United States Patent Application Publication US 2007/0083945 A1 - sequence listing, part 8

SEQ ID NO: 48192 - DNA, 393 bp, Glycine max
  unsure (1)..(393): unsure at all n locations
cttatgtttcaattgtgaactaaaattcataacggatcatctctgtaaaaacaaaaaaattcctcctcctcttggtggaagaggcaaatgatcaacaatccttttcaaaggatgtatccaaacagacctctactaaacctacaagtgatgctgaccctggtcatttncatatttccnccatgccttaacaggttccccttccccaaagaccttaaaatgtattggacgtgtcaacaaccttccaatgacaattcttgtggattcgggtagctcacacaatattntacaacctagaatggcacaccaccttcagctacacatcanacttacaccgctcttctcagtcatggaagggaatggngagaaaatcactgccagggcattgtcacatat

SEQ ID NO: 48193 - DNA, 98 bp, Glycine max
atgtgtgtcttatttgtgatatcattgatgccccgagcatgtgtgtttgcacacatgtgcatgctgttgagagataaacagagaggtgtgtcatatct

SEQ ID NO: 48194 - DNA, 379 bp, Glycine max
  unsure (1)..(379): unsure at all n locations
gctcgaagaagttctgaagaaagtttcggctttacattcccaactctcttgtagtggcattgtattggttgttatcttggttggtgcatcttantatatttgatatctgtattgcatcatgcatcatcatggtttgttttgagaaaagtttctaagttagaaaagtttcttcaaaggcataaactctctgttttgatcgattacagcctcattgtaatagattacaacaagttgtctaaagcttgtagacttgagtctcgtatcggtttaatcgattacaactatctcataatcgattacattgttgtttgagagaatgactgatttattcacgactctcggctttaattgattaccaagtggattaatcgattacttc

SEQ ID NO: 48195 - DNA, 334 bp, Glycine max
  unsure (1)..(334): unsure at all n locations
tactcaagctccttagtctcagatgatgccagctgagttgtagctacctcatgcacttctctaattactatggcatcatttctggcactaaactgctgggagttggaagccatcttctcaattaaatttttggcttcagcacgagtcatgtctccaaaggctccaccactggcagcatctatcatacttctctncatattactgagtccttcattaaaatattgaagaagaagctgctcccaaatctgatggtgaaggcaactggcacataagtttttaatcgctcccatactcatcaagctcttttactgagttgtctaatacctgaatatct

SEQ ID NO: 48196 - DNA, 481 bp, Glycine max
  unsure (1)..(481): unsure at all n locations
catgcaagctggacatacgcgcaatgaggctaaaatgacttttttaacagatcatacaaaagattatcataccttgaatggtttgaggagacccatacaaatttgcacccttcgtctttgtccatcagatactttatgcaatctccaggaaagatcgatatctaatacctatccagttgaacagcaagatagaaattaagcaacagtatttccagaggcaactatatatgcgttcccacaaaaacctttgcagaaatagccacacataaacagaacatcaacatcaagagtacataatggctntattnttggtcaaatctgaaacttcaaagctcagtctttatgccatatggcatctaatatcaaattcatggatagatgctggtaacatatntaatgcattcacttcaatgagttagtttccttatattttattaacatanactacataagttaagagaaacctcatggacaaccacat

SEQ ID NO: 48197 - DNA, 159 bp, Glycine max
gctcgtacaatgtggtaactcagaaactaaggcggttcaagtcttgtcagccatatatgctcctagagacgatggagaccagcgtgatgctcgtatgagatgtgtcacgcatctcgtgtgtgaacttcatatgcgagggccctgtgtggggctgcatgc

SEQ ID NO: 48198 - DNA, 285 bp, Glycine max
  unsure (1)..(285): unsure at all n locations
atcctcttattactagctattttgaattctttagttcctgaatgtacaaccttcaaattgttgcccgttcccctctttcttttctgcaaaaaagaaaatccatatcaaagaaaacatggatgaagttctaagaaaatcaatatcaaagaagacatggatgaaatcacaattaaaaagcacaactaccaatctttcagaggcctttagttaatttgtcttgtctccttatgtgggggnggtttgtttaataatattatacttntgccttccaaaaaaaacttatga

SEQ ID NO: 48199 - DNA, 303 bp, Glycine max
  unsure (1)..(303): unsure at all n locations
ggatggaccttttccaggtttggagattatcaatttcaatgcctataggtnggaccttccataagagtatggagttagcaccactcttaacatctctgatttaattccttttcaggtggagctgatattaatgaggagggaacaaatatatttgaggtcaaatcctcttcaagggggaggggatgatgcaatcctccctatgaagggaccagtcactatagccataagccagatgcttctacacgattgggctagagctgctgaagaatgcctaacggttctcatgaaccttatggtagattt

SEQ ID NO: 48200 - DNA, 431 bp, Glycine max
  unsure (1)..(431): unsure at all n locations
atccttaagtcacctgccgcatgcaagcttagtagctaactcttgaggatcatgcctcangtgtgcacatctatattaagcaaagagtgattccccctcttccataataacagggatcttcaagaaagtgttaagagtgtcctcatcaaacttaatcaaatgacctctcaccctcacctgcttaggtgatttgtcctcggggtcatagaggttggcatagaattccttcgcaatggcaacatcaatgttgtcgtcagcaaaatcagtcaactcctcatcccaatagcgtttctcgagttccttcttgaactcatcaaactctgtatagtggaccaccacattcctctctgtgtaaaagcttctacgcaccacaatgccagtgtatctttcccaagcctcttgggaagtgaatctagatctgtcaaatctga

SEQ ID NO: 48201 - DNA, 370 bp, Glycine max
  unsure (1)..(370): unsure at all n locations
tgctcaatngctccaggttgctgtgtggaaggtcttaangtctgtattgtggtcagcanaggagcacaaaccacaaacccttgctacaggtacagatttctgattcaaggccagttgggttaccaagttaaccaatgcatccagtttgccttcaagcttcttattctcagatgatgcagctgagtttgtagctacctcatgcactcctctaatgactatagcatcatatctggcgctaaactgctgggagttggaagccatcttctcaattaaatttctggctttagcatgagtcatgtctccaatggctccaccactggcagcatctatcatacttctctccatattactgagtccttcataaaatatt

SEQ ID NO: 48202 - DNA, 387 bp, Glycine max
  unsure (1)..(387): unsure at all n locations
agcttgtagccattataagagaatgttcttgtgattgtaattatgactganaatgttagtcagtttgccagatttgatgtgaaggaatgcattaaccgtatcccggtgagagtgtgatccttaaattttgagagaaacgactatcatttagtacttgattttgcgtgaatctctgaagtatggactgaatgcatgaaattgaggatgatgaacgccatgtttgattgtgatagccacttatccaaaaagctgaccatgtgcttgaatgatttaccccttgcacccacgttgagctgaataaattattgattgattgaatctggactctatacagtgttatcttctgctaccttgacttagggtgaggagagcatcatccacagtagc

SEQ ID NO: 48203 - DNA, 330 bp, Glycine max
  unsure (1)..(330): unsure at all n locations
ctcttgcaagaaaataaatcattcgcgagagcaccacttcttagagtaacaatatactngngccangggtaatcttccttgtaactcgagaatgaagggttagatgtcaacttctagctttcaaatgaacacgcacgggaaacatcgggctaagctgaaaataaatcactcatagtgtataaaactcacaaggcaagtgtcttatcctattctccaaccataactgcaccatgactctatattgcacgctacttcctattcaatcattaatcatacgtaagatcacgaaccaatatgattttctcgaggtcagtgtttttggagaggaat

SEQ ID NO: 48204 - DNA, 352 bp, Glycine max
  unsure (1)..(352): unsure at all n locations
agctntataagtgcgggttcgggagacaaaggtcaagtgttcacgatatgctaagatgatattccgagtactttggatgtggtacgaccatgctctcctgatttccagctgggaaattggcgagtggaggaaccccccggcatttacgcaacaagcataatgtaaacctttacggtttaaaagctctatagttgggcctaggctttagagttttcattttgttaaggctttgtgtcttttgtggttgaatttataatacaaggatctttcttcatctgttcctggtctctacccattctcattcatttgcatggtttacttcttttctaaaacggcagattcgatgacgagt

SEQ ID NO: 48205 - DNA, 374 bp, Glycine max
  unsure (1)..(374): unsure at all n locations
ctgctaacgtttgcagacaaaccaacagtatcttcatttcatgtccaagaagagttaggtctagccacggcccacgagcatagaatcgcggatgagtatgcccaagtatacgcagaanaagaggctagaggaagggtgatcgactctttacaccaagaggcaaccatgtggatggatcnggttgctcttaccttgaacgggagtcaagaacttcctncgatgttagccaatgccaaagcggtggcagacacctactccgcccncgaagagattcacgggcttctcggctattgtcagcatatgatagacttaatggcccacatatatagaaatcgttaggaaacttgtatggtctctcagaccttgactagata

SEQ ID NO: 48206 - DNA, 197 bp, Glycine max
tcttactggactgataggttatatgttagacctttccttctattaaaacaacattccacttttcattatttttacaccttcccttcttgacaccctatctttcttagacaactctctactttctcggtcaatcttgtgttacaaacacattctctttatctttaatttaatcttgctaaaaatttcatcactactcg

SEQ ID NO: 48207 - DNA, 344 bp, Glycine max
  unsure (1)..(344): unsure at all n locations
gtcacctgcggcatgcaagcttctagcanagatactagagaccttgactaanaccttattcaaacttcccaaacaactacattcaggtaatcctgctaatgtttctgtaatgcacgcataaggttgtgctgtgtgcggaggaagagctcatgagtcacgcacctgcatgacttcagggggaagcatcaaaagaggtcaattatattatcaattgaaaccaccaatggtataatcaaggaggcaatgcaagctatcatccaggaggcaatgtatgttttcatcaaggaggaaatttctcccagaaccaaggtcatgcttggaggttccacctatgtaataacttc

SEQ ID NO: 48208 - DNA, 340 bp, Glycine max
  unsure (1)..(340): unsure at all n locations
taataatgacatgtctatcttagcactatctntccaccatctattgtgaaataacaccttagttttatgagttcttgagcagaattggttacactcttctctggcttatgacgagtagaaatgttagggaatggtgaatgcatgtgtagtggctgtctacacttaatggactattgtctacatgaagtcacaaaccttttgtttagagctgttgtaactttgtgatgtgttagtcatgtagttgataacatgtcatttgcttctgaatatattttttatcatgacatgtatcttttctagagcaagatttattattattcatgatttactactattgcct

SEQ ID NO: 48209 - DNA, 305 bp, Glycine max
  unsure (1)..(305): unsure at all n locations
tattacaatatattggtaatcgattaccagtgtatctgaacgtcgaaattcaaactcaattgtgaagagtcatatcctttcataaaaagctntgtgtaatcgattatatggttntggtaatcgattaccagtgacaagttttgaataaaaatcaagagatataactcttccaacggttntcaggttgttctaanagttataactcttctaacggttttcttgactagacatgaagagtatataaaagcaagaccttgacttgcatgngaaaaataattattacaactntttcatatattctttta

SEQ ID NO: 48210 - DNA, 568 bp, Glycine max
  unsure (1)..(568): unsure at all n locations
ngacgatgagctcattattggtcgaantatcaaancncaagctcctgcatgtctcgagagttctagagagagaaaggtccaagcnccacattgtntgatatatnttgtncgcgcgaagagctacagataccagagcttgtgacgaaaccgtcctgagagcttgagatgagtttgtgagtgatagtgaggtccctcacgttgtatggctctctcttgtctcctaatctcgcactctcgcttctaacgcctcttctcttgtgatactgcgatctctctcgcgcttcctttccgtcactcgtgctccctcttctatccgcttctgtgtctctattagccgtctccacacctccgcgattgcatcccatactctcctcgcgcccctcccttgcatagtactacgttacattcccttcgaacttcgtccacctttccttgctatctcagtcacttgcattcgcacttctgtcttctctaccgccttcttatatctcttcatatttttgtcgtactgttcatctatctcgtgcacttactctccttctctgcatatgtcacttactccctgacg

SEQ ID NO: 48211 - DNA, 514 bp, Glycine max
  unsure (1)..(514): unsure at all n locations
cccatcgtttaaacccttgtaaaccnttnctctacggcacctgcnngcatgcaagctagatcaagcttcttatctactaaaccgaatcttacctctctcgtcttcacactgctatcaggatccctcactctccacgctgttatgctctctctctctgtggcgcactctctctctggatctttctctgccccctgatctttctctcaccctggttctctctctctctataattttgctctactactaaatactggggattcataggagaaaatctatctctctgaaaagaacaaaatgttgtcgactgactatacagaaactcaataaaggcatggctcaacacttgtgtgttgataacataatatgtatatatatatacataaacagtccacaggtctgatcaaagaggatatcaccctatattaacccacactaatggttctaatacacgaaacattagtgtctattgataccatacatatcaaagcctgttaagtgttgacatgattaataa

SEQ ID NO: 48212 - DNA, 453 bp, Glycine max
  unsure (1)..(453): unsure at all n locations
cattagaactgtatcttgtttatacaaaacattatatgtgattgcttactctttccaaacgttgaagaagggcagttttgaattgccgaacaccacgaccacttgaagtaggatccagtctatgagctttctcgaacgcataacaccggcctacaagagcaaaacaacacgctccataaaaaaaaaaatgcattcaagcaccaaaaaataattagtgtttatttgcaaacaactgaggacttatgtcataaattcgaccattaaacttgctgaaataagctaaaaagacagtaccattttaatgaacaacacaacattaagaagcttgctgaaataagctaanaaaggcttatgtgaagtgcaagctattctgataagtncagataagctcttctaaacactctcgatgcatatgaacacgtggacactacagatactgctcgcattatgaca

SEQ ID NO: 48213 - DNA, 403 bp, Glycine max
  unsure (1)..(403): unsure at all n locations
cagcttctacactatgcctntcagcacanaacatacgaacaagggctncaattattnggtctttatattggcacgggcaacaaatgttattaacagaaccaaatactgaatttcttgtcagctntgtctctgtccaaccccattgccacatgctaaaaggctatattttttacttgactaaagttataattntttattttattaattataaaatattcaaaattcatacaactccacanaacggcacatgccagaaatctatntaagaaagatttcttgatcaggcttttacttcaaatgaaatttctatcgaatcctatcaaagcatgcaatcaatactagcaccagataattaatataaagaaatctcaagaaaataggaaacatctactcacaatcatta

SEQ ID NO: 48214 - DNA, 419 bp, Glycine max
  unsure (1)..(419): unsure at all n locations
acctgctgcatgcagctctagttactatatattgatggacgatgaaactatacttctaangtgttactnttcgtttagggggagagagggcatccgattgatgagacacgttgcgatttacaatgcataacaccaaaacttgagtgggagggatccatggttcaaaagacaatgggttgttacgacaatatagcgatgtttgtgaatgtatgtgtatgatggtcttgatgatgccaacacaaaagaaacacaagctttattttatgtccatatcaagaccaagaaaacatagatcaataagaaagcttagtcttagtctatcgttgttaaaagagtctcttagtgattgcaaagctttgcgctcacaacatagtttntaaatggattataaaaacggtttaaaatatttttaacatttt

SEQ ID NO: 48215 - DNA, 312 bp, Glycine max
  unsure (1)..(312): unsure at all n locations
tgctccacgtgcctccttctccagccttctcccgttgggtcctcttgaacttgtttcgtcatttccccaccttctcccgtntagcttttttcttcaattttgtggttcgtttcttccagcttcacttgccgttgagttttccccttactgaggttttccatnnttctgttgctacatgagggttcctccgtgctttctttcttctccaattttgtggttcgtctcttccatcttcacttccagtttttgctttgggtttctgttgagttcttgttgttatgcatgttttcttcttaacaagctatcgacaaa

SEQ ID NO: 48216 - DNA, 374 bp, Glycine max
  unsure (1)..(374): unsure at all n locations
gttagttttaccagtgggatactattcttaaaacaaaaatgacatacaacctcctcccataaatacaaacatcaatgtaaatgtagagcaagcttatgcgcatatttccttacaaacgttctcttgcacaagacattctattaaccgaaaaaaatgcacccatatacaatcaaggcagcttcgttacctagattatntacacgtacttccaaggtgtatttgttacttacatcacacacctgcttggctaaattcacatacatgcatactcaaagcattgtggggtaccaaaaatagcacatgtgcacatcttggtatatctaatacctatacatacacaaacttcatgatgaatcttgactatctacacaata

SEQ ID NO: 48217 - DNA, 209 bp, Glycine max
  unsure (1)..(209): unsure at all n locations
aagcaaanaaagaatagaggggaaatttccaatcaaacaacaagagaaggaaaatnttcaatgaaagcaaaaaaagagaagaatgaaaattccccaatcaaagagtgggagaaagctaaaagaaaagaaaggaaaattcccaatctaagaatgggagaaagtataaaaggaagatgaagaatgaaagaaagctcctgatcaatgatcga

SEQ ID NO: 48218 - DNA, 254 bp, Glycine max
  unsure (1)..(254): unsure at all n locations
aacaaaaaattggtttctcatcctgtgaatgctaaatgtactgcaaaagggaagaacatagcaaatttagtccttttaacccatttatgtattcttctacttcaaaggaaaacacatcaaatatgtagcaatcattagaaataaaataatatagaattgtatggtttgcagttttgagtttcccatctttntagcatgatagtatgttgctttttttaattttaatattgttgacgttcaaaaggaggtgactg

SEQ ID NO: 48219 - DNA, 411 bp, Glycine max
  unsure (1)..(411): unsure at all n locations
tcttatntcttcctcaaaaaagcagtcattatccattgatatcatcttttatggtcttgctagaatcattttcagcaattntcatctccaaaaaatccacggcatcactccattcttgcaatttaatccaaatatatctggcagcatttattaacccacacactctaactatggcaacatcatcagaactatccggacataattcagttgccttgaaccgaaaaagtaattgcttaaagaaataccagagtgaatctcctgcagtaaatctaataaattgtgcacgtaataaactggatggcatagtttggcagcgctcaatcatctcccagataattttaagaaaaaactctgcaataggtggagcattgtgatcttcgacagtcaatagcagatactcttgctcagtgt

SEQ ID NO: 48220 - DNA, 353 bp, Glycine max
  unsure (1)..(353): unsure at all n locations
atctctgagtcacctgcggcatgcaagcttagattctaggagagcattcattcatagancaactttttttctttttattcccaaccctattacttgccccctctttacactcagctttctttttattaaatggcagcacacacacacttttattttataattacaattttttttagaactgtgtgtgctgctcttttcttaccatttcacactntcacccagtaactcccccaaatttggaacaaatntgccttgaaccaagattctttctatgaatgatgctctcctacaacctaagacaaggtagcaggagataaattgtgtaggctcaaggttcaatcaatcaaacatac

SEQ ID NO: 48221 - DNA, 323 bp, Glycine max
  unsure (1)..(323): unsure at all n locations
ctcatttgatacaaactccatatctatngaatttgggtctacaatggaacaagatgaaaagaggtttctgtaccgtatacgctattcctctgatgaataaatgatccagagggaatggagggaggaattggtgatccaaaaaggttagaaatctaacattctaaaacattggtaattgattacatgattatggtaatccacttcaacttctgtaatcagtttgaaaacaatgttggctactggtaatcgattattgccttctggtatcgatactagagagtaaactctaggttaaagtctcttttgaaaatttttgaacaaat

SEQ ID NO: 48222 - DNA, 358 bp, Glycine max
  unsure (1)..(358): unsure at all n locations
tcttcagtcacctgcggcatgcaagcttcccacatccgtacttggaaggtacctgatacngtttttcctaatgcaatattagtataattccgatatggctcccgatcgcactcagctacaaaatatgttcaagaaggaaggtgagacctttaaagaatacgcgcagcggtggagagacctggcagcacaagtggaacctcccatggttgaaagggagatgatcaccatgatggtagacacattgccagtgttttactatgagaagttggtaggttacatgccatccagcttcgcggacctagtgttcgccggggaaagaattgaagagagggaagttcgattatgtttctctacaagt

SEQ ID NO: 48223 - DNA, 360 bp, Glycine max
  unsure (1)..(360): unsure at all n locations
ctgatggtgtaaagaagaaatcacatgtntgtcatcatttaaaaggttgagtatgtgaatgtatgtatacatgaatttgatgatgtcaaagaagaatctaacaaggctacttcagatgataagcatttgcttcaagaataattcaagattgcttcaacanacaaagccttgtttcaagattcactaaagaccaagcctttccttaaaacaaagttctttcaagacatgcaaggctctggtaatcgattaccaagaagtgaatcgatactagaagacggtgttgagaaatagctgtgaaaaggtttgaatttgaatttcacatgaattgttaccatatgttgtatcgataccacaacaaac

SEQ ID NO: 48224 - DNA, 562 bp, Glycine max
  unsure (1)..(562): unsure at all n locations
accaccctttgcccctgtganccngtgaancgttgtattcagcgactgcagctgaagcttataatnacgcgcaaggttgatggaactttaactattatgctcagaaaacacttcagaactgcaacagcaacattggggggtgagatccacttgaagaatcaaccactaaactcattaaaagcctacacaagctcttagattctcaaatacgcctctatggatacaataaacaccacatcnttggttctaataaactgtcctgatggtgatcattgcaacatttgagagctgagtgtccacaatctgcttcttctacactcttctacggggtaataaaaaacattatgatgtgccccagtatagagcacatacaggtaattcattgggatactgatttattttccatgtaccttaccaccctctgaggcagatgagggctatactattatacaatctatttcataaaatatgtcttcatgccaccactatcttggctactcaataatctttaagaaccattcgatttggtagtttataaccacgaaacaaagggtggtgcacg

SEQ ID NO: 48225 - DNA, 369 bp, Glycine max
  unsure (1)..(369): unsure at all n locations
agcttgggggaaaaatatactcaacatcttaattttatcttggatataaaataatagcaattggtatattccatatatatatatatatggggaatgctaatgcactcacaccattttttaagtatgagtgcattatcaaccaacaccanaatantttgaacaaaaaaaacaatgagttctatggttttagtaagcttaatttaaggatattatagtcaatttcttaaaacatcatttctctctcctttctcatatcttaccagcattacctttctcctcacctacctgttatgaaaataaatatatattnttaatttaattcattgtattnttttaatttcaagaagtaaataagaatgatatgaaaat

SEQ ID NO: 48226 - DNA, 405 bp, Glycine max
  unsure (1)..(405): unsure at all n locations
cgaggaagactcagagcaacacgtctnnttgtgtttaagntgtnnttacatacgtngatgnngatacacctatcccaatttgtcaaccaaattaccaaccataccagcctacatattatgagacatcccaacaaccaatctacgaatagtaccaaccaacatttgatctcaaccacacataaactcaaaagtatgaatgagacaccaaccttgcatcatacatgcaattgtngactgacccaacatacacccaactaacttaatcatctacattttatggatacgaacaacatattccttacgcttcagggagcatgcaacatgcatcatagagtgccctagttgcagatcctttgccttcaccgcaacaatcttaacctcaatacgcagaggatagttcacttg

SEQ ID NO: 48227 - DNA, 476 bp, Glycine max
  unsure (1)..(476): unsure at all n locations
tgcaagcttatctttgaaatacagggcatcattgccttatatagcaacggtttttacagaanaataacagaataaacttccatatggtatttggtcgcacccgaacatggatgcatttgaaagtagttcatgataggctaattntagatattcaaggacatcaagctaggtttacttcttcatcatggtctgacttggactcttctaatgttatgttagccatcatacaaaagttagcttcttcgctatcctcatccgacaatgtgtcgtctatgtcttcccaagtactcataagctcattcttatctttagaattgataaataataacgagagagattattaatggatagtggtctcataaaaatttttattcctgaattattagtggtatatatatatctttaaataaaaatatttcattaatattatattanataaacattttctgtaaaaaatatatatcataaaaattaat

SEQ ID NO: 48228 - DNA, 335 bp, Glycine max
  unsure (1)..(335): unsure at all n locations
cctgccgcatgcaagctcgtaaagcccaatgaaccttncttcttctggtattttgtcactttatgttatgtctttcggatntaattatctcactctcaaataagatatcttactcctgtatgatatgttctctctctctctctctctcacacacacacacacacacacatatatatatacatataatcttttccgatttggttttattaaattatgtttaaagcaataaattcaattactatctctacaatttcgctgatcgatttgtgttttaaaatgatgtcttgaaagcccatatatatatatatatatatatatatatatatatatatata

SEQ ID NO: 48229 - DNA, 281 bp, Glycine max
  unsure (1)..(281): unsure at all n locations
gagacgaccacgttgnggtccccgaatgactngttacattgaggaatccaaatnttgagtttagtttgttccatcactgaaaccttttggaacaaaattatcataatatcactgaaaacttaattttaaaatagttattgtattttttatgtatatataacatgaacattgatgaaatgacaaaatttgtgatctatataaactcaattatatatgattcattcttagttacaaaaatagccaacctatttctaaattaattaaatagcaatgactttatg

SEQ ID NO: 48230 - DNA, 258 bp, Glycine max
  unsure (1)..(258): unsure at all n locations
gcatgcaagctcgcccagagaaggagtccacggaggaaatgcttactcatctctaaagattgtaaagcggnttctaatgactcctctgcggccttcacataaggcatagaggatgggcagctcaccaagatgtcttcttcgcctgatacgatgaccagatgcccttccactacgaatttcaacttttggtggagtggtgagggaacaacttctactgagtggatccacgggcgccccaacagacagctgtatgggggg

SEQ ID NO: 48231 - DNA, 317 bp, Glycine max
  unsure (1)..(317): unsure at all n locations
atggtcttaaacatgcacnattatctatggtttatgcgctcaatagctgccctctccacttcagattctccagctctaaatctgacacctcattgttcatctacaatcgaggttcaatcttgacttattctcttgtctatgttgactatttgttgcttacaggtaacgatgaattgtttctaagcaattccaagatgcactggcctcacaattcttcctgaaggaccttggcacacccatacatattttgggtgttgtaaatgcttccacgttacatggactatttctcagtctacatcactatattcgttattttc

SEQ ID NO: 48232 - DNA, 438 bp, Glycine max
  unsure (1)..(438): unsure at all n locations
atcctcagagtcacctgcggcatcaagcttaatatcttaataagatctttgtaaactctttataacctttatatcatgcttcatccataactcatcttatttctcgcatttgataccttgacccattttttagcatnttttgtttctaaccttgccctaatactttcattccatcaccatgatntcttatatcttagccaaaagccccaagactgctctagcaacctttctaatcttctaagacatctcatcacanataaggttagcattaacttgtaatttccaattaccttcctccaataatttcatcttaaaactcaaatgatctcccttgattccnttgaaatgtaacttgtggtttttctgtttgacttttgaatganaatgaacctcatccctctaaaatacctcaagagatagatcctcaatatgattatg

SEQ ID NO: 48233 - DNA, 178 bp, Glycine max
  unsure (1)..(178): unsure at all n locations
actaagtngactcgttagaatgagaagtttgttcggaatgagaagtgtgagcaaagtttccaagagttgaagaggcggttgacgacagctcctatgttaattttgcccgaccctaagagaacatttgaagtgtattgcgatgcaagctggcaatgctatgggtgtgtgttgatgcata

SEQ ID NO: 48234 - DNA, 364 bp, Glycine max
  unsure (1)..(364): unsure at all n locations
catgcaagcttaattacccaatacccgggtattactatcnccatttgaattgatatagtnccnganagctaatcttgagtcacgtgtctttgaaatgtacgcacacgttaacatgaaatatataatttattcgtacatctttactaaaaaacataagttttttaaatagattattcatataatatgatatcagagtctctataatcaattagtttaaaacaattcaatccttgtcggtcttaattttctgattcaagttacagtaagcacaaagtaaacgtgttgaatacacacaatacaaacccaaagacttttacattagataacagcatgttatgtgtaataagtattatttgaaagaata

SEQ ID NO: 48235 - DNA, 304 bp, Glycine max
  unsure (1)..(304): unsure at all n locations
actccgcaaanggaatgtaacatttcactgtaaatttgcacatctgctgcgaactggtaaatcgtgatttatctaggtcaatataatattgatgtaaaatatttgtaaattttattttatttaaaattaattttgattgaaaattttaattgattgtttttaattaaaaaatcattcagctacattatttttcattcataacaatcaaactcataccttacttaaaaaaattaaacttgatttcattcgaatcaacctgcttataataaatcataacttgttaaaactagaaaaatgagcttaa

SEQ ID NO: 48236 - DNA, 326 bp, Glycine max
atagtctgtattgagaacctgtgatgtacctaagcaggcgagctcctggcagtcaacagataaaaggaacaaagaccacaaagcaaggaggcttgtggtggctggccagctgtgaaacttgattgatatgtgagatatggtctctggtaatcgattaccaagggtgggtaatcgattacaaggcttaaaaatgaagacagggggctaagatggtctctggtaatcgattaccaaggggtgtaattgattaccaggcttgaaaacgaagtcaggaaacttatggagcctctggttatctattaccaccctgtgtaatctattacaca

SEQ ID NO: 48237 - DNA, 545 bp, Glycine max
  unsure (1)..(545): unsure at all n locations
aaaaattgtatggctaatngcctagatcantncaantatatatactaagntctttgctgcaaaattccttnttgtggtgagagnnntttttggnnatgcatataagnggncnncgncattggaagtgcggtttacagaacttgtggttcatctacggatggcctttgtggataactgggtggtgggtaaggaggaggntttnntttnttctntttattacntatttggttactttgttatacatatcgcttatctaaattcatttacaactattcattctccactatcaatttctatttaatataatatctaaataatctaataatacttttaatattatatatatctatatattattcacattatatatatattgattttttctatctttcttaatattataattatttttattatattgtttctaaaaatataatataacaaacttactatatctatttatctaatattatcatttttagttatatatacacttatacattctttttttctatctctctattatattctaaaattttaatcct

SEQ ID NO: 48238 - DNA, 281 bp, Glycine max
  unsure (1)..(281): unsure at all n locations
agcttctanagatgtacttaaccaggtccatcttgtttataaccaggtggatggctcagcatgtattgtcttagacggtgggacgcccagactaaagcacaacacgttctttcgagcaaggagtagttcatttcataagccgtgaactttntactcaagtagtagacagcgcgttctctcttnccggactcgtcatgttgccccaacatacatccaatcgactcattccaaatcattatatacaagatgagaggccttcctggtaccaacgacataagcac

SEQ ID NO: 48239 - DNA, 383 bp, Glycine max
  unsure (1)..(383): unsure at all n locations
tacccatcacactgtggactatgttgcagncttgctatggtgcacaacaaaggttccacatgcacaaagcgcgcataaacccaccatcccctgttgcccacctacaactgagctcacgtactcccacgtagcccataacctcgtttctctcaacaccgggtccncatcaatcctcccaagcttccncaacatcaaagtgaatcaacattcaaacagcacatatttccacagccataaatacagggcaaaggcagaaaactctgtcgcaaacaccaaccaaaatcacagcttttctcactttaagaccccagtaacaattccttcgatccaattcggtaacccgtggatcgactccaaaatattactggaagtctatagtacat

SEQ ID NO: 48240 - DNA, 251 bp, Glycine max
  unsure (1)..(251): unsure at all n locations
ccctacctctcatattatggacaaattctatttctataatatataaaattggatactttttatgtcagaaagaaaatatattaaaagaataatttatcattaaaagtggggtgtatattaattattataacttaactatgtttatatgagacactggtaaaatgatatggtaaagtaaaagactagggatatcatttnttactctaacacaactaatggttttagcacatgtttgtgtgtactcatttgtt

SEQ ID NO: 48241 - DNA, 366 bp, Glycine max
  unsure (1)..(366): unsure at all n locations
gcaaatttatttgttngnnncttattcatacattagttnttctacttatcagcatgatgcctaactgaggctaattttccactcagaaatgtaaaagaaaaatatcccggaaataataagggatataaagttgggaaaaaaagtgatggagagtgaactgtcggcaaaattagcaaatgattggtgttcagcgtatgcttaaaaatgcaatattacgattgtggtctatattgggctcattttcagatattttcaaatatattattattaactcgtgtngacatcttaaactgtttcttattttgttccctcctgctnttagaattggcccacttcatttgcaactcactcggacttatacttatc

SEQ ID NO: 48242 - DNA, 452 bp, Glycine max
  unsure (1)..(452): unsure at all n locations
agcactcanaatctagctatctaataacccttaattttttgtgatttcaaggggtgagaagngaaaatgagaatggggtaaactcggagccaactctcatctcanacaagtctatatcatcaatctaaactcgctcaaactggttttacgacaaaaactctaccgaatcaaaatttgactcctcaacacccaatattaccctagaaatggctcttgtttcactttggtcactcatattcctcattgcacagtctaagctttctcataagcctaaatgacatttcaaactaggatttacttcctttaacctccaaataccactaaatccagatttggccttccacttctcaagcctcactctttgtccactcataacaccacattctcactttctaaccctatgttaactctacccttatctctagccagtttccatagcatattctcacata

SEQ ID NO: 48243 - DNA, 465 bp, Glycine max
  unsure (1)..(465): unsure at all n locations
atttactatatatgnccagaagccgcaaaatgattactctatgtgaggagagagtgaatgaaataaccacaagagaagtggagtggagaacatgaatgataattgggccacaaatagcaccgcccattctctaagaatcggcatggctttgtgattaaaatgcatcacagaaatttctggtcttaaggattntcggccactcttttattttaatgctgaaacatgctgtttaaaatgggttggttaattatgagtatggcatcactgatccagtattcagattccatattcacattgcttgtctcattactagatgntgtctctctctttatcgaagtaaacaatgtagccaattttttctttctttattgtcttgagataatcctcaaaagtacaggtggaagtcgctactgcccctctaattgtaattatcactctttaactactctatcttttcttctaaag

SEQ ID NO: 48244 - DNA, 573 bp, Glycine max
  unsure (1)..(573): unsure at all n locations
agacgctttgtncnttgtctgantcgtcttgtagnaagcgacacannagaanactcaagctcgtganaacgtacactccaaatntaataaaaatgtctaattaagattttttanangnagnngaagcacgtgncaaatccatttctaagaccagaacatacttggtcctaaatgcatattgtattgttcggtaagacgttagctaacagtgaagagttgtaagaatggagaaagtgaccgaatgaggaacgcccggttgaccccaaatattgggtcaagttcaagttctctaccgcacaaattcacattctttgcttcagcagatatatctaaacatcaacagagttcatcacactacaatttgctcggttaaaggcgtatctacttataaatattcctatacatcctcactttatgtcctatacaatccatcattatcacattaatcactcatggttcttccgaggttggtgtagccgtacattgtgtcaaataaactatacgttcaacagttcatataaccaacttcagaccctgactctaccgcccgcctattgcctgatcttactgtcc

SEQ ID NO: 48245 - DNA, 152 bp, Glycine max
aggcatgacgcagtttcactgggttttgaaatcgccccttgcagttgaggctcttcaaaattcgcctgctaaaagatcctgtctcaaatgatgaagtcagttgtccagaccacccagtaatttgaagagaacatctatctggagctctttca

SEQ ID NO: 48246 - DNA, 316 bp, Glycine max
  unsure (1)..(316): unsure at all n locations
gctcgttaaaacagaagaaaaagaaatcgaaagtgtttatataaatatatttctaacaaaacaagaaatgaattgaatgtctcggattcaaaaacttacccgttgaagaacgaagaacaaacgaagaacggatgaagaacggtgaagaacgacggaaaaccttcacggatttgctcatggaaacgtctcggaagcgttacggaagcacctcagcttggattttcttcacggaaacaattnttttcacccacaacagctgaaatgcatagccaggtggatgagggatatttggaacaacctcctttcgcctatttat

SEQ ID NO: 48247 - DNA, 293 bp, Glycine max
  unsure (1)..(293): unsure at all n locations
ctcagctcttccacggcagcccgagccttacccacatgagcaatcatgtcatggctggtttgcttgagggctgtaaccttcatggttgcatcaaataagctctgaatatcaatggcaaaaatttcttgagccttcttccaaaaggaacgacacgttttaaatgatctaaggatatccaaaatattcggctcaactgattgccataacacagcacacagtngataatcaagcttctcccattcggctctnttgtcacttgaaacagaatcggaagctttctccaagtggtcatg

SEQ ID NO: 48248 - DNA, 258 bp, Glycine max
  unsure (1)..(258): unsure at all n locations
tatttttctcaatgtcatattacatacaacatcatctcatgcacatctcatataactgtctcagaacactatagacgagacagttgtgcggtcaaaaagaatatnttttcataccaaattgagagtatntcatgttacaacaattaagacatgtacttgcatcatcagttcaacaattagtatttataagcttccatgtacatataattacccaaacataacatatcataatcatcttatattagttcataaaataaa

SEQ ID NO: 48249 - DNA, 256 bp, Glycine max
acacaacggagatgaaacgccaaattagcctatgagatatagacacatgcccacgaagggattgcgcttcttaagaactgtatggagttggaaaacaaaccagaagatcttcataaggatctaaaggaacttaatgaactacgcattcataaaaatgaagaaagatatgatcttttgagagaatgtcacaagctcactaagattattgtgtacaccatgaatattcaataactgaaaatatatgtgcgatgtatat

SEQ ID NO: 48250 - DNA, 121 bp, Glycine max
  unsure (1)..(121): unsure at all n locations
acattntcagaagccttttcctctctccctcacgttgccattcttttcttcttcattctccattgaagctccaaacaaagctccaacctttggctatcatttatgccccaaatcgtgaaag

SEQ ID NO: 48251 - DNA, 109 bp, Glycine max
agagtgtctggaatggtgcaaattaaagtattggcgatgttcacagactactgcgtaaaaaaaaatggcatgttagttcgcctgggcgagcaacccctgcacttaaata

SEQ ID NO: 48252 - DNA, 221 bp, Glycine max
tacctcatctctattgtaagcagcaaaaggaaaagatgcataaagactttaataaggagaaaatacaatattttgcctactttggactttcctttaaaatataaaagaatctcgtttgtttagtttccctttcttcttttaaaaactaaagcatctttcttctctcctttaaaaagtaattgtccagttagatgtggactaaaaatttttgatttaactta

SEQ ID NO: 48253 - DNA, 423 bp, Glycine max
  unsure (1)..(423): unsure at all n locations
caatagatagatctannttttttatgaaagccagataaatctatnattattaacattatnnncattttcaataaaaatattaatacatagtatagagtttaatactntatggtctctaaacttttttcttttgcaaagttttacttttaatttttaaatagacttttcttttaattattactataagtaaaaacattaacgatgcaataatcacgttagcaaccaagtgacttatgatgtcattaagaagtctcgtggaacaactacatgtagttatatcttttataaagtgtgcttttaactctgcatttgttgttgtcattaaaaaatgatctttctagttcatgtcatttgaaaataaanacacgttttaattcctctgtccaatgctctcctccaacacttttaacaataaaatatgta

SEQ ID NO: 48254 - DNA, 198 bp, Glycine max
agcttataataaatcgatacgctcgattttaaacatcttattctctctataaattcaaatggccataacttttcacacggatgtctgattctggcgcataatatgtcgagaggctcgaaattgaacaatggaagctcttgaaaaattccaatagtcataatgttttcacactgatgtccgattcatgcttattatata

SEQ ID NO: 48255 - DNA, 290 bp, Glycine max
  unsure (1)..(290): unsure at all n locations
aatggattntcaagggttgagaaagtgaaatgagaatgagngtaaattggagcaaactctcacctcacacaagtctataacatcaatttaaacttgctcaaactggatttacacctaaaattccaccgaatctaaaattgactcctcaacacccaattntaccctagaaatggctctntgttcactttggtcatttgtttttctctctagcacagcccaaactttctcataagtcctaaatgacatttcaagctaggattaactcactntaacctncaaatgccactaaa

SEQ ID NO: 48256 - DNA, 379 bp, Glycine max
  unsure (1)..(379): unsure at all n locations
atgtagtgcgaagttttccatnctttatatcttctagtattcaaagaccttcttcttcaagtgtttgttgtctctaagcgaatagaattcttcacttgagctntgtcgcaagctacccttntgcgggcgagcgaggcaaggctcacaggtgcgtcttccataggaagaaaatgcgcggagtctccaccaacgtttattgaaaggaaaacgttagaaaaatcaaaggaaaccgtgcatgaagaatattccagattctggagttatctttacgtntgaggaaggtattagcacctctcacgtttgtccccataggacaacagccttagattagaattgtgtgaaattatgtatctaaacctttatttcttnttttattttt

SEQ ID NO: 48257 - DNA, 174 bp, Glycine max
  unsure (1)..(174): unsure at all n locations
aaatagcacctttgatcccacacccaattttcattttgtctcgcttntaaaccagcttcccttctcggtcgaattacagatgaagcttatgtccttccaccaagaggactctctgttgttccttcttgtcacatncacaattcctcatgctccatagttggattccaaaacttg

SEQ ID NO: 48258 - DNA, 524 bp, Glycine max
  unsure (1)..(524): unsure at all n locations
aaaaagttacnccttgtagacccttgataccgttgtaaacccgatctntgagccacctgccgcaagcanagcagacaccattttttctcattnttcnctgtttgtagcgcacttaagcctagtccaaccttctcttaagtatggctaacctatgcttaagcttggcttcacctacacttaagcgttgaaactagtagtcccatttcccttgcaggttatcatacaaaagaatgacaatatcataagaataaaacctaatttatccttgtttgtacaagaaaagactaagactcacagttgtgattcaaagaaatctcaacccctatatacacaattcaaagctctcaaggaatctcaatagatctttttctttggacaagtacaatcactcttagtgatatcatactttacatcaatctcatattggctaagtcctcattgcttaaaacaaatggatatgggtagtaccatctcttaaaccaacaaacaacttagtacaacaatgcatacatatacgcgtcttn

SEQ ID NO: 48259 - DNA, 421 bp, Glycine max
  unsure (1)..(421): unsure at all n locations
atgggacaatnggctacccaattgtatcaacaacaatcctagaattctgacaagctaccttctcaagctgtccaaaatcccaaaaatgtcagtgccatttcattgaggtcgggaaagcaatgtaaaggacctcaacccgtagcaccttcctcatctgcaaatgaacctgccaaacttcactctattccagataaaggtgatgacaaaaanttacctaacaatttctgtgcaggtgaatcttcttccacaggtaattctgatttgcagaagcagcacattcccccgcttccattccctccaagagcagtttccaacaaaaaaatggaagaggcagagaaagagatcttggaaacgtttagaaaagtagaggtaaacatacctctgtnggatgcaataaagcaaatctcagatatgccaaatc

SEQ ID NO: 48260 - DNA, 246 bp, Glycine max
  unsure (1)..(246): unsure at all n locations
ttgtattggtggtatcttgattggtgcatcttaatacatttgatatatgttttgtattatgaatcgtcatgggtagagtgaagaacaatttctacgttagaaaaatttcttcagaggcaaaaaatatctattttaatttattacaacacgttgtttgatgcttgtagagntaagtatcatatcgatttaatcgattatcgtagcactttaatcaatttcactgttgtgtgagaaagtgactaattt

SEQ ID NO: 48261 - DNA, 358 bp, Glycine max
  unsure (1)..(358): unsure at all n locations
accatcacgagtatcgtctcctttcattatgggggtaccacctgngccgcagatccttacctttgggcgtgttctttaatgatcctccccttttgccatgttctgtagtgcattctatcggaccatataaaattgagtgatctgcctaacaaggcaccttagttcttcaagaatggatcggaaggttcaagtagtgtccaggtacagctccccagtagacttcttggaagaatgatcatcatttctcatttttggtatccccatctttgacaatcattttaatggtctgagacagtttcccctatcttgaaagtcacacctgaacttgaatacatgttcggttagaacacttttagta

SEQ ID NO: 48262 - DNA, 439 bp, Glycine max
  unsure (1)..(439): unsure at all n locations
agcttgtaactctgtactaacaactgttgtaaanggttattgtaccaaagtaaactgcaaaatcggcgaattttatcgtaatgtcagatttataatcatataatgactgtgctttgaaaaaaaatgcctaactatctttagcttaaaattaaaattgcgttagtagcaaaggaataatgcttgttgtttatataataataaaaaaaataatgcttgtaactcctttgttctcagacaaaaaaaaactcctttgttcataatgtaaaagacaactttaccaaaacaaatatttattaggcgcgaagaaagtgagatatttgaacatgtgcatgatttaagttttgatctcctttcattaaattacagatgcatacacatatgcaatcgcgtaataataaacggttaattagttgataaaaaataaattatatttaataag

SEQ ID NO: 48263 - DNA, 74 bp, Glycine max
tatttgagataaactagatatagtatttatttttttagaggtattcttctgtcaaattttatcttaataatgta

SEQ ID NO: 48264 - DNA, 297 bp, Glycine max
  unsure (1)..(297): unsure at all n locations
ctgcagcttctacatgatgctntaactcttaaaaatatgctgctncatttttgcgtaatgntgtcatggtctngatgtctagtggtgtgccatcatcataccactactntattataaaaaacaagtnataactctttttcatttataacaggaatatcaagaattactcaagtcaatctttcgtggatagtaaatatagncaaatcattcttcaactgcccactggatatgntccacatcccatgcctgacataataaccacactcatagccttcgctgttgacgtgactctacatt

SEQ ID NO: 48265 - DNA, 569 bp, Glycine max
  unsure (1)..(569): unsure at all n locations
tatacgtgctaaanngccncntcncgananncnnnnctggngaacaaatacctatggaactattcttctgtctaccgtttatacacttggcgaatgttcactagccaccatgcaacagcgcgcaaactccattcgtgagtgtggtcgacgcaaatttcaatgtcaatatcaagtcgtataagcctgacatggtgcatattctataccattattacaagagaatatgttcctactctgtctccaccagcttatcttgtcttgcttctgataagtagattccacacatttgttgaaggagctcttgcttgtctgccacagatgtcaatatgcatagctgtcattccgctatccatcttcactcggaaggctcgccatataatgtcgtgtttaacctccgttacttatctaagcacttcatagaccatcaccatgttgtaacacagactatcctcttgtttgtaacgatctcttatcgtctcttcttaatggttcccgttcaatgctcttccacgtactataagcacaacattcctcaggattctttgaaggctgactaatactatgaatcg

SEQ ID NO: 48266 - DNA, 257 bp, Glycine max
  unsure (1)..(257): unsure at all n locations
taccacctacaacatatcaaataaanattaactataattccttggtagtggcaagagttgggttgtaatatatgatgcaagagataactactgctgccacanaattttcanatcaaatccnctcttgccccttcttcctctctaaccaacaatattgtttgtgagtatgcaactatctatatttaatagaacatactactttatagtataaatcatatatgtccaccataccatcggagcatagcatatattatcga

SEQ ID NO: 48267 - DNA, 200 bp, Glycine max
  unsure (1)..(200): unsure at all n locations
tggaatccaacaggtcaatagctttagaggtgattgagatacactcaaatatgcttcttnctttaatgaaccctctctgttctccaagaatgattctatgagctatggtggatagcctatcagccaagaattcaatgatgattttccattggaagttggccaaagcaatgggcctaaactattcaattctatcaccttga

SEQ ID NO: 48268 - DNA, 256 bp, Glycine max
  unsure (1)..(256): unsure at all n locations
ctctctgttagtctgcatcgtgaattaactggggtgaattgcatgtgagaatttgcattgtacttctacaaatatacgtgaagcattctattntgtcagtanttcgatatgctatgtcatctctggtcttgttagaactatgcttgcttactcttctagtgtaatacagttcatttctcgttggaagttatgctaatgcgacaatatgtgggtgaactttaggacgcaacatggcatttcttgcttcattacaaaa

SEQ ID NO: 48269 - DNA, 157 bp, Glycine max
  unsure (1)..(157): unsure at all n locations
ctgttgaccaccatacagacctttgcccttccatgcagcaacctggagcaatcgagcagcctgaagcctatgctgcagataattacaatagacctcctcaacctcagcagcangatcaaccacagcagaacaactatgacctctgcagcatcagata

SEQ ID NO: 48270 - DNA, 696 bp, Glycine max
  unsure (1)..(696): unsure at all n locations
tgaagcttactactatatttctcattangantgtgttatagnanantntgntnnnnnttnanttnattttatttnnnnnnnnnnnannnnnaaaaattttacgtagcttataagctgcggttcnngcagacaangncaagcgttcgcaatatgcaaagatgatatntctagtactttgtatcttgtacgaccatgcccgtctgatattcagctgggacattggcgagtggaggaacgctcctgcatttacgcgacgagcataatgtacacctttacggtttcataagctctatagttgggcctaggctgtagagttattccttttgttaaggctttgtgtcttatgtttcttaatctataatacaaggatctttcttcatctgtttctggtctctacccagtttcattcattagcatgtatactttctatttctgatacggcagactcgatgacgaagtctcccaatgtcctatttcctgggactcgtcattcgtcttcttcattatatgatctcatcggataaatatgaaatgaggtgtggtatttcctcaactatatatatggtcgccatgaggacataatgcgcttctttagataacaaattctatattatgattgcagtgaagatggagaagattgttcagattccgcccttcgagagatataatcctctaacacaccaacatcttctgtct

SEQ ID NO: 48271 - DNA, 198 bp, Glycine max
tatcggtgaagcgaatggtacgtactatatatctcatgcataattgcgtctcgcttgattctgacaaccgtgaacgttatgaatttggttgactgctttcatgggaaactatgtgtcataagtctcagaggtacaaatggggactcgttaatcgttattaaccaacacgagacatattcttgtagatcttcgtatgat

SEQ ID NO: 48272 - DNA, 95 bp, Glycine max
  unsure (1)..(95): unsure at all n locations
acttacaccgctggatctatacttttgtcaaatgcatatntaaaatgcatccatatgcacccanactatgaagaagttatcataatacaatcagt

SEQ ID NO: 48273 - DNA, 278 bp, Glycine max
  unsure (1)..(278): unsure at all n locations
gcggcttcttacttttggtctcaacgcgagctctgaccactgttnntccttcccgcgatgcttcgtttcatgttcgcctgagtgggcttatagcctaaaccatacnttccacgatttccttgggttnttatcangctagttatgccgccattgtcttagcctaaacccatcccgggttcataaccagtccccaacataactcgggccatcattaccgccgcatcggacagacaagggtgcccanagagggagtccacggaggatatgctgaccacctc

SEQ ID NO: 48274 - DNA, 265 bp, Glycine max
  unsure (1)..(265): unsure at all n locations
gcacgagctcccttgaaggctttttacctctcgtagccatctngtggctatcgtagctncgctaagcgcaacactcatgggctaagtgcgaggaagactctggaagaagatgagatgtacaggttcgctaagcgccaccacttcagtcatctgctaagcgagaaaggcacgtgctaagccanaattcactaatgtgcactaagcggtccataagtgcactaagcgcacaagcacgaacaaggccacctaattaagcctgaaatca

SEQ ID NO: 48275 - DNA, 281 bp, Glycine max
  unsure (1)..(281): unsure at all n locations
gtcctctcacggggtgtgaggtgtgccatgttctcanaatgtgcaaaatcagaatgctcataatcagaatgctcaaactataatgctcaagatcacgatgttcaaaatcaccaataatagaatgcacagattcaccagttatggaatgctcataatgatcaataggtatanaatgatgcctaactaatatgtgaaatgtcctatctatctcangatcaaagggttgtaagtcagatggattgcctctagtcatacactacattcagcatgcacacaactag

SEQ ID NO: 48276 - DNA, 430 bp, Glycine max
  unsure (1)..(430): unsure at all n locations
ctgcagctatgtcactacttacatttgatagcctatgcaaatttttggttgaaaagcctacacagctgcgcctaacctaagctacgacttacattaagggctacctaggagctaacgctggttaactaacgacgtggacctaccactggcctacaccctataattaatttaaaatcaagcaagacttggtgtacttgcactaacttgactttacctgacactgtaacttctatgcggtgactgctgcttgatcttattgtcattcacacaatcaagatgtacatatttatttatttcatctaaacttagaagagacttttttctagtgatgctgagtaagtatatttaggtagcaagagaattagactanactataagcatggtgaaagggaaacctatgttgctgatcgataacactaccctgggctgc

SEQ ID NO: 48277 - DNA, 216 bp, Glycine max
  unsure (1)..(216): unsure at all n locations
caccacatctagaatgatggngttaagtcgtcgttgtggctgcctcactggcttagctccatcctctaaaagtatcctatgcatgcaggtagatgggctaatactnatgaatgttgctaaagtccatccaatagctntcttgtgcttctggagcactaacaacaacttctcctcttgctcggcagtaagggaggcagagatgaatcactggaaatt

SEQ ID NO: 48278 - DNA, 287 bp, Glycine max
  unsure (1)..(287): unsure at all n locations
catctccagtgttaattntgcccgaccctaagagaaccattgaagtgtattgcgatgcaagcggganaggctttgggtgtgtgttaatgcaagagggaagagtaatggcttatgcttcacaccaattgcgtnctcatgaagttaactatccggcccatgatttgtgaactagcagtgtggtctttgccttanagaattggagggcattattatacggtactctttttgaagttttcagtgatcacaagagtctcatatacttggtcgatcagaaggaactcaatatg

SEQ ID NO: 48279 - DNA, 599 bp, Glycine max
  unsure (1)..(599): unsure at all n locations
tgcgatgctntnantcntanngctctgngngacatcnngactngctttcaatctgcattcaccacagattcttgcttcttctatttttatgatgggactgcctctacagcactttgtcatgatttctcatgcctctagtgcgatgccaaacttgagcctatttgactcatcttccttgcagactagacatgtggaggagcgactggtatccttgaggtgtccatanngtaaccagntgtcccttggatnctgcttgccctttcattagaaacttcactcttttctcattngtcactcangcattcttgactattgtgacgtttacattngaatccttcatcacacactgactgatgctgatcaagttcgcagcagtcccttcaccagcagtacttgtcagactaggatgtgcttattgactactttccattccatgatctgtcttagagccatttcaatgtacatactagtgagcaagtcaatgtcaccagaatgttaactctgcatgtgctgaacagccgttctaggacaatcttcttactgatctctagtgaagatgaccacagactacagtctgtgtttgaaccactatcttctcn

SEQ ID NO: 48280 - DNA, 281 bp, Glycine max
  unsure (1)..(281): unsure at all n locations
tcttctgattaatactgcagcggactntgctatccttaatagaaaaagcctccataaatggtcttgctcatcatgtggtcaccaatatcctttctatttgtgtgaaattatcacacacagttagcgactcaacctcttccatgtcaggtgtgtatactgnatttgaatagtagagagctgatcactatcctgcaccccaaattatatatgctcgggtgcttcataacgttgatctaataattcctaccaagagtgaatctatgtacttctaaacaaaataa

SEQ ID NO: 48281 - DNA, 286 bp, Glycine max
  unsure (1)..(286): unsure at all n locations
taattagaaacagtactatacatacagactacattctgatcaacattaccatattaattcttatagcaaggaanacaacatcttcattcgagtttagaagaataataccctatattgctgaattaacctatngatcaatcatgcaaaggaactatagaggaatctataaactagtgatcctagctaggttgtaactgcagaaggttaccaatataaatgaataaatttcattataaatataatgcgtatgtaatgatcaacatagatgaaatttaatgtgcatcaa

SEQ ID NO: 48282 - DNA, 212 bp, Glycine max
  unsure (1)..(212): unsure at all n locations
gcatgggagatcctgaataccgctcatgaatgaacctccaaagagaagatgtccagattgcaactattggccacanaattcgaaaatctgaagatgaaggaggaagagtgtattcatgacttccacatgaacattcttgaaattgccaatgcttgcactgccttgtgagatagaatgacagatgacaagctggtgagagagatcctcagatc

SEQ ID NO: 48283 - DNA, 223 bp, Glycine max
  unsure (1)..(223): unsure at all n locations
ttctggaggaatcttctggagggcccaagtgggcctgtgtgctatttgcacccncatttntactaagtacacnccctgcctttnnttggtgattcttttttcgtaaaggtacggaaacttacgaatttcgtaacaatattttgtttctttccgtaatgttacggaaccttgcggattacataatcatccccttttttgacttacggaatgttacggaacctca

SEQ ID NO: 48284 - DNA, 127 bp, Glycine max
  unsure (1)..(127): unsure at all n locations
ctaatgccattactctatgtatanaaatatactaatggctgagtattaactgatatttggcgaccaatagtcactcccaacagccaacaagtcatccaccatttggtctcccaaaaggctgatgcct

SEQ ID NO: 48285 - DNA, 458 bp, Glycine max
  unsure (1)..(458): unsure at all n locations
ctcttcatctgaagataatggtcattagagtatttaatgcttacattacatgcacgtcctttcttaatgcaaagagtccactctggttggcttagagcttgacactttcaaaacctgatcttcaattattattcataggattctgaaagatcttaggagaatgtcnttgcaaagtgaattccacacatagagtattaaattaagacatacatgtcaactcttaaatggttatcnaaagatggcttaagcttgctatcgtctgattattcagacatagactcagctagcatataccaattaccacattgattcaagttttatatccgatttatttcattaatcaaataataggagtttgtattgcttaaacataatgtctttgatcatactactgataaatacatgtgatatatatcatcatggaccacttanatatgtacaacttcattataacgttc

SEQ ID NO: 48286 - DNA, 185 bp, Glycine max
taactacctcaccttcgccaaggaggagatctgatgcaatcttaccctgcaagggcattggacagaagactctaagaagaatggaccggagatgcatgagatggccctatggttctcattagccttatggaagatcttgcgcccatgggctaagtatgagcccacttatctttgtacatattaga

SEQ ID NO: 48287 - DNA, 262 bp, Glycine max
  unsure (1)..(262): unsure at all n locations
ctgcagctctaatatatatgcgccgaatcagacttccgtntcanaagttatgttcatatgaatntctcgagagcacttcgtgctcaatttcgagcgtctcgatatagtctgcgcgctaatccgacttccgtgtgacaagttatgaccatttgaatttctcgagggcttacgtatctcaattacaagcttctctatatattatgcgcctgaatcatacttccgttacataagtatgaccattgaatttctcgagagcttcgtt

SEQ ID NO: 48288 - DNA, 599 bp, Glycine max
  unsure (1)..(599): unsure at all n locations
agcgatgcgtagctctcatatatatgcgccccgatcgacttncgngtgacaaggttatcgaccatntgtaatttctcgacactcttttcgttgnnncaannnctgagcgatctcgatatagggtgctcctgaatctgatgtccgagcgacatgttatgaccattatagtctctcnagagcgttctatgttcaattaccagcgtttcgatatatcatgcgcctgaataggactcctctgtgacaagatatgaccattggagcttctcgagagcgttcgctgatatatttctagcgattctgtggatatgcacctgagttgactgtcgtgtgacaactattacttggttggactctgtagctcgtctgtcaatgtgacctttccaaagtcaagggctggacggacatcgtgtgctactttgatatttgattattcgcaactctcntatgtaaatcgaagcgtggtattgtctatactgcattggatggcgtatgaatgtattaactcttattatatgtcgctctttattgtattcgtgtaaggccgtattctgttaagcgatttcgtgtagcgtatctttgtttanacgcatatacgcacc

SEQ ID NO: 48289 - DNA, 231 bp, Glycine max
  unsure (1)..(231): unsure at all n locations
gctcgcgactggtccctntcttcctttcgcaacttgagttcactattgctaccccatagagctccacgaaatttgttccggccatactcttccttgcgagccctctnggtctctggttcaagggctcttgcggtaattgcattctcttcccgtaacccggacactccttccgaacgtgtgtagcggccaacttgaacttctcctaaggcaagtttgcctttcctaactcgc

SEQ ID NO: 48290 - DNA, 270 bp, Glycine max
  unsure (1)..(270): unsure at all n locations
cagccttctggaggactcttctggagggcccaagtgggcctggttgcttattgcacccncatttttactaaatgcacccncttttctattnnttgtaattctttttccgtaacgttacgaaactttacgaatntcgtaacgatacttattttctttccgcaaggttacgaatccttacggattatgtatttactctntcttagctntcgaagaagttacggaaactcacagatngcgcanaaacacttcttttcgacttccgccacatta

SEQ ID NO: 48291 - DNA, 216 bp, Glycine max
  unsure (1)..(216): unsure at all n locations
ctgcagcttngattaccgtgattgatcgattctgtcttttttgctttaatcggcattacagggttgttactttgaccgtttgcaaaaaacaccaactaacttcagcttatgaaagagatccccctatgtgttttcttaaggtgtatacgaacgcatggtttctatatgcgtctcatgagagatatcctttccacactgcactaatcttgccccatt

SEQ ID NO: 48292 - DNA, 271 bp, Glycine max
  unsure (1)..(271): unsure at all n locations
ccttgatacttcatggagaataagttctagagaagagtacttgtttccgccttatcgctttctgcanagcacttttcaatntcaacaagggattctttgacactagttacatcatttgacacagtacccctaaagacccaggaatgtcacgcttaatgatcatacaattcatgcgtgatcccacttctcatgaagtttcctctgtctagaggtactggaatctatatgacaaaggagtttctcaatccttaatgcacggtctagatccatt

SEQ ID NO: 48293 - DNA, 76 bp, Glycine max
  unsure (1)..(76): unsure at all n locations
ctgcagctgacatcaactgttaantactggagtggtcctacgttttggctgaagtttactngaatctctaacatct

SEQ ID NO: 48294 - DNA, 227 bp, Glycine max
  unsure (1)..(227): unsure at all n locations
atgatggtacatatgaagaattgngtgtagttcaattgtcttcttcaaagttaagaaaacacantcataatgagtgactatccttctcggatgatttttgcaggatgttgaataaatataatggataaggtggattatgttacggaaatggatgtcttttgcggnctaacaccaattatgaattatgcaacanagtgtgttctcttgaaagacatatatgaactcat

SEQ ID NO: 48295 - DNA, 225 bp, Glycine max
  unsure (1)..(225): unsure at all n locations
actttcactcggatggtccgattttggtcataatatataaagacgctcgaantncacaacggaagctctcgagaaaatcatatggacataacttttaactcggatgtgcgatttatgcgcatcacatatagagacgctcgaatatgaacaatagaagctctcgagaaattcacatggtcataactnttaactcggatgtccgattcacgcgcataatatatcgag

SEQ ID NO: 48296 - DNA, 193 bp, Glycine max
  unsure (1)..(193): unsure at all n locations
actggctctntcttcccttcgcaacttgagttcactattgctaccccatagagctccgcgacattngntccggccatactcttccttgcgaagccctctggtctcttgttcaaggggctcttgcagaatggcattctcttcccgtaacccggcacactccttccgaacgtgtgtagcgagcaacttgaacttc

SEQ ID NO: 48297 - DNA, 413 bp, Glycine max
  unsure (1)..(413): unsure at all n locations
gtaataattttacatcaatctctgaaatctagaatgaaatatatgnaaatggaaatgatgaacgccattgntgtatatacaagccacttgaccaaaagcttacctattatcaatgattatatcattngcacccatctttgagctaaactgtaattgtattgaaccatgagccttgagttgtaattcctatntaccttgcttaagttntaagagggcacattggtttaagacaatctcaccccanatnntggggaagtctgtagaaaggtaatggttaaaggtanaaaaaccacactccccccacaattaaattaaaataacaagagagaaattgttcaataagtggtgtgtcgtagacaagtaagtgaaggctatgacaagtaatatataaaagactaatggtagtcaggatt

SEQ ID NO: 48298 - DNA, 214 bp, Glycine max
  unsure (1)..(214): unsure at all n locations
attgcacccccctttctatttttntggtaattctttntccgtaacgttacgaaacttcacgaatttcgtaacgatgcttattnttcttccgcaaggttacaaattcttacggattatgtatttactctnntttagctntcgaagaagttacggaaacttacggattgcgcanaaatacctctnttcgatttccgtcacattacgaaatttcacg

SEQ ID NO: 48299 - DNA, 401 bp, Glycine max
  unsure (1)..(401): unsure at all n locations
tctcaattgatattnntgttcaagggggtacaaaggaactggtagtattagaaatgtcttacacttagaaatcaaatgattggcacaattttgatgaataaccacacactaaataagaanataacacaacatcttgagtatcaataagagctaatcnatcagaatccatatctgtccactacaacatttatgcttatgcacaccacgattccatggtagaaactcttgcatacatagaacatttattatatattattatatagcacaattcaaccatgcaggataacctactgcatccatctacgaacaattgtgcctaaatggcacagataaatacagatgcatatctataaccatattatattttagattactataatattatggttattattttatat

SEQ ID NO: 48300 - DNA, 164 bp, Glycine max
  unsure (1)..(164): unsure at all n locations
ttgaagtagtaacttgaactaaaatagggtgctactggagttaaagaanaaagaccaatctaacataatccagagaaccactttcacatatccaaagaacatttataattagaaaagaatcatgtattctatacataatacttaaaacaaagctaattattgat

SEQ ID NO: 48301 - DNA, 180 bp, Glycine max
  unsure (1)..(180): unsure at all n locations
tagaggacctcttgagagcctgtgtgttagagcagaggggtagttgggatagtttcttacccttgatagangttacctacagcaatagttttcactctagtataggtatggcgccttacgaggcattgtatggtagaagatgtacgacacctctatngtgggtagattccagtgagagca

SEQ ID NO: 48302 - DNA, 261 bp, Glycine max
  unsure (1)..(261): unsure at all n locations
ctgtcgcagactctgtgggttatgctgctntgccgaccaccacacagacctttgcccttctgtgcaatcaattgaagcaatngaacagcttgaagcttatgctgcatacatctacaatagacctcctcaacctcagcagcaaaatcagccacaacagaacaattatgacctctccagcaacaggtacaatcccaggtggaggaatcatcccaaacttagatgggcgagtccttcacaacaacagcaacaacaacaacctta

SEQ ID NO: 48303 - DNA, 291 bp, Glycine max
  unsure (1)..(291): unsure at all n locations
tctgaacgacgctctntntctgcattgttactaggttctccggatacaagnttcagatccttggcttgagattcaatcaatgcattaataaattctactggcgaatgactaanaccaagaaaaaatgcccgtctnctacggtgctcatggattnttctaatgattccacatattgcttcatcacatgtctcaatctctttgnntcttttccacgtagccaataaggcagacaactccctctgaatagganaaggaacatcaaccatcacatcataacaagcagtaccagca

SEQ ID NO: 48304 - DNA, 190 bp, Glycine max
  unsure (1)..(190): unsure at all n locations
tcatgtntataaatnngaaaagggcttttatggcttgaaacaagcccctagggctagggctgggtacgagcgcttaagtaagttccttttagaaaaggactcttctagaggaaaagtggaactactctcttataagagaaatacatgaatttatattcaattagtgaggatatttgatcatacaatgtgg

SEQ ID NO: 48305 - DNA, 251 bp, Glycine max
aaactctgaactagtactccccttttatctactaccttgagagtccttgatattctaagaagtgagcttactaccctcctttatagtagtcactcttggagaagctgactactaccatcctatatagctactcacccatgaagatcgtgaaatcgagacaatcctactcaagactactacaatgctcgaatcatggtaaacctatactactagatggcatatcaggtcaatgaggaaacctttttatatac

SEQ ID NO: 48306 - DNA, 296 bp, Glycine max
  unsure (1)..(296): unsure at all n locations
ctagctgcttataagatacctntatatggtagntaaatccagcctatcttaagataattaaaggacgaatagattaagacagtcaatattaaaagatgcctttcataaaaagatcaataattctatttatgataaagattattatctattaaatcatccacattagatcaaattcacatccttaattaataatcagctatctaaataggtactcattacttacatatttcacctcaggataattgttatnttggacgataatcacttatcttacaagatantcaattatcattatc

SEQ ID NO: 48307 - DNA, 295 bp, Glycine max
  unsure (1)..(295): unsure at all n locations
cttaatcgcacctctaccanaatatcatnnttgtccctgatgttgaactctgaacctcataagaagaaggtattgttgaagatattgaatgacgctcatgtcattcatgacatctctaaggagaatattgaaggtattgtaggtaatgttagtgcaagcaattacctaacattcactaatgaagagatgccagtagaagaagcagggcataatatagccctacatatatcaatgatatgcatggaccatgtcttggcaagagttctatatgataaccggtcctcgtataatgtca

SEQ ID NO: 48308 - DNA, 224 bp, Glycine max
  unsure (1)..(224): unsure at all n locations
atagcatcttgatggtgcagcttctgaaagagaaggacagcatgaaattctatactgcanattagatcagaggagcgaacacangtgtaattattttgacccatcgcttctacttctgcaacataattgatgcttggtattctttcctaatagatgcatntgccaatagcaattaaagttaaataaagaatgctccaatcgtcaccttattccattactcacta

SEQ ID NO: 48309 - DNA, 318 bp, Glycine max
  unsure (1)..(318): unsure at all n locations
gcactgggctgcagctatgaaactgtcttcatggtagtatcaagtaagtgtttactttattgtgactnnnactatccttgttcatgtagatgtngaacttgacttgaggatgaatcacantanagagaatgatacaaacctatcaaggtccaaatatcttttgcaatggatgtaaggcttattgacacaagtagaagctataaaaagaaaaagggttttcatagcttaatcatagaggtgcaagatnaagaaggtttaactataataaagtccaatccatgaatngtctcatatctacaattttgngattatttcaac

SEQ ID NO: 48310 - DNA, 195 bp, Glycine max
  unsure (1)..(195): unsure at all n locations
gatgtgctntcacttcaaggatcaatcactatagtgatatgatcatagcctntattaatgtatntaaataagtatttaattgaggtactctagttgcaccattcaatattaatgtgagctntgtacctcaacaacaaccatgtattataaggaacgacactatggttatcaatggagacaccacctttaatcaat

SEQ ID NO: 48311 - DNA, 289 bp, Glycine max
  unsure (1)..(289): unsure at all n locations
gaatgatgatctcaaganaactcatcaagcttatttagtnngatttgtcatagacaccacttcacctagtgatgtacaagataccatctgttgtgaggaggtcaaaggattactagatganaaggtatttagttgatgaaagattattcttataggatnttcaagacttggaagacagggtgaagtccctaacgacaactcttgaagaatcagaagaagagcataagtaaatgcttaaataatagctcttacttaaaaataatgcactcttgctaataatgagcttgac

SEQ ID NO: 48312 - DNA, 216 bp, Glycine max
  unsure (1)..(216): unsure at all n locations
atgtgatacaacaagtattcgttctacacganatcacaagataacaagagtacaatgcanaacaatggggttagtttaagggttgaatctcaacactttgctactatacatgatgacaatccctangtagcttccatgccttactgttagtcgatgaatacgactaactnttatgtataaaaacttgtgtaaatgtatcanacctcctctaattat

SEQ ID NO: 48313 - DNA, 370 bp, Glycine max
  unsure (1)..(370): unsure at all n locations
agcttgggtgttaagcttgtctataagagttagaagtgatatataaananatatttgtaacttgttgaagntagtaaaacttagtgctttgtcaagaattagacatagtttcaatgtgtacaacgaactagtataaacctctgtcttttaatgacctagaattcgaatctgattttatttcaaaaatttattatttatctttaaacttaatgttagatgataacaagagaaagaattaaaacatctctaacattataattcaactgttgtgatatttgtctntacataattattacacataanatattcctattatatttaaaatattattgtttaagatattatatgttatttattacgaatattatat

SEQ ID NO: 48314 - DNA, 250 bp, Glycine max
  unsure (1)..(250): unsure at all n locations
atcaattaattagttcttactactgatattatccatcannattgcaaatatcaaccaatttagttgttgaggatnttgcatatatcggtcagnttcgntactaatattaagttgcatcaaggaccaaactgattagtgggtatcaatttcttttcttatagaaaggagacaaataaatagttactgccaaatctagctagggatcaattngatgnttaacttatattgtngaattactgtatattatact

SEQ ID NO: 48315 - DNA, 260 bp, Glycine max
  unsure (1)..(260): unsure at all n locations
gttagatctaaacccaataaataagtcttttccatggaaccaccatggatgccttagagaaatatgataatagaagatgagaagggaaagaggagagtttcttaccactgaactagcctcataactcgaaaagagcattgctacaaggttctttgaatcaatgaaatacaaggtctcacactctctaatggtgggttgtcttggagaggaagaanagggtgacatgaaagaatataatttgtgttttggtttacattaca

SEQ ID NO: 48316 - DNA, 118 bp, Glycine max
agatacgggaacttatgaattctcgaacgatacttgtcttctttccgtaatgttacgaaaccttgcggatcacataatcatcccctctttgacttacggaatggtacggaacctcact

SEQ ID NO: 48317 - DNA, 441 bp, Glycine max
  unsure (1)..(441): unsure at all n locations
gctcacattcactttcttctacatcatattcaaactnngccanataaataatanagtcatctcgactcaaagaanatcatataagtctcatacaattaatatagaacctatatcctaatgtcacattctatcagagcgtggtgtcccgtgtcctctagcatgangntcttcatagtcatccacctattcatctgctcccccgaacacaaagttcaagatcatcacaggatccanacacaaacagcaaaccgggagtgagttatcacattgctaactactagagagaaacaacacaaccatatagagcccaatacaatttacctagcatatctcaccatatttcatcacttcgtcattcatcaatcacacgtttcaatcatcaatcattatacacaggaatcacacactccgatcaagacataataacacatcaatttcata

SEQ ID NO: 48318 - DNA, 203 bp, Glycine max
tacatcaacagcccaagatcctgtgctttataccagaagttccttcatctctcttcactaactatatgaagcttctatttattgcatgaccatgaacgatcagaatttccaccttcacatgtgtcttcaacgttctgtctaacaatgaactgaagatgtttctacaagaaaatcaatagtgactcacgtgctacaaagcgcga

SEQ ID NO: 48319 - DNA, 248 bp, Glycine max
  unsure (1)..(248): unsure at all n locations
gctgtggaaaaantgtgaaatctctggatattctgggatgtctggaccttctgaaccttatggaagagatggaggatatgaagggaatataagagtgatagacttctagaatgtgtggagcactctagagaataatctccaccctangatacaagtatcttcaccattcattgtggatgtggagtagtatatataagggtaggagcctncattcctaaccactcaagaccagagtgaattcacttctt

SEQ ID NO: 48320 - DNA, 190 bp, Glycine max
ctatgaatatatggtaagagcttatgtacaaccacgattgaagcatatccaatacctgttaatggttatatataaattagtccaacaagctttgtacagttctgtcatatgccagctaactacttcttgacgtaaagggatggaacttggaaatgaagcaatctttaggtagatgaatttttactgttac

SEQ ID NO: 48321 - DNA, 226 bp, Glycine max
  unsure (1)..(226): unsure at all n locations
acctatattatttacacgtacctccaaggtgtattagctacttacatcacacacatcttctnggctaaactcacatacatgcatactcaagcactgtggggcaccaaatatagcacatgtgcacatcttggcatttctaatacctacatacgcaaacttcatgatgaatcttgactatctacacaattaggggctacatttcatggctctttttcaagtttatgct

SEQ ID NO: 48322 - DNA, 134 bp, Glycine max
  unsure (1)..(134): unsure at all n locations
gactagttccgctccggagtacgacagtcaccgctttaggagcgctgtacaccagtagcgcttcgaggccatcaanggatggtcgtttctccgggagcgacgcgtccagctcanggacgacgagtatactgatt

SEQ ID NO: 48323 - DNA, 379 bp, Glycine max
  unsure (1)..(379): unsure at all n locations
cgtaacaagacaattatagttgctgtttgaatacctcacccactctcaagtgtatcacacaattatggcttttctctaatgaaacactcttgcctcttaccactctaattccncttgagttcttaggcaattcaagagattatggccacaacaaagaacaattcaccaatatgtgtaaggtaaggctagagagacaaggacaaggttaaccatgaanaaggctaacaatggttttaggcacaaatgaaggaaataaactcagaattaggattcaaggaacaatcttcctgcatccatatattaccttaagagattttttttaaagttcttaagcatgaaccatcagcccaattnttaatttttattttaatttgctata

SEQ ID NO: 48324 - DNA, 229 bp, Glycine max
  unsure (1)..(229): unsure at all n locations
caacggaagctctcagagaatgtanatggctcataactttaactcggaggtccgattcaggcggataatatatcgagacgctccaaatngaacaatggaagctgttgagcaattcaaatggtcataaatagtcactcggaggtccgantcatgcacataatatatcgagacgctcgaaattgaacaacggaagctctcataaaatcaaatggcataactttaactcgga

SEQ ID NO: 48325 - DNA, 224 bp, Glycine max
  unsure (1)..(224): unsure at all n locations
tatggtgaccatctagtagtgaaactcatggtggaagctcatactntctcaccatcatagatgaattctcaagaagagtatcggttgtatgtttgaacaataagttagaagcttttataaaattctgagagtggcatactcttgttggacatcaacttggtacanaattaaaattcttaagaattgacaatggcctggagtttgtttcatagcagctcaatgag

SEQ ID NO: 48326 - DNA, 136 bp, Glycine max
  unsure (1)..(136): unsure at all n locations
actcgccaatttcccagctggaaatcangagagcatggtcgtaccaaatccaaagtactcggaatatcatcttcgcatatcgcgaacgctngacctttgtctcccgaacccgcacttataaagcttctacttatgt

SEQ ID NO: 48327 - DNA, 521 bp, Glycine max
  unsure (1)..(521): unsure at all n locations
gcagtctcatctcaaccttgcactgcttgacgtggaggacgactcgctctccatgtgcagtgtcgagcanaacgtctcgttggaggactacttgagaggccggtggagccgctcatcaagctttgattaagcaaactactgcannatgatagaagaagaaggattgtgtnttttanaatctatatcctttttgtaaataatttgctgtgttgcatgtgctgtgaaagttnttataaatgggtttaagatgagagnngtgttgtgtgtgcccttctccttcccttgctngccaaggaaattatgcccttgtattttaaagcntagtacctttgcttctactttattggtgctagttcaacccttatctcaattgatcgagtgaatatgtctcgtgcgaaaatgacaatgaanagtgttctacactactatgagtctgtctatgcattataagtaatgcattcttcttgttttgatgttctttatggttcaccgatgtggtatacacgtagatattgtgtatg

SEQ ID NO: 48328 - DNA, 196 bp, Glycine max
ccctataaagcaacgtggcggacaaaagtggacagtaaacttgaatggtcgtcattgtcaacgcggaagggattctgcgcttcactatacatgtgtacacattattgcagcttgcgtgtacgtgagcatgaactactaccaatatatagatcgtgcttatacaaacgagcacatcttataagcttactccgcacaa

SEQ ID NO: 48329 - DNA, 344 bp, Glycine max
ttacacgagctcactccaaaagatccgagaagctcttttaagatgaagcgttctatgacctttgcgctcacatagcataagaggcacttacagatgcttctgctgaacataccaatgccttcatacaattaatttggtgagtgaaggaacactccacgatgatcaagaccccacaaagtgaggggtatatctattggaagactgcggggaggctttgctggagcatcttcctacttgcgggcgcaagacacacatgactgttagggacttgaggatttcaaggctagctagtaatgaccttcagacactgccagtggctattatgcctcaactattccttcctg

SEQ ID NO: 48330 - DNA, 193 bp, Glycine max
  unsure (1)..(193): unsure at all n locations
cacttgtgtgcttgagagaaacactggcttgtgagtaaagaagcttagtcaatcttccttgatgcctgtcatgcttgctaaccaatttcatttccttagcacattatcacattcttctatcttgaaattatgaccacatgctaattggtggagatgatgaattgtgaaatgttgcaatcatctcangtactat

SEQ ID NO: 48331 - DNA, 299 bp, Glycine max
tgctccagaagatcagtgtcaatacattgtatctaagaatgaaagggcagaagggaaaaggaaccttctggctgctcatcgcagttcacaacacatgtttatataaacactctctacacacattcaaagctctataaccagctgtagatctgaaaaacttgcaaaaaaccccaaagattgcgaaagccgaggtacccatcggattctatgccttctatatcaggcctaccacagttactcttttggtcatatccgggttggagacggctctgatgtaccaataagggtattcggtgtaa

SEQ ID NO: 48332 - DNA, 232 bp, Glycine max
  unsure (1)..(232): unsure at all n locations
ctctaaaatcaagaaacacacacacacacacacacacacacactttttnctagtcgatgactcacataaatnttcattctcccnncttggtcttgagnttatgcttcagttgaaattaagttaattacttgtgtgagttcttgatttattcctattctctcccccttggcataacaaaagcaaagtgcgaacaagataagaccacatatactataatcatcacaaggataca

SEQ ID NO: 48333 - DNA, 470 bp, Glycine max
  unsure (1)..(470): unsure at all n locations
ttcatagacacanaatattactcttaacttctagtcataactgtgcanaatctgtataaataactntgtataaatntaatntagagcaatgtattcaaatgaaactgcatacatgcnggtgaattcggatatagcaccaacatctatgtggataaaacatcaacagtactgtgcattccataagttcatctctgatttgttatgtangtaaagaagtgatgtgccaatcaccggacacaaatgttgatttgattattatgtatacgactcttctaactaaaaaantgttaaattaataatacacgatatgaggattgcggcagactataatatacctgagtgcatactgatgtaccatactgggatgatgtggttattctaactgattcttggtcaaacatactattgatatgtactacaaaaatggacttgnacttcattgaggacttactacttcatgtggcgtcact

SEQ ID NO: 48334 - DNA, 170 bp, Glycine max
  unsure (1)..(170): unsure at all n locations
agcccgaggactagagtacttgcataagggatgcaacactcgaattttacatttgcatatagcccaacattcttttggtgagaagttctgctcaagatatctgatttgggctagcanagccttgtcctaganatgaaagtattatttccaggtctgatgccagaggaaca

SEQ ID NO: 48335 - DNA, 272 bp, Glycine max
  unsure (1)..(272): unsure at all n locations
ctcacttcagcttaagatatgaagaagactccagaatacaagtggactatgatgctagtatttctggtaataagtagacaactatcattaccttgtgtacccctataaactgtctacattatatataatcatgatatagagcttgcgacatctaatctcccctgccaattaatccaatcctatgattatgaaacatgacataantaattaanatctattcatctaacctactctaaatngagatgcaaaattgtactatacagggctaaatt

SEQ ID NO: 48336 - DNA, 337 bp, Glycine max
  unsure (1)..(337): unsure at all n locations
tctgagctagaagaatcctctctctctatatgtgcttgtagtgcatacatatagcgcaagatacttaagagntagggaacttagaatatatagaananaagatgtaacacctatggatagtgcgtatttaccagctaacagtgacgttacctaaaccaacanatatttgtgttgcttaaccactaatgtagcttattaatattgtctcacaaggcaaggaaaaatttctgtgtaaatggattaaaatttanaacacataattntgcagatatatntgattattgattacaganaatgtgtatgcaaatggtacatggtactctatttataatacacg

SEQ ID NO: 48337 - DNA, 412 bp, Glycine max
  unsure (1)..(412): unsure at all n locations
ctgcagctttaccaagagttttactctctgtaatcantaccagancataatttgttttanaagctttcanactgaatctacaacgttccaattaatttcaaaatggtgtaatcgattacaagatattggtaatcgattaccaatgtgtttgaacgttgaaattcanattcaattgtgaagagtcacatcctttcacananatgctntgtgtaatccgttacaatgagttgtgtatcaattaccagtgacaacgttttgataaaatcaaagactaactcttcaatggtntcangtttttaaaagtatactctttatggttcttacccacatgagagttataaagcaagacctgacttgatttaggacatcatacaatttgacaccttacaacactttcacatttcttgatctc

SEQ ID NO: 48338 - DNA, 276 bp, Glycine max
  unsure (1)..(276): unsure at all n locations
aaactngtgctattcatcttttcattctcttctncccttgccaaaaagaattcgccaaggacctaaccgctgaanttcttttgngtctctcttctctcttttccaaaagaacaagggactaaccgcctgaattctttngtgtctcccttctcccttgncanagaattcaaacgacacaatctgagaattcttttgattcttcacatctcctaatacanaagcgttcaaaggtttaatcgcctgagaactcttttgtatccccattcacaaagtatc

SEQ ID NO: 48339 - DNA, 159 bp, Glycine max
caattcttgagtgtgctttggctcctacactgttcatgccgctgagactatattggacgcgtcactgaagtcaagaggccaacttagtaaaaaggcttatgagctgggacattgcaacgataagtgtagtaggaacgccattaatcataattctaccgt

SEQ ID NO: 48340 - DNA, 212 bp, Glycine max
tactatatatgccttctatctgctgcatcaatgcttactcattacgtgttatatgtccaacttcaacaccaggcttggagacttaacttgcataatcttattcgtctgcatggccttgccgctcctatatactaatggtcatatctactatgaagaagacgtgttctaccatgcgaaagatatagtattctctcacggtgtgaatatctctt

SEQ ID NO: 48341 - DNA, 267 bp, Glycine max
acaaactatctacctatcctttcatatctttgtataatagagaactctcgtctcttctttattgttgtttgcattttctcgtccttacacgcctttttgccgaaatccgacaatgagctcgtcttctatacatacataattcttgaggatacaccatctgctttaccttttattattcagaccctgtgtgaaaaatgatgatcaaaggccgctagcattcgctgacgggaaaccaactctcctctctaaaccagtcctaaatgcttc

SEQ ID NO: 48342 - DNA, 274 bp, Glycine max
  unsure (1)..(274): unsure at all n locations
gcttcctctccctccccctttgcaacacactttcctttctctcctggagatnnattttccatctctccgaagatacaattatattgactcgcgaataataatagtctgtgatagtgttctgttgctctctaggaagattggttcttgttgaggatatgtctaatgcttgcacttaacagactcgtattaaatgtaatgtcctgtgatgatgaatcgaagggatacacatataagggtcttcatatatctctaacagcttccatgacataaatta

SEQ ID NO: 48343 - DNA, 304 bp, Glycine max
  unsure (1)..(304): unsure at all n locations
ctatgtacccgtagtggtcccattgtgtttcgtgcattttattctattttgttacctttatacccctgtgacggcttagccatttacttagtcattctcgctaacttaaaataaaatanattccaccgaacgttgaattgattatccataacttcggtaaaaaaattccgaccgtcggtcgtgccgaaccacgtggaaatcaaaagaggtaaaatatattatatcaaaaatatctttttagtaaattagcggaaatcatcgacgtttctctttggattctattcttatcgatgatatactaagg

SEQ ID NO: 48344 - DNA, 203 bp, Glycine max
  unsure (1)..(203): unsure at all n locations
gtacctagattatntacacgtacttccaaggtgtatttgttacttacatcacacacatctcctcggctaaattcacatacatgcatactccaagcattctggcgtaccacaaagtgcacatgtgtacatcttgggatttctaatacctatacatacacagacttcatgatgaatctcgactatctacacaatagggtgctaca

SEQ ID NO: 48345 - DNA, 419 bp, Glycine max
  unsure (1)..(419): unsure at all n locations
cacaatattctgtctaagcaagaatgtctcanaagaggttagacatgctacaaggtacaaaccataagtgttcacctccaaacaaatagattcatacttgctcaatttcaatttcattgtctgcagcttcagcgcaggttgtgagtgaaaaactctgacaccatgagctgagcgcttttggaattagattcagctgctgagaagtctacggtctgatagngttgtattagcacatgtcgcatcctattgattcatgcctgtactcaaaaatctcgtgttgatgtaagaacaatataacttacccagctgaagcgagatggcccatcttgtattaaactcaaggcttgactctaaacaaaaaacttgttacatagtgtcactctcattattgctacagacctctctgttgttgaaaactg

SEQ ID NO: 48346 - DNA, 229 bp, Glycine max
aatggacaataaggcatctatggcttcaactatagaagatatcattatatactgaagtatcgttggtggtttcttgccaaagataacttcaaatggtgaagttctcgtgcttgtgttccatgacgtgttacaagaccattccacccatggtaaatactttcctcacgtcgaaggcttattatgaacaaaaactcataaatattgttcaatgatacgattcataacttct

SEQ ID NO: 48347 - DNA, 152 bp, Glycine max
  unsure (1)..(152): unsure at all n locations
gttatatacttatcngcgtacacgagcgttatggcacaatactgctaataaatacgcccgcctgactcatgagactgtgtatcataacatctgcgcatgaaccatactacggatgtaagctgatcgcgcggatcaccctgcgctgctatata

SEQ ID NO: 48348 - DNA, 255 bp, Glycine max
tggcggatttacaccgatatggtgactctcagacaatctgctctgagccgatagtaagccagccacaccgcacaccgctgcgcaaccctgcggcgatcaattagtgttaatgttgttacagtataccatacttgactccatgttttcccgcctaacacaaagaacacgagcatattcgcttagactgagatctttttcagggtttaaaaaatccatcaaaacacgacgttagccaatattgatctatcccgggtc

SEQ ID NO: 48349 - DNA, 308 bp, Glycine max
  unsure (1)..(308): unsure at all n locations
gctttctgtgtcaattntgagtgtctcgatatattatgcgcctgaatcntacattcgagtganagntatgagcattngaatttcttgagagcttacgttgttcaatatcgagcgtctcgacatgtgatgttcctgaatcgcgccaccgtgtgtataggtatgaccataagaatttcacgagagcttttgttgttcaatttcgagggtctcaatatgtgatgtgcctcgaacatacgagtcgaaagttatgacaatctgaatntctagagagcttccattgctcatattcgagcgtctcggtatattat

SEQ ID NO: 48350 - DNA, 239 bp, Glycine max
  unsure (1)..(239): unsure at all n locations
acggtcagatcatggaagcgtggtttgtgaagttgcagaccacatctcgagacgatccaacggttaatgaatgctatgaagcgcttttaccgaagcagcttcatgtagctttctctagaagcttcattaagaggcttcctctagaagcttcctcgtggcttctttgagaagttntctcaagaggcttctntgagaagctacatccttatctatccacccctctattaactaaattaact

SEQ ID NO: 48351 - DNA, 316 bp, Glycine max
  unsure (1)..(316): unsure at all n locations
tatgggacacccgtcatatgtggtactatgtggcgatcgggcgatggcgcanatcaactctnccactttcacanatcaaacattaacgtaccatnnctcagtgcccaccttcaaattgagctcacgcactcncacgtagcccttatcctctgttctctcaacacccgggncctcatcaacctctccaagcttncacaatatccaagcaattcaatttccagatatcatgaactaccctanaccaagaanatagggcagagggcagaaactctgcccanaacacattcacatattacagctttccttactcatatat

SEQ ID NO: 48352 - DNA, 207 bp, Glycine max
  unsure (1)..(207): unsure at all n locations
ctagtctaggtctgagagaccatacaagtttcctaacgatctctaagtatgtgggccattaagtctatcatatgctgacaatagctgagaagtccgtggatctcctcggtggcggagtaggtgtccgccactgctttggccttggctaacaatcggngaagatctggactcccgttcaaggtaagagcaaaccgatccatccacatg

SEQ ID NO: 48353 - DNA, 219 bp, Glycine max
  unsure (1)..(219): unsure at all n locations
aattcaaaacaatgtggtatatatttggtttcacttaagtacttggtaaccagacaaagaattaatataataacaaaattagtagtttgcacttctagctacaattnttacttctaattagttctccaactttctttagttattntgcaactttatctcttttttatgttgttaatctgatggttaaggctctatttctctctaaaaaatgatactatt

SEQ ID NO: 48354 - DNA, 181 bp, Glycine max
aagactaatcagtatttataatggtgcacaaaggggttaagaaatatgagaatataatggcacatcagagggtacatcctttgtggtacaagtagagggtacatctacttgtgttgttgtgactgagaacaagagagggtacatctcttgtggatcagttctagtggagggtacatccact

SEQ ID NO: 48355 - DNA, 249 bp, Glycine max
agcgaacaaacaccataactaaacgcgccgcatgggatccctatcgcaccagatccaaatctagaatgatgggtgatcaagaggagacgcacgaacagatgatagccgacatgtcggctctgaaagaacagatggcctccatgatggaggccatgttaagtatgaagcagctcatagagaagaacgcggtcaccgtcgccgttgtcagttcggctgctgaagcagacccgactctcttgcaactacgca

SEQ ID NO: 48356 - DNA, 314 bp, Glycine max
  unsure (1)..(314): unsure at all n locations
gctgacttgcagtgatttagcctagttcacttagtattattcattanttaagatagagaaatcccacagagaaacgntccgatgattaaatttggtttaatttacttaaagatattctttgattattatattattaatttacctctnnttggtttccaatgtggttacggcatgaccgaacggtcggatntcattntaacaganattaacggatattaaaaatcaaattatcggtaaaaatttaatttattttttgattaggtgagaaaatgacttaagtaaataactaaagcacgtcacaagggggtatggaa

SEQ ID NO: 48357 - DNA, 243 bp, Glycine max
  unsure (1)..(243): unsure at all n locations
ctatatcttttctttctcatctcccttngccananacaattcaacaaggactaatcgcctgaattctntntgtgtctctcttctcccttttccaaaagaacaaaggactaactgcctgaattcttttatgtctctcttctctcttttcanagaattcanaaagacacagntngagaattctnttgattcttcactttcccttanacaagagatttcanaggactaaccgcctgagaatatctt

SEQ ID NO: 48358 - DNA, 536 bp, Glycine max
  unsure (1)..(536): unsure at all n locations
gcaattttgtgtgccatatgccaagaaatataatggttggcttagctttgagactccacctcanaaggaaagaccttctccacatagntcaacactgacaccaggtttttgtaggccacaaaatgtaaacatgtatgaaactagatccatcacttgaacttcanaattgaacactactcgngaggtaacagcataattggatggtaggtaattntctaaaagggtatcatattctactntaatataacaagaagaacatttaaatggccaacattcggtccttaaaaaataantgcataagaaccttaaccaancattgattattaatagaacgatatctgcactataagaatctctcataaactgctcaatcccatcttcactanaatctctagtttgggatcatggacccttcattcaccatcacaacaagccgcaaacaccaagcatggttttattttnnatttttatatcatatatangatgagattcactatttattaatataatcttatagaaaactgctgatattttat

SEQ ID NO: 48359 - DNA, 208 bp, Glycine max
  unsure (1)..(208): unsure at all n locations
atactcagcccattaagacagcttcggtgctacactacaatgggaaaatgaaaccttggcttgatctgngaattccacagtataaaagctattggaagaagtttctgaacaaagaggatcagctcttaagtgattgcaatgtaaatntcataataagtngtgntcctgtggtgcatgtttgggaaattgtanggctgatctcttaaac

SEQ ID NO: 48360 - DNA, 280 bp, Glycine max
  unsure (1)..(280): unsure at all n locations
ctcatgcactcctctaatgactatggcatcatntctggcgctaaactgctgngagtaggaggccatcttctcaattaaatntctggcttcagcaggagtcatgtctccaagggctccaccactggcagcatctatcatacttctctccatattactgagtccttcataaaaatattggagaagaagcttgtctgaaatctgatggtggcggcaactggcacatagtttcttatatctctcccagtactcatacaggcttctctcactgagttgctaatac

SEQ ID NO: 48361 - DNA, 247 bp, Glycine max
  unsure (1)..(247): unsure at all n locations
attgatatgaccctacctacttcanattaaagggattaccatccaatcttctcactaactattaaaccttaacttgtaaattaacatagagaaatatgataatattaactgctacgcatgttgctttcttcatacctaactaaccgtgtgacctaagacttagtagtatccaaacgaaaacataagtttaatgtaaaattaattttatgcctacacattattaaacaacatatgtatcaatttctat

SEQ ID NO: 48362 - DNA, 250 bp, Glycine max
  unsure (1)..(250): unsure at all n locations
gagagattctgctgngcgaagacttgtacagaacagatcttgaagaggaagttgtcctgagagcatgagatgagtctgtgagagattattagggtctagaggtggacgagagatcctcactactngcatntcttcaatccttcatttttctcttctctgtgtagtacagaaagctctccagntatggagagctaacatctctggtggttctttcttgctagtacctgatgtaaatactttntcttatcta

SEQ ID NO: 48363 - DNA, 243 bp, Glycine max
  unsure (1)..(243): unsure at all n locations
tctanatatggaggagtttcgtataactcatgaagtgagagagtacataactagagtatcatatgctagcatagtaggagctattggatatgacacgatattcacatgttctaatatcatttatgcactacgtgtaacaagttgatatcaagatagtcttggaggagggcattgacagtgggtaagactattcttaatacttaagaagaactaaagactatgccttatttatggagacacaaa

SEQ ID NO: 48364 - DNA, 147 bp, Glycine max
  unsure (1)..(147): unsure at all n locations
gcacctctgttagtgttaccatcgattgtngatttagcgttgngaaatggtgtgaagcgatttcagcattgtgtgaggtgtggntttctctgtgatgtcgcggactcgcggtacatgatggtgaagntggactggctcgtacctgat

SEQ ID NO: 48365 - DNA, 263 bp, Glycine max
  unsure (1)..(263): unsure at all n locations
acgtggcaataaactgagtgacatcttctctaataccaggccagtagaagttttcagagattcttgcaactggtntggtaatgccggtgtgtctgcctgtcggagtcacgcgatattcctttaatagagtggaaatcatagggatatccctgngaagccagagtcgtccgcgatgaagaatcatattattggcaatgctgaaatcagggtggtgtgtgggattctcagtgatngatgtgccgtgctggacatatcctgtatga

SEQ ID NO: 48366 - DNA, 217 bp, Glycine max
  unsure (1)..(217): unsure at all n locations
atgaggatggngtaaactcggaacaaactctcatctcaaacaagtctatatcatcaatctaaactcgctcaaaaccggttttacgaccgaaactctaccgaatcataatttgactccctcaacacccaatttaccctagagatggctcttggtttcaactttggcactcatattcctcattngcacagnctaagctttctcataagtcctaaatgac

SEQ ID NO: 48367 - DNA, 423 bp, Glycine max
  unsure (1)..(423): unsure at all n locations
acgatgaagaatntcacagaaccgcttacggaagcgttacggaagtccttcgacttgattnttcttcacgaaaacgtgtttntgcccaaaatagccgaaatgcatagccaaaggggtcttgaacatctngaaacagctncccnctcctctacttatagaannaaaaaggaggtgctcgccgcccaaagacttaatgaagaagattctaagcgcacccaatactaagtcacccnctttcgttttacggaaagtacgaacctacgactgttcattgattatctttttttcttacatgtaaggaatctaccagtttgaattacgagatacgagccggacccgaacatttaaacggagactgcgctatgtctctacaccactcaatgttgaggctaatgatgcatacccattgaagtaccctacttt

SEQ ID NO: 48368 - DNA, 303 bp, Glycine max
  unsure (1)..(303): unsure at all n locations
cttacgccgagctgcactgatgtcccatatggatttggagttatttgaatattctgtttatggtagcgctgtcttagaccattccattggattaaggatgaaatctgcgcattnttaggtgaaaaagaggctaagtttttaattgcaaaaagtagatgctgggcttagcgcttatccaccgctcagcgcagnttcaccgtgcttagcgcanaggagaatctggcatagcatcagcatcatagccatgcgctaagtgcgagatcagtgtgctaagcgcaacaagtgcctttagccaggctaagc

SEQ ID NO: 48369 - DNA, 248 bp, Glycine max
  unsure (1)..(248): unsure at all n locations
cgcactcctctgcgatgctaatcagtaagtgtactgagtcgcacaggtaatatataacggtaagaaccgagtatcgaatcacatggaacttgtttcatccagaanatatgcgttcaatgagcanaaatntatgtaaagcaagtaaatgataaaaggcgtttttgtctataattctaattaactacaaattanaatatctaagagtgagaagtanaaacagtcaagtaaaaactttgngttattctact

SEQ ID NO: 48370 - DNA, 293 bp, Glycine max
  unsure (1)..(293): unsure at all n locations
tggcagtggtcctagatgcanganagaatntctccaagaacaccctcttaaggtcantcccagctgaaatagatctgggtgcaaggtagtatagccaatcttttgccactcccttcagagaatgangaanagcctttagaaagatatgatcttcttggacatctggnggcttcatggtggaacaaacaatatggaactccttaagatgcttatgaggattctcacctgcaagaccatganactngngtagcatatgtattagtccagtcttgagaacatatggaataccctca

SEQ ID NO: 48371 - DNA, 254 bp, Glycine max
  unsure (1)..(254): unsure at all n locations
gacagntgtctcacattgaaggaaaagacaacatgtcatgcttctgatggagaggaatgaaccatagtacagatattgccatgtgtttcttgttcatagtgaaagtgacctttangagaantatttgtgaanaccttatgtactattatatantttccttttcttacatntacatgttagcaattaanaatagaggaaaattgaatntgtatataatagaacattngcacttccctttntcatcattcttagtc

SEQ ID NO: 48372 - DNA, 446 bp, Glycine max
  unsure (1)..(446): unsure at all n locations
agcttctanacttatacaagaatgaagctctgataccacttgctagacatgtggccttagatatcttaagaaagggggatngaattaagatattccaaactacttgcccaagtaaaaatctatctcactttntatnntaagttataatttccttaacaatgaacttcttaaatattgattcanataaaacaatctgaatatgaaataagcataataataaggagttaaggaagaaaaggcaactcaattatctggtcggcacaccttggcctacatcatccaacaaccgttgagagtcatacttgaattctttacagtctacacaaagacatcttcttgtttagatatttacacagaacctcgtcttaatctaagaataaaaaaaaatgattcttgaaaataattacaatgacactaataatctatgatgcattgatgcangatct

SEQ ID NO: 48373 - DNA, 239 bp, Glycine max
  unsure (1)..(239): unsure at all n locations
gtcaagaacacttcatgttaacatagatgatgacttcaagaatcaacgaatgagctcaagaatgaatcaagaacacttcaaggttcataaggaaattcgatttcaagaatcaagtttcaagaatcaagttccaagaatcaagattcaagactcaagattcaagaatcaagagaagactcaatcaagataagtattaaaaaggttttttcanaaactgagtagcaccatgaattttctca

SEQ ID NO: 48374 - DNA, 291 bp, Glycine max
  unsure (1)..(291): unsure at all n locations
agtcacctgcngctgcagcttgtcgatgaaaaaggtcttcttccccttgtatatcttgaattctctctcaaactcgaaggtccacttggaactacagagcatcacacctatcaccgacatagggtttcagaccatctgacctgtcactaatctttgggagatgagacgaagcttcgtcaccttgtatacgcacttctacatcattggcggagcaccctttttacccatgagccatttgctctcttggtnaccagatgagtgcaatcacagcggcaccgattaatcatgatc

SEQ ID NO: 48375 - DNA, 245 bp, Glycine max
  unsure (1)..(245): unsure at all n locations
cgcggttgtaaataagttgagntcgctaatatcaaattttaaacaatcgatgntgtgtgtcgatattaacatcgcattttaaaaaaccaatggtgtcttatcaattagtaacatcagtttgttgttntccagtagcatcactactagaanacaagcttttaacatttgcattctaacattgattctatagaaatcaatgtaaaacataacatggntgtaaataacgtgattttataaaaatcgat

SEQ ID NO: 48376 - DNA, 201 bp, Glycine max
ttcattgagtcaagcagtagcatatgctagattgcaagaagaatagtagaatgacgcacgaaggacatttcgaccttcgtcagttgtaggagcttcttcaagctctcgacatccgctattacccattccatccaccaattcaccactggtaccaacacctgcacgatacaacgtcttcagcgttccattcaagagactcac

SEQ ID NO: 48377 - DNA, 344 bp, Glycine max
  unsure (1)..(344): unsure at all n locations
gtgaacctctggatattctgggatgtgtggctggacctatggagagatgaatggataaagaggtaagactctaaatggtggacactctgagaataatctcatctagatacagtatctccaccatcatgggagaggagtataaaatagggtagagccttatctaacctacaatnagagctcttggagagagataatactgggaagcttatctcagctgagtaccttctgaagagagaaatagtgggagctctatctaactgacgacacgtaagagcaccaaacaagatccccccccccccccccctttaatacaaattatcctaaagctgcacgtagaactacat

SEQ ID NO: 48378 - DNA, 230 bp, Glycine max
  unsure (1)..(230): unsure at all n locations
gctcgcgactgggccctntcttnccttcgcaactggagttcactattgctaccccatagagnctccgcgaaattggtccggccatattcttccttgcgagccctcttggtctctcgttcaagggctcttgcggtgatggcattctcttcccgtaacccggcacactccttccgaacgtgtgtagcagccaactngaacttctccttggcgagttntgcctttcctaactc

SEQ ID NO: 48379 - DNA, 278 bp, Glycine max
  unsure (1)..(278): unsure at all n locations
gctagtcaatttgtcagatggattatgaaggaatgcattaatcttatcccgataagagtgtgatccttannatttgagagaaacgactatcatctagtactaattnttgcatgaatctttgaagtatggactgaatgcatgaaattgaggatgatgaaggccatgnttgattgtgatagccacttagccaaaaagctgaccctgtgcttgaatgatatcccttgcacccagattgagctgaatgaattatttgattgattgaaccccgagcctataca

SEQ ID NO: 48380 - DNA, 252 bp, Glycine max
  unsure (1)..(252): unsure at all n locations
gtgttcttcacctntcctctngaatctngaagtgttgttcttgattctatcttgaacatcttgaactcattctntgattgaccttngagcnnttttgtcatcaccttgtcatcatctntgttatcatcaaaacatctctgaatcaatcttgattcatcatgaagctntgcttctacatccattgttgctcanaatcatctgcacattctaaatggtataaccaataaaactcagattngaaatcattgtatc

SEQ ID NO: 48381 - DNA, 243 bp, Glycine max
  unsure (1)..(243): unsure at all n locations
aattacataattagtgataaacacggtgctataatctnttcatcatgatgatntttaatcttcgatatatttttttcaatgtttatgctnttcattattattcagtctatcctatttgtcttcttttaatatcttccttgataatcttccatcctttataatttattctcttttattgttatatctaaatagacatttaataattggtctaacagaaatattcttatattataacttacaatt

SEQ ID NO: 48382 - DNA, 264 bp, Glycine max
  unsure (1)..(264): unsure at all n locations
gcactttcacaattcatggccaattctactagtaatnntacaatttcctccttggttgtgcatgcagagaanatacatgatgttgtcgatgatgatatcacgcccaagacagccaggaaatgacattgatgnttatctaagtccgttgattgaaggcctgagaaagctgtgggacgaggnggttntagtggttgtatgggttcagaatgagactcttctaatgcatgcaatgctnttttgtacaattaatgactttcagcatat

SEQ ID NO: 48383 - DNA, 223 bp, Glycine max
  unsure (1)..(223): unsure at all n locations
ggagagaagttgaactttgagttgtgtctcacaagactctcattcatcanagttaccacaagtgttacacatgcttctatntatagactatgtagcttccttgagaatctttcttaagaaaacttccttgagaagcttctttgagaaaacttccttgagaagctagagcttagctacacacacccatctaanaactaagctcaccttcttgagaagctagagc

SEQ ID NO: 48384 - DNA, 285 bp, Glycine max
  unsure (1)..(285): unsure at all n locations
gttgttcttttatcaagtccatgcanaaaccatctgaattcatttggttttgngaaagtaaaanatcattttgttgtgttctgatccanaaataagtttcgaanataatggttggtgattctttccaaatcatgttatgttcaataaaatttcctggttaagtcccaaaagagttataatctataactatactaacagaatatcanagcacgcataaattagtcaaaataaacttgcgtaagnttttcaaaaaattcacaacaatanataatgtaataaagtact

SEQ ID NO: 48385 - DNA, 218 bp, Glycine max
  unsure (1)..(218): unsure at all n locations
gcagatccctcatgtaagactagactcagcttaagtagcttactanagtttaggtctaattagcctaagcttcgtccgcagatccctcatgtaagactaggcctatactaaatagcattattgtaacaacataactaaaaccaaaatttaacccgtagatccctcatgtaaggctaaagttcaatcctgcttcanacaagttctaaggcaacaatacg

SEQ ID NO: 48386 - DNA, 496 bp, Glycine max
  unsure (1)..(496): unsure at all n locations
catattatacacaagggtatatnntttanaataaagggcatgcagaagcttattgcataacctcatatatttacacnatggtatattgtaatagacacatgttaatatcangaagatagccatcattggaactaaggatttgatntgtattaagattgacccnctttntactctaatatattactatatatagtactcttggatagtacacatgtgcatacctctgagacgcacaacattaagttatagttcttctctatagaaacaatagagaagcactatagcatccagtatctggaaatactagtccacatgtaaaagtaccaacgaaagtacaagtggtagcatattacagatcattgagtagagttggtggtcctcaattaatcaggcangtgtttctcattactttccagggtgagcatgcttcaggactcatacatactttnggcacccagtgcaatagtagtgatagagtgatgtctcacatgctgtc

SEQ ID NO: 48387 - DNA, 249 bp, Glycine max
  unsure (1)..(249): unsure at all n locations
gacagcaggaacatctcacactngtagcaccacgtgtgtacattagcaatgtcgtacagcctccacaataaagttgtgacatgtccattcctgcacgggcaacatgagattaaaggttccnccagatgtaaccatntagttaaagtccaatacatgttaatgaatacttaatcaagctgaatgcatagtttcttatcagtttatctctgtctccagctctctccacacacacacacacagagtatcttt

SEQ ID NO: 48388 - DNA, 472 bp, Glycine max
  unsure (1)..(472): unsure at all n locations
atcatcttagacttatattntaatattagtactttgattctcagccttgtattttggctatattaagtatggatatgaacattntactatttccttatttgcatagtatgtttagaccaatattaagtatgttatttggctatgtgaagnttataatttatctatgcatggntgttcgcttcatgaatctcatggtcttggttcttgcttcatgaatcggntcgatatttttatgacaattggttggatgtttaaaaataaattgttgatacgcacttttgcttnttgttgatgccaaaggggagagcaatgggataaactcagaatcacatgagaatcaactattaaagttaactaattcaaaacacagggagattatgatgacacttgaaagtggtgatgttctgattcacagtgcatatataaagggaatgataacaagctctgtgatgtatcaagtgtttatatacat

SEQ ID NO: 48389 - DNA, 252 bp, Glycine max
  unsure (1)..(252): unsure at all n locations
agagggagagaagtggaactctgaagtatgtctcacaagactctcattcatcacagntgcaacaagtgttacacatgcttctatttatagactaggtagcttccttgagaagctttcttgagaaaacttccttgagaagcttctttgagaaaacttccttgagaagctagagcttagctacacacacccctctcataactaagctcaccttccttgagaagcttcttaagaagattcctaaagaagctagag

SEQ ID NO: 48390 - DNA, 312 bp, Glycine max
  unsure (1)..(312): unsure at all n locations
gtaaactctntattacccttatatcatgcttcatccataactcatctcatttctcgcattngataccttgaccattnntttagcatttttggttctaaccttgccttaatactctcattccatcaccatgatttcttatatcttagccaanagccccaagactgctctagcaaccttcctaatcttctaagacatctcatcacagataagggtagcattaacttgtaatttccaattaccttccttcaataatntcatcttacaactcagatgatctcccttgantccctgaaatgaacttgctggttttct

SEQ ID NO: 48391 - DNA, 249 bp, Glycine max
  unsure (1)..(249): unsure at all n locations
gtgactcgtaagaatgagaagtttggttggaatgagaagtgtgagcacagtttccaagagttgaagaggcggttgacgacagctccagtgttaattntgcccgaccctaagagaacatttgaagtgtattgcgatgcaagcgggcaaggcttgtggtgtgtgttgatgcaagagggaagagtagtggcgtatgcttcacatcaattacgtcctcatngaagtaactatccgactcatgacttggaacta

SEQ ID NO: 48392 - DNA, 380 bp, Glycine max
  unsure (1)..(380): unsure at all n locations
gctgcgcttttctgaaatcttcctggtaggttgctcggtatgtgggttggattgatggcagacgggctttgtggtgattaacgtggctttgggatgatgcgcgttctggtataggggggggtccaactgcctttacggagacatctatgtcaggtacgtcttcaagaagaaacgccggagcgccccacgttattgagaaacctaaaaacaagcggctacaattaaaaaaagatcgggtgttactgcgngaagtataccacccatgttctataccaagaacgaagccttattaatgcgcaaacatactcaattattattttccttttcatcttttactttgggcaaaagcggtctgtctagtctcatgcagagataactcg

SEQ ID NO: 48393 - DNA, 249 bp, Glycine max
  unsure (1)..(249): unsure at all n locations
gagccatcatgctctttgcggtaaccaaaagaagcaatcacagcagcaccaattaaaaaggatctcttgattggaacgtaagggtcagaatcaagaggaatntgannaatggcggaaaagagagtgacaagctgtggatatggtagtggagcatttaatcacaatgccttatgcatgcgatatctgactaagtgtgcccagtcaagttgatgccctgtatganaggcccacatgataattagatctttc

SEQ ID NO: 48394 - DNA, 226 bp, Glycine max
  unsure (1)..(226): unsure at all n locations
agagggagagaagtggaactttgaagtgtgtctcataagactctcattcattaaagttacaacaagtgttacacatggctttatatatagactangtagcttccttgagaagctntcttaagaaaacttccttgagaagcttctttgagaaaacttccttgagaagctagagcttatctacacacacccatctaataactaagctcaccttcttaagaagagaagc

SEQ ID NO: 48395 - DNA, 290 bp, Glycine max
  unsure (1)..(290): unsure at all n locations
atcttcttctgatagcaatatctctaagggctaccgtgtctacaactggcanactaaganactcgtcattagtcgagatggtgaagtngatgagtacgcttcttggaattgggatgaagaanaagtggagaagaacgttcttatacccgctcaactacctcaagaganagctgaggaagaagacccaggtgaaccaccttcacctncaccacaacaacaagatcaagaactatcatcaccagagtctactccaagacgagtaagatctttggtggacatatatgaaacct

SEQ ID NO: 48396 - DNA, 444 bp, Glycine max
  unsure (1)..(444): unsure at all n locations
cttctgttcaagatgtatgcagcagtgttcacagcttctccccacanatatttttggagtttcttgctctttaacatgctcctcaccatgtttaacaaagntctattcttcctctcagctactccattatgttgaggagtgtatggaggtgttacttcatgtgtgatgccttctttctcacanaattcagcacactcagcagatacatattcacccgcaccatccgttcttaatatctctaaaatttctccacactgtntctccactganactttgaatntcttgaatacttcaatcacattactcttcctcttaatcaggtatatccaaaggtntctactanactcatctatatatgtaacaaagtattcgtcacctccacgagtcatatgttgaatggtccacatacatcagaaaaaacaacttgcagctcctcttggatct

SEQ ID NO: 48397 - DNA, 412 bp, Glycine max
  unsure (1)..(412): unsure at all n locations
ctcatctatgattgctggagaatccacaaatggccaggaaaagaaaagttattcgtggtgcacttattataataaggcatgacatacgcaggagaattgctggagatacgtgatnacctaccaatcgagaatangacaaaaggaggacatctgaggagatcttgaaaatgacaagttatgggtgaaagatgaaaaaggacacttttactatggaattatacctatcagaaaataaagaatgaacttttagcactgaaaacatagacttgcatgactatcggtgctctttattgattatgctaaaacacttgccttggttaattgagccaactataactcataatatctcttatatcgacgtctacatagaaaacactgtattatctgatatatgatagaaatcaaaatctat

SEQ ID NO: 48398 - DNA, 60 bp, Glycine max
caaatataatgattatgccatgactatctgtctgatttgtctcctaaaagtgcaattatg

SEQ ID NO: 48399 - DNA, 263 bp, Glycine max
  unsure (1)..(263): unsure at all n locations
acatgatgttgaagagctntgtgtagctcatgttatgcataatgacactcgtanagctgttntagttaaccacagntagttgtaacagacttcagacacttacatctaacttctaaagttctggaatgtgttgtacagactccagacacttacaaatctgacaaatgtctctgtagctatatgtggaacttatgtagtcagataccttatgaatcagntcagaaatacagaatcaanaattaagtaactntccaaattctctc

SEQ ID NO: 48400 - DNA, 252 bp, Glycine max
  unsure (1)..(252): unsure at all n locations
aatgcagtttgatgttanngttaatgcgcttctgtgttccatactcaaccttgatgccatggacatgaacgaagaacaacatctatatgttcttggtgactggatgtangcttgggtcgttgtcaaccaaataaaacttgagttgtttcttcttcatacgctcttactttctgtgtgcactttattccgctttactttgctaagtattattatgtctttacttctcataactagcagaagcctatttaatct

SEQ ID NO: 48401 - DNA, 240 bp, Glycine max
  unsure (1)..(240): unsure at all n locations
acaacagcgctggggcggcaacggacaatggtctntcanataaacctgttgtacatgaacaaacattatatcatgcgctgaccgtgccaaacgaaccagcgaagtcattgcataattgttacactaactatattcaatgtacctgaacanaatgatttccaaacacgtgaccgacacatatgatgcggtggccagaagagtcatgtggtggttgacttctaagagggaaaaatgtcatgc

SEQ ID NO: 48402 - DNA, 328 bp, Glycine max
  unsure (1)..(328): unsure at all n locations
agagagttanatatggcttcccaactggntggctccatttaattgatcagctaaagcgatgatgagagaagtttcttacttncagttttgaagcagagggtcggtctttcctggttgaggagtgtctccactccagtcaagtagcttgagttatcttttccgtcaagggcttgatctcattcaatgtaatttcttccattaacaattattagagtataagctggtaactacaaaccaatgacagagcattgaccacagatgatgatatgttgcttcaacgcctctacacattgcggaagatatggtgggctaacataggattacatga

SEQ ID NO: 48403 - DNA, 203 bp, Glycine max
  unsure (1)..(203): unsure at all n locations
gagcatctctagatagttaacctggtttcacattaataaccaccacatggccaaagaaatgtggctaagatgagaatctataatagtgaanacatnttgattcctggtttaagactaataggcttatccaattactaattaccatgataaatcttgtgtcttcagggtctagttcttccatgaccaaagtcgcatattcctct

SEQ ID NO: 48404 - DNA, 240 bp, Glycine max
  unsure (1)..(240): unsure at all n locations
gctgacctatctacatggatgtaacaatgcattcttgaatgggaccatctaagaagacatntacattgctcaaccatatatnggtntgtgcatcctaatcacangcccaaccatgttgcaacttgaataaagccctttacttacaatgcttttatatcatttctcttggcttatggnttcaccaatgtcaaatctgacacttcacttttntatttataanaatgatcatgttatggctat

SEQ ID NO: 48405 - DNA, 269 bp, Glycine max
  unsure (1)..(269): unsure at all n locations
ctgttaggggtcaacataccttcattatgtatatgagtagtgggtggccttcccgatntcatttgngaaaggcacacgttgtaattgcatgcatgtaaggagttcaaaagtgctcgaaatgtccgcaatcacacagccattcattcaattggacatgtcatacctttatctntcttagaatgtgagtttttggctaactcaaccncanaagctagctcaaggggtgagggtttccnctcacttatatattctaacttggctctatctct

SEQ ID NO: 48406 - DNA, 244 bp, Glycine max
  unsure (1)..(244): unsure at all n locations
gatgttgtgatgtttgtatgctgannatgctntggaanactgatagaggtgaagggtagagttaacctanggttagaaagtgagaatgtgatgttatgagtggaaaaagagtgaggctttgagaagtggaaggttaagtctgaattctgtggtaaatggagggtaaagtgagttaatcctagctcganatgtcatttangacttatgaganagcttggactgtgctagagaaaaaaacaaatga

SEQ ID NO: 48407 - DNA, 212 bp, Glycine max
  unsure (1)..(212): unsure at all n locations
attatagggtgaaccaagctcatngctttacaaaaaggttcatcaagtcaagttgaaatatggaagtaaccgtcttgcannaatggngcanaagatgaatcgagtcacatcactgcttcgtctactgccaaagatatttaggattggttatgtcctttgtacttncagtttcaccttgacanagatgtcatggaccatgttgaanatctaaa

SEQ ID NO: 48408 - DNA, 283 bp, Glycine max
  unsure (1)..(283): unsure at all n locations
agtgattagaatacacttttctatcagacaaaaanggacgcgaaagcctggagtggctcagtgacacaaaatatctgggtcttaatctcaaggggagattaaaggtagtgccaagagtgacctanagagtacttgttgtccatcatagatttgttagtggaacctcttcatgttttgaaggagaactagacgtagcccaagagttagggtgaaccagtatantacctatgttctcttactacttctatataactagttcttctcatagttgacttctacatta

SEQ ID NO: 48409 - DNA, 210 bp, Glycine max
  unsure (1)..(210): unsure at all n locations
acacaccagaagattatgatgatggatggctcanattctcacaaaggtaaacgtatcactttcaaatcgagctttcataactatcatgacatgtataggaanaacaaggatgtcatatcacacaatgtcaagagacttttattntcataacaattacccattacttgaacatatgctataattcagagacaaacatganaagttaacaca

SEQ ID NO: 48410 - DNA, 279 bp, Glycine max
  unsure (1)..(279): unsure at all n locations
tacgcagagatgacaatntagagagtgatccaatactttgaaatggatttccactgaatctattaatagacagatagagatatcttaatgatgaaagtttcaaaatgatcttggaagagcaccaccaattaaggtggttggaaaatctagcatgttaatagttttaaaagccccaaattgatctgtcagattgcctgannagtgtgaactccgaactgcaagtgttgtgagtccatggganatacaaggagcangaatttctataagttgataacctgg

SEQ ID NO: 48411 - DNA, 242 bp, Glycine max
  unsure (1)..(242): unsure at all n locations
ttgactcaccttgacctctcttatactccattcatggggaagaatccatctcagaatgggaatctctncaatctggtctatcttgacctcggaggtagttattatgatctgttagctgataatgtagaatgggtatcaagtatgtggaagcttgaatatcttgattcgagttatgcaaacctatccaaagcatttcattggctacacactctccaatctctatcttctttgacccacctata

SEQ ID NO: 48412 - DNA, 262 bp, Glycine max
  unsure (1)..(262): unsure at all n locations
tacgcagagatgacaatntagagagtgatccaatactttgagatggatctctcactgaattattaatagacagatagagatatcttaatgatgaaagttctcaaaatgatcttggaagagcactcaccaattaagtgttggataaatctagcatgtcaatagttntaanagccccaatctgatctgtcagattgcctgaaagttgtgaactccgaactgcaagtggtgtgagtccatgggaaatacaacgagcaagaatttc

SEQ ID NO: 48413 - DNA, 245 bp, Glycine max
actcacctgacctctcttatactccattcatggggaagattccatctcagaatgggaatctctccaatttggtctatcttgacctcggaggtagttattatgatctgttagctgaaaatgtagaatgggtatcaagtatgtggaagctcgaatatctcgatttgagttatgcaaacctatccaaagcatttcattggctacacactctccaatctcttccttctttgacccacctatatttgtca

SEQ ID NO: 48414 - DNA, 251 bp, Glycine max
  unsure (1)..(251): unsure at all n locations
agagtaacgtaatctatacaggtctaagactaattagtcttcattgctcattctctgtcttcacagatatatgcacanagntnttagattagcttgtcaatatcaggttcgtactgtagtgatggatcttacgacctgtattgcatgcactacataatatangagaagatcaaatgtaatgcgaatataaagaatatatagaacacaatatataaagaatataatattataaacacaactatttggttaac

SEQ ID NO: 48415 - DNA, 292 bp, Glycine max
  unsure (1)..(292): unsure at all n locations
tctgttatattattnaattctggacactctattccaataccctactctctncctatngcattnngtgatggcctgcttactttgatgaattttaattgaattaatttgngattttctctctctagaattataatcttccctatntacgtatgaccattattntgttaaaacgatggaaataattctatntacatccttattaagactagataagttctcagtaactattangtgtgtaagtaaagggaagagagaggaagccttggttcgagggatcaagattctacatatg

SEQ ID NO: 48416 - DNA, 201 bp, Glycine max
  unsure (1)..(201): unsure at all n locations
tctgatggcagtggtcctaaattcanggaagaatntctncaagaacaccctcttaaggtcatcctatgctgaaatagacctgggagcaaggtagtatagccattctttcgccactccagagaatgaggagaagcctttataaagatatgatcgtcttggacatcccggggcttcatggtgtacaaacaatatggaacttct

SEQ ID NO: 48417 - DNA, 217 bp, Glycine max
  unsure (1)..(217): unsure at all n locations
acagcaacacgaattatttccacacatngattaatcacagcaggagaagaaataacttgagagggttgacaattgacaactcttgtgtggaagatcctaacctcattaaggctganatccttcagcattntcagagaagattcatgaatcccagctgcatagacctaacttggatggagtctctctcaatgttntaacccatactcagagggataca

SEQ ID NO: 48418 - DNA, 490 bp, Glycine max
  unsure (1)..(490): unsure at all n locations
cgttatgcgagacggagaccatcatgttagctatcatcttcaagtaccaagaagagttaggtctagccacggcccacgagcatagaatcgcggatgagtatgcccaagtatacgcggaanaagaggctagaggaagggtgatcgactctntacaccaagaggcaaccatgtggatggatcggtttgctcttacctngaacgggagtcaagaacttccccgattgttagccaaggccaaggcgatggcagacacctactccgcccccgaagagattcatgggcttctcggctattggcagcatatgatagacttaatggcccacataaattagaatatcgtagggaaactttgatggtctctcagaccttgactagatacgaacttctttttgaaataaatgagtcgtcccatgttctactccaaaagcttgtcaaatcaagcactcccgatttatctctacatgattgatgttgtctcgtctttgcacgg

SEQ ID NO: 48419 - DNA, 202 bp, Glycine max
  unsure (1)..(202): unsure at all n locations
gctcanagatcaatcaaagaacaactcatgtgaatcaagaacaattcaagagttcaagaaaagaatcaagaagaattcaagactcaagaagaaagcctagaatcaagaatcaagattcaaggttcaagatctcaagaatcaagatcaagattcaagactcaagattcaagaatgaagagaagacttaatcaagataagtatt

SEQ ID NO: 48420 - DNA, 215 bp, Glycine max
  unsure (1)..(215): unsure at all n locations
tcttctggagggcccaagtangcctggtggctatttgcaccccaatttntactaaataccacccctggccttttttggtgattctntnttcgtanagttacggaaacttacgaatntcgtaacgatacttggtttctttccgtaatggtacggaaccttgcggattacataatcatcccttttttgacttacggaatgttacggaacctcactaa

SEQ ID NO: 48421 - DNA, 334 bp, Glycine max
  unsure (1)..(334): unsure at all n locations
agcttctatggaggctgaatctttgagcttcaatgaggtccttcaatggtgattntccaccatggagatgcagcggaaggcaaagaagaagaggagatgggagacaccatccactatggaataagccatggaagaaggagcttcaccaccaagaatgttccttagataagaagcttgaagaggataatttaatggaggaaaagaaagagagaaggggggagcacgaaattgaaggaataaaagagggagaaaagtggaactttgaagtgtgtctcataagactttcattcatcaaagttacaacaagtgttatacatgcttctatttatagact

SEQ ID NO: 48422 - DNA, 288 bp, Glycine max
taagtcacctgcggcatgcaagcttctaaggaggtgagcttagttttatatgggtgtgtgtagctaagctctagcttctcaaggaagttttctttagaaagcttctcaaggaagctacctagtctataaatagaagtatgtgtaacacttggtttaactttgatgaatgaaagtcttatgagatacacttcaaagttccacttctctccctcttttattccttcaatttcgtgctccccccttctctctttcttttcctccattaaagcatcctcttcaagcttctta

SEQ ID NO: 48423 - DNA, 342 bp, Glycine max
  unsure (1)..(342): unsure at all n locations
gggagcacgaaattgaacgaagaataagggagagaagttgaactttgagttgtgtctgacaagactctcattcatcgaagttaccacaagtgttacacatgcttctatttatagactaagtagcttccttgagaatctttcttaagaaaacttccttgagaagctcctttgagaaaacttccttgagaagctagagcttagctacacacacccatctaanaactaagctcaccttcttgagaagctagagcttagctacacacacccctctaataactaagctcacctccttgagaagagaagctagagcttagctacacacccctataatagctaagctca

SEQ ID NO: 48424 - DNA, 451 bp, Glycine max
  unsure (1)..(451): unsure at all n locations
agctngcactagccagtgatggaatgaatccatatgtgaatttaagcacttaacacaattcatggccaattctactagtaatttacaattttcctccttggttgtgcatgcagtgaaaatacatgatgttgtcgatgatgatatcaggcccaagacagccaggaaatgacattgatgtttatctaagtccgttgattgaaggcctgagaaagctgtgggacgagggggttttagtgtttgatgggtttcanaatgagacttttctaatgcatgcaatgcttttttgtacaattaatgactttccagcatatatgaatttgagcagttacagtgttaagggtcatcatgcatgccccatctgtgaagaagacacaagctacatacaactganacatggtagaaaaacagtctacactaggcatcgacattttctaaaacctcatcaccctta

SEQ ID NO: 48425 - DNA, 407 bp, Glycine max
  unsure (1)..(407): unsure at all n locations
ggaccttcaaactcagcttgagccaaatcctgactcaccataaaccttgaccctgngtgagaatgtcaatccttaccctcggaagcaaaaaaaaaaagaagaaaaggaaaatttccaatcaaaggaaaaaatagaggaaaggaaattcccaatcaaagagtgggagaaagcaaaaagaaaagaaagaaaattcccaatcaaagaatgggagaaagaaaaaaagagaaaaggagaagaaggaaagaaagctcctgatcaaggatcgaaagaaaacagaagaaatgtgcagagaggtctttggaccagacaatatctgaacaatacggaattgtcaccaaatgaacaaaagaaagaaaaggataccataacctanaagtggtcttcttaccaaccaaaatcctgtgcgt

SEQ ID NO: 48426 - DNA, 317 bp, Glycine max
  unsure (1)..(317): unsure at all n locations
gccagccgctgcctacctatgccacttgtctaatgtgaaaaaataattgggattaattcatccctttcgcaactggtaaatgtatgttatgagtcatgaccagaatctaatcaacatccctctcagagtttaatggtcgtctttttcaaaagagggtttctttctctcttttcctttttttggggattcgcgaattttttggtattggatttttatggttacctattggtatgaattaccaaattcgtaactaatggtatgatgggtcctatatatctcgatttcgntgtgtatctagtctaaatatataatggaat

SEQ ID NO: 48427 - DNA, 453 bp, Glycine max
agcttctacattaatattacatgtttctacattgtgattgaaccatagtttcccatttgagattcaatacaatgattaatatagacagtttgtattaattattgtattgaaacttgaattgtccgttttgacagtttgagaaagataattattttttacttaattctttcttataagttaagtatgttgtgttaattttgactaaatttcagtttattgcatcttgctttgttctctaagtgtgtacaggattgtggtgttgatgtcaccgctttcatgtcgtgtacttggagatcaaagtgaaatgctgccaaaatttcgtcaaatttaacataaccgtcttaacttgtttgtgtgaatcaagtaaaaatttgtcttcccgaattgatatggcacatattttatgaaaaaagatgttgcatcatattggatatctaccaatgtgatagacac

SEQ ID NO: 48428 - DNA, 410 bp, Glycine max
  unsure (1)..(410): unsure at all n locations
acatttgtaaaaaataaaagcctcggactatgttggtagaaaacaaactcggccgatatttgccaaaaaatgtacttttggccgaggttgacgaaggttatttttagaggaatgctttgaaatcttaaaatttaataaagtattcaatccctattcaaataattggattggatttaaaatccaaaaatctgaatttgaatataaaaccaatccattaaaatggactaaaagtggtttcgatatgatcaatggattatgtattggttttatantaactggtttttttttggaaaaaatataaattatattaaacccaaaatggtacaacaataaacggggcataccccgcagctagagaaaattaaaagtcttcctaatacaagaagacctatatcaagatgctaaaacaa

SEQ ID NO: 48429 - DNA, 418 bp, Glycine max
  unsure (1)..(418): unsure at all n locations
gcgctaagcacacttccaagcatttcataaacaataaagaattggcacttagcgcatcctgccgctaagcccatctcgtgaaagttcaattccagaatggatctgtggcttatctcaggacagcgcgcttagtgctgctacaatgaatatttccagagaagaagttgcgcttagcgcatcatctccactaagcccactgcttgaagtttacttctagtgaagatgttaggcttagcgcagtgatgtgcgcttagttgaactattcagtcaactagtcaggggtctaagcgcttatcgcaagaaagctcatgcttattgcgtgaagacatggcgcttatcggatggacaactganaaaattttcaaagtcttntctgtccatctcttcacatgagcttaaaaacccccttngtcactac

SEQ ID NO: 48430 - DNA, 384 bp, Glycine max
  unsure (1)..(384): unsure at all n locations
cggataaggacttactattccatgaaccaatatctaatacaaaatatcatggttctgttaatttttttttctacaaaaatattctagcactcaggtatatatggattgagaagggagttgataatcgctacaacgttgttgctttgaaggtgtctatacgtctactctattcctccattttagattcataatctcagaatcatattatgtcctcgtgaatagctgagagtgtttgatgattattagatatcagagtatacaccaaattcaaaattgacaaggatatagttatacacttactcccatccatgagatattgattcaaggaannaatcatactatatctcanagaaagggaaaaaacactaaagctgatagaatttt

SEQ ID NO: 48431 - DNA, 392 bp, Glycine max
agccttgtgttggtggctctggcgaatatttcttcattttctcattatatgatagagatgggaaaacgttttctatttatattttctggtttactttttgaaaataatttttattttcagattttaaaacttataaaatatctttacttttttacttcttattctctattttaatatgaagaaacaaaaatattaaaaatgtgtttggtttaaccaatttttgatgaaaaaactttaaaaagtaatattaagtataattatctttagtatatattaattacgtaacaaagatattaagtaatattacgtaacaaattggtatatattaattgtaaccatcacaaaaagaaaaataataagtataaactaactaatatcttaaagatttcttt

SEQ ID NO: 48432 - DNA, 468 bp, Glycine max
  unsure (1)..(468): unsure at all n locations
cgcttgacaacatagacaacaccaattttttcttgaacataaccacattgaanaaggatgacaatcaggtattagttgccttaaaatcatgtatacaggaaataatgaaaaagagtactcagtcatgtaaattgaagtagtaacttgaactaaaatagggtgctactggagttaaagaaaaaagaccaatctaacataatccagagaaccactttacacatatccaaaagaacatattagaatttagaaaaagaaatcatttcattcaaatacataaatacttaaaaacaaaagtctcaatttatttgattccccagacttgaagacagtttactaaggcaccaactgatcaattcttagaattatatcttgcttagcaactcacagtaacaaaccaaatttccccaagtgactgccctatatgtaattatgtgcccacanacaataaatacattacatttctttaaa

SEQ ID NO: 48433 - DNA, 393 bp, Glycine max
  unsure (1)..(393): unsure at all n locations
atacttagcatgaaaatctatgactaaaaacatgtagtcacgaaaatgaaatacatacatgtacagaagacacaacacaaagttttctctgtcagtctcaattgtaattttgtttcaaggtgttacaaaggaactgttagtattaaaattgtctaacacttagaaataaaatgattggcacaattttgatgaataacaaaacactaaataagaaaataacaaaacatcttgagtattcaataagagcttaatcaaatcagaattccatatcttgtcacactacaacattttatgctttatgccacaccaatgattccaatggttagaaaactcttgcaatacaataagtaacatntttataattantaattatttatatcaagccacaatttc

SEQ ID NO: 48434 - DNA, 310 bp, Glycine max
  unsure (1)..(310): unsure at all n locations
tgtgtcattaagcgatattccactnttggcgttgagctctactctcttgtattgagcgaattacctcctcgggttgcaattgcacttagcgcacaggtctcgttaagaaagttgtccaaagatgttatttgaaaaatctcaatagtaaaaaatgtaggcatgaatcaagaaagttgcagttcatgtttgaaggtgatccaacggttaacgagtctgggatcatggttntactgaaataggttaaacaaactccacataaccttattgttcacaccaagcaaccgcacacaaataagtcacacaacacctc

SEQ ID NO: 48435 - DNA, 439 bp, Glycine max
  unsure (1)..(439): unsure at all n locations
agcttcacacaatnnnattttcttatacttgagttttggatgaccaattntgaggtacttcctaactagattatttagatgatgcatgttaatgtgtgcagtcctacgatgccacaaccaagaatcatctattgtacttaccaaacaaatcaactcatgaaatgatgcatgttcaacatttaacatatatatatatatatatatatatatatatatatatatattacctattatctttcaatgtggaaaactttacatggcttcacttataagacaaataatttttgttgaattcaattttgaagcctttgtcacaaatttgactaatgcttaggaggttatgctttattccatccacatatagaacattctttatttgagtnttgtgttgatttccgatatttctcttccattatttttcatggtattatctacaaac

SEQ ID NO: 48436 - DNA, 452 bp, Glycine max
  unsure (1)..(452): unsure at all n locations
ttctccactaagttgcctaatgcctgttatgtcttctctaatggcaatggtcctagatgcacggaagaatttttccatgaacaccctattaaggtcatcccagctgaaaatagacctgngagcaaggtagtatagccaatcttttaccactcccttcagagaatgaggaaaagcctttagaaagtcatgatcttcttggacatcagggggcttcatggtggaacaaacaatatggaactccttaagatgtttatgaggatcttcacctgcaagagcatgaaacttgngctgcaaatgtattagtccagtcttgagaacatatggaacaccctcatcagaatattgaatgcacaagctctcataagtgaaatcaggtgcagccatctncctaagaatcctctcacgaagtggagggtgatccatgttctcagtataaaaattagtagtggaat

SEQ ID NO: 48437 - DNA, 466 bp, Glycine max
  unsure (1)..(466): unsure at all n locations
agcttagcccaagaggggattgtccttttttatgcaatcctatgccgcaagggcattggatagaagaccccaagtagaatgggccaaagatgcaagagaaggccctagggttcttatgagccttagggtagattttgggcccatgggctaagtacgagcccacttatctttgtaaatattaaattaaggtttcattatttttgggccttgtatttagggctccataatgtaggtagggtaccctagaaatataggatttttcagcccttgtattttaaggcacctagactagtttttgtattaggggtagttttgtaatttcacatgcactaagtggatatttgatgtgtgtggttggaaataaatntaattgaattggcagaagcccaatccaattaaattttagagagggaggtgagcatttgcttactacaccccatttgcacatcatatagtcacactttgt

SEQ ID NO: 48438 - DNA, 332 bp, Glycine max
ctctctgaatccactgtattgctaggtttatataatgtgtattcattaatggtgcattcaaatctctattgtatctattaattattcatttaataaatcataatcccttttaaacaactaatgttttgaccagtcaagcacgtttacatctttgtaatgcatatataaaaaagtatttgtttgagttgctatacatatttttgaagaattaaattaataaaatatagaatataaataattttcacaaaggtaaattaaaaattttagtttttaattataggtaatataaaactgtaattgtaataaaaaaatgcttttgaaatacatattca

SEQ ID NO: 48439 - DNA, 428 bp, Glycine max
  unsure (1)..(428): unsure at all n locations
agctggaaccaatattnttcaatctctattccttcattaactaattgattagcaatacaagcactactttttgagcaaaacaacttacagcaaaaataatacactttatctaaatcctttgaatacactagccattttttatcatatttttctccatatggcattactttttggtagtaaaatgaagaaaaatgtctattattttcatcttttggatactgcatatcattatatctaattggatcataaatattnttagaaacttcatttgatgtactattgagctccttatttgtttctaaacaatcttcttataaatnttcattatcctcttgttcttgactaggattaagactattcatattgttaagaatttctatctctagaaattntcattatcagtattntgctctaccgtattaatatta

SEQ ID NO: 48440 - DNA, 381 bp, Glycine max
  unsure (1)..(381): unsure at all n locations
caacggaagctctcgttaaaattttgttgtcataaacnttcacacagatgtccgattcggggaaataatatatcgagacgcacgaaattgaacaacggaagctctcgagaaatttgaatggtcataacatttcactcggatgttcgattcggggacataatttatcgagacgctcgaaattgaacaaccgaagctctcgacaaattagaatggtcgtaacttttcacgcgaatgttcgattcggggacataactcatctagacgctcgaaattgaacaacggaagctctcgagaaattcgaatggtcataagttttcacacggatgtccgattcggggacataatatatcaagacgctcgatattgaacaacggaagctct

SEQ ID NO: 48441 - DNA, 346 bp, Glycine max
tcaagcttgatgcaacatttggagaggttattgaaacaacgagatgatgcgctccatgagaggttggatcaaatggagaatagagatcataatgaagaagaaaggaggagaagagggaatgatagtgttcctagacaaaaccgaattgatggtattaaactcaacattcctccatttaaaggaaagaatgatccggaggcctacgttgagtgggagatgaaaatagagcatgttttctcatgcaacaactatgaggaggaccagaaggtgaagcttgccgccacggagttttccgactatgctcttgtgtggtggaacaagctacaaaaggagagagcaagaaatg

SEQ ID NO: 48442 - DNA, 440 bp, Glycine max
  unsure (1)..(440): unsure at all n locations
gctggttatcacacatatgctccagcttgagaaggagtgtgagatacttgatattatgtctattattaatgatattgtatttaatattaaaatatcctacttcctattaatcagtaattgattgatcttgtaatcaatattgattccctttaccatattataaatagcatgagatgtggtctatagcgacacaacattacacagtaaatcaaatataatttttccccataatgaccccatagttacagtgttctatgctactcatgcattgtttttgaagcaaacataaatgtaacattntacaagggctcaaatgatttcaagaaattagctctttntcaaatattttcactttagaaacttatattttcgtgaacttatgtatgatgtgatcattaaatagtttgatcttatgtagtattaatgtactatcaacatta

SEQ ID NO: 48443 - DNA, 277 bp, Glycine max
tttatcttagagaaataatggatactaacttattttattcaaaaaatttcccagtcgaatctaattgattgtgtggatgcatgtcatttgtgaagataattatatgtaggttatttcatatgtgtacaaagaaacttgtgctttatctttagggaaaatggcatcaactatcatatgcatgtgaagacaatttgcatatattgctcagttgaaagatggacacactaaagaggatagaacaaaacatattcttcctaaagtcttctacactcgatct

SEQ ID NO: 48444 - DNA, 254 bp, Glycine max
ttatctgcttagtgttcaacataccttcattatgtatatgaatagtggttggccttcccgatttcatttgggaaaggcacacgttgtaattgcatgcatgtaaggagttcaaagtgctcgaaattgtccgcaatcacacagccattcattcaatttgacatgtcatacctttatctttcttagaatgtgagtatttggcctaactcaaccccaaaagctaactcaaggggtgagggtttcccctcacttatata

SEQ ID NO: 48445 - DNA, 342 bp, Glycine max
agctggaccttatctcacatggatgttatctatgtattcttgaatgggaccatctaagaagacatttacattgctcaaccatatatggttttgtgcatcctaatcacagcccaaccatgtttgccacttgaataaagccctttacttacaatgcttttatatcatttctcttggcttatggcttcaccaatgtcaaatctgacacttcacttttttatttataaaaatgatcatgttatggctattttcttgtgtatgtagatgatttgcgacttacaggaaacaagtttctcggtgactttcaacaactagctgtttccaacaacttttcacttaaaaatc

SEQ ID NO: 48446 - DNA, 409 bp, Glycine max
  unsure (1)..(409): unsure at all n locations
atcctgtctcaccatanaccttgaccctgagtgagaatgtcaatccttaccctcggaagcaaaaaaggagagaatgaaaatttccaatcaaaggaaaaaaagagaggaaaggaaattcccaatcaaagaatgggagaaagaatgggagaaagtaaagaaagaaaagaagaaagctcctggtcaaaggaaccagaagaaatgtgcaaagaggtctttagaccggacagtatctgaacaatacagaattgtcaccaaatgaacaaaaagaaggaaaggaaaccatgacctaaaatggtcttctccctttaattgccaaccagaatcagtgcgctagcgacttgttcgcctcgcgccaaaccaaaacagaaaaggaaaaagccaacaaaaaaaatcaaaagcccaaaacaca

SEQ ID NO: 48447 - DNA, 442 bp, Glycine max
  unsure (1)..(442): unsure at all n locations
tttcataggtgataatgcgccgagtcgccacccacgtttatttgtggaaaacgtcaaaaaaaccgaagggaacttgtcatgaaaaatatttcaaaattcggagatgtatttacctttgaggaagggtttaacaccttctcacttttgtccaaaggaccacaacccttaatttggattgtgtgacatattgtacctaaacttttatttcttttntattttagaggtcgacaaaagcggggctcttgctcctacgtacccttcatcgaagaggaaataagacctacgtagttctttcaaaagggcgaatcaagcgattcttttttacttggaaggtggtccttttaaggtgttggacctttaaatgatccatttntacttggtgagaaaactgaggtatcgaaccctannatcccttttagtgattntttgcngacgagcttgg

SEQ ID NO: 48448 - DNA, 417 bp, Glycine max
  unsure (1)..(417): unsure at all n locations
tcctcggagccattcctgcgaaagcaaacatttgaattgttagtttacaagaaatataacaatcattacaaacaagggccaaacaacacttctcatggcacgagtgtcaacatgcactttataaaataatcatattggggtcgtgctattttatgacacatacgtatttgcacacataaaaattttgtgtgaagcattttacaacacctatccatgtacatatttttttgacaaaccttttcatgctacatcctatatatatacacacattttttggaaggcttcttttgttacctactcacaaatacacatattttgaaaaacacttttacgctacccatccaacactntgtaaggcacttcatgctatatatactcatattatgcaaagcattttcatgctatatatattcatac

SEQ ID NO: 48449 - DNA, 396 bp, Glycine max
atctgtagaagaacatagaccacagactcttgccacaagtgcagatttctgattcatggcaagctgaattactaagttgaccaaggcatcaaattttccctcaagctttttattttgactagatgaagatgaatctgtggccacctcatggactcctctaaggacaataacatcatttcttgcactgaattgttgggagtcggaagccatcttctcaatcaaattcctagcctcaacaggggtcatatcaccaagagctccaccattggtaccatcaatcatactcctctccatgttgctaagtccctcatagaaatatttaagaaggagttgcccagaaatatgatggtaagggcagcttgcacataatttcttgaatctttcccagtactcata

SEQ ID NO: 48450 - DNA, 457 bp, Glycine max
  unsure (1)..(457): unsure at all n locations
ttcccccacanagtcttataaaatgacttaagaacttataatccctattcgtcacaatgcttttgggcagtccatgaaggcacaccacctctctaaagaacaagtcttttaccacacaatcatcatccactttatggtaaggaatgaagtgagccatctttgagaacctatctaccacaacaaaaatagagtccttgcctctcttggaccttggaaaaccaagtacaaaatccatggatatgtcagtccaaggagatgtggggataggcaaaagggtatacaaaccatggcttatgaccttagatttagctctatgacatacaatgcatttgacaaaatatttattaacattatgtttcattntttgccaaaagaaatgatcatgcaaaatgcctaaagtcttgtaaaccctaacccatncaacctcctcatgggcttctctaatcaacaattcatg

SEQ ID NO: 48451 - DNA, 370 bp, Glycine max
  unsure (1)..(370): unsure at all n locations
ctgcagcttagtttatcattntaattaattttattaccataaccaacctattatatttaattaaataagtaaattaaaaatttaaaaattccgattattataccaaattaatatttacttaaattaatgtattattataccaaaatcagaatttaaaatatatattaaccccaaaaatatcttaaattatttaaattatataacaaaaatacttaaatttaataatatcatttttttaataacaaaattaaattataaaataatattacataaattaatttaataaataaataaatttctaattaattaaaaatattttatataatataatatttaattttaataaaatataaacttttttattaaaaaa

SEQ ID NO: 48452 - DNA, 462 bp, Glycine max
  unsure (1)..(462): unsure at all n locations
gatgttgagagtgtntgtcttanatcactatctctatttgaagtcccctctttcaaaaaaatagaacatttaaaattgagattgatgtgatagaaaaaaagtgttttgccactatagtaaacaatgaagagtggttatggcattacagagttggccatttaaattttagagatctgattcagctaaactcaagagaaatggtgttgggtttgcctcagatcaagcctcctagtgaagtatgtgatggttgtttacagtgtaagcaatcaagaaccactttcaaacaaaatgtaccaatcanggcaaaggagaaacttgaagtgatttactctgatgtgtgtggccctatgcagactgaatctcttggtggaaacaaatacttcatatcctttattgatgaattgaccaggaaagtatgggtttatctaataagaaagaagagtgatgtctttgaagtctttg

SEQ ID NO: 48453 - DNA, 413 bp, Glycine max
  unsure (1)..(413): unsure at all n locations
gcttcggaagaaagtgatgttgtacattctcctaaaggcaaagcttgaaagagcccgggtagtcaaagagaagttcaagtccatagccatcaaagtctgaagagagtatgatgaactaagggacgtcaatatggccaccgatgaagccttggaatgagaaaccaagaaggcccgaaaggaagaacacgaccaaaacaagttttgaggggctntatagggcagcaatagtgagctcaaactccgaagaggtgaaaggaatcatcacgggtcaaaggcatgatctggaaggacgagctaaaggcttgccttatgtcgaaaagaaaattgtcccaacagttaaagtgagactgaagggaatatgtggtccatcatcgatgagtgcaaagagaagctaaatctagcggcgactcacg

SEQ ID NO: 48454 - DNA, 414 bp, Glycine max
  unsure (1)..(414): unsure at all n locations
ctccgcttcagctgagctntgggaaaaggctaacctttatgatttcttcttgagacaaaagtccagaagcaaatggattaagaaggaggacagcaacacgaattatttccacaaattgattaatcacagcaggagaagaaataacttgagagggttgacaattgacaactcttgggtggaagatcctaacctcattaaggctgaaatccttcagcattttcagagaagatttcatgaatcccagctgcatagacctaacttggatggagtctctttcaatgttttaacccatactcagagggatacattggttgaaccttttaaagaagaggangtgcgatgtgctgtgtggagttgtgggaatgacaaaagcccggggccagatggcttcaatttcagaattattaaacactt

SEQ ID NO: 48455 - DNA, 361 bp, Glycine max
  unsure (1)..(361): unsure at all n locations
agctntctccactaaatngcctaatgccttaaatgtcttttctgatggcagtggtcctagattcagggaagaatttctccaagaacaccctcttaaggtcatcctaactgaaaataaacctgggagcaaagtagtatagccattcttttgccactccagagaatgaggaaaagcctttagaaagatatgatcgtcttggacatccgggggcttcatggtgtaacaaacaatatggaactccttaagattcttatgaggatcttcacctgcaagaccattgaaactgggcagcgaatgtattagtcaagtcttgagaacatatggaacaccctcatcaggatattgaatgcacaagctttca

SEQ ID NO: 48456 - DNA, 386 bp, Glycine max
  unsure (1)..(386): unsure at all n locations
agagaaattgaaaagaaattaataaatgcggatgacgaaatcaattaatgatcaaataatagcggtggtgacacattacaaaacagaataaatttattttcagtaaagagtaccattagaaataaaccttatattcgttcaaaaagaaaagaaataaacattatagtgatataaaaaataagatgaatgaaatttaaaaatttaacaacattgaaatgtgaatattttattaaaaaaataaatagtaattatatattaaagtgtttactcttaagagcggagagttttatcaatctattctcactcaatgcgtctgattnttaaaanacattttaaatactattattagaattcggtttattctanattcttcagttgataatatc

SEQ ID NO: 48457 - DNA, 349 bp, Glycine max
gcttctagtatctatgacctgttatttatattttgtgaggagacaagcttagtaactgttgcgtagttttgttttggtgttttgggcattagctcctttatatcataaaaaaaagttgatctcctaattaggaatggaaaaaaataatctgtaccttcaaatattcacgaataaagttggatagtaaataagtatctttaactagtatcaacaggtaacgtatatacgtatttttactaaccatttgttaataaggcgcaaatggacgtggtacttgtacctaccgtacctattacctgtgggatataattttatttaaatttagtgtagcgaggactatcgaaagcgt

SEQ ID NO: 48458 - DNA, 343 bp, Glycine max
cgtagaattatggggtacccatcacatgtggtactatgtggttgtcgggcgatggtgcacaacaagttttccacatccacaatgcgcgcataaacccaccatcccctgttgcccacctgcaactgagctcacgtactcccacgtagcccatatcctcgtttctctcaacaccgggtccccatcaatcctcccaagcttccacaacatccaagcaaaacaacattcacacagcacaagctatcacagccaagcaaaacaaagcaaaggcagaaaactctgcctaaacaccaaccaaaaatcacagctgttcccactcaaagaccccagtaacaattccttcgat

SEQ ID NO: 48459 - DNA, 315 bp, Glycine max
  unsure (1)..(315): unsure at all n locations
gctctcgngaaattcaaatggttataacttttcacacggatgtccgattatggcgaatcacatatcgagacgctcaaaattgaacaacggaagctcttgagaaattcaaatggtcataacttttcacaccgatgtccgattcaggcgaatcacatatcgagacgctcaaaattgaactacggaagctcttgcgaaattcaaatggtcataacttttcactcagatgtctgattcaggcgcatcacatatagaggcgctcgaaaaggaacaacggaatctctcgagaaattcaaatggtcataacttttcacactg

SEQ ID NO: 48460 - DNA, 432 bp, Glycine max
  unsure (1)..(432): unsure at all n locations
tagtaaagctaagcactaacaatatgttcaagtgcatattcagattcaatgcatgaagagtgacaggcatgcagattanaatgaagatcagtcatgtattcatcaacaatatggtcaattatttcaacacgaaatacagaaagatcttcagatgggtgtttcatagcatcaagaatattaaaatgaacagttatatcaccaaactccatagatagtgtgcatgcatatacatctatcttagttctagcagttttcataaaaggtctgcctacaatgatgggaactgatcctttagaatatccctcctccatattcaaaatataaaaatcaacaaggaaaatcagctcaccaactctaactaggacatcctctatgaaaccagcaggataagcaacacttctattagctaaatgaattatcacatcagctgac

SEQ ID NO: 48461 - DNA, 398 bp, Glycine max
  unsure (1)..(398): unsure at all n locations
agcttccgctgttcaatancatttctttttgatatatnatgcgcctgagtcggacatcggagtgaaaagttatgaccattggatatctcgagagcttctgtctttcaatttcgagcatgttggtatattatgtcccagaatcggacattcatgtgaaaagttatgacaatttgaatttctcgagagcttctgttgttcaattttatgtgtctcgatatgttatgcgtctgaatcggatatccgtgtgaaatgttatgaccatttgaatatcttgagagcttccgttctttgattccgagcgtcctagtatattatctccccaaatcgaacatccatgtgaaaagttatgagcatttgatttttagagagctgtcattttcaattcgagcgtctcgata

SEQ ID NO: 48462 - DNA, 402 bp, Glycine max
  unsure (1)..(402): unsure at all n locations
aaaactacgcttctatccaagctatcttgtggtgaagcttcacttctatggcttattccttaatggatggcgcctcctctcacctcgttttctttgtcttccgctgcatctccatggtggaaaatcaccattaaaggaccccattgaagctcaaagatccagccctcatagaagccccacaagcaagctttcatcaagtggtaatcagagcacaagagctgcaaattgccatatatggaattggaaggaggattggtgccatcccttgaagaatttgagtcaagaagcacggagccaaccaccttatgagctattggactaagaagcactccacattgngtgaatcaccaaagagagaaataccaccacaattgaggaccttgttgcaatattgtaattgac

SEQ ID NO: 48463 - DNA, 350 bp, Glycine max
  unsure (1)..(350): unsure at all n locations
gcngcattngtgttctctttacctattttggnngcattntgatttcatttttcgtattcctactcactccaacaagtaagtattcaatccttgagttntttgctttccattagtgtattttgttcatcttttggagctctaagttgtaagaatgtgctcatatttatggggcagatttggggttttttatgcttgatttgttaaagttgaggggttgtaagggatggccttatgcctatgtggtattctgaaacaatggggcatgccacattgcccgcattctcttgcaatttatgcctaaacacgcgcccaccaagtgctcggtgaaatgccccaatgacatatgaatg

SEQ ID NO: 48464 - DNA, 416 bp, Glycine max
  unsure (1)..(416): unsure at all n locations
ntaggaganaccataaaaactaatgtagttcctaaatttaaatcaattgaggaagcttcgccaagtatccccattgaaaaacctttattcaaacctttcaaagttagtgagaaggctaaacgaaaaattagggaacttagaaaaactaaatccttaactgaaggtgtaggtgacaatcatagtgaattactaaacaagattggtagtttacttaaggtcattccagatactccccaagcctcggaaaatacttccaaaatggtaacaagaagtacctccaaattaattaatgttattaatgaagatagtgaccaaaactcagataacacaactgagataggatcagtgtcagaaaagaatataaatccaattaattccaaacactggaaaacaccctccaaattatattatcaacg

SEQ ID NO: 48465 - DNA, 313 bp, Glycine max
  unsure (1)..(313): unsure at all n locations
agcttggggctggttattctatatatacttctccaagggtctagnnnatccctctcttctctcctctctctctctactctctctcctattnncggtnttttagttttaggcttttctttgagacatcttttcgttttacaatttcagtagcaataaaattgtgctcttcaatttataagtttggtctctattgattaatggaaggctaagtccccagcgttgctttctcttgaggatcaagtgcagttctctttgaggttctcttattacagttaaattatgttcagtttttcctcttcactggatactctaa

SEQ ID NO: 48466 - DNA, 465 bp, Glycine max
  unsure (1)..(465): unsure at all n locations
taaaaaacaaatactagtagcttatttttatatattttggatccccgcaaaggtcatcaaacgtacacaaacaagcgaatattaaaattaaaaccatgacgatatgtataaaaaacaaaacaaaaaaaactggatgattattatgcgcaacgatatttacagtttgtctatcatcaacagattctccattttacatgtagctgactcagagtgcgaaaaacgcttttgtcgttgttatatatatatgccatcactcactcacaaagcttaagaaaattttccgaacaagaagagaacctataatgtagtaccttgcgctggaagaatagcaactgagctntgacgatgacgagttcggacgtcgatcaacctgaagagcagaggagaaaatcaagagatgaatgtagaaagcgaatganaaaatagacgaaaaaacctaaacccttactcgacactaaaactata

SEQ ID NO: 48467 - DNA, 228 bp, Glycine max
atgattgacattaatataaaataatgagtgggtgattaatttaagccgatacatgctttctcttaactaagatttccagctgcaagctttctgtatgaaaaaaatcaccataaaaatattttcgtaatattgtgaatgttccaatatgaagaagattattttttgtacaaaattcttgcagtctaaacttaaaaataacggacaatagtgattaactaatatgtaatt

SEQ ID NO: 48468 - DNA, 472 bp, Glycine max
  unsure (1)..(472): unsure at all n locations
tacccatcgcatgtggtactatgtggcggtctttcgatggngcacaacaagttttccacatccacaatgcgtgcataaatccaccatcccctgttgcccacctccaactgagctcacgtactcccacgtagcccatatcctcgtttctctcaacaccgagtccccatcaatcctcccaagcttccacaacatccaagcaaaaccacattcaaacagcacagctatcacagccaagcaaaacagagcaaaggcataaaactctgccaaaacaccaaccaaatcacagcttttctcacttaaagaccccagtaacaattccttcgatccaattcgttaaccgttggatcgactccaaaattntactggaagtctatagtacataagcctacanntttgaccgtgggatctattagcanacattcagaactcattctgcactaactctttcacagctaaccacacacaagcattt

SEQ ID NO: 48469 - DNA, 268 bp, Glycine max
aagagattccaaggtggaaagaatatattaaaaaaaggtattggaatggcaggccagggcctgcttttatagacccttcatggctggtcaagaaaaaacattggaagaagtaccacccttgaaaaaacctggaaaccaatggaagaagtacatctcttgatttttaatcaaaacttggcactgggtatcgaataccaaaaccatggtatcaattacacaagcattttatgagaagatgtgactcttcacaatgaatttgattttcacg

SEQ ID NO: 48470 - DNA, 215 bp, Glycine max
  unsure (1)..(215): unsure at all n locations
aggaattgacactggcctgaaacacttgtgtgctgagagaacactggcttgtgagtaaagaagcttaatcaatcttccttgatgcctgtcatgcttgctaaccattntcatttccttagcacattatcacattcttctatcttgaattatgacaaatgctaattgggtggagatgatgatttgtgacatgttgcaatcatctcaggtactatgat

SEQ ID NO: 48471 - DNA, 287 bp, Glycine max
tcaaagactggaaagcggtttctaatgactcttctgcggcctccacataaggcatagaggatgggcagcttaccaagatgtcttcctcgcctgatacgatgaccaaatgcccttccactaccaatttcaatttttggtggagtgtagaaggaacaactcccaccgagtggatccaaggacgccccaacagacagctgtagggggggttaatatccattatttggaaggtaacttgacaggtgtgagggcctatctgtactgggaggtcgatctctcccctaacctct

SEQ ID NO: 48472 - DNA, 323 bp, Glycine max
  unsure (1)..(323): unsure at all n locations
tgaaatcaggtgcagccatttcccttagttctctctcacttgtggaggntgagccatgttctcaaaatgagcaaaatcagaatgctcagaatcagaatgctcaaaattataatgctcaagatcaggatgttcaaaatcaccaataatagaatgcacagattcaccagttatggaatgctcaaaatgatcaaaaggtataaaatgatgcctaactaatatgtgaaatgtcctatctatctcaagatcaaagggttgtaagtcagatggattgcctctagtcatacactacattcagcatgcacacaactagttgccttgtcata

SEQ ID NO: 48473 - DNA, 242 bp, Glycine max
atgccaaggatggcggttagaatgcaactaggatcacacactcagactcaatgttcgaaagtcttttatttcttaaaccttggtgaaacttctttggaaaaggaaacaactatgtaccaactttttcaaaggatggttatatcagttactttatttggtgtttacttatgcaccttatcatgtcttaaattctcaaatttaagataacgtgttgtatgaagtactaatggttcaaagttatg

SEQ ID NO: 48474 - DNA, 397 bp, Glycine max
cctgatcttaacatacttttctggctttcgttacctaatgtcgccaagcgcaattccttactgccataagtggggttcataaagctaagcaccagtcatggcagctaagctgaattccttgcggcaatatgagcgctaagggagaccttattagctaagcgcatgctcctctgtacttaagatgcatcattttagctaagccagccatagcctggcttagcgagagttgcagcttttcggatctgcaaacctcactaagcggttttatcctcgcgctaagccaagcctgtgttcaaaaaaaaaacttgaatttcaaagttggctaagcgcacggtacctctaagcgaccatcttcataaaaccaaacgtcactttgagaaagcaaaacatcttatgt

SEQ ID NO: 48475 - DNA, 389 bp, Glycine max
  unsure (1)..(389): unsure at all n locations
agcttgcctangcgagctatgttatatctacctcccccgntntgntaaaaaatggctttgagggcttccgtaatacttccataaaatttccaaaaaccctgagtaaggatatttctcttaagattggtgaaagggaagataaaaaagaggaaaatcaagtccgaaacgcttctgtaaaggttccgtaacttttctgtaaagtacgaaaagtaggtgaacttagtaatttgggggtgcatcaagaaacttcctgaggaagcctggctcgcctgggcgagctgggcagcaagctcttccccattntggttaattaaagggcaaatgggctgtttcaaagggattcttgaccctatgctatgcatttcagttgttnttggtgaaaaaacatg

SEQ ID NO: 48476 - DNA, 429 bp, Glycine max
  unsure (1)..(429): unsure at all n locations
agtttcttgtgatttcactttataatatatcctccaatattctgttctacttttaaagatttagtactgtacatttttgaaagaatgcattatgttttgcagatatgtggaaattgggttagagtcagggcttcctgtttcagtcaatggtaagagtctttcaccagcgtctttacttgctgagctcaatgagattggtggaaggcatggaattggccggatcgacatggttgagaatcggcttgtaggtatgaaaagccgtggagtttatgaaactcctgcgggaacaatcctgtttgctgcagcacgtgagttggagtcattgacacttgatcgtgaaacaatacaagtcatagattcattagcccttanatatgcagaggtagtgtatgctggcagaatggttgatccgcttccggagtccatgga

SEQ ID NO: 48477 - DNA, 379 bp, Glycine max
  unsure (1)..(379): unsure at all n locations
acactgcaactcgagcttttggtgatccagcacttgcaattccattgccgaagccaaatacactagctccaggaacaaagttaccacctgcgggtgataaagtatgtgaaccagctacgttcatagtcacgtacactaagctctgaggcattcagttttgtacctgcatttgcctcataacctttgtagaaatatcttgctccaataagcttcctacatatagtaaaaacgtcaatttaattcaaatatcaaagacctttaaaacttaatggaatttctcatgatgcaagttaattcaaatgcctaccgaaacatctatntataactgaagctgatactaatngaactaatattaacacgtaaagaatgattacctacc

SEQ ID NO: 48478 - DNA, 400 bp, Glycine max
acagcttctgttatgaatttcgagtgtctcgatatactacgggtcactttcggacatccgagtaaaaagttattgacatttgaatttgctcatagcattcgctggcaaataccaacgtctagatatattaaaagattcattccgacatccgagtaaaaaagcattatctttttattttgctcagagcttctgttttcaatttcgagcatctcgatatattacaggactcaatcggatatccgagtcaaaaagtattgtcgtttggatttgctacgagctttcgggttcaattacgagcgtctcaatatgctacgggacacaatcggacatccgaataaaaagtattgtcgtgtgaattactcagagctttcggcgcaattacgagcgtctcgaatattac

SEQ ID NO: 48479 - DNA, 494 bp, Glycine max
accattgaatatgatttgcagacgcgatccttaagcaccgcggctgcagctttagcattcaaaggtttaatgtttatctcgatggccgaatcaagcgcataatataatcagacgctccaaattgaataatggaagctattgagccattccaatgggcataacttttaacttcgaagtccgattgaggcacataatatatcgagacgctccaaattgaacaaccgaagctctcgaaaaaatcaaatggtcataacttttaactcggacgtccgattgagacgcataatatatcgagaccctcgaaactgaacaatggaagctcttgagcaaatcaatggtcataccttttaactcggatgtccgattcaggcgcataatattttgagacgttcaaattgaacatggaagctcttgagcaattcaatggccatactttccactcggatgtcgattcggcgcatatatatcagaccctcaaattgaacatgggagct

SEQ ID NO: 48480 - DNA, 275 bp, Glycine max
attatagatagcgtgcttattgccattgagatcattcaccatttgaaatgcaagcacaatgaaaagatgaggtaattggctcctaaaattgatattagtaaagcatacgaatgggtttactttggtttcctggaggctgtgatgagaaagttgggctttgatgacaagtgaattgtaacatcccaattttctagacttgcgaagctgagtgcagaaatagctggtgcttgttgatatgcattgtgatagtattatctatagtgaaataattcata

SEQ ID NO: 48481 - DNA, 431 bp, Glycine max
agcttggctctaagaaactatttctctttcttatttgacaataactatgtgtttgaatggaggatttaaatttttttaggaaattcaaatacataatattttgattgtcttgatttaaattcctttcattttgtaaatattttatttggatgaggtaattcaatttcttgtattttaatttccttgtttggatcagataattcaatttcaatgaaatttcaatttcaatcaaattcaaattttcattcttaaatatctattctgcttttgctttttcatgtctagtgaaaggcattgattcttctgatatgctctctttatttttatttttcttttaaaaagtgcttctgatatgatgtggatttgggtaaatggacaatttaatgaatatctcacacataatttttatctcgaaaagtctgacatcttct

SEQ ID NO: 48482 - DNA, 385 bp, Glycine max
tataagaacaaaactgcctcaatcatttccatatatctatgtgaatcacgaagcatcaacaagaatcaagccaatgctattgtgcaagcaatcaatggggcaaaacacaccaaatgattatgatgatggatggctcaaattctcacaaaggtaaactcatcactttcaaaactatcatgacatgtataggagaatcaaggatttcaagtcacaaaatgtcaagaacttttattttcaaaacaattacccatttcttgaacatatcctataattcaaagacaaacatgcatagtcgtacatgcacacaaaattgacccaaaatattaaactaagaatccgacgaaactaacaacattaacaaattaacacagctaacaaattaaca

SEQ ID NO: 48483 - DNA, 338 bp, Glycine max
  unsure (1)..(338): unsure at all n locations
agcttgttagaactattatcttatgactttntattggcacaaaataagttactntctaagcaactttagaatttaacagaaacacttggtaagttgccaactaaactgtctattggtcatcctacacagtcttctattntgcaggttacaggttgtaccacctgtggtgaggctcatgaaacagaccgatgtattcccattgaagaaaacactcaagaaattcattatatgggaaatcaacaacgacaagggtatactcaaggaggaatttcaggcttctagcagggtccttataatcaacaaggacagtggaggtcacacactggcaatcagttcaa

SEQ ID NO: 48484 - DNA, 597 bp, Glycine max
  unsure (1)..(597): unsure at all n locations
ccgcaccacccaccactgaatcgcgacganacgaatgactagaaanntaaaactcccaagcacaggnacggaagtgagacgctgtagatgcactcgatnagacacnccngngacactatagaacactcacgcttatcaaaccatgggggagagtgacagatctnatttatatgacgaaaanncaagacactgagagaggagacggacnagcccaccacgccgacgaggccaaaagaaaagccaatagaagaaacccaaggccctattgacaaacgcagaaaggccacacgaacgggcccaatagcgaacaccgaattctagaaactacaaacaaacgcagcgacggggaataccaagaagataggaccagaaacacacacgaagagaggaaagaggagagccgaaaggaagagcaccgaaaacaaacggaaagnacaagcaaaggaagacacctccatccatagccaaaagaaccagggcaaggattagcccagaggtagcgtcccgacgccaaaaatcactagacccgagagccacctaccaagcggccggcgagacatgaacgacgcacaagaaccgagaacgagagccaccccn

SEQ ID NO: 48485 - DNA, 370 bp, Glycine max
  unsure (1)..(370): unsure at all n locations
agcntaaagnaggccctagtcattcatttctatgagangttgnngaagtattggcgattagaatagccattctttggattatagggttgaaccaacctcatgcttntacaaaaaggttcatcaagtcatgttgaaatatggaagtaaccgtcttgcaaaattatggcaaaagatgaatcgagtcacatcactgcttcgtctactgccaaacatatttaggattgttgatgtccttgttactttcagtttcaccttgacaaagatatcatggaccatgttgaaaatctaaattgattcaaccccatatcctgtgtaaaaattcgcaatacttcaactgtacatcattcacgtacatccatgcttttcattg

SEQ ID NO: 48486 - DNA, 385 bp, Glycine max
gtgacacttcaaactcagcttacaaacttagaaatcaagtgatcatgtattccgatattatggggagaaatcggatgcacattttatctatatacaattgtttgttgcttgcttgaatcttgatttcaggtattgtattgtcatcatcaaaaagggggagattgtagatgcaattggctttgatgttttgatgatgatcatgatgatgtgttgcaattgatgcaaatgggcttttcaagattaaaattcaagacaatacttcaagattacaaggcacaacatcaagatgatcactataatattatgaagggaattcctaattgaattagcaaaggtttggccaagtgatttaaaataaaaagtgtttttcaaaggttttactctc

SEQ ID NO: 48487 - DNA, 443 bp, Glycine max
  unsure (1)..(443): unsure at all n locations
cttatggnttctttgagaaactttctcaagaggcttctttgagaagctagatccttatctatccacacccctctattaactaaattaacttccttaaaaataattatggatgaaaataacgccacaaataatccaacctccaatataattactaataatatatatatatatatatatatatatatatatatatatatatatatatatatatatatatatatatcagggtgttacaagaagatacatggagaaaaaatgaagacacaactctggaagagaaggtgaagcaaaaaaaaaataatggagggttaaggagcacctacttgaagctcttgtgctctgattaccacttgatggaagctcgcttgtggagcttntatggaggctggatctttgagcttcaatgagatcctgtaatggtgatcctccaccatgagatgcag

SEQ ID NO: 48488 - DNA, 487 bp, Glycine max
actcaagcttcatgatcgatgaatcaagtagtttgatgatgacaattatgcccaattttgatttcaagattgagtcaacaagttcaagatcaagattaatttcaagattcaagaaaagacatcaagatgaattcaagattcaagagaagaaatcaagaagcaacaagtcaagacttcacaagggaagtattgaaaaggatttttcaaaaaccaaacatagcacagttttgttttacaaaaagagttttctcaaatttttctaagttaccagagtatttactctctggtgatcgattaccagtttcctataatcgattaccagtgataaaatttgatttcaaacagttgttaactgaatttgaacattccaaatgaattttaaaagggtgtatcgattacaatatattggtcatttgttaccagtgtatctgaacattgaaattcaaattccattgtgaagagtcacattctgttcattaaatgcatt

SEQ ID NO: 48489 - DNA, 388 bp, Glycine max
  unsure (1)..(388): unsure at all n locations
tataaatagaatcatgtgtaacacttggggtaactttgatgaatgagaatcttgtgagacacaactcaaagttcaacttctctcccttttttcttccttcaatttcgtgctcccccctctctctttctctccctctttcttttcctccattgaagcatcctctccaagcttcttatccaaggctcatcttggtggtgaagctccttcttccatggcttattccctagtggatggcgcctcctctcacctctttntctttgtcttccgctgcatctccatggtggaaaatcaccattaaaggacctcattgaagctcanagatccagcctccaaagaagccccacaagcaagcttncatcaagtggtaatcaaagcacacaagagcttc

SEQ ID NO: 48490 - DNA, 467 bp, Glycine max
  unsure (1)..(467): unsure at all n locations
tgacacttaaaactcagctttccaagatacggaaaattgngacttagccttggtagaagtctctacatattgcctcccttgcccagtattatgatcagccgatgaggtgcttcacctttgggaacttccagctatcacccatggtagaagaatttgaagagatcctagggtgtcctctaggggggaggaaaccatacctcttcacaaggttctatccctcattagctagaatttccaagatagtccaaatcttggcgcaggaattagaccacaggaagcaagtcgaaaatggggtggttggaatgccgagacaatatttggaggcaaaagcaagaatcttggcaggtaaaggcgagtgggccccgttcatagatattctcgcacttgtgattttcggaggattcctctntccgaatgtggatgggttggtggacctgtcaccgatcgacgtttttttcgcctatcat

SEQ ID NO: 48491 - DNA, 404 bp, Glycine max
  unsure (1)..(404): unsure at all n locations
tctnntgagaaacttccttgagaagctagagcttatctacacacacttctctaataactaagctcatctccagagcttatcaaactttttcgaccagtgagttgtgagtctactttgtttttctgtgcattttgtagttgccttgttcgatgcttgatgtttgttgtttgaaattggaacttactcacttgtttggtttccatgagttatagagatttggttgttgtagtcatatcatgtttgttctcctcatgtttgctataccatgagtttcaatgttgtgtcatgagttatcagactggccatctgtattaattgtgaagtgcaatgggatgatatggcaagcgatcatgaaatacaaatgatggaaagtgagtgttaatgtctcgagagaggactagttt

SEQ ID NO: 48492 - DNA, 369 bp, Glycine max
  unsure (1)..(369): unsure at all n locations
gagtcatgatgaaactagatattattacatagctncctcttgtgaaaatacaaatccagaccacagatacattgctgaaatactattaacttcaagtctattattgagagctttgagttctgagttgctgacatttcaacatcactcatcaggtcatcccattaaccctgagttattccttgtgctggagcagaccaagttaagtagtttgcttttgaaagacaaaagcagatttggaaaagctgcttacatgaagctaaatacaaagaagtggcagaggaaactcatctttgatgctgtgaatgagattcctggtgaaaactaagctcttttcttgagccatgcttgaagcctaatgaactcgtagca

SEQ ID NO: 48493 - DNA, 439 bp, Glycine max
  unsure (1)..(439): unsure at all n locations
tgttcttggattttcctaagttctttttatgctnatatcaatatacttggccttcatttaattgtctctgggcttggcgaccatgatcaacaaagtacttttggcacctactatatgttgacttgaccaacgatgttattggaatgctgcgacaatctttcaacaccttattcacacattctgataggttggttgtcatgtgaccatatcttcgtccagatgtatcgtaagtcatgctccatttttcctttgaaatgtgatcaatccatgttgctatggctggactcaattgacgaaatttttctaagttttgatcaaacacatgtttgcaaggagtgtacgctgcatcaaatatgttaccatcaacagttgtaggtagatatgatactcanattaacttaatgtataaaatanaccttacccaatttcttgaacatct

SEQ ID NO: 48494 - DNA, 442 bp, Glycine max
  unsure (1)..(442): unsure at all n locations
agcttgatgatatgggctggtcttgatttatntatgtaacaaaggatgctcttggattcgaaaggaaccccggtgcctatgttggatgtaccctactatcacaattgcctttgagcatctttcacgagcttctgatcgaatgagtttttttctcaaatgcgcaagtgcaaaccttgagacccttttttttacaatcatatgtctatgtgtgtattccattccagaatttaaactcaagcaaaattagtccttttttgatccacatgagctttattgggcttgtaacgcggctaggggttaagagggctatcaaataaaaggtcagagaggctcaaaaagtgtttaagggttacaaagagtaagaacctngagtgccttgctcgcactggtattcatttcaactnnttggactgggatctactccatttngtctatacaatca

SEQ ID NO: 48495 - DNA, 466 bp, Glycine max
  unsure (1)..(466): unsure at all n locations
taagctcgaactaataccaaccctatnngaatcttatgtnttcttcttaatnnngccttcccattaattaatttaattaaatttgacagctcatttgagttcatgcacctaattttccattaataacgatattaaccgtaacatgaatattgttgcaccttcattaattggttttttttttccttcgtgcgattngtagttacttgagcttacttgttcatcttcactgaaccatagagtaagaaaattgaagtccactgcaagctagcaagtggttttgttgacctataaaaaaaaaaaaagacaagcaagtgcttgtaaaaaatactaagggagaatcttaacgactaatgaagacccatacaattaaacccacaaataaattacacaccccacaaaaaattcaattctaggatttaccattaagttcctgaatattcatcggttctgtaaattaaataaaata

SEQ ID NO: 48496 - DNA, 346 bp, Glycine max
  unsure (1)..(346): unsure at all n locations
tcacaatttcctcactcataattggtctgccaccacttctgtatgccattgggttggtgtcacttgtgatgcttaccatggaagggtaaggacattgaatcttggcgacatgtctcttagtggcaccatgccctctcacttgggaaaccttaccttccttaataaacttgaccttggcggaaacaaattccatggtcagttgccagaggaattagtccaattgcataggttgaagtttctcaacttgagctacaatgaatntagtggaaatgtttcagaatggattggaggattatctacactcagatatttaaaccttggaaataatgactntggtnnggttttt

SEQ ID NO: 48497 - DNA, 459 bp, Glycine max
  unsure (1)..(459): unsure at all n locations
cgtagaatggctagacatgatacatgtcaaggcttgtgtttgtttcaaggataaaaaggatgccccacattatttccatgacacaaatgcaaaaaatgatgatttggaaactttatgcaaaactggtcatgcatgcacctatgcggacactcaagtgtcaaatttttatggtcatgtgatgctagggctcaagattcatttcctctattttagtcaacccaacgtttccaaaatatgttcttttatcaatttgtgcattcatccgagtccattttgggcgtccggganaatnttcacagcattcacccttcaagtgtatacacattttttttcaaaaattggttatgatcagtgagatttttttcaaagaaaaagtggaagttatctctttttcaaagcatgttggtttttcagctagacaacttatctttctttttgtctcttttattctttatcata

SEQ ID NO: 48498 - DNA, 329 bp, Glycine max
gacaaactttaaaaatcgaacaaaaaaggaaatgaacctgacggcgagttgggcacgaagaactagtgacaacaagctagtgatggagaaagcctgcgacaacgagttgatgacggggcctccacgatggtgaactgggcatgactcaaaagtgagtgaggtgagagtgaaggcatagtgaaaaatgagagtaattgaaatgatgctaaggttgcttggctttgattggaacggtaatttctgacaaaacctaatacatgggccaaaatttctaacgaaaaataatctgtcgataactaatgcttttctgatggaaatacttttctaac

SEQ ID NO: 48499 - DNA, 450 bp, Glycine max
  unsure (1)..(450): unsure at all n locations
agtctgcctttccaacatcaagaaccaatgcttccactatttatccactctccaaaatagttccagccactatggaatcatatcaaaatgagaattggtacttgcacttgataagaaccatccaaacatattagttaataactaaataccatgtgggaaggagaaaaattacactgataattggcaataaaaccaaaaacatcattataatgttcaaagcttataacaagtccaacatcctcaacagccttaactttgccttttgcaaccataccaatgttaaatccttcatcccactttgtatcagatgcaccagagccacagtattccaaccttgcaatctaattcanagatgcacacaagataagaagtaatagaaaagggagaggatgtgaaaggaattgctgacaggaacacaggagataattatccaagaggcaaataacaaaa

SEQ ID NO: 48500 - DNA, 464 bp, Glycine max
  unsure (1)..(464): unsure at all n locations
agcttngaaaccttggatgacttctatctttaatccagcccaagaatagtttagattccaagattcccaccattcgaaccacccagagcttccccaatgtgtgaaacagatgactcagttttctggtaagccttcaataataatgtcaacatgctctcgaatagtaataggatcaccaatagcactaaaagaatcaacaaggttctgaatctcaatcaaaatactacaaccttcaagagtgagttggcgcagctccgtacgaagttgccttgccttcgcgtttgtgtgagcatgaaagtagttgtggatcttgtcccggagaagccacgaactagtgcagccgatgaactttcaaagcatgggagcagaaatggaggattgaagccacgggagcaacaactggtcttgttgctcctatgcgcgatacgcaagagtgacacaaccagagtcacaatcttcaagag

SEQ ID NO: 48501 - DNA, 478 bp, Glycine max
  unsure (1)..(478): unsure at all n locations
tgaaccttaatgattcttgagaatccccnttggnnaggncccacngannatacngannaattttttgntatatattttttcnaaanggaccaaggcaagtgtgatttcacaatctgcctattatgcagaattatgctgttgaaatgggcagcataatattggctttgtgcacaaaaagatgttgatttgctggtcgtggaaagaatataatacattgggttctggatgtttcctaacagattccaatggctacaatgtatatttatgtactatggacccttctgtaaattgtcgagtctatccatcggctcacgaatagtatcaagaaaaagttactgggggatttatgtacgaaaggtcttgtttgggttgagttatatggcaaaattatcgcttcgtcagtgtactgggttgatataacagtgtttgatatgcttattcacaccttgatattgataaatatcggaccttattctat

SEQ ID NO: 48502 - DNA, 319 bp, Glycine max
  unsure (1)..(319): unsure at all n locations
tgtccttggtttagacatgatttatacatgatttatgactngtaggattcaatttgggcaaaattggacgagggcaagtgtgatttcgaaaatctgcactattatgcagaattttgctgttgaaatgtgcagcagaattttggctttgtgcagaaaatgatgtgtatttgctggttgtggaaagagtagtataaattgggttctggatgttttctagcagatcccaatggtcacaatgtagatttatgtactatggacctccagtaaaattttcgagtcgatccaacggttaacgaattggaacgaagagaatgttact

SEQ ID NO: 48503 - DNA, 373 bp, Glycine max
atctatcgctcctaatatggagcccttctcaatcaccctcattaagaactagcttttttcttcctctattgcctttacttgaatacacctttgttgggatctctatttggctcttaactctctcatgaaacttcttcacaaactctgacctagattccccttctttatgtataaaagaagtgtccactgggaggggaatgaagtcaaactgtgttaagggattaaacccataaacaacctcaaaaggggactacatgaggaagatactcatcccaagacttatggttgcctttcacaagagctcttataaaagtggatgaagacctattcactaccactatttgccaatcagattgtggatgacaagtggtag

SEQ ID NO: 48504 - DNA, 138 bp, Glycine max
attggttaattcttaattaattaatttaaaaatcatcattttgcctgcaacttaaaatttaaccaaacccacctctgaaccacgcctcgggttttattctaagcgttttgatatatatattgcttgctttcgaaaact

SEQ ID NO: 48505 - DNA, 414 bp, Glycine max
  unsure (1)..(414): unsure at all n locations
ngtagtactaccacaaagaaagaanacaatcagcgcttaatgggtgtttataaacaagctacatgaggcaggtaagattgtgagaaataaggcaagactattttccaagggttattcacaattggaaggtatatattatacagaaaccttggcccctattgctcgtctagaggcaatacacattttactctcatttgtagctcatacaaaaatgagactatatcaaatggacgtaaaaagtgcattccttaatggactgatacaagaggaagtctatgtagaacaacccccggtgtttgagagtaacatatntgcacaccatgtatttaaactctgtaaaacattgtatggacttaagcaagctcctaaagcttgatatgaatgtcttaggtcatttcttttacacaatgactt

SEQ ID NO: 48506 - DNA, 432 bp, Glycine max
  unsure (1)..(432): unsure at all n locations
aatcttcttcttccatggcttattccctaatggatggtgctggctcttaactcttcttctttgtcttccactgcatcttcatggtggaaaatcaccattaaaagacctcattgaagctcaaaaaaccaacctccataaaagctccacaagcaagcttccatcaggcattcccttggatctcttgcccaatctacttggagtcttctatcccatgcccttgctgtgtaagattgcatcattccctccaccatggaaaggatttgacctcaaatcttgagggtcttcatactctatgctccttccctcaacaccttgtaaaagaataaaaacatatgtattagtggtgctcggtatgttgaagtaaagcatgtctgaaaaccattttctggcatcttccatgaagaacatgggtctcacaactaatgagtgtgn

SEQ ID NO: 48507 - DNA, 307 bp, Glycine max
  unsure (1)..(307): unsure at all n locations
aggaagattccactccgattgaaaggttcctctcggttggggtttctactgagaactaccgcggngcatggtggatactgttggctgtgggttatggagaagaagctctggacgttggatatgatttacgaagaaggaatgataaagaaaatggctgttttccaaagttacacgaaatacaaaggttgaaacactcaagtgcttctgctctcagaaaatgaaacggttctcacacgcctgacgtcctatgaaagatcgcaacggtcagatcatatacatatgtcctatgaaatgccagaccagattt

SEQ ID NO: 48508 - DNA, 468 bp, Glycine max
  unsure (1)..(468): unsure at all n locations
ctgcaagcttgcttgtggagcttctatggaggatggtatcttttatcttcaatgaggtctttcaatggtgattttccaccatggagatgcagtggaaagataaggagaagaagtgagaggaggcgccatccactanggaataagccatggaagaaggagcttcgccaccaagaatgtgccttggataagaagcttggagaggatgcttcaatggaggaaaagaaagagagagaaagagagaggggggagcacgaaattgaaggaggaaaagggtgagagaagttgaactttgagttgtgtctcacaagactctcattcatcaaagttacaacaagtgttacacatgcttctatttatagactangtagcttccttgagaagctttcttgagaaaacttccttgagaagcttctttgagaaaacttccttgagaagctagagctttgctatacacacccctctaataac

SEQ ID NO: 48509 - DNA, 434 bp, Glycine max
  unsure (1)..(434): unsure at all n locations
taagctgctagcattttctggttcaatcattttagaattagcttgatattttccctgatgaaaaggtggactgattttgtcttaaattaagtggcctgctgtgataactgatactccaagtctcatcgttctgactagtgagagcaagacatctagtatgccattcagtatgtttgaaatgtgaatgccaagtgcataaaatctgtattgattgttacttatatccatagggtaacaagagaagtgctgggtttacagatgaagagaggaaatcatttgcaaagaacttcttatctaggggatttgtagatacctttagaaggcagcatcctggtgttattggatatacatattgnggttaccgtcatggtggacgcaagttaacagaggtatttctagcacactcttaaaaatnngattatatataatttact

SEQ ID NO: 48510 - DNA, 379 bp, Glycine max
ttaaaagttgttcttttatcaagtccatgcaaaaacatctgaattcatttggtttttgggaatgtccttcattgttttaaaaaaacaaatccttttgttgtgttttgatccaaaaataagtttcaaaaatactggttgttgattctttctacaacatgctatgttcaagaaaaattttctatttaagtcctaaaaagagttataatctataactatactaacataatatcaaagcacgtgtaaattagtcaaaataaactggcgtaagtttttcaaacaaaaaattcaaaacaataaataaggtaataaaaaagtactgaaatttaatacaaagcgataaataaacataaagacaagttcatgaatttttgaagatcat

SEQ ID NO: 48511 - DNA, 208 bp, Glycine max
gatcattcaataagttataagctaatgacatttattgatatcagctatgaaaggttataatattggtgctaaacaaactacatattacatatttcattcaaatgcacaaaatttcactactttttaatttacaaaaggaatcataatgatgagtatgaggacaaacgtgcgaaaggtgatataaccataatctacctctatatgggtc

SEQ ID NO: 48512 - DNA, 286 bp, Glycine max
ctaaaaacataaataacacaaacataaacgcgatcaactatgtatagattggaatccttcataactaaacaaaaatatgatgttcggggttctaaagaacaagcaataacactcaatcatatagctgaaagagaactactgaaaggaagcttcaaaaatgtccaaagagaccgaggcaataaaaatcaaggaagacaatacgacagaatgaaaacacgctatctcaagcaatatagccaatgcaaaatgatttaaaagatagagacatcattctgctcagaaatac

SEQ ID NO: 48513 - DNA, 393 bp, Glycine max
  unsure (1)..(393): unsure at all n locations
ggaactcgctaagctcatataacttagtacaatttntttatttttgccttgcgctaagcgcctcacttttgcactaagcgttattcattgcggtttgtataaagctaagcgagacttgctcgctaagcccaatagcgtctagtagtcgagtcgcgctaagcgagcacctctcgctaagcgcatgtttaaaactgtttttccctgagctaagagagtgcctatctcgctaagccaattatgcagaaaagattttctgtcataactcgctaagcctatgagttatttctcataaggcacgctaagcgagcatgatctcgttgagcgcccactgtgtttntcagtttttaatgcatgctttcaatttanataaaagttagcctaatatagtttaat

SEQ ID NO: 48514 - DNA, 428 bp, Glycine max
  unsure (1)..(428): unsure at all n locations
agcttcccatatgttaggctataaatagtatcatgtgtaacacttgtcataactttgatgaatgagaaacttgtgagaaacaattcaaagttcaacttctctccctaatctccttcaatggtaaagaacttggcaaagaagtatattgggactcctactgcttcaaccgtgtaaacataacttcatatgatatagcaatttcaagcattttataagttgagttccacctagttggacaatcaaaaactaaactcttagtgcacgggatcctcaattgttttggtggctcctcaaatttttccttcctttntggtgtggctctccaaaatgctacactatccctagtcttatctatcccatctttcacaacttctaacccatcttttacaatcaagtttaatatgtgtgcacaataacacatgtgaagt

SEQ ID NO: 48515 - DNA, 460 bp, Glycine max
  unsure (1)..(460): unsure at all n locations
ntattganatctcaccggccaacccaagtggtttcattttcataataataatatacccataaaatcgtatttttttttgttataaattatacgatattttaaaatggatgacattttaccaaattaacgttgcattaaatatttttttctcaagactattcgtaattaatactactcccactaaatagtattaaaaagaataaatgagtcataattaaaaagacaaagaatatattaaaaaattaagcgaaacgatcatttatggatattttttttaaattatcaaatagggtaaatttcaaataaatttacagaaattggtaaatcataagatatttcattacttctgaattcaaatacttatngaattaaacctggnaatcattttataactttaatatnttttttctattcaagtcgtaaaattttttatcatttcttaatttttttgaaatacaac

SEQ ID NO: 48516 - DNA, 322 bp, Glycine max
  unsure (1)..(322): unsure at all n locations
gagaaaacttataccaattattttttggttagctaatggagaactaattttaatttatgccaaaaaatcatttttttctttaattttttcctcttaaaagtgtttataaagaaacttaccaaaataagtctatagacattcttcatgtacttcaaaccctcaacgttcctaaattttcctcaagttttctctaaaaacaaaaccaactattgggaaattcttcaactaaacagaagaggcaccccntgtgatggtgtaattctaaattgacttagattcttgacttgttcctcatggacacttgagctctttatgtgttaca

SEQ ID NO: 48517 - DNA, 460 bp, Glycine max
  unsure (1)..(460): unsure at all n locations
tcttacaagagactaagannattttgatgtaaaatttttagtataaagatcttggggaaacctcttttgtattagaaattaagatactaagagatcgctctcaaggtatcctaaggttgtcacaagagagttatatcgataaggtcctagatagattcagcatgaaaaatagtaaaccaggagataccccaatagctaaaggagacaaatttagtctcaaacaatgccctaataatgaccttgaaagaacaaagatgcaaaagatcccttatgcataagtagtaagaagtctaatgtacgctcaagtttgcactcgtgccgatataacatttgtagtaggaagtttgggcagatatttgagtaatcctggaatgcagcattgganagaagcnnaacntctgattcngtacctanagagaacanaaggatacatgctcacttatcagaagtctaaattttg

SEQ ID NO: 48518 - DNA, 355 bp, Glycine max
  unsure (1)..(355): unsure at all n locations
agctntgaaagtggagctcgattaaatgtgattgttcaangaggcgctaaatatggtagtcactatggtctggaaaaagtgtgatgtgctgagagatgtcaacatgactattgtcgaaaccttaaagcggaaaaaccaaaagggctcgaaaagaagaatggagcaggaaccagctcttgagggctttatggggcagcaacaacgagctcaaacttataanggccgagaaggacgagtcaaggttggaaagcatggtgttagaagataaattgaaggcttgtcaaagggtgaagagaattttaacagagcaactaagcagaatggaagagaatatgtngacaattattgatcaata

SEQ ID NO: 48519 - DNA, 423 bp, Glycine max
  unsure (1)..(423): unsure at all n locations
tgcaacaatggtattgacagagtcactttacatacctgtgtacagaggcgaggcgtaacggtcatgcactgtcacaagggctgtagatgttgagatagagtcgcgaacacgaaccttatacggagaagaagagagcatgaggaaaatagggctcactttctaattttttaaatgtagattccacattgattttcaatacaaaaccgatgttaaccaagcaatgtaaatgttaacatcggtttgttggaaaaaaacctatgttaactcatcaaatggtaacatcagttttgaagaaactgatgttaaaaaacttatattaacataggttttcattgatttttagaaaaccgattntaacgaacttacattgacatcggtttttaaaaaaccaatggtaaagaccttacgttaacatcagttttc

SEQ ID NO: 48520 - DNA, 389 bp, Glycine max
  unsure (1)..(389): unsure at all n locations
agcttcggaagaaagtgatgattgtcattctcttaggcagagcttgaaagagcctgngtagtcgaagagaagttcaagtccatagccatcaaagtctgaaaagagtatgatgaactaagggatgtcaatatggccaccgatgaagccttggaatgagaaaccaagaaggcccgaaaggaagaacacgaccaaagcaaagtttcgaggggctttatagggcagcaatagtgagctcaagctccgaagaggtgaaaggaatcatcacgggtcaaaggcatgatcttgaaggacgagctaaaggttttccttatgtcgaaaagaaaattgtcccaacagttaagcgagactgaagggaatatgtgggccatcatcgataagtgcaaagagaa

SEQ ID NO: 48521 - DNA, 448 bp, Glycine max
  unsure (1)..(448): unsure at all n locations
tcattgcctaacaagccaacttacaacagcaagcccttatagactcagcataaggatgcacagaccaaagttgcgtatgtaaaaaaattgtatgaccaagtgaaggtgcaaattgcaaagaagaatgaaagctatgccaagcaagcccaaaagaaaaggaaggaagtggtacttgaacccggtgatgatcttggacatttgaggacaaatgttttccaagaaggagggaatgatgagaatcatgaaacaggccaaatacagtctaaaggcccaagtggagaatgacgaaggcccaagtggagaaggacaaagcccccgagtggagaaggatgaaagcccaagtggagaaggatgaatgcccanaggcagagacactatcaagactattaattgatgctgaaggccagattaattngaaggcccataataaatatgttctatttagtta

SEQ ID NO: 48522 - DNA, 418 bp, Glycine max
  unsure (1)..(418): unsure at all n locations
agcttgtttaccccatgttgtattngcttacaatagagntgntcatagcaccactaattgttctccttttgaagttgtttatggttttaacccactaactcctcttgatcttttgcctatgcctaatgtttctgtttttaagcataaagaaggtcaagcaaaggcggactatgtgaagaagcttcatgagagagtcaaagatcaaattgagaggaaaaataaaagctatgctaaacaagccaacaaagggagaaagaaggttgtctttgaacccggagattgggtttgggtgcacatgagaaaagaaaggtttccagaacaaaggaaatcaaagcttcaaccaaggggagatggaccatttcaagtgcttgaaagaatcaatgacaatgcttacaaaagtgagctgcccggtgagtat

SEQ ID NO: 48523 - DNA, 451 bp, Glycine max
  unsure (1)..(451): unsure at all n locations
ntacatggtnntttatttgagaagcctacattcagattttgatcatctacgtgatcaagtccttgttggtgatcaagtttcgtcaatggactctctagttactagacttcttcgtgtgcccatgtgttgaaagatgaaaacttagttgaagtcatggaaacatcagccatggttgcacctcgtggaagaggaggaagtcgtaacaacagaggaggccacggtggaaggagttgacgtcctcaatgcacctagtgcaagaggatgggtcatactcaagaaaattgttactccttacatggctntcctgacaaggtagcacatgtatctaaatcaganaaatgagagacntaagtttcagatgaggagtaccaagaatatttgaagcttgaatctgaaaattccagcaaccaagctcaatcctcctcggtaccatgtgtttcaacaacatgta

SEQ ID NO: 48524 - DNA, 403 bp, Glycine max
  unsure (1)..(403): unsure at all n locations
agctntattaccaatgcctatcttccatataagnngnncataaaccacaacaaaacaaagtcacacttgaacaaaaattntgttaagttgccaagtataatatacaagtttctataatactaaagcatatcaatgatataacaaaatcctgtccataaagtcaagtaaatattattttatgaacccagtgttagtatcattccaataagcactaagcaagaatggaagaagcttagtcaaaatcatcaatcaaatacttcaaagttgaaggggataaatttgattttaacttgtgggaaaagtttaattcaatttataattataatcttactttattntacccctataaatacttcttggagtatccaaactgggccttagtcaaaatcaattatgaaatagt

SEQ ID NO: 48525 - DNA, 401 bp, Glycine max
  unsure (1)..(401): unsure at all n locations
ngtangattatggggtacccatcacatgtggtactatgtggcggtctggcgatggtgcacaacaagttttccacatccacaaatcacgtataaacccaccatcccctgttgcccacctccaactgagctcacgtactcccacgtagcccatatcctcgtttctctcaacaccgggtccccatcaatcctcccaagcttccccaacatccaggtaattcaacatccaaatcatcacaaactaacaaaccaagcaaaacagggcaaaggcagaaaactctgcccaaaactcaaaccaaaatcacagctttttctcacttaaagaccccagtaacatttccttcngtccaattcgttcaccggtggatcgactcaaaaaatttactggaagtctctagtacata

SEQ ID NO: 48526 - DNA, 339 bp, Glycine max
aaattcaaatttcaagtctgaagaatcacaactctttaaaaactacctgtgtaattgaataccacatttatgtaatcgattagcagtaaagaattttcgaaaataacccccaagaatcacaattggtcaagaatttttgaatggccatcaaatgcctttaaataggtgacttgggatacgaaattccttagagtttttctgaacaacattatcttatcctctcaaaaccaaattatcttatcactatcaaaatattccttggccaaaacacttgcaaattcaataaggaatcatgatcgatattcaattgtaatatccttatcttaaagagagaaaatt

SEQ ID NO: 48527 - DNA, 450 bp, Glycine max
aatggtcgacaatggaatataaactgcggcagttattgtcgttttacctactccaccaagcccatggatccccagcatgtggatgacatcatcagatccaacatccagaagttcttttacttcttgcatacgtgactcaagtccaactggataatccgcaacatgtaaaggagcacgattaatcttcttagagaccaactcaacaatcctctgaataaacttatattcgtattcttccctattcaatcagagaaatcagagaaaagtcaaacaaaactagtcatcctccatatcttgatatgtatgtatgctgttcaaggtaataaactttattcatccctctaaatttcaacattatgtttaattattaatcttggctctatattggtctacacctttatgttttgacctatacgcaaaaaatgtatgtttagctctagacagcatatt

SEQ ID NO: 48528 - DNA, 391 bp, Glycine max
  unsure (1)..(391): unsure at all n locations
taactctctcgagtctgttatttatgtttcttttgacatttttcccttcaccaattaacccacattcggtaatggtaatttgcgcccgcctcggggttgaataattggctctgaacctaacttacattcatgcctaatgaaccaagggttaattgggggttggggtgcctaatcatgtattgacaaccctaaattgattttcgcttaataaattaaaatagggttggattaagtggttaactggtagggacgaattcttcataacctangacaagagaatgacttctgaatcagaggaaacaacatgttnttaatactattaatttcgtattccagttcgctggttctttaattcacaaaacaaacaacccccccccccccccaattttac

SEQ ID NO: 48529 - DNA, 397 bp, Glycine max
taagcttcatgcttgaataaaaaatattaattaatactcttccaaagcatatcttcccgatatgagattaaaactagttaaagttaatgttgctttaagaagataaagaaaaagaaaaagtagtaaaaaatcaaacagaagagggacaacaaaattaaatgacaagttgccgttggatatatgtggtttccgtcctaattggttcaaattacaaagagaaatggggctagagtttgtcttgtttcatgtccattacttggttgtatatcatgaatgaattattgaaatcaatagggcatggattctgcaagtagcacacaagtcctctacaaatatctttgtcggtaaagctctaatggctgtgtgaggtcagcatcttaagcgtgagatcatgatc

SEQ ID NO: 48530 - DNA, 440 bp, Glycine max
  unsure (1)..(440): unsure at all n locations
ttttcttactttaggatgggggcaacaaaccacacttcaaccatgaaagcctcattaaacattatgacacctttgggaactctaattggtccacttggggacattattggcaaatggtaagcctctttttttatggaaaaacccaaatcagaccttcctagaaaaaggaagaaaagatattaaaatgttataattatatctcataatactcataaaaaaatggttcatgatcctaattttggaacaccaaataggcaattggcaaccaagtttaacatcttaccagctagagaaactcntcccatgaaaagcacgatgcgccatgaccctcatgtgacttaaaacaacatctgtgttgagagaatctncagaatatgcctagttcgtggatcatacctgaagatgatcaangcttatccaagcaccacttcnagaatact

SEQ ID NO: 48531 - DNA, 388 bp, Glycine max
  unsure (1)..(388): unsure at all n locations
actcagctntcatagtgaagtcaggtgcaaccatctccctaagtgtcctctcattatgtggagattgagccatgttctcagtatgaaaattagcagccgaatgctcaaaattagaatgttcagaatcaccagcaacagaatgctcggaatgcactaaatgcatggaatgctcagaatgctcaaaatgatcaagatgcaccacgggtaaaaatggggtaaaactacaactatactcaaacgatatccaaatcagctaaaaatttgtgagcaataccctaaaatcatgaaaagatagcacaaaaattttcagacaaaaattcaaagtataactataaaaactgcctaagaaaagttagaaaataggacaataatactttaataaaaaaac

SEQ ID NO: 48532 - DNA, 327 bp, Glycine max
tcttttcattaagaatattatcctaaaaaataatcaatttatcatggttaataacatggtattagataataccattaaaaatctggtcataaggtattctaataaaatttattaagatagagtaaaaaaaatatttattctaagtaaacgtagacaccaaagaacaacttgataaagaggggagataaattactcataaatatgtactagtataatatagtataagaatgtgacaaattaaataaaaaatattaggtggttatatcgcaatttggaatataaagatatcaacattccacactcaatcataaagtctttcatctttca

SEQ ID NO: 48533 - DNA, 444 bp, Glycine max
  unsure (1)..(444): unsure at all n locations
actcagcttagatgcaagctcanagganaattataatcgnttagttacaacaatttcttgaaaatgaaaacctataaatactagatgctttgaagaaatgagtaacgaacctacacgctatcattcaaattctttatgtagaaaactctttgtatattcttataaagtttgaaaagctctccaaacatattgattactctaacacaaatatctacatgctccaattatacattggatggctagacgattatgatataatcagctagcatattaaacagcatatcttcttatttgtgtagaaccaacagtggcttggccggacacagaatattcagttgttaaagctcggcgataaactttgttgtgagagctactagtaacagcgacaaatacttgtacgtttgtgaaattagtgaaacttgattggctaaccaaaactgaact

SEQ ID NO: 48534 - DNA, 357 bp, Glycine max
aaccactatgattggctttcatgttgatcactataacaaaaaatcagttccttttagtcaaagtagatctatcacaagtaaacacatcttttgatgttgtttggaaacttttagaacttaaacttcatttattcttcataggattcgacaaatcctgaaagaatgtcttgtgagacaatttctgccaaatgaacctcagacacaaagtactaaatgaagtcttaaatgtcatctttaatattggatcagatcatgacttattcatacttctgtctgaaatatcaaatagaagatcatgaagcataatctgatatcacataagacaaaaactttaacccgtggattttattgtatcta

SEQ ID NO: 48535 - DNA, 433 bp, Glycine max
  unsure (1)..(433): unsure at all n locations
ngagtccgttgttgctgccccataaattccctcggatctagtttcgaccccattcttctttttaggccctcttcgtttctcgttctaatgcttcttcggctatggctacgttaacgtctctcagctcgtcatactcttttctgaccctaatggttgttttcttgaacttttccttgaccactcgtgttctttcaagtttcactttcaaggcttgcacttcttcactttcctcagggacttcagcctcttccccacttgaactctntagcttcgagagccaagttatcccttgcattcaagccttcaaccattgatgatatccaccaataactccgttgctgcttcctctaagctccttatccttcctttgcaccgcattccttgcttttcggactctttgaagcatntttgcattgnggtcactgaaacctcg

SEQ ID NO: 48536 - DNA, 445 bp, Glycine max
  unsure (1)..(445): unsure at all n locations
gtcacctgcggcatgcagcttgagcaattcaatgtctttnattttttactcagatgtccgaatgagtcccataatatatcgagatgctcgaaattgaattcgtaatctcctaaccaattcaaacgacaataactttttactaagaagtctgattgagtcacgtaatatatcgagacgctcgaaattgaatacaaaagctctgtgcaaattcaaatgacaataactttttacttggatgtccgattgagtcccgtaatattttgagatgctctaaattgaaaatggaagctcctagaaaactcaaacaacaataactttctactcggatgtctgattgagtcccgtaatatatcgagacgttcaaaattgaatacggaagctcctagtaaattcaaaccacaataacctttgactcggatgtttgatngagtcccgtaatatatcg

SEQ ID NO: 48537 - DNA, 378 bp, Glycine max
  unsure (1)..(378): unsure at all n locations
ngagaatggagaattgcactaagcaattattacgcatatctttttactcgaaggtggaggacacatgaacgaaaacacaattcatggggctccgaaaaaggggttgagaatggagaattacactaagcaatcactacgcatagctccaaactcgaaggtggaggacacatgaacgataacgcaattcatggggctccgaaaagattgataatggagaattgcactacgcaatcactacgcatagctccaaactcgaaggtggaggacacatgaatgaaaacgctattcatggggctccgaanagattgagaatggagaattgcactaagcaatcactacgcatagctccaaactcgaatgtggaggacacatgaatga

SEQ ID NO: 48538 - DNA, 422 bp, Glycine max
  unsure (1)..(422): unsure at all n locations
gcagaaaactaaccaaactacccctcatatcttccaaaaccccatacccacgaaatttaagagagaaagaagtccacccaaacctggattttcgaagtcccactcgtagccacgcacttcacgaccccgaaaatgccctcctttcgcgatttggagcagaaatgagcaccaaaggttggagctttgttggggtttcaatggagaatggaggagaaggaaaaagcaacgtgaggaagagggagagcttctgaattttctgttttggctgagtgaggagagagaaaagctttntggtcttaaataaaaggttttcctctttntctattattntattcaagctctaccacatgtccctattttgatggagcaaaaagggcccactttctctttttgactgtgacccatactcagtcacaaaagtg

SEQ ID NO: 48539 - DNA, 294 bp, Glycine max
  unsure (1)..(294): unsure at all n locations
catatcatagctgttgtgcatcgtgcatcatcatgtgtgagtgagaagaaaatttcgaaagttagaaaacttattcagaaggcaaaactctctgttgtaatcgattacaaccttacaataatcaagtacacaagttgctctaaacttatagagttatgtatcatataggtttagtcgattacaaacttgttggaattgattacatagttgtttttgggacaatgactgatttattcaggagtctctgctntaatcgattaccatgtgatataatccaatacttctcttctataa

SEQ ID NO: 48540 - DNA, 227 bp, Glycine max
cttgggccagccacatcaaaagtgttagatttcaacttaaaactaattggcactaaatgaaagtgtccaacagatatataagctgtatcccaaaaattgaggcaggtgatgtgggacttcctaacccccccctccacaaatgcctgccaatacaagcaagcctacaagaataggcaagaactaagatgggctataggctctgatatcatgttagatttcaacttaaa

SEQ ID NO: 48541 - DNA, 399 bp, Glycine max
  unsure (1)..(399): unsure at all n locations
cttgcggatntggtcttcgccgggaaaatgatcgaagtttgtctgaaatgaggcaaatttaatcatcctacttggaggaatgagaaaattggggcaaatgaagagggtgagagtgaaggggaaacccatgttgcgactgccgtttctatacagccaagttttccaccaacccaataatgtcattactcagccaataacaacccttcttcttacccaccacccaattatccacaaaggtcatccctaaatcaaccacaaaacccaccttccacacaaccgatgctaaacaccacctttagcacgaaccataacaccaaccaaggaaggagatttgcagcaaaaagcctgtagaattcaccccaattctggtgcctatgctaacttgctgatactgcaatg

SEQ ID NO: 48542 - DNA, 438 bp, Glycine max
  unsure (1)..(438): unsure at all n locations
agcttaggctaaactntcatattctatttattcttagtctagnccaacaagaaggatttgaggatgaagcttagtttaagttagtctaaacctaggagggctgtctatattgagcctagtccaacaatagggatctgaggaagaagcttggattgattcattccaattggggatcgaggtttagtaatttaggctacaacatagaacacaaaagcatgattgattagagaaacatccttatatgcatcagctggtctgctagaaagacccaacacttctacctattgctatcaattttacttacttacatttttactgtttttatcctagacatagtttaattctactttaaaccatcaattatcaatgtttctttcaacaatgccttatttctgaatntaacccagtcttagactagtttcattgagttcgatactc

SEQ ID NO: 48543 - DNA, 448 bp, Glycine max
tgtaatatatcaaatatcttatgaaatttctttatgatcatggtacttgtattccatgcaagatttctggcattggaaattcagcaaaatgtgcaatatcaacaaaccaatcctcctcgacctttttagtagcaccctcagtttgtaaatagagaaagtttataacaagaaatggtattctatatagctgcaatacaaatgtatcgaaaaagcttgtttttgaaacaggattagtagtctcagatgcaacacaacaataaaatataaaatcattctttcctaaaattgaatcgtataaaaattatagtttggtggagtctacaattaatcagtttgcccatgcattgcacaggcactaataataatttaaataataatttaaaattctaatctaaataataatttaaaattcacaatataaaatcatggactaagatgacatgcatga

SEQ ID NO: 48544 - DNA, 474 bp, Glycine max
  unsure (1)..(474): unsure at all n locations
ttaagtcacctgcggcatgcaagcttgaaatggaaatccaatttcccttatcagttgagtagatagagcccgtgctcataagccaaatgataatagtactataacacctttactagaaatgctctttgtgggttgaagtgtatttctggtgataccaatgttagtttctttcacttaacaatgtaatgataaccaagtagacgcatgctacaaaaagatataacttatattttcttgtgaagctgaagactaaataatgacccataaacagaattaccaatttaagatattaataaaacataatagcatcaatgtttaaaaatcttcaaattgtagctgccaagaagcaaattagtttaagatattaataaaacanaattaaaaagaaaaaatgtaagattatacagtataaacttgaggaaaaatatatntatatgttgtcactttcgtttacagagttnttgtgaatcatat

SEQ ID NO: 48545 - DNA, 443 bp, Glycine max
  unsure (1)..(443): unsure at all n locations
tgtatggtagaaggggtaggacacctctatgttggtttatgccctgagaagacctcaccttangacttgaagtggtacaacaaaccaccgagaaggtcaagttgatccaagaaaggatgaggactgctcagagtatgtagaaaagttatcaggataagaggaggaaagacttggaattcgaggttggtgatcatgtattcttgagagtcactctgtggactggggttggtcgagcattgaaatcccaaaaactaacacctcgcctcatcggtcctttccaaattcttaaaagagtcggtcctgtggcataccaaattgcattacccccatcacattctaatcttcacaatgtctttcatgtgtatcaactccataagtatatccatgatccatctcatgtggtcgaattggatgacgtacaagtaaagagaacttgacatatg

SEQ ID NO: 48546 - DNA, 439 bp, Glycine max
  unsure (1)..(439): unsure at all n locations
tcacnattatatatatatatatatatatatatatatatatatatatatatatatacatatatatatatatatatatatatatatatatgtttaggtagaaagataccttggatatgcatgtatgtagcaaaaaaaatttcacaaaatatatatatgtatgtttaggtagcaagataccttggatatgcatgtatatagcaaaaatatctcacaaaacatatatacgtatgtttaggtagcaagatacctgggacacacatgtatatagcaaaatacctcacaaaaatatacgtgtgtgtaggtagaaaaatacctcatganaaaaaagagagcgagcgagaaaagaataagaagaaaaaaaanatnganagaaagaatataaanaaatataanaaataatagggggtgtctagctanaaaacacatgctcgtgaagaag

SEQ ID NO: 48547 - DNA, 459 bp, Glycine max
  unsure (1)..(459): unsure at all n locations
cgaacctccgttggagttgtctgttgttgcctctctataaccgactccaccttgttcggatccaccgcaaccccatccttagaaatcacgtgccctaagaactgcactttctccaaccaaaagtcacattttgacaacttggcgaacaacttcctatccctcaggatatgcaacacaatcctcaagtgcttctcatgctcatccttattcctcgaatatactaggatatcgtcaataaacacaaccacaaactgatccaagtaatcatggaatatacggttcatatagtccatgaagatggcaggggcattagtcaccccaaatggcatgactaaatactcgtagtgcccataccgagtccgaaacgcagtctttgggatatcttccttcttaaactcgatntgatgatatccagatcgtagatcgatcttcgaanataccgtcggtccccttaatngg

SEQ ID NO: 48548 - DNA, 298 bp, Glycine max
gggatatcttttacaaaaatgacattccttatgatccgggactatgtggaattgtatttcaagttcacagtcatttaattttgttttgaacatcaagttgtatcccaaatcatcaaagatatcttcataatgattatatttgtcatctattgggtatagattggtatactcatttctagtgaattccgttaagattttataatctttgttaacttcatattcttcaaaagtatagtccaaccaactaactattgaatatatttctgagtcaatagagactgtctcatctatgggaatg

SEQ ID NO: 48549 - DNA, 360 bp, Glycine max
  unsure (1)..(360): unsure at all n locations
tttatcttttgaatagttcaacgttattttcctagntggggtatgtagttgtagacatggtgcatgcagttgcagatgtgccatatttttaggttatcattttttcatacgatttttacttttactatatatatatatatatcctcttgtaatcctttataaagtgatatataaaagaactcaatttctataccaagaatgcacaacaattctataatctgtctataacttctacacgaaggatgtgctaaaaatacactgtttgctattataagtagtattactactttattntaatgggttcgattcatttcagcatttgtagaatggttntctctctcaataaatttgcattttata

SEQ ID NO: 48550 - DNA, 463 bp, Glycine max
  unsure (1)..(463): unsure at all n locations
agcttggagaggatgtttcaatggaggattagaaagacggttataaagagagaggggggagcacgaaattgaaggaagaaaaagggagagaagttgaactttgagttgtgtctcacaagactctcattcatcaaagttacaacaaggggtacacatgcttctatttatagactaagtaacttccttgagaagctttcttgagaaaacttccttgagaagcttctttgagaaaacttccttgagaagctagagcttagctacacacacccttctcataactaagctcacctccttgagaagcttccttaagaagattcctaaagaagcttgagcttagctacacatacctctctaatagctaagctcaccttcttgagatgaaaagctagagcttagctacacacccnctataatagctaagctcacccccatgacanaaaacatgaaaaataaaaaaaaaagt

SEQ ID NO: 48551 - DNA, 400 bp, Glycine max
  unsure (1)..(400): unsure at all n locations
tgcccagttcattgcatgtgatttcattctccatggtttgtgtgnnttctttattctttntctatcctcttctttaatattgacattttctaagccaaaaacaagacacacacactcatgtgaaacttgaactattagtgttttatataatattttggtgcctgaccaaatcaccccatcaaatttaccattattttcaagaatagtatttttaagtgaatgtgatcttttgttaggcttaattaatgagattgatgaatttgtgtcttcggaatgtgcctttgttaaataatcacaatgccctctctttgggtacatgttgacttttaaaatatattattagtccttgtgtgacggcaacaaaacatggtacagaagaaagaaaaaagcataaaagtca

SEQ ID NO: 48552 - DNA, 436 bp, Glycine max
  unsure (1)..(436): unsure at all n locations
aatttcccaaaaaccaatccctcttattactaactattttgaattctttaagtcctggatggaccacctctaaattggtggtcggtcccctctttggtttcaaccaaaaagaaaatccatatccaagaaaacatggatgaagtcctaaggatgccatggacatgtgtatttctgaagatataatatttatattccatcaagcataaaatgactggtgattacatgtaatagacattttataacatggttgccccaaatcacaattaaaaagcacaactaccaatcttttggagtcctttggttaattggtcttggctccttctgtggtggggggtttgttaataatattatacttttgcccctcaaaaaaaactgatgactgatcctcttttattaatcctatttggatggtatggataaaagacatggttctccn

SEQ ID NO: 48553 - DNA, 447 bp, Glycine max
agacctcatttattcttcataggattcgacagatcctatgagaatgctctctacaaaatagattttagacacggagtattaaatgaagtcttaaatgtcatatcaaatcatgattccatcttgctatcatttgaaacatcagatgcagacttcacgaaacatgttctgatagcatataagacataacttttaacctttgtatttgtttacatttaatcaaaataatcaagggtcctggttcatcttttgacttaacaatctctccccccccccccctcttttttttatgtcaaacaaacacaaatttaaaagttgaagggcaatttataagatttcacattaaagtgttagtcagtcttatcagatgcagaaagttatatcataaatagatcataatacatcataagaatttgagatagagtccgaacagataacaaaaaacatctc

SEQ ID NO: 48554 - DNA, 504 bp, Glycine max
  unsure (1)..(504): unsure at all n locations
atttactanatatgtcctcgatgtacacgtatcctnacagncgacctgcaggcatgcacgctngaaccataaccccgtgagagtgttttccttattggttttataaccaccagcctagagccatatttttggattaatctctggattttaaaatgaaatgcctgaatttggatatgaagaaaggccttggtgtatataccaaccacttgaacattaagcttacctggttaataatgatgatatcatttgcgcccatctttgaactgaattggaattggcaaaatgaaccctgagccttgaaatggcatctccatttaccttgctttggttttaagagagcacactggtttaaaaaaatttttccccaaatttggaggaagttgtttgtggatattttaatgtagaaaccacgcacacacacaagttataaatgcttttgtctaaaaaaaagagaaaagaaagagaattcnatagtggtgtgtgtaaacaagtcattgaaggttg

SEQ ID NO: 48555 - DNA, 340 bp, Glycine max
  unsure (1)..(340): unsure at all n locations
cttcatgctngaataaaanatattaattaatactcttccaaagtataacttcccgatatgagattaaaactagttaaagttaatgttgctttaagaagataaagaaaaagaaaaagtagtaaaaaatcaaacagaagagggacaacaaaattaaatgacaagttgccgttggatatatgtggtttccgtcctaattggttcaaattacaaagagaaatggggctagagtttgtcttgtttcatgtccattacttggttgtatatcatgaatgaattattgaaatcaatagggcatggattctgcaagtagcacacaagtcctctacaaatatctttgtcg

SEQ ID NO: 48556 - DNA, 382 bp, Glycine max
  unsure (1)..(382): unsure at all n locations
cagacaacacttcagccatgaaagcctcattaaacataatgacacctttgggatctctaagtgttccacttgtgtaccttattggcaaatgttagtcttctttttttatggaagatcccaaatcagacatccctagagaaaggaagaaaagatattaaaatgttataattatatctcataatactcataaaaaaatggttcatgatcctaattttggaacaccaaataggcaattgcaaaccaagtttaacatcttaccagctagagaaactctccccatgaaaagcacgatgcgccatgaccctcatgtgacttaaaacaacatctgtgttgagagaatctccagatnatgctagtttcgtggatcatacctgaagatgat

SEQ ID NO: 48557 - DNA, 280 bp, Glycine max
ctacagtagttcagaactagtgcctattctacgccttgcatcgcaacacttagctagacctctctaactcacatcaaaggtacttatagctgcgctgcgtccgtatcataggacataaataccctatgtgaaaactacttcgttaggttgcatacactttctcaataatacaaaatctctcttcgaattctctctcaacaatgttcacgctaagtaccattgtcatcacgcgccagataatattgaagcaactgtgcctaccatatactttatttgggca

SEQ ID NO: 48558 - DNA, 308 bp, Glycine max
  unsure (1)..(308): unsure at all n locations
acaaaaaactgaccaaaacctatcttctcctttttggaccaaatatggcaaggtgggggccaagaaattttcttcccatcaaaccctggatgcaactgtgatcgtatgcccatatcaactagatcttgacgggtattcaagccatccttcgtcttgccttgaatgttaaggagcgtcccaatcacactgtcacaaacattnttctccacatgcataacatcaatacgatgtctaacgtcaagaatcaaaccagtaagaagatcaaagaanatggacctcttcttccatatgcaactcttacttttatc

SEQ ID NO: 48559 - DNA, 406 bp, Glycine max
  unsure (1)..(406): unsure at all n locations
ttatcttctgngatggccatggntatgttcttctctctttgcctgtgaggaaggacaaacacaaggtaaaattcaattgggtattgtgtgtgtctcttattttgtcttgtgggattcctataaaccttgtgaattatgattaacctggttgtttgtttcttcacgggaatgaaaggtcttcaaaagaggactttaacactctacttgccaaactacaatctacaaaaaaaataacatcagagtcaaccacttttgatgccattggtattcagaaaaattcaaggttcaatgcgacgaggattatgacccttgagagtcctgtgaaggatgaagcacatgatacttataaagatgaagattcaccattgatcaagagagaactctctgattttatctcaagatcatg

SEQ ID NO: 48560 - DNA, 383 bp, Glycine max
  unsure (1)..(383): unsure at all n locations
agcttccgtaataatttctaattattgattatacctaatgacaaattntgctgtgagagaattcagctagatagaggacacagattccgattagtaacattcgtgaggctgggaagttagtagtgctcctagcaattgaggttctcatttccatgattgcaactgtaaaactaaaaaatgtagagagagggtttttaattattgcaaagttattatttggttgcacaactcaattcaacctcacacagtcccatgcttgtcccttaatgcacagtgacttgtatagtatagtgctgcaacatcaacatcacaatgcaatttaaatgaatagcaggggatccagatatatttgatgtgtctcaatctcatttacctataaaaaa

SEQ ID NO: 48561 - DNA, 420 bp, Glycine max
  unsure (1)..(420): unsure at all n locations
actcagctcatatttattgaacttagctatgtcgttttggtttactctatgtacatttcatggtgacctgaggtacgaggaaacttcaagtctccgcgccattgtcactgatcttacatccagtctcgttgccattgtcactattgggtttaatgtaagcttcgtctttttttcatttctagtttagttagcaaacatcttcaagtttgtttctgttaagagtttgatttttcaaggaatctattactactttggtttgctgcaacccaacctagatatatgaacatctttagatcgactactgtacctcannaattggaatggtttagtaaattgaatttgtttaattntttatccccattgttagcttagacaataataatgatgcacgtacaagaaagtaggaacctatcactatct

SEQ ID NO: 48562 - DNA, 472 bp, Glycine max
  unsure (1)..(472): unsure at all n locations
gatccttaagcacctgcngctgcagctatagtcattactgttaaactttaactcaagnngaatgttcctttgatatagtaaataatttgttttgtggccttgagatgagtaatggttggagtctccatgtattgactgatgagtcgagtaccatataaaatgtctggtcttgtggacgtcaaatatcacaaactacccaccaaactcttgaaatttgtagcacccatcttttttgcttcgtcaaactttgataacttcattttgcactccaccggtattccaattggcttgcatagttttgctatgaaatgaagattcaatcttccttttgctttacctcaataccaagatagtatgacattagtccaatatcggtcatcttgaactccttgaccattgctttcttgaacttttcanacatacttggattacttcccatgaagatcaagttatccacatatatgaacatgat

SEQ ID NO: 48563 - DNA, 453 bp, Glycine max
  unsure (1)..(453): unsure at all n locations
tcatggtgaatcaaaggtgattcaattgtgttttgatgatatcaatgatgatgagaaaggtgatgacaaaaagctcaaagatcaatcaaagaacaactcaagtgaatcaagaacaattcaagagttcaaganaagaatcaagaagaattcaagactcaagaagaaagcctagaatcaagaatcaagattcaaggttcaagatctcaagaatcaagatcaagattcaagactcaagattcaagaatgaagagaagacttaatcaagataagtattaaaaagtttttcacaactttgaatagcacatgagtttttgacaaaacctttaccaaagaggtttcactctctggtnatcgattacaaggtaatcgattaccagtagcaaaatgagtttgaataaggtttcanactgaatntacaatggtccaattattttcaaaaactgtaatcgatta

SEQ ID NO: 48564 - DNA, 401 bp, Glycine max
  unsure (1)..(401): unsure at all n locations
gatccttaagcacctgcngctgcagcttgctagcgttatgcttacggaatcaacatgttagctatcatcgccaagtaccaagaagagttaagtctagccacggcccacgagcataaaatcgcggatgagtatgcccaagtatacgcggaaaaagaggctagaggaagggtgatcgactctttacaccaagaggcaaccatgtggatggatcggtttgctcttaccttgaacgggagtcaagaacttccccgattgttagccaaggccaaggcgatggcagacacctactccgcccccgaagagattcatgggcttctcggctattgtcagcatatgatagacttaatggcccacataattagaaatcgttaggaaacttgtatggtctctcagaccttgac

SEQ ID NO: 48565 - DNA, 318 bp, Glycine max
  unsure (1)..(318): unsure at all n locations
ctggcttagcgcgtgaagactggatgcttatcacaatgtctgttcttagcggatagacaatttccaaaaaatttctaagactttntatgtctatctcttcacacaaacttaaaaccccttgttcattaccaaacaagctgaaattaatcataatcacaagcaagatatcctaactatatacaagagataagaatgaaaaataggaaaaggaaagaaaagctgggttccctcctagtaagcgctcttttaacgtcactagcttgacacatcgtcctgttatccangatccaaacgaagaacaatgttcaatctttccat

SEQ ID NO: 48566 - DNA, 402 bp, Glycine max
  unsure (1)..(402): unsure at all n locations
agcttgtaggattatggngtacccgtcatttgtggtactangtggcgatcgggcgatggtgcaagtcgactctccacatccacaaatcacacataaatccaccatccccagttgcccaccttcaactgagctcacgtactgccacgtagcccttatcctcgttcttctcaacaccgggtccccattaatccctccaagcttccacaacatccaagcaattcaacatccaaacatcatgaactatcaaaaccaagaaaatagggcagaggcagaaaactttgcccaaaacacaaaccaataccacaactttccttactcaaataccccagtaacattctctttgttccaattcgttcaccattggatcgactcgaanattntactggagggtcctagtacata

SEQ ID NO: 48567 - DNA, 331 bp, Glycine max
tctacttatgtggcagggcggtcttccttcaccttcttgtctccaacgcgaagtttgaccattggtcttccttcccgcgatgcttcttttcatgtccgcctgagtgggcttatagcctaaaccatacttcccacgatttccttgggtatttatcaggctagttatgccgccgttgttttttcctaaacccatcccaggttcataaccgttccccaacataactcgggccatcattaccgctgcatcggacaaacaaagctgcccaaagagggagtccacggaggaaatgctgaccacctcaaaagactggaaagcagtttctaacgattct

SEQ ID NO: 48568 - DNA, 415 bp, Glycine max
  unsure (1)..(415): unsure at all n locations
ggaccttaagcacctgcggctgcagctttcaattaaattatgttcccgtggnnggccacatttggtttcatgtatttttatttactttttataccccattttgacgtgcttaaaccatttatttaagtcatttctcgcttaacctaaaaataaaataaatttccaccgatcgtttgaattgtaccatccgttaactttggtagaaatgaattccgaccgatcggtcgtgccgcaaccatgttggaaataaaaaaaaagaggtaaataataatataataataaaaaacaccttttagtaaaataaagcgaanaatcaatcggacgttttctctgtggggatttctcattcttaattgaattgactaaataactaaagtgaaactaaggctaanatcgactcgcctagtcaagctcg

SEQ ID NO: 48569 - DNA, 460 bp, Glycine max
  unsure (1)..(460): unsure at all n locations
tctntgaganaacttccttgagaagctagagcttagttacacacacccctctcataactaagctcacctccttgagaagcttccttaagaagattcctaaagaagcttgagcttagctacacatacctctctaatagctaagctcacctccttgagatgagaagctagagcttagctacacaccccctataatagctaagctcacccccatgacaaaaaacatgaaaataccaaaaaaagtccttactacaaagactactcaaaattccccgaaatacaaggctaaaaccctatactactaaaatggccaaaatacaaggcccagacgaaggaaataactattctaatatttacaaagataagtgggctcatacttagcccatgggctcgaaatttaccctatggctcatgagaaccctagggccttcccttggatctctagccaatctacttggagtct

SEQ ID NO: 48570 - DNA, 369 bp, Glycine max
agcttcataaatccatcactttttatgttctatgcacaaaaacttaaatgatgttaatttaacaattatttgctcaaaaaggaaaaagtaggagggaaaaattacaaattcctatataatttatgatgcaatactaccccgcaagggcattgggtaaaaaactccaagtagattgggctagagatccaagggaaggccctagggttctcatgagccttagggtagatttcgagcccatgggctaagtatgagcccgcttatctttgtaaatattagaataggtttttccttcgtctgggccttgtattttggccattctagtagtatagggatttagccttgtatttcaaggcattttgagtagtcttt

SEQ ID NO: 48571 - DNA, 375 bp, Glycine max
tacctcgaacccaaatagtgattatggcagtgagattttcaaaatgtcacaaaactttaagctttcctcgtacctcaatcagcaatactacaactgaagacgtattattattattattaatattatcatcaataaaacatgaacacccacagaaacttagcatacacgacgttgacctacgtacctcgcagagaaagctttgagctttgagcacccacgagtgtttcagcaccctagtagcaacagtgtatgtagggttttcttcgagcgaggacaatgtgggttttgtggagttcgagtgaggacaatgtgggttttccggcagtgtaaggggttctgtgggttccagcgaggacaatgtgggtgccgagggag

SEQ ID NO: 48572 - DNA, 455 bp, Glycine max
  unsure (1)..(455): unsure at all n locations
ctgcagcttacagcaatgcacttctcatttttcaaacgatatgttgacaagaaaacacaagtatattcactangaaaacatttgtgtggaaggaaattgtagtgctgtgattcaaaagatccttccacctaagcataaagaccctgggagtgtaaccattccttgttcaattggagaagtcactatgggaaaggctcttattgatctgggagccaatattaacttaatgccactctccatgtgcaaaaggttgggagagttggagatcatgcccactangatgactttacaacttgttgactgctccattaccagaccatatggagtaattaaagatgtgctggtcagagtaaaacattntatcttcctagcagactttgcggtaatggatatctatgaagataatgacattcctgtaatatggggaacgccattcatgttaactatgagctaca

SEQ ID NO: 48573 - DNA, 393 bp, Glycine max
  unsure (1)..(393): unsure at all n locations
ccacccagctcgcccaggcgagcaaagttgcttcctccagaagcaacaactatttggaggaatcttctggagggcccaagtgggcctggttgctatttgcacccctatttttgataaatacacccccctgcctttttttggtgattcttttttcgtaaagttacggaaactcacggatttcgcaacgatacttgttttcttttcgtaatgttacggaaccttgcggattacataatcatcccctttttgacttacggaatgttacggaacctcactaattgtgcaacgatgcttcctttngatttccggtgcgtcacggaaccttacggattgtgcatcaatacctncttttgatttccggcatttcccggaacttcacaaattgcctaatga

SEQ ID NO: 48574 - DNA, 418 bp, Glycine max
  unsure (1)..(418): unsure at all n locations
agctntganggtaatgggtgaatagtcttctgttgtcttctctattntacacttctttagatgataaatgagtacaaccatttgtattcttgcagggggggttcctaaattcaaaaaacactttgccttcttacaactatctctattaaaaaatgatatgcaaattaacaagtaattttcttctattcattaaaagtgaccactccattaattgtatctgcatgttatagaatttgtaattcatttgtgtttttgaaatattattggtaggttataagcatcaattttggtgtagaaaccaaggtgtttttttttaaaaaaatngtctattattttcttttaaatgcatcttcattntttaaatngagcttattatttccatcttctaaggagcctttcttttntataattattttac

SEQ ID NO: 48575 - DNA, 450 bp, Glycine max
  unsure (1)..(450): unsure at all n locations
aggtttgaacagggtcttcttcanatgtaggtgggatttggccatacaccatatcacaactcatgtcttcaaaatctatgattaagttcagatacacgtgaataaaagtttaaaatgatctgaattattttttaaattaaaaaataataataatccaataatattttttgggaagttatatatgtaatcaagaatgtaaaccttaaattttggctagtaatagcaagaagacatactaggagtcattgttaacggaagtccaaattcattagtgaaaaaatcttgggtaggaatcttgcacatattgacacacattccaacacagccactattctccaggtaccttcacaagaataaatatcaaggaaacaatggaaaaatggtgaaattgttacaacggccttaattaatgcangaagtaaatttcaaaatanatactagctattaatc

SEQ ID NO: 48576 - DNA, 213 bp, Glycine max
  unsure (1)..(213): unsure at all n locations
ggatcccccttctttgtgtaagaacaattattctctactcttaatctcatttgtgttaggatttttctatatggctggcgaaacactcttgttgggaatttctaaggaacaactgatgtaattactttaatatctaatngatggtgttcctgtgtcaatgcttctttcaatgcttaatttgatgctcttggctgacacccattgtatgtctag

SEQ ID NO: 48577 - DNA, 69 bp, Glycine max
aaccttgggaactccaggtggggggtattggcccaaaaccaacctgaaccattcccaacccaccccggc

SEQ ID NO: 48578 - DNA, 365 bp, Glycine max
tccaagaatcaagatcaagattcaagactcaagattcttgaatcaagagaagacttaatcaagataagtatgaaaaggttttttcaaaaactgagtagcacatggatttttctcaaaacatgtttaccaaagagtttttattctctggtaatcgattaccagattattgtaatcgattaccagtagcaaaatggatttgaaaaagttttcaactgaatttacaaagttctaattgatttcaaaaagctataatcgattacaatgttttggtaatcgattaccagtgcctttgaacgttgaaattcaaattcaaatgtgaagagtcacatcctttcacataaaaactttgtgtaatcgatacactg

SEQ ID NO: 48579 - DNA, 420 bp, Glycine max
  unsure (1)..(420): unsure at all n locations
cgaatgttgctagaaattgcaatttatgggcaagcctatactctaatatactgcaagcagggatttttgcttttttgtctagtttgcttcaactcgattttaggtgtggtgcattttccgtttgaactatacatatcgcaaataaattgaccaagactcattattgtaaaggttttttcacaataattatggtggagaaaatgccaattcaaatagaatgtccatgattttgactaggctaacaagttttgacagggaatcaagtcctgttatgttaatgaaatgaacttgcagaaatttgaacctctcaacagatggagaataagtgtataattgctttagtcactgttgatgttgatcancgtctttagaactacnntctttcttatctattaatntcaagtttgaaatgatacatat

SEQ ID NO: 48580 - DNA, 369 bp, Glycine max
  unsure (1)..(369): unsure at all n locations
actaanatnacagnnatagcatatatataccattactatcactttgtaattatagtgaacattgtaactttgcttaatagaaaaattaaaataaaataagttacatcttttcacaagtgtaaatgaaaaatattaaaggaatctaatacagttggttggtgtaataagatgtgtgaatattacaaactacttaacaccgtgttcaatttctacgtataaaaagatgtaaatgaaaataacgcatctaacacaataataaatcttgttaacaaatgaaaaaaaaaacgattaacgcaagtgctactagtttatatctcttaatcaaataatntatgttatgaattctgatattagatatgaaaataaata

SEQ ID NO: 48581 - DNA, 420 bp, Glycine max
  unsure (1)..(420): unsure at all n locations
acaaagcaccctacggcctcatgtgctaaaactnttagctgggagcaccatgacactaccaagcctttctctgacttcttttcgaagtttttagggagtttagtctcttcagaagctctaaccacccacaagaagtaactttcactatctcttaaaccataagctagttcttctatttgctcctcactaagtattgccatactcccaaaagaaacataaataacagactcttttatcttatcatctaaccattttatgcattcttcacttgtgaatngtgcaacaccatagtcttcatcatcttgggtttgcttgtctaanaacatggatggaatggatggtcctatnngtcctaaatttggccagatcttcatcgtccaatcagccacctacaagcaaaataagtaatgtcacattcta

SEQ ID NO: 48582 - DNA, 464 bp, Glycine max
  unsure (1)..(464): unsure at all n locations
tctgtggtttatgaacacgtcacatgtttccaaaatttctccatttctcaccacttgattcacctctgatatcatttggtggctgagaaaccttgatcggatgttcatggacaaggaacgatgcatgatgatatgttactgctattgctttcttccaaataatgtgtatataccttttgaatttggcctaatattttgcctttcaattcctaaagtttgctactacagtttcttttgtctttnttgtacaagggtaagtgtaaaatttttatgtagggttgagttgccttttatagggtttttaaataaaatttatattctctctcttccaattggtaatttctttgtgtgttcctggatcgttcggtcgatannttgtttgatttttcatagcgagaatgcatgttcatggaaaaagcgctaaggatctcannaagcatttaatcataacgtgaagatttgac

SEQ ID NO: 48583 - DNA, 291 bp, Glycine max
caatggtcttggattataccaagagctttctcagtatcttttcctctcaaagtgcttttgaccttactggaacaacacaatttattcttctttatttttttaacatacaacttaattgttgtgtgtgctgatgcttaacctttttcttttcattcttttcaacttttctcccccaaatttagagcaaatttgtcttgaaccagatgccctcctagaatctaaacaaggtattaggagataatcatttaaagttcggggttcagttaatgacaaatcaataagctttataca

SEQ ID NO: 48584 - DNA, 443 bp, Glycine max
  unsure (1)..(443): unsure at all n locations
ngcttctacatatataagagagcattttgatggaggtctcgtctgcctcctacaggttccgatagcccctttaccatttcctttgattctaacgactaccaaacaaagggggagaaaaatgtaaaagctgaagtgtcatagtctacagaaagcagaatcatagagcaagctgaggtgttatgtctgaatgaagcacactctatgggggaactcctatggagaattttatcctatctgtcttatatatactccaaaacatatctgcttgatgtgaaaattttacatgaataaaagagatatgatttatgttacctgatcagactttgtgtggtactcttatgatgccttagagtttttgtttctatcatatattatcttgcatctgataagactgttaatatgttgttctatgagatattctaagatcagattcatcttctaca

SEQ ID NO: 48585 - DNA, 260 bp, Glycine max
ttcgcttagcacacttatggaccgcttagcgcacattagtgaattctagcttagcgtgtgcctttctcgctttgcggatgaacagaaacggcgcgcttagcgaacctatacaggtgatcttcttgccgagtgttcctcgtgcgtaacccatgagtgttgcgcttagcggacgctcgctaagccagtggatcggcttagcgagaatgtgaaaaacaacactttccagcgcttgccttgttaactagaaattgagtgaaaat

SEQ ID NO: 48586 - DNA, 442 bp, Glycine max
  unsure (1)..(442): unsure at all n locations
tccttcgcttttgaatctaaagagtatttctgtattttcttttataatcgatgaaagccatgtgtgtgccactttgagatactcagagccattactgtctttgtttttcttttagaaaataaagaaacctcattaagtgactactcttgtctaattgattatggtccaagacaaagctacatgaaacaatttacaaggaaatgtaagatccaatgcttagctaaatacatagatatttaatcatgtgcacattactctgcagccttgcactttgaaatattttgaataaaagccttcatttttgtttatgacctcatcctacatcgacaacatttataaattatataagcttcattaggcactttatatttcaagttagatgagacaaatagtacatcacacatttntaaatgtgtattcgttccaaagtttatctaatatc

SEQ ID NO: 48587 - DNA, 342 bp, Glycine max
  unsure (1)..(342): unsure at all n locations
agcttaagagtgctggcttgttgagncttggatgttcttgcataggtatatgcatatcccgaagcaactgtccctcgccgctctgttgtctgcaggatccgtttcaattcttatctgaacaccatttataaataaaatgttgaaataattacgtttcagatatcaacgcaacatcattcctaagttcaattatgaatgcgtagcaaacctaataatggtgacaatcgattagcaaaaacagctgctcaaaggaaaactatctcatccctgtctgcatgcttaatgaanaagaaaaacagtaatgacagtcaaagaaaatgatcatttgatatctcgaagttg

SEQ ID NO: 48588 - DNA, 159 bp, Glycine max
  unsure (1)..(159): unsure at all n locations
aatacttctagcagtagtctctttacaaaggaattgaactcatcttncttgaacctcattactgcctcgataccgatgctgtgcgcaaccgatgttacttcagagcacagaaagaaaagaagagtgctgacatttctatgaaaataccacatattatgt

SEQ ID NO: 48589 - DNA, 610 bp, Glycine max
  unsure (1)..(610): unsure at all n locations
nccctttgcccatgaagatgttgcgctgactgatttactatgantgttaacatggtataagtgtcgacactcatatangagttntaaatttttttaattcaaagacgagaacacagtagacaatatttaatgagatatntatcgtagtataaactgtaaacatcgatagatatgaaactacaaacaactgatttaaatttgatattacattacacctaaccgaatcgaatcacatatgattgatatatntgactcttggatgactcttaataataaaatagaccaaactatacggcgaacactcttactagctgacatcntttctttctgtgttattttctatctcatcatgatgtttgtctccattcgtttcctatatctgttgtctgcattcacaangggtggactggagatcaatgttgttccatagctctaataatagctatacataataacaccgaatttcattaatggccatgcaggcacggtacggatttgttcaccagaatcngatcgctccgaattgaacatggatttatattgtacgcatttttattgtatgataatgttatatatccgccttatctacccgtatatggtgcctcatttt

SEQ ID NO: 48590 - DNA, 210 bp, Glycine max
gatgaggcagatatttaaaacggaaacattgtagaaaccaacatgaaaagataaagatcggacaatatgactgaattgtcaattttcattactatgagaagctaaatacaggccagacatagaaaaacccacatatggtggtgaaattactgacatctgaaaggaggttatgtgaggtaatgcaaacttcggtgacacctgacgtgtact

SEQ ID NO: 48591 - DNA, 656 bp, Glycine max
  unsure (1)..(656): unsure at all n locations
nnnaaaaaaatgatgactgaactacatgcatagttaacccctcagtncaattcagagtctacatcagtggcgagtnggtctntatgttcttctcatttctatagacggnnctaaccactatacaatgctcgtcaccaaagtgtgctcgatatcaactagttacacctagtgcataagcgacatcatgacgtggataagtcatggggtacatgatagctcccgctgcactagcatatggtactctactcgtgtgtgctctttcttcaggatgtggtggacagatctccctactaagagaattgcaacacgctcaggacaagagcccctgcttggaattatccatgtnataatctcttaagagaanatcaatgtgcatagattgggagagtccaagcaacctactagatctatctctataagttgtatacctagaatatatgtcgctctgcanatccttattgagagttgtctataagcaaactttgtcgctgaatgtggactgcatctctatagtaaatgtatctcataatcactagaagatatagcctcccatgacgttttgataccatgctcttctacattaacaactcgacttgtgatggctattataagatgtctactcttctgacacgatagtcttgacaatctaagtctcg

SEQ ID NO: 48592 - DNA, 214 bp, Glycine max
  unsure (1)..(214): unsure at all n locations
gctgcaccctcaattgattattactatctgtgcatcacctctacttatatcaattgcataattctacgacggtctttcaaacagaggattatcttatnttaataaatatatccaatcaatcccaatccttttaccgattaacatcttgtaagatnttcacaaatccctaccttttaattttcgactttctcaaaatatatcagctgatgaatta

SEQ ID NO: 48593 - DNA, 528 bp, Glycine max
  unsure (1)..(528): unsure at all n locations
ntttttatatatatatatagctgttagggtaatcatctccctctatgtatggggcacttgtcacagtctatgtagatagatatattagacatttattgtatgcgcttgctacagggagatgatganatggcaacaaattaagtgcctttaagaattatgttccttgctggggtaaagtaggtatgactgattttggtgacatgatgtgtaaatgagatgtgtttgaatgatactatatgttacaacttgtgttaatgttaatggactatcanggtgacctaagttgattacgtacgatcctaagaaggtgatcgatgtaactgattgcacaattcaccatatcagtcgatatagcataatacctggagctatatgtcactactagaatctaatgtgatggcatgaatatgttaactgtaatgctatatctgccggttaatttactgccacatattatacactaataaatgcgtcgctaataatctgaaaagcctattttttggtggaaaaaaataatataataaaaag

SEQ ID NO: 48594 - DNA, 174 bp, Glycine max
ctagacttcttgtaattcacgttgttatatccctatcgactcgagtaagtatacattgatctaagactctgtgtcatttgacgctcattatatggctgaacgaatcgatgaagttgacctgatgcagactcgtgtaattcagcgctcgaatatatgcctatcgactcgaataag

SEQ ID NO: 48595 - DNA, 615 bp, Glycine max
  unsure (1)..(615): unsure at all n locations
nntcactcganggccgantcangcncataatatatcgagacgctcganattgacaatgtgtatgctctntgagcattcanatggncataaactttcactctgaagtcggattcacgcgcatcgtatatcgagaagctcganattgaacaatggaacctcttgagcaatntaaatggtcataactcttcactcggaggtccgattcaagcgcataatatatcgagacgctcgaaatgaacaatggaacctcttgagcaattcaaatggtcataacttntcactcggaggtccgatccaagcgaataatatattgagacactctgtaatgaacaatggaagctcttgagcaattcanatgtcataactntcactctgangcngattcaggccatagtatatcaaacgctcgaaatgaacaacggagctctccagtaattaatggtcataacntttaactcggaggtccgattatgcacgttattatctagacgctcaaantgaacatggaactctaaacaactcaatgctaaactttgactcgaggctattaaaacatatattcagaccttgaatgaacatgactttacattaatgttaaattactcgagcgatact

SEQ ID NO: 48596 - DNA, 528 bp, Glycine max
  unsure (1)..(528): unsure at all n locations
ctgtataccgtgnagcacctgcagatgcagcttanggatgcagtcantttcattctctcaattatcttatgttactannagcaccccatttctagtgcattatagagtaaaaacagntgctctagcgcatcaccaagatattaaaccacggntgttcctatttctctctttctcacagaattgtttgnntctagtgagtaacgaccaaaaggaagcanagcaatccaacttatctagcaaggcctctactaatataatatatatattcatggttctcgcattggaatataaattacgacacataataaaatatattaatatgaccaatagtatcctgttgctgcagtgtagcatgtccatacannaataaatgatatagcatagaaatttgtgacttcacacattatcattaatatatctactcatatcatgccagtgagcaacgtattgataatgtaaaggatataatgcaaaaatgagaatcttaagcctgatctcctgatatgtgnctaaatgtactggcacttn

SEQ ID NO: 48597 - DNA, 201 bp, Glycine max
tgggtggctattatgtgtctttacttggagaccctgggatgctggttgaggaaatgagctatgaggagttggtattcattggttggatgcttgcttttgctagtatccgtgttgtgcctgagtggagaaaggtgtccaggtgtggtgagttctttgctaaggttggtaaggatgtaattggccctcgcgtttagctctgat

SEQ ID NO: 48598 - DNA, 112 bp, Glycine max
taagtgtatgatgctcaatgccaagtagacctataaataatgttgatggaaaaatgcatatgtgataggaagaaaaatgaaatgtatatgctatgtgatgacaacaatgagt

SEQ ID NO: 48599 - DNA, 646 bp, Glycine max
  unsure (1)..(646): unsure at all n locations
nggggtgtgatgatattaagtacactatgatactcaagcttaagnntattgatgaaangggagtaagtntgacacaattccaatatatannatatgaatttgtaacgngtatcntgtaattgatatcgtanaattcgattctgtagttgtaggttgcttcatctannaagctattggtcattgtaattaacaattttaaatggtgctattatacctataatanaagaagaacaaatataaagtcttaataagacagtggcagtgtaaataaatctattgacataatanaataacaagtttcagaattattngatgttaaacagtcgaagtgacaaaatttcgtctcgtaaattatgtattgcaactagtattcgcaatttgatcatnactantaatagttaattgagtttgaaattgacaactgtatataatttgtgttacgctgtaataattatatgatatattgcgatttaattctctatactataattaactacgagttattaatattctttaattactatacanataacgattacttatcttgtatacatacatgataataaatatctatanagactacatacatatatgttaataaatcttacccatacatgcactatttgtaaaaatatctgaaataaag

SEQ ID NO: 48600 - DNA, 636 bp, Glycine max
  unsure (1)..(636): unsure at all n locations
cagtacccctctaccttattcatactttctacatatgttgtaattgatttatattattaannnnnnnnaaaagtacgtgagcgactgangctcnnnctgatgatatcngatgagatgatatttcaagtctcttttcttnannagncactntacaaaccttgaaacaatattttcttaattaacaagtaagatattagaatgtcaatacaattgactgtgtgtatatttctctgcattngcgttgactctatagtctcacgaagacaggcaattntcgcctctctaatcttattcgttatcaagataagatattagtcctcatcataaaaagattaagaatatagcttaattaatcctttntccgaccttacatgacattgataatgtccattcctagagagaagcctctgcgaatttgcattcttcgtttggcccatgtttgaaaatttctcataatgcaacacatgtgatcgatttgttgctcaatttgaattttagacactattgctttgttgcacttngagntctagtcaattcaataacactaaccgtatcttaagaaagaggatggcacggcatatatactctatctgtgaacaggatctttccttcatgtaactntgggatctaaagacg

SEQ ID NO: 48601 - DNA, 616 bp, Glycine max
  unsure (1)..(616): unsure at all n locations
nnaaacctatgatatgttgacacttgatactcagctntacatggccgatggtgaaccggactaanattcttatattgctctgcatnggtatttctngcaatagtaacaaatcatgcagaacttcgtgatatgttctagagatctctgacatccattattaaaggatgagcccttgaatanatgcaataatcagtgctgatctagttggcatttgtcgcgacatattngtctatcttngtgatagacacccagctcccaggcagcgtagtatgtatcttggtttggtggctactatataatntctattcgctcgactgcattcgccatttggaatctcttgcaacaagaggatgctatctcaaaactctagtatgagtgatgtatttgtactctttntaggtttaatgctcttcccatattaccactcatgattattggctttgnggattnctaacgaaacattcgttcaaggacataacacgtacgaaagctgctcatagcattgtacaattgagccttgccacaaaactggaatatacaaggttcagacatgatctattgtgctatgtctttcactgggaaaatgttgccatatgatgataatcagatgtgaccg

SEQ ID NO: 48602 - DNA, 127 bp, Glycine max
tcgagtaacacatgtgatgctgtagccaatcagccagctactgggaaaataactattctctttcatagatattttaaaaaacatggttattctaagcaatatagaatctttcgctcaagagttagct

SEQ ID NO: 48603 - DNA, 633 bp, Glycine max
  unsure (1)..(633): unsure at all n locations
ntntaaccgtgatatgctganagcctcggngctntngcacggcagcatctctggtgaagtggatcaccanaggtttgngtttgcttatgctcttatcagccaaatgcatgcataccatctngctccncttccttgtgccacanacctcaaacaggaccttgtccatcaatccttgtaacaattcttctgccatagagcatgcctncacgtcatgtgatgcaccaggatgcatcatacaagaattcctctagtgcccatcaaggcannatatccctgcatcacacatcgcctnctatatgaacctcttcgaggtcaacacatcctccatccacttcgggccccgaggttatacnntctcaccgcattaactgccnggtccccatgactagcangaggatntgtcctcacattngnngtatccctctggaatgtcagcacccccgatcgatcaagctctggacctttatgttgaagccatgcattgatctatgaatagccccgngacacctcatggtangngcaagttgactatgggtgtaccacganggaaggacatngtagactttcccaggaagctgcttgcttctcaaaagtactatcttcccaacgtgtcgtacttcacctaacttctgg

SEQ ID NO: 48604 - DNA, 470 bp, Glycine max
  unsure (1)..(470): unsure at all n locations
gtacgctaaagatattatgaatgcttcaactgagcgtatgngtttgaagaaaatgtgcacaatgtncattggctttcttttataggatcgtggcctcataatccctaaacaatgtgcacatgagtaatttgctctcaagcccattatacatttaaccctaaacaatgagtatataaacttaaaaaaatagaatctaatttccatatatggctatggtannnaaaatatttatcaacgaagtgaanactataataaatataactgataagataattattataaaaataaatgaaataattatacataccaatttgtgataaaaaataatgtgaattcttttacanaataatatattgctacttctcttaaagtatggcttcattaactgatagaaatctacattaacagttatttacacgacaaataaattagactattctgcacattgcgcttatggtcaaacactacta

SEQ ID NO: 48605 - DNA, 319 bp, Glycine max
atctgtccccagcaggtcatacacttcatctcaaagataccgatcactctccggacatctttactgatgtcccttattggagctcctcaagcccgtggctagggtgtttcttttaccatagtattggctatagtcattaaagtgacaaatataatgaaacattaattctttatctcctgatctatgctgcaatgtattcacatccgaatattttctaattatgaggattaatcatctgatagaaagctgcggtcgtcatggtgaacaaagatgacttctagctgagcctgaccaccggatatatatatatatacatata

SEQ ID NO: 48606 - DNA, 286 bp, Glycine max
  unsure (1)..(286): unsure at all n locations
tctatctttcaatcttctctcaacatcattcaatatctttcaactctttctacagaaatttctgattcatttctcttcatctttctaaaagttntggtcaacactttctcttcaaagaaaaagtctttgatcanaaacttgtgctattcatctttntcattctcttnctcctttgccaaaagaacaaaaggactaacccgctgaattctttggtgtctctcttctcccttacanaagattcanaggactaaccgcctgaaaattcttttgattcttccttacccat

SEQ ID NO: 48607 - DNA, 281 bp, Glycine max
  unsure (1)..(281): unsure at all n locations
atagatgatgtacgantaagagataagatanactgccttaataaagagacagaagaggtaaaaacaatcaagctcatcaatacaagagagttgattatgcttagcagtatagaaaggatcactaattntagtatcaagttctttgaattagagtataccncaccaactaacctttctatttatgagtcatgctctgtactaacaactatggcatcaccagctacaatgtgagatggtacctgtntcatacnaaactcatctctcaaattttgtaacctcat

SEQ ID NO: 48608 - DNA, 439 bp, Glycine max
  unsure (1)..(439): unsure at all n locations
ttactggacgagctcagctgctgctgatatatagctggaaaggaattagacagatgctgtggcaataacagctatggatgcanggcatgcttcacangaccatatatctgatgcatggaacatggtcaagagtatggagtgccaaagcatcgagcccacttggaatcatcgcagtattattatgagcttgcaggctcacaacaatacatgcaatgattgacaaagctgcttaagagagattcagacaagattgattggtatactcgataagataggtcatctactggataaacatcacagtgctaactcttctgtctaagtcagtaacacagacgtaatatggggagactaatacctcaatgaaatgtcctgtctcaatagatacgcgagagtcaatcagattttatacgtgctatcaaaagaaaccatagtctcaatg

SEQ ID NO: 48609 - DNA, 183 bp, Glycine max
  unsure (1)..(183): unsure at all n locations
actgtctataanaatacngcccgcctgccctcatcgagtactggtgtaatcattagcattctgccgcatggaaccatacaaacggctgataacctgatcgcagcgcatcacacttgcgcctgcgataatattgcatgggaaaggngcgagaagtgcatatggcacttaataaactgtgactcg

SEQ ID NO: 48610 - DNA, 194 bp, Glycine max
  unsure (1)..(194): unsure at all n locations
atttgttattccccgactaaactgagaaagagacactgtagcanaatctcgtttacaacctgcantcactttcttccaaggattctacttaaacattaagtatactatgagaccgatcgctntaaccgatcatttataatagcaaacccgatgccgcgcctgacctgtcgataccgaagaccgtagtatatgtt

SEQ ID NO: 48611 - DNA, 105 bp, Glycine max
  unsure (1)..(105): unsure at all n locations
ttgaactacttcacatngatnntattggtccctatagaacaatgagnttgggtggtaattactatggcttagctatagtagatgaatactcaaggttcacatgga

SEQ ID NO: 48612 - DNA, 654 bp, Glycine max
  unsure (1)..(654): unsure at all n locations
aaaattttatgagattgtctacgctcatgctagatccctctggtggactangcncaattagacgtccctctanngttagactaacttanatttgagttcgaccgcagatccctcttgtaagactagactcagctcaagcagcttacgacagtatagccttatntagcctaagcttcatctgtagatctctctttgtagactagacttagactaaacagcattgttgtaacgacataattaanaccacaacttaacccgcagatccctcttgtaagactaagtttcgaccctgcttcaatcaagttctaaggcaactagtcatttnccaatgctatngtcacctaactatgcacatatatgggatatctgaccgaaagcataccaacattaagcattgtatgaagcattgacacagaaacataatcaatagacattaagtattacataagctattcatagaaatccccactanggtgctnnatcagggatacaagnaccctacctatgctgcatgacangctactcttgtccaaccgcagtgtcccgccgacaagtgttaaacgggagaccagatcgaatctcggactggtatctgcagcattcataatagtgctggatgaaatactgatatgacatgttcacttctagcaagag

SEQ ID NO: 48613 - DNA, 565 bp, Glycine max
  unsure (1)..(565): unsure at all n locations
nccccncccccaatgaatgatatgcactatgantactcaacgctatgaggcncctcantgtcngtgtatcttttccaagcctcttaggaagtgaatcaggatctatctaatctggctctggtaggtgtagagggtgcctttctttttctagaagtcgtctgctaaatataagacacagcataagagaatagtacagggttattcttaaganaacagaacaaatataactgaacacagagttgggcacttcgtgcagcatgctgagcttagcgcgccttatgatataacacaagcgcaagcgtagtgatgaacagtgcgataacatgctaacgcgcaggcgcgctagcgcgttatatgaatccagaagaacacagggttaccctttactatgcctatgacttaatactaagctaatactacctaactataccactatcatctgccttacttaatacttctaggtgactgaagaagtaagtactatgatgctgcagtgaagacatacccataacaaatgtagataagtgcagtgggcagaaacaatcttgctacttaataatgtgcg

SEQ ID NO: 48614 - DNA, 581 bp, Glycine max
  unsure (1)..(581): unsure at all n locations
atgatgacancggtagagtcggacnctgcanggcatttgcanngcttgggtantncccangcntgangtacccccattaaatcannggccctnccccattaattgtacctatcattgcttggcncaaggccaggagccagaacaangcttaaagtacgatngaatntccagtgcaaaatacatccatgccgcctcccaaacatactcatnccaagtactggtanngaatgtaaatatagaagcttnccgaactcctgcactgtaccttgctctctgctcctagaaaacttgaacagcgtggtagcaccatgaactagtttcttcgaataggccttgttgtccttgaaacaatggaacagatgcaaggcagcaccatctcactgcagatcnaacaactatgcattcatcacgggcggcatagtcatgtctctggcgcatcacatagtgtcattcgactgcacaccggaagatctcaagccacctgcaaacagctaaaaccatatgaaccatctactcgacaacacaattctatcacaccactatgttcaacatcaaatagaatnacacatttttaatcctct

SEQ ID NO: 48615 - DNA, 618 bp, Glycine max
  unsure (1)..(618): unsure at all n locations
cccctcattcaatgtttgatgtgtactctgantactcacgcctagancaganacttagtacccanattccttgtaaagctgtttgcggatctgtggcagtcttttcaccaccatatttngacacanatacatctttgacacgctctagaaaagccatgggtaactgtcttccaattgattcatctgcaacaacacaatatgctngcaaattcaaaagtctatatttataacactaccnactcnaatatattacggtcacctctacaaaagcagtatcagttgataatatatatacttaaagagaaccaatanatacttagttatcaatcttagatagcagcactctgcagcangccccaataaagctatagcaagatgatgaataggtgaataaccacattcttgagatctagatacaataatattntactactatatcatgtcaaaaaaaatatccaacttattattcataatatcaacgcctgtctagctaataaagaaatcagagataatagttacctcggtaacaagtatacacgatataaaaggaataaaccaaacaaggggagctgcacacgaaacaagtaagctgcaactggaagaacaagatgtgatgtg

SEQ ID NO: 48616 - DNA, 584 bp, Glycine max
  unsure (1)..(584): unsure at all n locations
ttactgcttgagcacctgcggctgcagcttctatagtctaatgacattggctggataactacnttactctcattaccacagaatcagattacctctcactctcaaagctcactctttttncactcataacaccacattctcactttctaaacctanggttactctacccttcatctctacagtttcataagccaattcagcatataaacatcacaagcatcatcacanaaacccttaaacagaatgggtatgtctaactcatccanacatggcaaagtcaacatgctntcaacaagagtcttcacaaataactatcacgaagcagaaaactaacanaactacccatcatatcntccaaaaccccatacccacgaaaatcaaaggagaaagaagtcacccanacttgaaatttcgaagtccacttcgagacacgcacttcacgacccccgaaatgccttctttcgcgantnngagcagaatgatggccaanggntgaagctnntgtgggcaacaatggtggaggaagaaaagaaaangaagctgcatgagagaggggagagcttctgaatntctattttgtgagt

SEQ ID NO: 48617 - DNA, 549 bp, Glycine max
  unsure (1)..(549): unsure at all n locations
nnngggnaatatgatactaggtgcactatgantactcaagcttctagctcactccanacatcttctcatagatcacaatggtcagatgatggataatngtcttgtngaagtgtanaccancattagagaagatcccaacggtaaggaatgctggtgcagtgttttaccgangcagctgcatgtagttntctctagaagcttattaagaggcttccncagaagcttattaagaggcttcagccactcagatactttaaagatccacgggagatcatgaaacggtctggaagggaaccaattcagaaatcacggtacgaagtggctcgtntacgagagttatgacttcttaaacttatagagcttcttaaagctctctgctcttgaaacttctcagagtctttgaactgatctattatcacaccttatactaatacttctanatatacgtgnataccacaatatcactcactatctatattatatttttagggtcccggtggactgaatgtgcaatgacgctcgcttgttcttcggactgagagactatag

SEQ ID NO: 48618 - DNA, 606 bp, Glycine max
  unsure (1)..(606): unsure at all n locations
ttatccttgagcacctgcgctgcagctntgataacaaatntannccatattaacagatanatcatatacttactcgagaanntactgaaatagaatctacatcatcaagactaatattagcctggtcaaataccggtggcttatatcccttcttgaaccagtcattctcaatgacctcagcanatgtaatccgctgtttcatattattaaaagaanaacagatacaggttggtaataataatantattggtgaaatggacggaaaagtaagagtatttgtaaacacttagatagtactagagtattaataaaataaacanagaanacacaaggtcatacagtggcaggatggggatcaangattnntgtgattagcttctttgcacttgaagagaaccatgangagacatgaactcngcctttgaaatctgtcaaccaanantggngaaaagaannagaaaagaaaaagaaacacaccaggcagcacctatcatgaaacagaaaatgtggactgcacttgaggaaaaatgcaccaattacttttcattttgtcatatcaggcttcaacttagaaaattncacagaaccatgttacttatctctctt

SEQ ID NO: 48619 - DNA, 288 bp, Glycine max
  unsure (1)..(288): unsure at all n locations
gctcaagtttcattcgtccaatagatggatagtgttacaagactctattcgnnttgtctaagaatattctctngtgattngacaaccttaacacanacatcttcaagctgtatatggacttcagagcttcgatatgttgagagatcccagccagtcgttatctaatagctttgatgctcgacacgaggccactactgtgtagaaagagagtggggaccatanatactttctgcaacatatcttcagaaaagtacaattcgctagtggtcgctagtgctcagagccgac

SEQ ID NO: 48620 - DNA, 531 bp, Glycine max
  unsure (1)..(531): unsure at all n locations
agctctttcttttatggcttanttcctagnggatggcgcctnctctcacctcttctnctttntcttncgctgcatctncatggtggaaaatcaccattaaaggacctcattgaagctcanagatacagcctncatagaagccccacaaccaagcttncatcaagtggtatcagagcacaatagcttcatgtaggtgctccttaaacctncattaattnttttttgctttaccttctcttncattgggtgttcttcatttttctccatgtatctcctcacatgtctggtgctaaatgggtgtaacatgaatctntagagtttcccaccgataaacttgctatagaagctagaatnngatttctatnggtcaaaaattatggtctttgtcttgaaccatgaatngtgttgagttaaggtccttntgagtttgtctggtattttttgtggctganacctaaccataaaatctacnnaaatataagtagngaaacctcaaaattagagtgactgtcacctatgtagttgcaaaat

SEQ ID NO: 48621 - DNA, 192 bp, Glycine max
  unsure (1)..(192): unsure at all n locations
gtatattgaatgtngcatcttagntcatatcatatcttttgtgcatcatgcatcatcatgagtaagtgagaagaaaaatntctaagttagaaaaatttcttcataaggcanaactctctatttttaatcgatacaatcttatncgtaatcaatacacaangtgtctgaagcatggcagagtatgtctcatat

SEQ ID NO: 48622 - DNA, 160 bp, Glycine max
tccttcttcatatattattactatcatcttcttcaccctcatgaagcctcatgctgatgtatccctataggctggcgggctaaagcacgagatggtgacttaagagtatcatgcaagagattcttcagttttattgacagtggcctgataataaaggggg

SEQ ID NO: 48623 - DNA, 621 bp, Glycine max
  unsure (1)..(621): unsure at all n locations
ctacatgtctagagatntctagagagaganaggtccaagttctatagaagttgagagattttgctgtgcgaagacctgcagagaccggagcttgaagaggaagccgtcctgagagctngagatngagttgtgagtgantgtgaggtcctataggtggaggagacatccncactacttgtatntcttcaatccttcatctntctctcttctttgntgtanaggaagcttccacgtatggagagctaaatcctctggttggtcgtccttgtaggtacttgatgtaaatatctggatatctatntaataatggtttggtgattcactatgctagcagaacttcattctaccatgctnttgccttgatcacgtagatgcatgtgttttagaatcattcaagagtggaaactgtctgattctagaacttgtacttggctgcacctagacacatgacatttgtagtagagatatctcttacatcangacctatangaagaccacgtgtngctactttgcttacgcatcgtactcacgtgantttcttttantagtagttacatactngngcataatcacacatctctttcagactgacatncatcaccgaagagctttacaagtact

SEQ ID NO: 48624 - DNA, 189 bp, Glycine max
  unsure (1)..(189): unsure at all n locations
tgccgctntcagtcggaacctgcgtgcagctgataatgaatcgcacgcgacccttgcgcgccggccgtgacaattctatgtgacagtatatcaantctgcatcatcgctatatactatcagcgacaacagcgtaggcacaatacgctaaaaataccccgctgcttatgatatgtgattatacatcgcat

SEQ ID NO: 48625 - DNA, 485 bp, Glycine max
  unsure (1)..(485): unsure at all n locations
ntttttattaattatgatagtatctctgcaggcgcgcngtcattctgcgatcttgcnggggttattattagcgtttaggagtgcacttatggcttataagagcagagaggcgcatgcatatacgatgttgagcccctgagttttgactgctgctgggcacttaagatccggtccgagctcaatccctatggagtgatacattatggcgcgttacacgcggatgganactgcgtaccactaatgcttggacatcccttcgcagtgggaatacgagagccgccgatcgcttcacagtggcgctgatgcaatggctgagcgattctctaccattggcgattacacgatatggcttagacactgttgagcgatgtagcagccaaccgccaccgtagcacccntggcgttattactnatatgagcttcagtttcgtactggctcatgcatcatgcaaagaaaggatatagctaactgttaactgttgttt

SEQ ID NO: 48626 - DNA, 450 bp, Glycine max
  unsure (1)..(450): unsure at all n locations
agacgcaccgagctcagctattgctacngccactacacacagcccagaactatctttgtgccagccaagtgatatggaaagatgatgatagtgaaggcaattgaagaaaagagcttccagcagcacagaaagaagaagtgctgacccggatatctgacttgagagaatgtttcaagaagaggatgataaatataaatggcaatcagctaagtcagtgaaaaacaacgccagtggaaagacaaccccggggaaagataagccagggaaagataagcccaagtaaacctataaactatatgtgtgatgccaactattgaggccaagtaatatgttttagtatattttattatggatttggccaactgttaaatgccatgttatttatcttgtagatcactatagattagtttgtttcataagaactttgcatttataaattgngaagctttt

SEQ ID NO: 48627 - DNA, 175 bp, Glycine max
  unsure (1)..(175): unsure at all n locations
agtgtgtctcacaagactctcattcatcanagntacaacaagtgttacacatgcttctatttatagactatgtagcttccttgagaagctnntcttgagaaacttccttgagaagtttctttgagagaacttccttgagaagctagagcttagctacacacacccctctcataac

SEQ ID NO: 48628 - DNA, 336 bp, Glycine max
aataagttattttattaggaaggattctctaatcttgaggatcaagaacaccctgctgtataaagacatacaacttgcggtgcctcgtgaagaggatttcttctatttaccttgtttaacacatcaaaatcaccttgccaaatattcgggcatactccatttacgcactcaataaggatctgacctaatgattcaaacagcttacctgttggatactattggaccttacttagtattcatttatatttgcgcacattacacgttacatcatatcattagcagacactataaccaaatacactattaacttctataatcgattcatagttatcaaca

SEQ ID NO: 48629 - DNA, 251 bp, Glycine max
  unsure (1)..(251): unsure at all n locations
tatatcgagacgcacganattgaacaacggaagctctcgagaaattcgaatggtcataacatttcactcngatgttcgatccggngacataatntatcgagacgctcgannatgacaaccgaagctctcgacannatatgaatggtcgtaactnttcacgcgaatgttcgattngngacataatcatctagacgctcgatatgacaacggaagcttcagaaatttaatggtcatacgtttcacacggatgt

SEQ ID NO: 48630 - DNA, 187 bp, Glycine max
  unsure (1)..(187): unsure at all n locations
atctaaagatgtattgtcngaagatggnggcatacacanaagatgaggaactgctgatacatttcttccaagaaagtcttactggngtagctgntacctggtacactaacttggaaccttctcgagtccattcttggaaggacctaatggttgccttcgttaggcagtatcagtacaatttcgatat

SEQ ID NO: 48631 - DNA, 232 bp, Glycine max
  unsure (1)..(232): unsure at all n locations
tatatgcatcagctggtctgctaganagacccaacacttctacctatngctatcaattntacttactntacattttactcgttttatcctagacatagnttaattctactntaaaccatcaattatcaatgtttctttcaacaatgccttatntctgaatntaacccagtcttagactagtttcattgagttcgatactcagattcatcccatttaatnnttaaatacttga

SEQ ID NO: 48632 - DNA, 368 bp, Glycine max
  unsure (1)..(368): unsure at all n locations
tggcatcagaacatttaattgtgaagcaccatatactgggttaanaaggaacgatgcagtggaaaagctaggcaagaagaaataaatgctctcanagatacaagaatataaaactcanatgctctcaatgctctcagtggagaatggacataaaactcacagggcaactacaatagcacttattcctatatcattaaatataaaatanaaaaattgctttatgaaaaaattctcccacctccttggattacatcagcataatacagtatatattntgaaatatcctcttctcgggtacannaactaaaaactacaggcatctgtgggtcatagatctaagatacaaatatggtactgctgcataccct

SEQ ID NO: 48633 - DNA, 523 bp, Glycine max
  unsure (1)..(523): unsure at all n locations
nnggccccctatggcacaattatgcgtacgcgtcgactcgtactacacagaatagaatatagtggtactcagcatctgtncncntacatcatatatatgtcnggtcatctttatctgacanatatatcctcgccctgtagctatgaccgcaatcacactctaccgatgagttgttattttgtatgggaataactcatcaacctgcatcgtccatgtcttcgtataattatttcacgtggcgatagttgagatgactacctaaaattagcatactgttgtcttacattctcattattgatatattgcccaagatatttcactttctgtccaagaatgttctctccctggagacgtatagatttttttaaaatataatcattattatcttcacaatctcggcaaactccgtaaggtctacacttaaaatatttctaattaaatacccttaaccttttactaatggtgaactaggttctgtgggcatgttgctataatgaccaatggtcttttctattgccattag

SEQ ID NO: 48634 - DNA, 447 bp, Glycine max
  unsure (1)..(447): unsure at all n locations
taggttgctgtctgtctatngtgcacaacaaagtttncacattcccaaatcgcgcattaaccaccatntcctgttgccacctncaactgagctcacgtactccacgtacccatatctcttttctaacaccggtcccataatcttcgagcttctcaacatcaggaatnaacatcaaatcatacaacctacaaccatgcatacatggcaatgaagatactctgccaaactaaaccaaatcatagctttgtactaaagacccagtaacattcttcgtacaattcgtgaccggtgatcgactaaaagttactgaagtcttgtcatagcctcatttgacgttggactgtagaacatcaaactatctgcctcttttcacaccacaaatacattctgactagcaaattgtgcaatcacagaatctgctaggaattgaacaactcttatcatctg

SEQ ID NO: 48635 - DNA, 210 bp, Glycine max
  unsure (1)..(210): unsure at all n locations
atcatgatgaacannatttatgtccacagtcttatgttccgtagccttcccccaccacgtatccattcttggatntcactcctctgtcgtatgatcctaactcaataactcctaatgcccttccaccctgtcatgcanactcggacccatcactctaacgtgtttccccatggcccatctatccgattggatgtccttcccaaatatatc

SEQ ID NO: 48636 - DNA, 268 bp, Glycine max
  unsure (1)..(268): unsure at all n locations
ngcgctcggccgtcgaccattttcatgtttacagcnattatcaatttctgcattcatccgcttatatacttattangcgtacaacccgcgttaatggcaccaatactgcttaaaaaatacgcccgcctgcactcatgagactgtgtaatcataagcatctgcgactggagcatacaacggttgtaactgatcgcacggatcacacttgcgcttgcgtatattgcatgtaaacgggcataattgcatatgcacgttaacaactggaacg

SEQ ID NO: 48637 - DNA, 564 bp, Glycine max
  unsure (1)..(564): unsure at all n locations
gtgatcgggtagagcaccgcggctgcagcttgangggagtgtanatatcattatctntacantatcttgtatttattattacatagaaacatatgattcttgatgatatgtaattacctaataatcagtaatcgaatgatatngttaccagtnnttgactctgatntcttcattataataaagatagattcagaccacacattcattaaacactgtatagtcccaaagtgcaacttttacaaatccactccttttgtcactagcaacaattcattcctagaatgaccataatttgataaatgaaaactttcataaccaaagcaacacaagatgccactgtctgaatcaacttttatagtatcaactaaaatcataacagagcaggaaaaatatcactgagggctataattatataactcacatagaaatcacaaggaattagatgcccctagcatatcacacacgttggatacacacaatcaggagaaccacagagccatcacacactggggcttattcaaaagttcagaataagtcttccaacagacactatactcaaccact

SEQ ID NO: 48638 - DNA, 242 bp, Glycine max
  unsure (1)..(242): unsure at all n locations
tatattgcctggcctgtctttcatgatgagttttgaaatgcttcatatctactttcagttacttcctcttcatttgtgattctttgcttcatgtaatgtatcatcgtattcatcatgtggagttgggtaatcattggagtactggaggacactacatggnggaaggcacgagtactttggaattggtgttgacactntctatcnattccatctctgcattacttcttgaaaataaaaattgt

SEQ ID NO: 48639 - DNA, 527 bp, Glycine max
  unsure (1)..(527): unsure at all n locations
tatatctggttnagcaccncangcnntcancctgnnnaggactccacatgcttcaccaagatgatgtttatgttgtgtatntgatcatngcatcaagaagcgaccatgttgatggaatggatcgcctcgacctataataggaagtcaagacctctcactgctacttagccaaactaaggccattggccgaagtgtgtntatccccaaaaggaattcattggctaatcaattattggccacactcgatagatccatatggcccatatattggatatccctagggttgtttaacacatgtgtaaatcttgctagatgaaactttgttctttttataaaagaaatgtctgaactgtccgtttctaaaaggtcttgagagaccaaagcttacattcttcatcatatctgactgcggatctcaccatgatgtcttagaactatccactacaattcaagcacccttaacaccacataataaaggtatacaaggttgctacataaagccactgctcttaatacattggttagcg

SEQ ID NO: 48640 - DNA, 74 bp, Glycine max
acagatacaaccctggatggaggaatcacgctaatctcagatggtccagccctcagcaacaacaacagcagtct

SEQ ID NO: 48641 - DNA, 157 bp, Glycine max
  unsure (1)..(157): unsure at all n locations
aaatctacattcccattcagattcgcccccacactngcaatgtggtgtttcaagtaatggatatgaatcccgcctatagctgcctcttgagaagaccgtggattcatgccctgtgagtggtcgcgtcaacgcttcaccagatattgaagttcgcagt

SEQ ID NO: 48642 - DNA, 503 bp, Glycine max
  unsure (1)..(503): unsure at all n locations
aatttctatgcctagattgctacttgatactagcttgtgaccgaactactcaagggatctctcagcgtgagtatataccggcccaagcaatatagcaactatgtcatgctgctctataacanaaatatgaacagctgatgtgcacttatatcgccaacccattatatactgcagacacatttacttcggcaacactattgcaacacagatagatcattgagagcatatatatcatgaccgttagtattatgatacctaaccaatctatctcgacccacttctctataagacatcttgtgcaacagatggcaattcttgacattcttaacggtaactttaataattttgaaatcggtgttcttgggaggttcctctagtctaacatgaagaaaagaatttatttataggttactaaagtactattaagtctttcacactaaaacggctattctttgatgtaaagttgtgatgtacattgagcttcttattgatacgtcttgacg

SEQ ID NO: 48643 - DNA, 437 bp, Glycine max
  unsure (1)..(437): unsure at all n locations
gatgacggtcttagcacgcgctcactgctataccgaatgaagaatgttttattccctttgaaatactagtttattcctatcttacagaaatcttatacatacaaaaacctaatggaagttgatcatatcagtttatccaagtagcgtttacgctacagcacagatagttcaagtgaactactatattccaccaaacctataacttatggtcatgactgggaatgatgtacacaatgaagacttctcatggattattggtgaagtatgcatatagtcctggagcaggctatctttagacgctggaattgtagaaatcatntcatggctactatgaatacctatcatctgcatttaatggtgatctgacacttacagtgcaagatactgcttgaagaagaggtgagagatacagaaacaagaaagaggaacatgctgtt

SEQ ID NO: 48644 - DNA, 54 bp, Glycine max
tatctgtgcttgtgtatctacgtctgtcttgagagacatatactctgacacaca

SEQ ID NO: 48645 - DNA, 493 bp, Glycine max
  unsure (1)..(493): unsure at all n locations
ctctttattaccatgctatgtgctcgcgactggtccctttctttccttcgccaacttgagtcattattgctaccccatagagctccgcgaaattnggtcccgccatactcttccttgcgagccctcttggtctcttggtcaagggctcttgcggtaattgcattctcttcccgtaacccggcgcactccttccgaacgtgtgtagcagccaacttgaaacttctcctggcgaaagtttgcctttcctaactcgctttgagagcttggacttcttcngtctcttcggtgcttcnaattctcttcgtgcgactttaactggcgagcaatctaacctcgatgcaactttcagcattcatggaccaccaatgtgccttacgaatgctctagctctgatcttctttacgggttccatgcctatgattcttgatagcttggatttggcgccgagacctacaagaaagaacatgttcttcgtcgtgctcctatgggacct

SEQ ID NO: 48646 - DNA, 563 bp, Glycine max
  unsure (1)..(563): unsure at all n locations
tattttagtatgtattgttgcgcacgcttagtgacctatgatactcagctctattaagctgaccatttatcataacacaagtgagtttattcagaaatatagttatctctttatctagtgagatgattctctaattcttgaggatcaagacacnctgctgatcaaggactttacaacctttggtgggccctcgctggaagagtgttctttcttcctatatctcacccttgtctttcaaccacaattcagaaaatccctctgccaaattatctgtgccataactccattacacactcanataagtgttctgacctanatgaattcaaacagaccttcactcgtttgaatacctcattgagcctgtagcttcgtatgcattctatatttgtcagcacactaactacgttacatccatcatcatttatgccgaaccactataagaccacagataaccactatttcatcttnnctatcattcgcattcataggttatctaacatctagcagcctggcagaggtatataataatataacctgaatgacacgacttcacnagcatgttg

SEQ ID NO: 48647 - DNA, 496 bp, Glycine max
  unsure (1)..(496): unsure at all n locations
tctgggctgcgtcgctactgtagangacattgctcaagaaattgttttatatttctatctgccaagaangatatgtgtccgattggtatagaagaatcanaaagttcatgcttgcctgaatgattacatactgtacagacatgatattcacagaaatgccccatatgcctctaggtgtggggtattacactacaagtgaaggatgatgacagtgtatagtgacaaactcaagacggccctcatgaagtgtgtggatcttccatcatccaagttaagcgtgtttgtaataagacatgcaaaggcctacatggatttgcataatgcttgagggctctgatgctgatcttcatttctggtgcccctatttttgtgtagtctttatcatatatagaaaaagatttaaccctgtgttggattttaaagttcaagatttctttctgagaatgatttgttcaatctggctttcttttttaaatctgctatcttacaaactgct

SEQ ID NO: 48648 - DNA, 226 bp, Glycine max
  unsure (1)..(226): unsure at all n locations
atctaagtcttatacaattaatatagaacctatatcctaatgtcacatcctatcagagcgtggtgttcccgtgtcctctagcatgaggttcttcatagtcatccacctattcatctgctccnccgaacacanagttcaagatcatcacaggatccanacacaaacaacagaccgngagtgagttattacatctctaactactagagagagacaacattacatatag

SEQ ID NO: 48649 - DNA, 574 bp, Glycine max
  unsure (1)..(574): unsure at all n locations
tgtatgcgcgcctgcngcatgcaagcttgcatgagtatcgngaatgagaatgcatattntcaagttctctttcacataatatgtagctttacanaccttganacaatattntcttaattaaaaagtaagaaattagaatgtaaaacaatggactgtgtgtatnattctctgcatttgtgtngactctataggctcacgaagacaggcaattntcgcctttctaatctttattcgtatcaagaataagatattagtcctcatcnaaaaaagattaagatattagcttaattaatcctttttccgactntacatgacattgaaaatggtccattcctagaaagaaccactggcanatgacattcttcgtttgcccatgtttgannatttctcataagcaaaacatgtgtcgattgatgcctcaattgattttagacactattgcttgtngcacttgagtctangtcattcatatcaataccgaatctaaagaagagggtgccacggcatatatactctatctgtgaataggatcttttcttcttgtatacntgggcatctgagtgcttgtgagcat

SEQ ID NO: 48650 - DNA, 189 bp, Glycine max
aattctatatgcttgcatgagtctgcatatacaatatgcaactcgtgaatgttctaaactttacatcatataagtacctgataagcatataggtactatgcttgccaaattgatttgaaacccctccacgtaagctgttggctctatttttcctacgatgcttgaatttgcaaaagagtatttaactta

SEQ ID NO: 48651 - DNA, 299 bp, Glycine max
  unsure (1)..(299): unsure at all n locations
gcaatggttatcatcgccttaatngaaaaacatgatccgtacacatcattagcttgaatggatgcagaatgaagttaagggtgtacatcananaccatatctgaaacgaatacctgtaaacatagtatataaaagctccacattctatcaaaacttctaaatatatgccaaaatgtgcgtatttcaacaaaattagttttcccactccaccggtctgaagcatgaacctctgtttccttgtttccaaatcaacacaagtaatatgataaatcatggcagaggttgctcattatatttat

SEQ ID NO: 48652 - DNA, 252 bp, Glycine max
  unsure (1)..(252): unsure at all n locations
atcgcttcanataaagtcntaaattctgcaaattaatattacaattcacaatngcaatatatataggtacaaaagataagtccatttatctacatctattgccttagttagaanaaagataaaatatttacatattaaccgacaatggtactcaccccaatatgganagtatttctagttagtaaatgatgactgtggtcttaaactcttaattctgaaaccagtaaacttacatagaatgaaatctatcac

SEQ ID NO: 48653 - DNA, 196 bp, Glycine max
  unsure (1)..(196): unsure at all n locations
tcataatgatcattgngatgtagtaattcgaattttgaaatacattaaaaggacctcaggacaaggactactctatgaagacaaangagacacttcaaatagtggattttgcgatgcagattggacataatcacccattgataggcgttccacttcaggatattgtgtgtctggtggaggaaatcttgtctcatgg

SEQ ID NO: 48654 - DNA, 156 bp, Glycine max
gtattgtcatgattcaactccaagttggaagtttaacatgttcaattaattcattcagaaatcaaatgtaagaacctgaatcaacagataacgtgtagtctcattccgtggccgatgcagctcaatctttcaaatgttctcatatgaaagctcaag

SEQ ID NO: 48655 - DNA, 182 bp, Glycine max
aatttcgacatttcacatcacaaaatgcaggtgcctcttattctctataaaaaggggtgcgcctccacgatatccacaggggtctcaacacgcttgagacttgagccaggcggttgaccataacacttggtttgatttcaatcgactcatacactgttcgagagactggaatatcttgtaga

SEQ ID NO: 48656 - DNA, 657 bp, Glycine max
  unsure (1)..(657): unsure at all n locations
ngactgagatgaacgactactcagctctagtctcancntgagcgtctcgatatattccaactcaatcggacatccgagtantaagtactcgtcgctngaatctcctacgagctatcgtcgtcagatatggcgcagatggatatattacatgactcaccgcgacatccgtgtatatatgtattgtcaattcacatttctcagagcttccgatctaaactttgagcgtctcgatatattacgggactcaaccggacatncgtgtagtaagtactggcatttcagttgctcgagcatctagtctcaatgctgacatcacgattattacgcgattcatcggacatccgagtataaagtatcgtcgtttgaattcctacgagctcgcgttntcaatgttagcgactggaatatacatgactcaaccgacatcggtgatagagtattggcattcaatntctcagagcttcgatctaaattggagcggttgatatatacaggactcaacggacttccggtataagtattgtcattgaattgctagagctctatcctaatttgaaggtctgatgtctcccacatatctgactgcgaagaatagaattgtgctgaattccacaactacgtctacgttgtcgctcgatatacggattatcgactcct

SEQ ID NO: 48657 - DNA, 201 bp, Glycine max
ataaatacagatgagcaatgacataaataaccggtggtggttttttgacgatattcctgcctggcataatagcgtccccacgcatgataaaaggaaccgcgtataattttaaaaaatgacaatatcatatgaagactattgttgttcaataatcaacacctactacggaaaaaaaactacgttgctaatgcgactgtttaa

SEQ ID NO: 48658 - DNA, 518 bp, Glycine max
  unsure (1)..(518): unsure at all n locations
nctcacaacatggacttaactacttagcctgntgccctgactaacagtgggattatgtgctttatacaatcacaaatggctttattggtcatcataatacatgggtgcccaccgataattgcaaacctgcctagtgacaggagaaatgtgaattattattacatctgaacccaactgtgattgatgggcgcagtgcctgtagatctaatgtagtgagttgctatgtgatgaacgatagttacagcactgatgaatttgttttctgaactagctactatactcatgctagagctggttgacacttctaaatcatctatttgtttggattatctgcagctgaatgttatctattgcgtggctgaatatacaggataaatctgaacacacttgtaaacatattatacaatgataatnatgtgagctatctgatgctattgtggtgaaaattgagtggggtgtcaagacttacactgtgaacatgtgatgtcactctaagatgattatacgactggtagcag

SEQ ID NO: 48659 - DNA, 557 bp, Glycine max
  unsure (1)..(557): unsure at all n locations
ttactgtgtaagcactgagctgcancttatccttaaatcttaagtgcagattttcaggaaaatgatatatcttatncagcgcaaggtggtgcagcccagatacgcacactgctatatatacatgaacgctgcacgagttttctaccaagtccgggattgaagagttaatttgtgaagtttggaacttgagtggtttgtgagcctaccttgatgtcaccctaacatcaagtgttggacctgagtgtgtagaggtgatctctattgttcagagagcaatctctggtgtgtctttgattatttgacacaccggagagtgattgagagggagtgagaggcgttctcatatctaagagtggctcttangtagagggtgcacgggtagtggtatgtgagaatgttgaaacagtggctgtagatcttcaactacactatntagtggattcttctggctgtacgcccaatgtagtgcgttgacgaacggttacattctctgtgtattattataattgttatcagcaaattactgttatttgacgtgagtcgaatcggcaactctt

SEQ ID NO: 48660 - DNA, 639 bp, Glycine max
  unsure (1)..(639): unsure at all n locations
aataatctatatggctatatggactcttatactangcttgagcaattcaacgacantagcntntactcgcatgtcttgttgagtcccgtaatatatcacggcgcactctattgaatgttgaagctgtgagcaaattcatacgacactcacgtgttactcggatgtctgattgagtcccgtaatatatcgagacgctctgaaatgaatgttgaacgtcacaacatatncaaacgacaataacanttttactcgatgtctgatggagtccacgattatatagagacgctcgatntagaatgttgaacctctgagcaactctatcgaccataacgttacactcggatgtttgattgacgccctcatatatccagacgctcgaaatgaatgctgtgcatctgtgcaatcatacgacataactttttctctgatgactgattgagcccgtatatatatacacgctccacattgatgtgaacctataaccattctatcacagtatcttntacttgatgctgactgattctctattaacggatctctaatcatgtgatctctggcatctacgacacactttactagagaggttgaatctattaaagacgtgaatgaaggtaactcagcattcacgcatactatgct

SEQ ID NO: 48661 - DNA, 272 bp, Glycine max
  unsure (1)..(272): unsure at all n locations
aatgaatttgatcttatcatatnanataacanaagaaatttcattatagagatgagagaatangtattttagtacaaccatgagggaggataaggtatcctctaaagaanaaattcagtgatcttctgattatgctcacccctttcacagannaagaggangctaccatcatattgagaccacagcatacgccaatatctctcaatagtgtcaatgtctcacagggacaggtactgtattgaaacagattattttctttttaaattacttct

SEQ ID NO: 48662 - DNA, 700 bp, Glycine max
  unsure (1)..(700): unsure at all n locations
aattagagatgtacgtggtgcactctagatctcagcttggctcacaccggattgtctgagcggaaaggangtgatttatcgttgaattagcaagaagctctgcattaagctcgtgatagngcttcgngcgaagcttataaccaagcattctgngcatttcngtgggacttcatgagagaatgtgaagttngngctcaccaccgcacagattctgaaggttgtgaagaagctggcccacgcangcatgctggactgcttgcaactgctgcactttcatattggttctcagattccctcaaccgccttgcttgctgatggcgtgggagaagctgcgcatatctactgcgagcatggtcggctcggggcgaacatgcgagtcaatcatattggaggtggacttggcatanactacgaccggtccatatcatgtgactcanatacttctgctgagtacggtcttgaggagtatgcttctgctnggtagtcacatccgttcattagtgtgtgcgaccctanagttcgtganacattcctgtcatctgcancnatgagtgtgagaagctatcgtgtcacatcactcatgtcttgattntcganagcggntagcacatncatctcacactggtgaggatgctccctcgctnttgctctctatactctgcgtgngtagcagcngctgaatccactatatttccttctt

SEQ ID NO: 48663 - DNA, 552 bp, Glycine max
  unsure (1)..(552): unsure at all n locations
atagccctgagcacctgangctgcagctgcnaccaatgctaccactatagaggagaaccttcaggtgttcatatanacctcctnctctaaatcaccattaagaagagctggtttcacnatccattngtgcaactcaaggtcaaaatgagcaactaatgccaagattatacgaagagaatctttcttagatactggagaanaagtctctttgtaatctattccttccttttgagtaaatcccttagcaacaagtctggccttgtatctctcaatggtgcctaatgaatcctttntggtcttaaagacccatttacatccaatggcctttcgcccattaggcaactctacanggggtcaactttgtactctgatggaactatctatcttcatggatcatacctanattgactcttacactcatggtngacaaaagttaggacatttcagctcatattatagcagatcttgcaaatcatatatactaggaaagtgatttctacttagtgacctcttatgtgatcacatttcttggacatgtgtcactggtgtctn

SEQ ID NO: 48664 - DNA, 276 bp, Glycine max
  unsure (1)..(276): unsure at all n locations
tctctccatacttgtttgtcattngcatggaaagagtgattctagtgtgaagtntgtagttcagtggcacatgtggagggttnttttttaccaacggtgatatgtctgttactcgatgtatntagaaaactatcccaagtcactttatagattactactacaatctattgtaccattgaaatacagccccaaactaaatatcaatatctctttctctatgacctgtgaacccacccaagtagacactcccttnttcctatnctacacctttctaac

SEQ ID NO: 48665 - DNA, 244 bp, Glycine max
  unsure (1)..(244): unsure at all n locations
ccttgacccagngtgagaatgtcaatccttacccttnggaagcanaaaagaagagaaggaatatttccaatcaaaggaaaaaagagaaggaatattcccaatcaaagaanaagcanaaaaaggagagaaggattatntccaatcaaaggaaaaaaggaagcaaggaaattcccaatcaaagagtgggagaaagaaaaaagaaaagaaagaacattcccaaccgaagaatgggagaaagtaaaaa

SEQ ID NO: 48666 - DNA, 203 bp, Glycine max
  unsure (1)..(203): unsure at all n locations
tgtcccacattatttccatgacacgcgtgcaacaataatgaatcagaaaattatgccanactggtcatgcatgcacttatgtggacactcaagcatcaagtttttatggtcatgtgacactatggctcangattcattnntcctattcaagtcaacccagtggttccaaaacatgctcttgtatcaattcatggccttatctg

SEQ ID NO: 48667 - DNA, 226 bp, Glycine max
  unsure (1)..(226): unsure at all n locations
accttttgtgaatgagtttactcgggaaatagacatctcagaatcttctgactgtacctagtgatggtttttagcangacattgatgttgcttataagcaataatatgttgagtgtgaagaaatactacagactgataggtgcagggctgatgaatcttattcttctatttttgttcatgccacagacgtaacttgttagcttgagatctgaactgtggaacattt

SEQ ID NO: 48668 - DNA, 625 bp, Glycine max
  unsure (1)..(625): unsure at all n locations
ngggtcaaaaacgatatgagtgagcacgttgangtgcacttaganactcaagctnganggtgatacttcttcacccctncatntaanatcctgagatcccanggggaatcagatatatcgtacaaatttctttagcananatattaattactctaaatgcttctttatgcgtngtataagtgtgtcctttgttncagntagcctcagaccattcttcctcggatacaacttgcattcatccactttcaatttctctaaccgtcccactggcaaccaaaacaatngagaaataaacatgnttaatagaanagcttaacacatacaaatatcacagtaaanacagacataatattctatttccactttaagtttaagtaacacacanagggttaagagaatctgttactttaaggtgtgatgatctacttgaacanaaacggctaagatatttcctctacactaaactaaaatgaagaaatgataacgtggataatnttgacttctcanagtgttcatatgacaatcatcactctcactaatctatctcaaacatgaacacaaatgcacaataggtaaaatcgatttatatgggtgaagatacagaacccgtttgcttctagtaagt

SEQ ID NO: 48669 - DNA, 557 bp, Glycine max
  unsure (1)..(557): unsure at all n locations
agcggcgcgngatctctagagcacctgcggctgcagcttagctncgagagagggaaggaccatccgagtgtctgttgatcttgaagatgagttgagggttgctcanggccaaaagaaacttgtctcagcggttatgtgaaacagagaccaacatgctagccatcgtcagcaggtaccaagaagaactaaatctagccacgacccacgagcatagagtggcggacgagtatgcnccagtgtacgtggaaaaggaggatagaggaaggggtgatcgactcgtacatcaagaggcaacaatgtggatggaccgatttgctatatccttgacgggagtcaagaacttncccaatgctagccaaggccaagcgatggcggcacctactccgccccgaggagatcacggacttctaggtattgtcgcatatgatagattaatggccatataatagaaatgctaggaagctgatcgccttagatctggctagtatacctctgataaatgagttgccatgtttactcaaagcaggcatcaacactcgctttatttagatgctctn

SEQ ID NO: 48670 - DNA, 127 bp, Glycine max
cagatgacccaatgccatgactggatctactgacatgggcgcaatggacacggctaatacatagaatttcggactgtgaaatggttcaagcagatcgttctggtatacgaggattttgctgtctgat

SEQ ID NO: 48671 - DNA, 202 bp, Glycine max
  unsure (1)..(202): unsure at all n locations
ctacgtttctcaagtgggcattggcgaacgacatgcgttcagatntgggttntctcaagtggcgttcttgattnttttnnntctttccattttgattattgtgctattggtaagcaccctatccaactacagtatcacttctcccacacctgtcttacggtgtgatgctntaccacattaaattcaaatggacagatacaca

SEQ ID NO: 48672 - DNA, 685 bp, Glycine max
  unsure (1)..(685): unsure at all n locations
cgcacacgtcgtcctcatccatntgtcatntcntgtgatcganngnggtgtannnaagtgtagtgtagangtnagtntatgantgtcttgnnnnnnnnnnnnnnaaggatgtgcgnctgcngcatgcaagctatanatataantcatactttcaatggatgatgacgtgtatntaatattgttgtttgtcacgngactttatgtataataaatgattagctcttaaatcattaattacattcacaatacaaagatgcacggtgagaattaaaatgaatgaccaaatcatcaaatacagaagcattgggttggataatatatantacgaatntgaatcaatcgataggcatatctcctgacctgaattcctctaatataaataggaattcaatcccacttaattgattcagtatgtaatagtaatgaaatgtgaaaaagaacatnttcttccttcttttggctttaattgatttcctatnttgattaattaattaatcatggttggcgatagctatttaaagattaagatgtatcaaatcttatgccattattngaattagtttaacatcaagatattcaataaactagactgaagagagttgaaatataaatagaaacttaacctaagaaaaagatatgtgcatacgaagactattctattgaaaactgacattaatgcttatct

SEQ ID NO: 48673 - DNA, 228 bp, Glycine max
  unsure (1)..(228): unsure at all n locations
agcgagaatgtgagagaaagagagacgaagacgatgatgtgtcanagaacatatatatgaggcccganatcgctagccttacattctcttattacgtgcgtgtgtacaatgcaaggccagcccaggcttggcttaccttatcctatcctaattcctaacactctttttggttatctatctcatccanatcgcaatctctattctcntccnctcttaccttntctctct

SEQ ID NO: 48674 - DNA, 276 bp, Glycine max
  unsure (1)..(276): unsure at all n locations
ctgcagcttataggcgggtcggaacaaggtaggcgttccaatatgctaaatatattcgagtcttggattggacgacatgctctctgatttcagctgngaagatggcgagtggaggaacgccccggcatttacgcaacaagcataatgtatacctttacgggtttaaaagctctatagttgcgcctaggctttagagntctcattttgttaaggcgttgtgtcttctgttgtttgaattataatacgaggatctttcttcatctggtcctggtctct

SEQ ID NO: 48675 - DNA, 234 bp, Glycine max
tgtaacaaaattgctttgaagactttaaacaatctagaaagactcataactttatgcgaacaaaaccattaaatgcttattggcttatgtaaggacacaaccacaaggaaagggtatgggtacaacctaaaggaatgtagctaaagacatatgaggcacataaactccacaacgaggcaagagtacatagtcacacataagagggttttttggtaccattgggggggagacact

SEQ ID NO: 48676 - DNA, 704 bp, Glycine max
  unsure (1)..(704): unsure at all n locations
aaccattcgactctancncgctgtcgtgctagtatgtcgcgntcgtnaatgtntntnnnnnnnnnnnnncnnnnnnnnnnnnnnnnnnnnnnnntgcgatgtactgacgctgactcancacncctttanctnctatggnggtcctcaatctgtacgagctggtaggcttgatgaanatgtttataganngnncggagctacaacgcactctcagagactntctccaacgtatgaatagaaagatcggagactgtctgaacagactgtcggttctcaggatgatgccaaacgctgaaacaagacgaatttcgagatcgaacacgtgaagaaattaaagtatggatcattattatcaagtttatcactctacatgatcttgtactatcggaattatggatatgtgctctgtacaattagtactacacatacgaatatagcatgtgcatagccctctagacttgcgtggcattatattagctagcaatttgtgccaattgaccgctatattctcttacgacataggttctatgaaaacactgattctcagtgtagcttgtcgtaattgtaatatactcgctgaagtgattatgggaattactatataatatgtacagtttattgtcagttatagttatactgctactacattccaatgagatgctcccgttgagtcttattaacatgagctcgactaatttgcagcg

SEQ ID NO: 48677 - DNA, 136 bp, Glycine max
ttctcttccataggtggttcttcatttttctccatgtatctcctcacatgtcttggtctacatgttgtaacatgattctctatagtttccaccgcataaacttgctatagaaactagatctgattctctatggttc

SEQ ID NO: 48678 - DNA, 747 bp, Glycine max
  unsure (1)..(747): unsure at all n locations
cacgtctacgtcagcnactcacggtactaactcttgttattangtgtnaaagtnnngggcgnnnnnnttnnntnnnntnnnnnnnnnnnnnnnnataagactgtagacgtgatactactgctatatntacactntcagggattaaacctttacttgangcattagttttctattttaatattatgtcttataattaaatagcatntcctctaattcttatgagacatactatatgacacttaatccttcgtcttcaagacatganataagaatagtatataagcttatagctacatgntatttattggctcgcattcggtttaatattgaattttcaaagatagagagaatcatactactgtgttcttgcattatatatatatatatatatatatatatatatatatatatatatatatctcgatcgtacctctgatcgatgtgaagtctaagtcttggcaaatgcttaatgtcgagtatgaataacntcacacctgatatgaactatagttctctttctgcgtgtgcgngngttgtcaatccaggtcctcaacatgatatattatacatatactggtgtgcgtatcgatagctcctgagtactcactttgaagaggtgctatactttatatgtataatcatgtgcgtggtaatctgcgtgacatatatatctctgtgcaactaacaagatttctcgtgaaaatataattgtccagtactgtaatatcatgttcttattgggttccg

SEQ ID NO: 48679 - DNA, 615 bp, Glycine max
  unsure (1)..(615): unsure at all n locations
cgaccctctccatagattaaaccgatatggganaagggggattggtagtntatnatnnnnnnnnnagctgcgtgagcgacgaagctcannnnacnnnnanactgctatcattgtgctatttatttcttgccgtttaacagntaagacctctattattgtaaaatgagatgtctattaatgagcctcacttatactgcgtgcaacaagagcaaatcataggctgaagctagaaaggacctaaagtgctcatgttgtaaagtcctctaaagacaagagcataagaatataaataacttctagccctagaatgaatctgttaatggtccacactaaagaaacaaattcaaggtgacaactgggttctttgcagtatgcctagacatgtatataagaaatgtaccaataacatgcttggcatgcaaagaatggatgtatcttattctgtctgtctaaggcaattagcttcattctaaaacactggtggtagatatgggccccactacattagtgttcaatgcaggctgccaactaccgaaccaatgatttgaagatggacatgctgggatggaattcgtgacgtgatacatacgcatttaatatacttaggctggctcg

SEQ ID NO: 48680 - DNA, 602 bp, Glycine max
  unsure (1)..(602): unsure at all n locations
agatacgtctggtcgacancngcgagcacgagtntgcaganngcaggngtnaaaggggnttnntnntnntnnnnntnntnnnnnnnnnnnnnnnnnnnnaatcacatgtatgaactcacatacttngcnngangnngnnngtgnatgtgagactcctactatattcgtgtctcacagatttcttaaaacatttaagcacacaatcattaacatttcttaacatgcaaacacatgatgcacaaaattataagatatgaagagaaatgcaacctgtttatactggtcggcacaaccggcctagtcagactcaacaacacttgaattcattatttgtaaatcttacaagttgacaacaggacaccatccttggtcaatcttacacaaagacttagttctaacatctatgatataagatggagagaactcctcagaataaatacataaatatgataacttaaattgcagcgtgcaagatctttgaaacttacataagctttgatccttatgcttgaaggaaaatttgcagcaattttatcttgaagaaaattgaaagaattcttaatctgcaaactaatatgctggactacatctagaaagacgtg

SEQ ID NO: 48681 - DNA, 342 bp, Glycine max
  unsure (1)..(342): unsure at all n locations
taaaatcttctatttnttgttntcatgcatatatcatntggaacttgcttttatatctatacataggagtatatcagcctaccttngaatgtaaacataagggtttaatttcttggaaaaggactgaaaataacttaaaaacatttttgaaaaaaatagtctttcgctaacgcagcctacgctagcgcatattagtatgcctacccacagttcagcgcatgacctaacctgattgagtgattggctgtagctgcaggatactaaccactcattcattgattcgtaactcacctatcgaacacagtatcttgtagcggacatgtgcaaccatcttacgttact

SEQ ID NO: 48682 - DNA, 621 bp, Glycine max
  unsure (1)..(621): unsure at all n locations
ngggtcggtatgcgctcggtgcactatgatactcagctanggtgagagcntgaagangaataccgnccttanganatgtatcattcacatagaattctgcataagcgtagaaatcanggtttagctccttcaaagtgttaatanatctgaagntatacncatctgaacccggnctttttgtcgcttccacagttccacacagcacaccttatctcttcttcattaanaggctggaccatcatcttcctctgggtaggagacagaacattaaaatgaactccatccaagntgggtctattcagatgatgttcattgaatctattctgaanatgctgcagaacttcagccctgatcaagtcaggattntctacccaagtaccatccatctttcagcccctcaaggngntnnctctctgctgaagtgataatttatggaataagagctgtactatccnctcttttatcatactctagattctgctgccaagatcatgcaatagctttccataatcactgagtttctcactgangactgtgcagaagtgagagctgatctcaacatcactctgtgagctgtactanaccagcactcatgcttatcacttcacttgtgaacttact

SEQ ID NO: 48683 - DNA, 291 bp, Glycine max
  unsure (1)..(291): unsure at all n locations
ctacctactgtngtcattntatttaccttgcactntatagnntttagcatanaagttagtttaaattctgtttganattatcaatcatacatgttctttcaacaatgcttcatttctgaacttaattcaggctaacattagttccctgtgttcgatactcggattcatccattntaattnttanatacttgacgatccggtgcgctttctggcgaactggatttcccttgaatatatntgaacaaagaagaaatggaacaaatagttactacatgagaaatcgaacactta

SEQ ID NO: 48684 - DNA, 666 bp, Glycine max
  unsure (1)..(666): unsure at all n locations
nnnnaaatatgtatatgagagatctagatactatgctaggatgaccagcgtnnanggggaacctcctgctcttattcttgaccacagagtggtttcctgtagatatgtcgcggggtcaagagaacctgnngacgtcatgcggngtgctatcgcccacaccaagcttgaccaatctcgaccccacccgtgcatagtcagtcagtgagaacctgtgatgtacctaaacaggcgagctcctgacagtctacagataaaagatacaaagaccacacagcacggaggcttgtggaggctggcagctgtgaatattgtgtgatatataggtgtgcgctctggtaatcgacttaccaacggtggtaatcgattaccaggcttaataatgaagacagaatgctaagatggtctctggtaatctgataccaagggggtgtaatcgataccaggcttngaaacgaagtcnggaagctaagggagcctctggtaatcgataccatcctgtgattcgatacaccatgaangggcactggtatcgataccacgattgtgatccattcatagtgactcttcatattcatgtctgagctggtaatcagttagctctgtatcattacaacttgtgtacatacacaatgatacctatatacccttattgatgacggtataaag

SEQ ID NO: 48685 - DNA, 616 bp, Glycine max
  unsure (1)..(616): unsure at all n locations
cgcactgcgccgngacnctctanagncnacctgcangcatgcaancctgcatttgaaatngccgaagccncactcattattatgtatagaccttgcatctcanacaaaccaaatcaaccgtacanaatcattatagttgctggttgaatacctcacccactncagtgtatcacacaattatggctcttctctaatgaaacactctttgcctttaccactctaattccncttgagttcttaggccaatcaagagattatggtcacaacaaagaacaattcaccaatatgtgtaanggtaggctagagagaccaggataaggttaaccaagatnaaggctatcaatgttttatgcacanatgaatgannataaattcagagnttaggaattcaagtaacaatccttcatgcaaccaatatattaccttaaagagatatatnnttttttaaagtcttcaagcatgaacccatcagcccaatnnttntntnattntgcttatacgaaattcagctttntttttattatataacaangagaatcaaatgctttancttnntgcatggntcaggcctaaaaaaaatatatatgaataggatggtatatacacgccaanaact

SEQ ID NO: 48686 - DNA, 586 bp, Glycine max
  unsure (1)..(586): unsure at all n locations
ngggggtatcatctgcacttgaggccttgatactactngctatggatctgccttcacggcttgcattggcttgaagcggactctgcaagggctgtaagctaaatgggctgaagacaagatcaatgatgccactatcgtgcaaggaaagggaacatagctgtctgagcttgctcttcttgctctgganaataactgtntggtcattcgcattccaacagctctttatgatatangctaagtcaatgacccggcttangttctttgangaggtaagagcatcagatccaactcccctcaatctacacaaggctgtgattaaagctgggaagcctaagcgagaagaagtagactgagccatcatggtcattngtccagagatcanaccgcaatgttcatgtcatcctgtgattagccatnaccacctactctgttgtgtcaatctgagtgtggaggaggactacgtngagtagagagagctcatgctgaccaggagaagactttctgagacttcatgtggcctctggtagataagccttgccaatgctaacagctcactcttgacaacctaagcaactaatagtggaag

SEQ ID NO: 48687 - DNA, 559 bp, Glycine max
  unsure (1)..(559): unsure at all n locations
atatggcggaccttanagcaccgcggctgcagctggccgatttgtcttcaccgcaaaaggatcgaagtggtctataatatgcannattggtcattctgctttgatganaatggggcaagtgaagaaggtgagaatgatggagaaacccatggtgtgactaccattcctatatggcccaagttcccaccaacccaacaatgtcattactcagccaataacaacccatcttcttacccaccacccagttatccacaaaggccatccctatataaaactacaaaacccacctaccacacgaccaatgctaaacaccacttttagcacgaaccgaagcacctaccaaaagggaattttgcagcaaaagcctgtagattcacctcaaatctggtgcatatgctaatggtagcatacccttgctaggttctcaactcatttttcgagatacacttgacgcacatgtcatatatggggagcctgggcattcattgatgttgatgacctaacatangtgcaatctatatgtgtgcctgcttgaattagagaatccttgtgatctact

SEQ ID NO: 48688 - DNA, 232 bp, Glycine max
atgtcgaggctactgatttttttccatatggggataagtacactactcgcacaaacaaatggcatgatgccgtaaatggtacatgctttatatttatgaataagagaaataactattgtacgatacccacacatcaagcatacgactgcaaaaactaagcttgttaccaactagctgcagagaaatgagctataaacaaactaaaaaaacgaactgtgctgtcacgtctgtt

SEQ ID NO: 48689 - DNA, 630 bp, Glycine max
  unsure (1)..(630): unsure at all n locations
tgtaatgatgcgcnctgcngngcnnntgcaagcttttanancnnctctcanctananngggaangancannnagtaaatgaaagaacgtantcttctatatctctatgtaggtgagtntcannatccttacatattanaaagagtcagaagtccaattcttcgaattaatctctcttaagaaatttcnttggttggtttcaccaatcataaaataanaatgaatatgggttgagcaagtgtatgaagaatgtcagaaattcatggagaatagatactacgcctcggtagattctcaaattgagcatattattgtgacantcaaggaaaccatagatttataaaccatgatgatagaacatcttcaaggatcatggcaagcttatgatgagaagcataagaagaacaacagatcactatgcaactctttcagatgcatctgatggagaatgaaaaagtcacgaaatgagagaagcaccagactgactganggtcgttgccaaccaagatagggtgacgtgcaacagaggacatgtctaattcatcacacagtacagaaagaaaagctacaaagacatggaagcgttcaagaaacgttgataattcaaccatgcttatgtaaagatgcactt

SEQ ID NO: 48690 - DNA, 358 bp, Glycine max
  unsure (1)..(358): unsure at all n locations
tatctcttntatcttagtgagagtgattcttctaaattcttgagtgaatcaagaacaccttgggtgtatcaaaggactttcacaacctttgtgtgttgcctcgctgaaagaagtgatctttccttctttcatcatcacncttgtctttcaaacccaattccagaaaatcacctctgccagaatatctcgggccatactccatttaccactcaataagtgatctgacctaattgattcaaacagaccttcacctcgttggatcaccttattgagcctgtacttcagtattgcatttctatatttgtcagcacacttaaccacgtttacattcattcatcatttatgcaagaacacctat

SEQ ID NO: 48691 - DNA, 340 bp, Glycine max
  unsure (1)..(340): unsure at all n locations
aatattcggagaaatcagtggggttcgacgttcgacgttcgtagaataccgaaatttgacgtcttagatcatcgtcgtcttcgttttcagctaacggtagacctcnaccagctttaattattttgaccgggggtcacattgttatgatttattcgttcattactttatccctttgcggctagcattataagcatttcgtaacaaataataattcacgacgtgatgatatcgtatttgtaatgaatcacgtcgcggccgaccgtgatcaaagagaatatttatatcaaatttttgtagagcaaacacgcgtttttggtctattatgatgctatactaggat

SEQ ID NO: 48692 - DNA, 128 bp, Glycine max
ttcgacccactgacgttgattaccaagctgtatgggaatgtggacatgctcacaacttatgatcatttgagaggtggtgtcatgtggcaatcacgtctttgatatagcatgccttttcttgaaagcac

SEQ ID NO: 48693 - DNA, 244 bp, Glycine max
ttaactgacaagattattttcttaataatggcaatacatcaaaaggtttggtcagttagtgctctatacgactgtacagacttgtttttgagcctgcatggtcctatcaactgattagtttcttggaacatagatggcttatcttgatatttagaccttggagtatatataatatatttgtgtaaaaaactatagacaagaaagtcttgaccatatattaactatgatttgtggcaaaaaaaac

SEQ ID NO: 48694 - DNA, 267 bp, Glycine max
  unsure (1)..(267): unsure at all n locations
gtcggattgagtcttgtatatatcgagacactcattattgataacgaaagctcgtagcanatgcanaccgcaataacttttgactcggatgtacgaatgaatcccataatacatcgagacgctcgtaattgaaaacggatgttctgagcaaattctaacgataatagctttttaatcggatggttgaataaatcctgtaatatattaagacgctcgtaattgaaaacggaagctcgtagcatagtcaaacgacaatatacttttact

SEQ ID NO: 48695 - DNA, 235 bp, Glycine max
  unsure (1)..(235): unsure at all n locations
ttcctcagagcttctggtntcaatntcgagtgtctagatatatcacaggactcaatcagacatccgagtanaagttattatcgtttgaattgctacgatgcttcgtttacaatgcgagcgtctagatatactaagggacacaatcgtacattccgagataaagtacatgtctgttgaatntgctcagagcttctgttttcaatntcgagcgtctcgatatattatgggactcaat

SEQ ID NO: 48696 - DNA, 66 bp, Glycine max
tgcaagcttctaacttatacagaagaagcctgtacacttgtaacattgtctaattctaagaggggg

SEQ ID NO: 48697 - DNA, 462 bp, Glycine max
  unsure (1)..(462): unsure at all n locations
ccgctccctcntccgactcctatgtgngngaccnaaggaagggggatggtaagtatntnnnnnnnnnnaatatcgggagcgaccgagctcnnntnnataagctttccactcaactttttttttctttcggaatatgacggtttggattccaacaaatcagacatcacggtatgagctagaacgtttccgaacattatgtacttttaaactcttagagctcttaaagctccgggtcttgaaagtccagagctttggagctctctacatcaccttataacaatactcctaaaaatacgagaataccacaatatcactcaactattctatatttagatatttcagggtccaattttgaacgcgaatgacacgaagcttaaatacatgcaatttcccggttcactgtcacatattacctcaatataacgcctcaaatactgcattttcccgggccgtacatcattc

SEQ ID NO: 48698 - DNA, 660 bp, Glycine max
  unsure (1)..(660): unsure at all n locations
ntttttgtaatcctctgtagaactttatactcaagctctaggaagctaccagtctataatagaagcatgtgtacaccatgtgtaactctgatgaatganagtttatgagatacacttcanagatccacttctttccctttttattacttcaatntcgtgctccccccttctctctntcttttactccattaaagcatcctcttcaagcttcttatccaaggcaattcttggtggtgaagctccttcttcctcggcttattccctagnggatggagcctccnctatcctctgtctctttgcctttcgctgcatctccatggtgaaaaatcaccattgaaggacctcattgaagctcatagatccagccctcatagatgctgcacaagcaagcttccatcaagtatgctcgagatctcccgtggtcactttcgcgcgcntcatatacgatggctgatcagacctcctctgaaancttgaccatcgtactcctgcaactctcgggtcaactccggctcacactcgaatacgttcctacttacaccgcgataactctatccacgctatctctctctaacttactccaatnctctacgcttatacaatactatacgtgacgcaccatgcttctatctaatgacactcacttcatcatcgtctcgn

SEQ ID NO: 48699 - DNA, 610 bp, Glycine max
  unsure (1)..(610): unsure at all n locations
ccccgctcccttccttcttattttgattgtgttttaggattatgattgtattttaantannnnnnnnnnattaccggagagcgactgangctcanctggaaganctacttaaaatatatgatgtggttagtattgaatgcctaatatgctgatgtaaccaaacaatctttcacaaatatatatatatggatgtctaggagaaagatccctggatatgcatgtatatagccaaatccttacaaacatatatagtatgttaggagcaagatccttggtatgcgtgatatacaaatatacctacaaaatatacacatgttatggagcaaaatacctcatgacaaaaaacaaaacactctctagacaagaattatctactgataatagggatagataatatgttgttagctgaaaacccgaatgctcttgaaacagatgacttcaacttctctttgaaaaatcactgtcataactagttttataaatgtgatacacttgagggtgaatgctggaaacttcccggacgccaaatgactctgtgatgcccaacgggtaataacatatttggaaccttgtgtgattaaatagaggaactgattctgactctacatct

SEQ ID NO: 48700 - DNA, 159 bp, Glycine max
  unsure (1)..(159): unsure at all n locations
atttactgtgagatggaagatcaacttgtaagcacaacacccacttgttaatcctggaaggatcataaactgagaagagtnttcataatcctntagccaagatcttgtctgtaaggtgatcttaagaacacccattaccgactacatattctatgtccg

SEQ ID NO: 48701 - DNA, 109 bp, Glycine max
tggtgtattgaccccatttactaatacacccctgcttttgggattttctaaaacgactacaatcgaatgaactgttctccgcagacgaccttcgatctatacccctttg

SEQ ID NO: 48702 - DNA, 214 bp, Glycine max
  unsure (1)..(214): unsure at all n locations
cacatataaccgcgtagcaccatgcagttatggcaccaataacttgctataaaattacgctcgtcttgtcatcatcgagtactggtgatttcattagcatctgccgactggaaccattcaactgatgatgaactgatcgcagtgcatagccttgtccctgcttatattgccatggaaacgggcgatagtgtcttatgcccgttaatagactgtn

SEQ ID NO: 48703 - DNA, 252 bp, Glycine max
cggtccagctcaatcccttatgacgatacatcactggcgcgttacacgcggactggaaacctgcgtaccactaatcgctgacacatcccttcgcactgggtatagcaagagcccgaccgacgccttcaacagtgccagctgaaggcaatgggcctgagcggatttctcttaccattgtcggatttacaccgatatgggcactctagacaatctgtctgagcgatagtaccagccgacaccgcacacccgtga

SEQ ID NO: 48704 - DNA, 269 bp, Glycine max
  unsure (1)..(269): unsure at all n locations
tcttcttcatcaatggagtcctntgcttcttgaatatcaatggtagtggaatggagaaggaagaaagattattggagacacgaattcaaggagaagatgagtcaagaacaagctcaccaccataggaagccatggataatagcttgaaggtaggagaagatgagtggagggaggaggagagaaggagcacgannatttatgcctcanatgaggtctgaactntgaagtgtaattctcanatgatcaaagttgaanaaaattgcacacat

SEQ ID NO: 48705 - DNA, 179 bp, Glycine max
ttttgggatcttttcgaagtatgaactacaattcgaacatactgttctttcgaagtaccggcttatttattcttttccatgtggtctagacatattcgcttttaataggccatcttttcataggccatcttggcctctgagcgatattttaactcggggagccacatctgctctacttc

SEQ ID NO: 48706 - DNA, 713 bp, Glycine max
  unsure (1)..(713): unsure at all n locations
tctcccctgccccctcatctttactgacctcgttnngggggtnnnaaggagtgttgtggtattgtgtatnaangtngnnnnnnnnnnnnnnaatcatacgacgagacctgtagagtcnacctgnngcntgcaancttntttctggcttcaaaaaagatcaacatgcacttctactgatgtacaattttctaccaannnnncnatgaacagaagcataaaccattattggtttcaagcacaactcttctgtatggaaagattcatttcaaaattaatgcggaagcacatatcattgcacctggcatcagtatatacactaacaantgaatttcttcaccctacaaactaaatataaattaactatcttcaggaaggacccatctcaaccaagaaattaggccaataatattcaatatattacagctagctgtgttatcatagatatcacagcacgtacctacaattttgttctttcattagatagatacattgctngcaattccctcttaagatcaatctacccattgagaatgcttgattgaatgtcgactcaacgagatgctgganggtcgcatggttatccacaaacctactacatggtatactgaataaataatcactaatagtaggataaaattgccnancactcattctttatactcataatactaacgtgaagtttgtgtntattgtgaccaccaacttatctccat

SEQ ID NO: 48707 - DNA, 227 bp, Glycine max
  unsure (1)..(227): unsure at all n locations
atacgtctaagaaatctatatatnggtgatatgataacttcaacaatatattaannatatttntatttcgatnttactgctgtaaagttctttaaactaacaacaactacacaagatgaacggggaataattntaattcaatannatataaaatactcatattntntacatgggacgaaaaaaatactaaacctttttcatcanaagctagaatatatatatacgta

SEQ ID NO: 48708 - DNA, 551 bp, Glycine max
  unsure (1)..(551): unsure at all n locations
ctcaagaagggcttcttgagaagctagatncttatctaccccacaccttctattaactataataaccttcttggaaataattacgggataaaataacacaacanataatccaacatcaaacataattactaggaatatatatatatatatatatatatatatatatatatatatatatatatatatatatatatatatatatatatcngggggttacaagagtcactttgagagaatgnattgcttataagtgaagtgggggtggtaganaaaagaagggttgtctcatggtgtgaggtantgngagatggaaaggtcattgctttcggtgggtgtaactggcancangataaatgggttgtgaactgtggagcantgaatggtacntncacacatttggacgtgaatgtgtagaataattgatatgacagggccgtggtggtgggagcaagtgaanaangntnnttatttgttggatatacacacgatgtcgaccacatcttttttaatggtatatatatcaactctcatctatcaaaggangtgggcgt

SEQ ID NO: 48709 - DNA, 492 bp, Glycine max
  unsure (1)..(492): unsure at all n locations
naagttgattcgctgtggcacgcttaggaacttgaactcagctggtcgagactacccgtgagatcgagacgatgaaatctttaaaacgtcaaaacggcgaaccttgcgaattctttcgaacgtacgggacgttcggaacgctcggttaatttttacggagacattttcagcaattcaaagagaagaatgctaagggtgaacctttccttctacttctcctattgagcaaatagggagatgctgcgccagtcgccaggcagccagtgcttctcagagcacagctttggagatctttgaggccaagggcctgtgtattgcacccattacaaacactcttgttttgggatttttcgacgtcgaactacaatcgacaactgttcttcgatgacgacctcgatctaaatcctttgctcgatgtcaactctattcacgagctcttgatcgggatgactacgtggctaatcttgttcgagtcgattcaatctagaggca

SEQ ID NO: 48710 - DNA, 468 bp, Glycine max
  unsure (1)..(468): unsure at all n locations
ttgctgacggcctcancatgcacgctctttggaccttgacaagcatcactcctcttcaaacctgctatcgctcgcactggtccttctccttccaactgagttatatgtacccaaactcggaatttgtcgccatactttcttgcagcctttgtctctgtcaggctctgcgaattgcttctttccgacccgcacactcttcaacgggagcagcaactgactctcttgcgagttgctttctacttgtttgaagctgactctcgtctttcgggcttacatttcttcgtgacactttacttgcgagccatctaacctcgatgcaacttcatcattcgtgaacccacagtgtgccatacgatggcctagctctgacttcctacggngttcatgctatggatttgatagcttgatttggcccagaacctcaagaagagactgcttttcgcgtgctcccagggacctagtgttaat

SEQ ID NO: 48711 - DNA, 589 bp, Glycine max
  unsure (1)..(589): unsure at all n locations
ttatacgccctgangatgcagctngagctattactactgtctagcanagcccctggaacctttntctactcaactcttnctttttggctttcttcatttcctgctctagcacttcatccgtggacatgtngatattcttcagcctatcacattctttccttactctagtgactaccaccttcagctactccttcngcacttttgtctttccaactcaggcttcaagattgcacctcttcgctttctcagactcctctgtctctttcccattcagaccctctagctntgtgagcccaagcaatcctggcactatagaattcatccatttgtaataaaccgctatgacactggtgcttcttcctctaagctnnctatctttccttttncacttatccatgccntacnggatctctgaagtatctcccgattagcttcacttgaatctcgtgcgatgaaaggcatgatggntnntctatatggngcacctctcataggatactctaatttcttatggccacacatgatatantaatgcacccctcatctcatcaagggacattagaaattcttcactaacatatactctgcn

SEQ ID NO: 48712 - DNA, 237 bp, Glycine max
  unsure (1)..(237): unsure at all n locations
cacaccannatgatatgatgatggatggctcanantctcacanaggtaaactcatcactttcgaattgagctttcanaactatcatgacatgtagagaagaatcaaggatntcaagtcacanaatgtcaagaactttattntcanaacaattaccccattcttgaacatatnctataattcaanagaaaacatgcanattcgtacgtgcacacaanattgacccaaaatattaaact

SEQ ID NO: 48713 - DNA, 112 bp, Glycine max
  unsure (1)..(112): unsure at all n locations
gcttgtcataagtagttgtagtttctatgaaggggaatacttgtacttgtgggcatgtcactcggttcagaactttcttgagactcangctgatcaccatggnnggggggga

SEQ ID NO: 48714 - DNA, 159 bp, Glycine max
  unsure (1)..(159): unsure at all n locations
catgctcgtgcgcttagagcacgtatggaccgcttagctcatgttagtgattntgggcttagcatgcttctctcgcttagcggatgagctgaagcgatgcgctngatgacctanagcggtgagcttagcgaacttgacaactcgtcttcttctggattc

SEQ ID NO: 48715 - DNA, 378 bp, Glycine max
  unsure (1)..(378): unsure at all n locations
gttcaagaatcaagattcaagaacaatcaagatcaagattcaagagtcaagagaagacttaatcaagatangtactagatntttttttcaaaacattgagtagcacaagaatttttcacannatcttttaccaaagagntttactctctggtaatcgattaccanaaggtagntaatcgataccagtagccagcattggtttcaaaactggattacaaagccataattgattaccataatcatgtaatcgattaccaatggtttaaatggtagattccaatttcagagtcacactagtgataaaccatttcaaatcatttaaacttgtggatcaataccnatgttctaacatttgatttaaattaacatgagagcaca

SEQ ID NO: 48716 - DNA, 295 bp, Glycine max
  unsure (1)..(295): unsure at all n locations
catctntatatgcatcagctggttngttagaaagacctaacacctttacctactgctgtcaatcttacttactttgcattttacttattntagcctagacttaaatttaatttgtttanaccatcaattatcaatggttctntcaacaatgccttattntctgaattaaccctgcctaatactagttccctgagttngatactcggattcatctgttnntaatttaaatacttgatgacccgatgcctttccagcanaccggatttcccttgaacatatttgataaagaaaaagt

SEQ ID NO: 48717 - DNA, 175 bp, Glycine max
  unsure (1)..(175): unsure at all n locations
cggtgagtataatgtgagtactnaccttaatgtgtctgacttaactctntttgatgtagatggagaagccgatttgaggataaatccttttgaagagggagagagtgatgaggacaaggcaaggaataagggcaaggaacctttagaaggacttggaggacctatggcaaggact

SEQ ID NO: 48718 - DNA, 632 bp, Glycine max
  unsure (1)..(632): unsure at all n locations
ntttacaaatgcacgctagtactcagctgtcatganggctacatagtagatgtgtctaggacacctaagccctngagggtcctcagaaatgtagtatatatggtgtgtggaaggtcanacgataggttctcaatcaagtgatatagcatgaacttatggaggtcacagtgtgtattcttggagctagccttgtgaaacacactntngctcagaatgntgatcccatattntgccttctcgacattagattgagatgaatgtcttcgatcatcatcttgtcagcatctctttgtaaatgctagtgactngggagtcatagntctttctctatgccctctagtaagtgtggccctcatgcagacnntcctgtgcttaacaatggtgtcgtggatagtactaccnttntctccannaacctngatgtatggnnttctgtgatgaactacatgtcgcagaagtgcaatcactangagtgtggttgaagcattgacaacgctacacacanaacacagaatcattacttatacccactttagttctaattanaatggtcactgatgaggtcgtgcagatgagagtgattcatgtggatactactgtagggtgtgcaagcatgaaagacaaccatgttt

SEQ ID NO: 48719 - DNA, 270 bp, Glycine max
aaataaacattaacgagtaaaggatttactttgtctaattatattatttacacataaaaaagataatgatgattggaatggctgagagacaaatgaaatgaattgtatctccatctttgtaggttgggatgggaacgttatacatgatacttttagttgaacttttagtattggagatgcatttcatacaatcttaagcattgctctaacatgttggttacttcaatttaactgataatcttaggtataattgagtttctatcctatcag

SEQ ID NO: 48720 - DNA, 664 bp, Glycine max
  unsure (1)..(664): unsure at all n locations
nncccctcgatatcacaatatgtgcactatgantactcaagcctagngaagtgggtgtgaggggtatctncagcacttcacctctctatgctcactntcaacatattcttagnantnttatcacatcattctgctttctttcttttcatangagacttgatgagagacatttcacaagcttaatgaaacanacaaaagcataaccctaatccataacaattcanaatttaatgagaagaataagatataatgaagacttggtaacctatgctctcacanaggaagaagaagagatgacgaatgatgatcggaagagatgaccaacgatgattggaaaggatgacgaaggtgatcgaaagcaccagagagaaaatcgcacaacacattgtgaggaacaagagagagagnattttatgggttatgaaatgacgagggcatgctctgtcattctgaaatntttgaggacatanntgtncancattatttatggaacagattccctgaaagaaacttgagatgccganatctaagctttaaacaagattcctangagctnntactttgtaagctaaactaataataccaacactctaaaatagaagatcttctatgatagatataagactttgactgtcacaactatgtctacggtgacattgaggat

SEQ ID NO: 48721 - DNA, 639 bp, Glycine max
  unsure (1)..(639): unsure at all n locations
cgctccgcacttcatattaacgtcttgcttanagcttannnaaggatgatgttgtgatgtnaantntntannnnnnnnnnnnaatctttcggagagtcgcctgcagcatncnncnnatggnnnaancaatggatggatcacacctgcaatttctctttcataagacatccagaactggctccatcagataacctgacggtcaatggggattggaattcgtcgtggcaaagttatctctcaaaagcaagctgatgttatggaggctaccttctatacgcaacattgggatacgaagagtcctatgctctttaatttgcacattctcggatacacatgtaaaaacatgtctattttactgactcccatngaattgggaatgcaggatataaactcagatggatcaacacctctcgtatgcatgactttggacaaaagcggcatatgaacattatgctcgttaaaatggacatagggttcaacatgtagaactcaggctcaacaaaacctcgggaccttaagaatggatataatctactcactgcagtgttgtgactctccatgggacaacactaatattggatatatcatacccactcctccatggattcatagacacctcaacaatgtcatcctcttccg

SEQ ID NO: 48722 - DNA, 439 bp, Glycine max
  unsure (1)..(439): unsure at all n locations
nnnnaacagccgatgttatacttgatactcagcttgattaactgatgaaagtnaagtgccnactgcaccaaatatcaatgcattatgcatgactatgagnacgcggaatatcatccatcctaattgtagctcctcaatattggtgtatagtattttacgcgtgatggaaaaaataagagtgaatagtggaagtcatatgcaataacaaaaaacaaactctatacttacgcttataatacatggcactgagtaaactatgacattaaacaaagactccaatgaagagccttccgtatcattacaaaaaagtaagtgttagaacttgcgaaacttacacataacacgaactgccagttacctataatcttaaagctaaatttaactcaacattcttaaacttcctaaatactgcgttaggtatgatacttccattaatgtg

SEQ ID NO: 48723 - DNA, 589 bp, Glycine max
  unsure (1)..(589): unsure at all n locations
attatgcgtgtgagcgactgcngcatgcaagctggacgtggggaggggnttggaaaaagaaggaaatgaatggtttgtttcaagctacacgaaaaataagacttggaacacttcagtgtntatgctctncaggaaagaagcttttctcacacatnncaatacatatcgcagatcgcgacggtcagatcgtggacatctattctatgaacctctagaccanatttcgagaataatccacggttaacagggcactttttctgagacagctcagacaacttccttgagaagctntctcgtgacgcttncttgagaagcttcctcatgaggcttctttgagagcttccatgagaggcttctntgagaagcttagattttaactacccacacnncctctataactaaactaacgtgcgttgaaacaaacattggataaatacacaacatatanaatcaaacatcaattataattgctaataatatntcaggggtgtacacctatcgtgagcttctcatcacgtcctctttgcgcgctcagaagtctcttcgtcgtgctcgcaatcaacagagggtctattacacattgaagaat

SEQ ID NO: 48724 - DNA, 591 bp, Glycine max
  unsure (1)..(591): unsure at all n locations
nnnaaacccgacgaagactagtgtanctatgantactcaaagcttatagcgcggggtctggagacanaggtcaagtggtcgcgaatacgaagatgatgtttctattacattagantnggtacgaccatgccctcctgatttcagctgngaaaatggcgagtggaggaaacgcccgcatttatcaacgagataatgtaacctttacngtntaaagctctatagtgggctangcttagagatnttcttttgtaagctttgngctttggtttgaattataaacaagatctttttcatctgtctacgctctaccattctcattcatttgatgttacttcttttctgaaagacagatcgatgagagttccccgaagactaatacctggaccgctatcacttcgacaagaatgaatnacagagatgaagaacgngatgtgacttcccagaatagaagaatgtcgcatangacaagaatgggctatcagagaacaactgtaactagaatgcatgaaaggaataagatgtcagatacgactatctagatatatctgtaaactacaaatttgtgcatcagaatgcgttgattcatgcact

SEQ ID NO: 48725 - DNA, 499 bp, Glycine max
  unsure (1)..(499): unsure at all n locations
ggatctatgtgtgtcccaatagaggcannattgatcatcctactangacgactgagaanactggngcanatanagagggtgaggatganggagaaacccatgctgtgactgccattnctgtacggncannaattccaccaacccaacaatatncttactcagccaataacaaactttcttcttacccaccacccagttatccacaaaggccatccctaaatctaccacanagtctgtctaccgcacttncaatgacgaacaccacctttagcacanaccannaacaccaaccaagaaagtgaatttgagcgagaaagcctgtagaatcaccccaatncagtgtctatgctgctngctccatatctactgataatcatggtaccataacctaccaaggtcataacctcattctcgagatacactcaacgcacgggctgtacgagagcccgngcgtcatgacatgaggctctgagcgaggtcaggctattgtccgctgctt

SEQ ID NO: 48726 - DNA, 622 bp, Glycine max
  unsure (1)..(622): unsure at all n locations
nntgcgaaagctngtcgctagagcagacncatcaactgccctaactctnttagactggtgatccctatgctctngaccttgactngatagaacctctttttaagcgaaggcattngactngatcccatcgtttactaaagtgaacaaaaatcgacgcgaatcataactccaacatctatcatgggtggaatggatgaatgcatgangaaatatgacacannatgcaattactaacatgggagctcgagaaatngtctccttcttagatacaacatctngtggtagcaaagtgcccaacgtatgtattnaaaanggcactcnngaccgtcgtggntntcaatgtgcgtgatcatatgcanaggcgcacatgggaatgtacagtatgacatatcacanaatataagcnaagggtacgtgacacttatgcatggagtgtgaanatgcacgcngcgtgtccgctcatgcccctatcangggactataaggagagagctactaggctttagtgataccncanggagcatatcttctcatggtctagaagatcatccttcgagaactactgagcagangggctactatcacatatgttcanaaaaaactcttatgaaggtactgaatn

SEQ ID NO: 48727 - DNA, 261 bp, Glycine max
  unsure (1)..(261): unsure at all n locations
tgtatcaggctattggggaactctctctggttatctaagggaccctctctactctttcttgcttcgtgatctctggggaatacctaaagacccatgagctcaagatcaacctcatagaaccccacaagcaagcttcatcnagtggaatcagacacaaagcttaagtggtgctcttaacctcattaattttttttacctctgtccatttgttcttcatttctcataatcnctacatgtctgtctaatgtgtaaatgatctta

SEQ ID NO: 48728 - DNA, 649 bp, Glycine max
  unsure (1)..(649): unsure at all n locations
aaagattaatgagctgagtgagcaccattagtgcactatgatactcagctngagaatgcccaactctcttatntctgatttaggctaaatagggtgccctggtggtgctcgcgcgcttagcgtaactctggctcacttagcgcgcatcttctcgctcagcggatggactcaagcgggtgcgttagtaggatgatccgtcgctcaacgaanatgtacagctcatctttctttcaattcttcctcatgctcagccaaaggagtggtgcgctcagtggatgtgtcgcttagcatgcagattggctatcgagcggatgaatatcaacactttataaactnttctaaattaacctganattgagagaaaatggatattanatacacnaaatgggagtactaagtgttattaccaatcttatcanaagtaatacaacactacaaataaccatagtntggaggagttgatcatntacacaggtttatacacatgtggagcanagcttcaagttattttgtgatgccaagactcagcangaatatgagcaacaagttcangatcaagagtcatcatctagatcaaatacagtgagatcataaaaactcagaatgcagacttcagaatgcntcagaagttaaaagagtttcaataact

SEQ ID NO: 48729 - DNA, 162 bp, Glycine max
tgatatatgagagagatcatattgctagacaaaatatctaaaataagccgatatatataatatttactaaaaattacattgataatatagagattaactgtctacctaatcacatactgctatcgaaatcatctgaagacctttttactgcaagactatcat

SEQ ID NO: 48730 - DNA, 346 bp, Glycine max
  unsure (1)..(346): unsure at all n locations
ctataaatctatctaagaaccctgttcggcactcaagaacccaacacatagaaatangacatcatttcttgagagaatatgttcaaaagggagattgtgttctagaattcggtgatacaaagaatcaagtagctgatatctttaccaaacctctccataaagaaacgttctttgctattagaagagaantanngtctttagatatcaatgatctagacaagtaggtaactcattgagctntgtcctcttatgttcatatantggcttgagtgtagtgtagcgttataatagtcatataattgttgttggctttaataatggnccttgataccttgttgaatataat

SEQ ID NO: 48731 - DNA, 224 bp, Glycine max
  unsure (1)..(224): unsure at all n locations
taccactactggannacccgaatgcanatntntattgaggcaatagatctaaatatttgggaagccataganatagggccttatatacccaccacagtagaaagagtttcaatagatggtagttcatcaagtgatagcataaccatagataaacctagagatagatggtctgaagaggatagataacgagtacaatacaacttnatagccaaaacataataaca

SEQ ID NO: 48732 - DNA, 286 bp, Glycine max
tctcgtaccccaataccactattcaataatagtgacttttggtacgggatcccacacacacaacactacctaccatcaatgaactgtagtttgctcgtcagataatactgcttgttttcttcttgacaaattatcactgctattgcctaactgtattttattaaaaataatattactggaccatttttgctaaaacaaactacttaactctgtttctgcgtgacagtggcacttatgagtatttaaaatttagtattaactatactcgctacaaaaaacttaagat

SEQ ID NO: 48733 - DNA, 364 bp, Glycine max
  unsure (1)..(364): unsure at all n locations
attatttcttcattacaagtattanatgccacggcatatctaaaacagcttcatagacccacatanngagcagcactaaatgtggagtgannataatagctatcatgaatcatcatagtcatcttaatntatctntctttccaatgcatcaacagataatcatagctaccttccncattacgaatntctggtcaaggatcattatctgcttatcatnttgattgtaacaaataatattgaatggttccaagcaacgtggtagtagctcatacaatcatggatgtgtagctgcagagagatggggtagtggatatgtaaaaatcagtctatagaggagtgtaatcanactcccacacatatatca

SEQ ID NO: 48734 - DNA, 591 bp, Glycine max
  unsure (1)..(591): unsure at all n locations
nttaatgcgcacctgcggcatgcaagctntganatgcanaanaactaaagggtggagacactnggctgctgtgtgtctcattanatcaggaaggtaaaataagaatggcacccacttgaatgtattcaaatggtaaaaattggaaaatggtattggagtacaacttttggtggtaaaaaccgttatacatgatgagtgtagaaagcataanatggttcaattagaaagcaccanaacgcctaanaattngcaatttccaattagaaagctttgccaacgagaactaaatgcataaaacaatcaattataatgtgtgaaaanaatatgcactaatttttaattaaatattnttacantacatnaatgtactantannttanatantaaangaanatanaanttanaaatattttagtgtganaagataaagtattatatatgaaaccgagttaattgggtaacatanatgaatctaatacttgaantaagcatacctatgtngacctatattcctcagtgctgcctccattgttctcaagcagtcaagctcatttatttataggcngatcttctcagatngtctactatatn

SEQ ID NO: 48735 - DNA, 270 bp, Glycine max
  unsure (1)..(270): unsure at all n locations
agagaagtngaaccttgaagtgtgtctcacaagactctcattcatcanagttataagaaatgtacacatgcttctatntatagcctangtagcttccttgagaaacttccttaagaagcaagtggtacatccctncaatagctaaactcacctccaagccaaaatacatgaaggaataaagcttccttgagaagcttctttanggaagcaagtgtacacccctncaatagctaagctcacccccatgagaacacacaaccctctaatagc

SEQ ID NO: 48736 - DNA, 460 bp, Glycine max
  unsure (1)..(460): unsure at all n locations
gtaatcttcttgaaccgagaatgaanggtangatgtcaacttctagctttcanatgaacacgcangggaaacatncggctaagctgaanataaatcactcatagtgtataanactcacaaggcangtgtcttatcctattcccaaaccataactgcaccaggactctantttgcacgcaacttcctatcgaatcataaatcanacgtaagatcacgaaccaatangattttctcgaggtcagtgttttgagaggaaatctggtgttcggtctttcctcttgtcatgtgggtggatatttcagtcaagatgatctgagtggcatatggctttggagacttctatcctcttctttcatgacgaaatgcttctttccttttactttcttcatcatgacgggatcttcttctttctcgggctttcttatttcatttttcttttctttcttccattctctttctt

SEQ ID NO: 48737 - DNA, 688 bp, Glycine max
  unsure (1)..(688): unsure at all n locations
naaccttacatgacgctactctcagctgtgcgantcnatcactcncgcttttatctctagcntgcattcnnttcttcttacccactcctcacgttnggtntntanaggaaaacaccataactgaacgcgccacaatgcattcctatcgcaccagaatcaaatctagaacgatgggtgatcaagaggagacacaagaacagatgaaagccgacatgtcggctctgaaagaacagatggctctcatgatgaaggcccatgtatgaatgaggcagctcatggagaaaaacgtggccacccgcttgcgctgtcagttcgggctgccgaagcagacccccaactctcttgggcaactgcngcaccatncctcctcanacatagtaggacggggaangggacacactgnngcacgatggcnaccctcatctgngatacaaccgagcggcttacncttatggattgccgccaactactcaccancccgtctgcngacgatgcggccatatngcttctccgtccttgaagagacccctctcacagccgacaggtccataagacctcangatatgctcgagggatgtgagtctatccncgatcccgaggacngcaccacatgttgctcagccacatacgaacaaccatagtttgtcacgaaggaccgcccccgcactgagattgaggagctcatcct

SEQ ID NO: 48738 - DNA, 144 bp, Glycine max
tcagacctcaatgatgtgactcgaccatcaacacatactttactcgtgctgatgatcatatatacaacctcaatgatgtgactttacaatcaacacatactttctcgatgctatggccgaaatacaacctcaatgagtgactta

SEQ ID NO: 48739 - DNA, 545 bp, Glycine max
  unsure (1)..(545): unsure at all n locations
naaagagatggaccgttatcactattagtgaccttganactcagctatacattcaattcgagcctctcgatatatacgggactcaatcatatatcctgagaataagttattggcgttngaaatgctcagaagtcaacattcaatgtcgagcgcctcgatatattacatgactcaatcagacatccgaggaanacagtattgtcgttngaataggctcagaggttcacattcaattctagcgtctcgaatgtacggactcatctacattcagtanaagtattgcgttgattgctcaagatcacattaattcagcgctcgttatactgactaataacatcgagtaagtattgcgttgatagctaaggtcacatcattcacggtgattgtcggactatctactcagtaaagtttgcttgattgtcaacttacttcattcacggctttttacggctatgactcggaaagtttgtttgatggtaagcacttaataacgtcttttaggctatacatcagaacgtttgttaatgtaactacttattgcggct

SEQ ID NO: 48740 - DNA, 655 bp, Glycine max
  unsure (1)..(655): unsure at all n locations
nnnttttacatgatgatatgtacacatagatctcagctatatgcgtngtntgcactgattctgtgatgtggaatgggccgtccaatccggcgtgatgcttttctttgagtaatctctcctggcatntnctcngagcctccataccaagtcgttgtgcttgaagctacgtgtcttgagctcaagttgtattattgagttatgctntatttgcatgcttcatactgaactcatgctttgcttttgagttcctcgaccaaatgcaactctactgccaacgattctgagttgttggccgcattgaacatgcttatgcatagtgaatggttcccgatcttcacaagtatcatagtgtcgatgtcggatgctaacattgaataaaagtgtctagcatgggcgatttgcgagtacatgtggtcacccatagcactccctgggagctcgtcacccatagtctcttgggactttgacagtactttgataactggaaatatgatctgtttgggctttgttgccactaattaggatcttgatgnggtgtgaatcttacaccaactacataagactctctggcccttacatgatagctctctngccgcacatcgctgagcaggctactcgtatacggcttcacgtaatattgacttgatcatgtccg

SEQ ID NO: 48741 - DNA, 276 bp, Glycine max
  unsure (1)..(276): unsure at all n locations
cattaatgagnttgacatctaatatgaatcttaacactggtgagtttataaaataatgtagtaccgcatcnatcgataaaacagtaaaacctacttacacttacgatagtgaaccaatatgaaacttatcattacattgtatatnaaataaatatattttaattaatatataagtttntgtgaagggtattattatataatgagtaggggaatactanttaatttttattgatgtaataactagatacaccgtttaatggcctaaacataatctac

SEQ ID NO: 48742 - DNA, 105 bp, Glycine max
  unsure (1)..(105): unsure at all n locations
gatccctcattaagactaagntcaatcctgcttctatcaagttctaaggcaacagtacatntcctaatgctaaagtcacctaacttaacatacatatgggtgatc

SEQ ID NO: 48743 - DNA, 189 bp, Glycine max
gccggtatggcaccacttctgtctaataatatacccccgcctgccctcatcaatcctgtgaattattaacatctgcgacatggaccattcaacggcttataatctgatctgcacagatcagcaccttgttctgttatatattgctctgtgaacgtggcgatatctttcattgccctttaacatactgct

SEQ ID NO: 48744 - DNA, 463 bp, Glycine max
aataacagaataggaacatgaactactgagccgcggcactctaagacccggtccagccaatccctatgtgagcgatacaatactggcgcgttacacgcgtgatggaaacctgggtaccactaatgcttggacatcccttcgcactgcgaatacaagagccgaccgacgccttccacagtgccagctgatgcaatgccctgagcgatttctctaccattggcgattccaccgtatgggactctatacaactgttgagcgatagtaccagccgaaccgcaaccgtgaccacctgcgcgatgataacacgtatgctgtgacaagctacatagccgctcatgtatgcgttgactaaagaaacaagcaaactcttaggccgcgacttttttaggatgtaaaacatccatccaagacgaccctatcgaattttaataaccgtgccgacgcccggaacgtagcgatgatc

SEQ ID NO: 48745 - DNA, 541 bp, Glycine max
  unsure (1)..(541): unsure at all n locations
attgccctagttatgttgncgaactggtacgaacccggatgggttangcanagacaacggcggcataactagcttgatatatgccaaaggaaatcgtgggaggtatnggttangctataagcccactcaggaagatgtaaagagaagcatcgcgggaaggaagagcggtggtcaaagctcgcggttgagacaagaaagtgaaggaagcccgccctgccacataagtagaagctttataagcgcgggtctgggagacgaaggtcaagtggtcgcgatatatgaagatgagtgtccgagtacattggatttggtacgaccatgcccctctgattccagctgggaaattggcgagtggaggaaacgccccgcattttacgcacgagcataatgtanacctttaccggtttannagctctatagtctggcctannngcttagagtccttctttnnngtaangggcttgtgtctntcgttnntgaaattatatacaaggatcttnctcaatctgtctacgctactaccantctcatcatttgatgn

SEQ ID NO: 48746 - DNA, 171 bp, Glycine max
  unsure (1)..(171): unsure at all n locations
ataattgagtagcactcactatcttaatttgaattatatttctaaaaaaattgagtgttttcatccaattgcctagaaatgaatactanacaaacagataattaatataataaaatgagggtggtacaaccatcactatgacaagatgaataccttatcgtgtcatctact

SEQ ID NO: 48747 - DNA, 441 bp, Glycine max
  unsure (1)..(441): unsure at all n locations
nttgggataatgtggcccttaggccttnaactcgctactatttgtgtgagtgctcttcacttaactgacccagaatcaagaggaaagaactgactgcccaatcaaaacaactgctcctcacagcttaattgccatcaacaatggttntactagtgactanggcaatgccttaaacttaaataattatacttgcttacagagttgcaaacaaaacaagatattgcttgcgaaataatcttcttttgtcccatggactgaaacaatctaagatgcgcctataaccganacctcgtctattaaagaaggcagggctctgctaactttagccaacttggggtgctataaataatatgctacacaccaatcatttctttcaaaccttactcatataaatccaaatgacgtgtttaagattaactccatattgatgtatatacgtca

SEQ ID NO: 48748 - DNA, 320 bp, Glycine max
actacgcgtcgccccaccctccatagatcagaccggaggcggtctcgactcgagcgtctgtcggattgtggcgtggaataaagcttgatccacggggatgagacacagacagggtattgaagaggatcagtactatgcttcaaagaactcctctgaaacgacaggtgtatacaatgaatacatgtttactatagagaattcctgatgtgttttgtatattggaacgtcatttgccgaggtgtgactgatattgaacttaaagttgtccattgcacgctttgatataaacaatctggttttactcatgaactgcacttatc

SEQ ID NO: 48749 - DNA, 377 bp, Glycine max
  unsure (1)..(377): unsure at all n locations
atctctcagtcacctgcgggcatgcaagcttttgcannagaaaataaatcattcgcgagagcaccacatcttatagaaacaatatacttgtgccatgggtaatcttccttgtaaccgagaatgaagggtaggatgtcaacttctagctntcaaatgaacacgcaggggaaacatcgggctaagctgaaaataaatcactcatagtgtataaaactcacaaggcaagtgtcttatcctattcccaaaccataactgcaccaggactctattttgcacgcaacttcctatcgaatcataaatcaaacgtaagatcacgaaccaatacgattttctcgaggtcagtgtttttggagaggaatctgggtgtttcggtcttt

SEQ ID NO: 48750 - DNA, 359 bp, Glycine max
  unsure (1)..(359): unsure at all n locations
tcactcccgcattntatctctagcatgcattctttctttctttacccactcctcacgtttggttntttagggaanaacaccataactgaacgcgccacaaggcatccctatcgcaccagatccaaatctagaacgatgggtgatcaagaggagacacangaacagatgaaagccgacatgtcggctctgaaagaacagatggcttccatgatgaaggccatgttangaatgaggcagctcatggagaaaaacgtggccaccgctgccgctgtcagttcggctgccgaagcagacccaactctcttggcaactgcgcaccatcctccttcanacatagtaggacggggaagggacacact

SEQ ID NO: 48751 - DNA, 174 bp, Glycine max
  unsure (1)..(174): unsure at all n locations
atctactcgaggcatgagagaccttacttgttaccganaaagatcggtttgagggggacatttagcttatcatataccgaccacgggaaacatggcgctgaatctcttctaaggcacgtctagtgtatgacactcacaatgcacttggcttatactatgtgaagatcatgactg

SEQ ID NO: 48752 - DNA, 392 bp, Glycine max
  unsure (1)..(392): unsure at all n locations
tctcttagtcacctgccgcatgcaagctntgtacanaaggtacatatctntaacattcacagttgtaaaattttaggtttagtggagtctttataantttgtccacaaatgtttggaaaggcaacaacatggacacagtcatttagacatcctaacaattcaatttagacatcctaatgcatatataaatcacaccaaatataatttcaatttacatacaagcgcaatttttaatagcaactaaataacacaaactgcctaataatatgaacaaattcaggtataatctaaaaaaaagcaaaaaaaaacaaaatacacagcaaaacatgatccctggaagaacttccgcaggatcttccgcgagaagtgtaacatcccaatttttcgtaaat

SEQ ID NO: 48753 - DNA, 415 bp, Glycine max
  unsure (1)..(415): unsure at all n locations
acttctccactctcctcaggaatntcagcctctntcctactcagaccttgtagctttgggagccaagttatccctcgcattctagacttcaatcatttgtgatagccgcctatgatgccattgctacttcccctaagctctntatcttttctttccaccctattccatgctttatggattctctgaagtatctttgcattagcttcactaaaacctcgcgcgatgatttcttcgttggtgacaacattgaggtggtaaggactacctgcgacaatgcatcatcaaaagaggaaaactctgaatgagacttcactattatcaagtgagtcggagacccagcatgaccacagatcgacctccactccctctatctcacacagacccaggtatacgggctaatacctcaatgtgcatg

SEQ ID NO: 48754 - DNA, 368 bp, Glycine max
  unsure (1)..(368): unsure at all n locations
cttgagaggcttctttgagaagctaacactttatctactaacacccntttaataactaaactcacatccttgaaaataattacggataaaataacataacaaatataatcaaacatcaaacataattactaataatatatagatatatatcagggtgttacaactctcccaccctttttgaaatttcgtcctcaaaatttacctgactcaaacaaggatggatgagcttctcgtatctgactctctaattcccacgtggcatcttctcctgatgcacctccccagatcaccttgaccaacagaatctttntccctcttaagtgttttgttcacctatcctcaatcctcagaggcaatgtttcatatgt

SEQ ID NO: 48755 - DNA, 81 bp, Glycine max
  unsure (1)..(81): unsure at all n locations
tgtcttcgtcgccctcccttgtcgctntaccttaccccagtagaggtcgtgatttatcaattgaagcagaggatgaaagaa

SEQ ID NO: 48756 - DNA, 372 bp, Glycine max
  unsure (1)..(372): unsure at all n locations
ctctacatanaagcacctatatataggttgttatatagccgttaagtttattataaacagttatagttcattaatattaacagtaattgatgcgaatgaactagtaaaaataaacccggatgggttgtgtttctttttggtacgtatatctgccctgtccttggccaataaattaggcagtacacaccaacgcatgaattaagacagggaaaccagccgctattaatttttttaaaaaaataatgaccgaaattatacattatagtaaggagcttaatttgtttgttttacagatagatttcaaacaacacttactaactggaaaacaaaaaatactaacggttctgtctaaatngacagtactgttttaat

SEQ ID NO: 48757 - DNA, 367 bp, Glycine max
  unsure (1)..(367): unsure at all n locations
aggttggattattatagctagtctctttagtancaatttttccagaattggccttttatttgtgtcgatacataatacatgtgtgtgcacacacacgtagtaatttgcagaaccactgtccttagttgacagcgagtaaaattgctgaatatatatttatataatcatcttgcagaccccgaagctgttgaatctgcaaggggtcgtcagctgcgcttgtaagtatctaatgttagtgaagtctgcaaatgtgatagtaaagattagttgacagcaactgtatgatatttgtctttctgaatctagcctactatagctacatgtctagaagctggctgtaccgatttcatgaaatcaatctcatctt

SEQ ID NO: 48758 - DNA, 316 bp, Glycine max
  unsure (1)..(316): unsure at all n locations
ctcatcgataatgggtccagnttaaatgtgatgcctaagagtactttggagaaattaccattcaatgccttccacttaaagccgagttcaatggtgggtcatgccttctacggcacccgccgagaggttaggggagagatcgatctcccagtacagataggccctcacacctgtcaagtcaccttccaaataatggatattataccccccctacagctgtctggtggggcacccgaggatccactcagtgggagtttgtccctctacactctaccaaaaagtgaaattcgtagtggaagggcatctggtcatcgta

SEQ ID NO: 48759 - DNA, 258 bp, Glycine max
aagaaatattaagcttgagcttgacttgcttaacttatttataacgtaattcattttattttatgaaaattttcataaataagcttttaatttcatcaatataatatttaataattattgtaatactagataattaatttaatattttttaagagaaaaaattattttttataaaacaactggctataatatatatatatatagtgagcttaatcagcatcatgacttatttctatgctttcgctcttgaactatatg

SEQ ID NO: 48760 - DNA, 355 bp, Glycine max
  unsure (1)..(355): unsure at all n locations
taataaatctatatatggtttaaaacaagctccttgtcagtggtactttaagtttcatgggataatttctttatttggttntaatgaaaaccccatggatcaatgcatataccacaaggtcagtaggagtaaaatatgttttcttgttttatatgtagatgatattttacttgtagtcaatgatcggngtttgctacatgaggtgaaacaatttctctctaagaantttgacatgaaggatatangtgatgcatcttatgtcatcgacattaagattcatagagatagatctcgaggtattttgggtctatcacaagaaacctatattaacaaaattctagagagatttcagatg

SEQ ID NO: 48761 - DNA, 381 bp, Glycine max
  unsure (1)..(381): unsure at all n locations
agctggcacttcttcactctcttaggaatttaacctttttcccactaagaacttttagctntgggagccaagttatcgcttgcgttctagacttcaaccatttgtaatagctgcctatgacaccattgctacttcccctaagctccttatttttcctttccactctattccatgctttacgaattctctgaagtatcttcgcattagcttcattgaaacctcacgcgatgaaaggctcaatgatttcctctgatggcgcacctctcatagggtagcctaactgtcttatggccaacacgagaatataattaatacaacccctcgtcctatcaaaggacattggggaatctcacatgatcataacactctgccccccccccc

SEQ ID NO: 48762 - DNA, 428 bp, Glycine max
  unsure (1)..(428): unsure at all n locations
tcacctttttgtcctcctcatagttgttgcatgagaatacatgctctattntcatctcccactccaagtaggcctccggatcattctttcctttaaatggaggaatgttgagtttaataccatcaattcggttctgtctaggaacaccatcattccctcttctcctcctttcttcttcattatgatctctattctccatttgatccaacctctcatggagtgcatcatctcgttgtttcattaacctctccaaatgttgcatcaaagcttgcatttggaattgcgaaagccccactccatcattaggattagtacctgacatctcaaacaaacaaatcaaacnnnnnnnaacaattatagttgctgtttgaatacctcacccactcaagtgtatcacacaattatggcttttctctaatgaaacactc

SEQ ID NO: 48763 - DNA, 399 bp, Glycine max
  unsure (1)..(399): unsure at all n locations
caccatccattttaagatgtatgcataattntcaaaataacagaggcagcaccttagcagctccagtgctgctgggaattatattgaaggaagcagctcttccacccctccagtccttgtttgatggaccatcaacagtcttctgagtagctgattcatcacaaaaagtatataatgaataccatatcttcatctaaaattgaaaaggataatagattaattcaagaagttatatagccaaatgacaaacctgtgatggcatgaacagtggtcataagaccctccacaattccaaatcggtcgttgataacctgtacaaaattaaaatntaataatttcattaagaaaaatgcaaatttataatacagatggaagcagcaatatataaatatatcacaa

SEQ ID NO: 48764 - DNA, 339 bp, Glycine max
  unsure (1)..(339): unsure at all n locations
ctgataggacgaccttcatctgatcttgcactccctcttcgttatccatcttacttttggatcgagtgctatacgggtgcctttgcgcctttttagttatggtgagctccctaaagaaacaaatagtggtgagtatgctacccaaacatgaatatgctaatgaatgatcagagcacttggatccacctcaagggcctttttagataacatgatgagtttcagaacttctctttttataaaaaggaacaaagctttcatctagccaagatcatacaaaagtgttacaacagaacctaatggnttctaattatatgggccattanatctatcatgtgttga

SEQ ID NO: 48765 - DNA, 336 bp, Glycine max
  unsure (1)..(336): unsure at all n locations
cgtagggttaaagtctncacgatgtcacgtgctcatgcaacaattgttagccatggctatacgagacatcttgccaaacaaagttaggttagcgataactcgcatgtgctntttcttccatgctatatgtagcaaagtcattgatcctatcaagtttgatgagttggaaaatgaggccgcaattatactgtgccagttggagatgtattttccccctgctttatttgacatcatgaatcacttgattgtgtatctggtcagagaaatcaaatgttgtggtcctatttatctacggtggatgtaccccgttgagcgatacatgaagatcttaaaagg

SEQ ID NO: 48766 - DNA, 300 bp, Glycine max
  unsure (1)..(300): unsure at all n locations
agtagagctgccgcatgcaagctttgtccgcaaacaatctctaatattcgttctaatgtccaacgccttanacgatcctctttgctgttatcggttaacatggaccgctcaaaagcataatatcaacatgtaactttaccgcttctgcgagaactacgtaggactgatgtcctcttcgatggaggatacggaagagcaaaagccccgcttttgtcgacctcgagagatgggtagaagtccaacaccttaactatctcaccaagtaaaatggatcattataaggtcccatgccttaaatga

SEQ ID NO: 48767 - DNA, 380 bp, Glycine max
  unsure (1)..(380): unsure at all n locations
tctagagtagtataatgtagtcggctatgatactttttaatatcttgcctccaatactaaatgccgattcataagctacagcggagatcggaatatctaacacatcccttgcaatagctagtagtgttggatacattagctcgttcaatttccaccacattaagatatcagaatctgaatttcttggtgaaacttcatcctctaagtaatgatccaacttcgttttcatagttgaggttcttgccctttctttctttcaatgtatctatcataatcacacaatttactctttccatcactaaccacatctagtgattcaaaagaactagtagaatctggatgctttttggcttgatattccgaaatanaatcataacaca

SEQ ID NO: 48768 - DNA, 220 bp, Glycine max
ggacaactactataagtagtgtgtaatagcattctattaaatagttaatgagaataattcattttttcatcatctgtgttagcactccatctttccctctcagctctctctctttagtttacctaacaccagggaggagaggtatttccaaccattagatatggtattattacagactctaaagcagcagatgattcaacagccactcttgagagatgtc

SEQ ID NO: 48769 - DNA, 261 bp, Glycine max
tctgcaatagtgccatgtcactaaacctgtccttcacttactcgttctgcatattggtgatagatatggccttattctcaaaactagggttcaaaataatgaaaagaggaaaactcaccactagggttcgaactgtggtgagttgcaaagagacatgatgacacatttaaaaagcacaatgatgagagttgaaattgaattatgtgaattgtttttggatgtgttatttcatctctcatgtgaatacattgttgatttccc

SEQ ID NO: 48770 - DNA, 325 bp, Glycine max
  unsure (1)..(325): unsure at all n locations
tcctgactcaccatataccttgtacccaggtgagtatgtcaatccttaccctctgaagcaaaataggaagagaaggaaaatntccaatcaaaggaaaaaagagaggaaaggaaattcccaatcaaagagtgggagaaagccaaaaagaaaagaaagaaaattcccaatcaaagaattgggagaaagaaaaaaaaagagaaggagaagaaaggaagaaagctcctggtcaaagatcgaaagaaaacagaagaaatatgcagagaggtctttggaccagacaatatctgaacaatacggaattgtcaccaaatgaacaaaagaaaga

SEQ ID NO: 48771 - DNA, 316 bp, Glycine max
atgttcaaaggttgtgtgtcaaagatgttatagaatatatgataaagttatgtggaaacgttgtcaaaagttatcgaaatgctaatcaagggtcttgcttttatagactcttcatgtctggtcaagataaccattggaaaagttataaccgttataaaaacctgaaaaccattggaagagttacatctcttgatttttattcaaaacttatcactggtaatcgattaccaaaaccatgtaatcaattacacaaagctttttatgaaaggatgtgactcttcacaattcgaattgaatttcaactttcagatacact

SEQ ID NO: 48772 - DNA, 429 bp, Glycine max
  unsure (1)..(429): unsure at all n locations
gcttctagccaaatggactttaccttgaataattccttttgatacccttttgagcccttgttccctttcctttgtttgaagctcactacaagccttaaatgaaaaaccatgttatcaccatatccttaaggaattctggagctttggaatttgtttgggaataagtgtggggggtttttgtttcattggataactngtttttgtggctatgcttcatgatgtattttgggccatacttgatgtacattgtatattggttaaatgttggacatgctgaatgaaatgtttgttctcaaaggctatagagtaaaaaaaaaaaattcgaaaaaagaaaaagaaaagcaataaagttgagtgaataagatcttaaatggcacaagaatgatgaaactcttggntctgctcttcatgtttaaantttatctttac

SEQ ID NO: 48773 - DNA, 505 bp, Glycine max
  unsure (1)..(505): unsure at all n locations
cttgatctaagcttggattaaaatggataggtatggattctttcctaattttgaaattaatcacagattggttggatgattatccaacctaatttgggatctcaaacaatttaaggatggattccattaaactatctctaatgcatttgactaaacttttacactctgaatatcattcatagtaactatgataattttatttgcattagtttggtgaattggattgatgatatntaaactngatcgnattttggttttttctgttctatttcttcatctttggttttgcgttntttcattcctttacattcgcctacaaactattcaatgaaattccccttgctatntacaagtgaatngaagaaggaaccaaaatgaatggtatctctgagtngacctaggttaatctngtttatagaatttcctagttttattggttttggagcgattcgataatcgttatcaattatcacaaacttccctttcctctgatctacataactca

SEQ ID NO: 48774 - DNA, 359 bp, Glycine max
  unsure (1)..(359): unsure at all n locations
tagtttctgataatattctttttatccnatcttgtanatcaatacaattctgataaatggcctaaaaatagaaattcaacatcagaagaaactgtgaacatggatggtaaacgtccaacagagatcaatcagccttctaagattcttgttatgtatatactccttttggtctcgaatataagcaaaaaaataactaattaaagttggttagaataatttaattataccaatttcatttaaaagataaacccttttcataaattatccttccttggaacttgatatcaagaataaaagagtgtcattggaaacaaaacctcaattaaataaagggcattttaagaatggtctcattaaat

SEQ ID NO: 48775 - DNA, 298 bp, Glycine max
  unsure (1)..(298): unsure at all n locations
cgctgatcaaanatcaanataacacgttagattaagtagccagatatcacaacatncacactatgcttagtttccgacanatctaatctcgcaggtaacgaaatcaacaatttgtcggcaaccaaaaacaaataaacattgaatcagaacaaaatacaagtagtacctttgatctcgagtctgagaggctgcatatgcaagtaacatgagagataatacaagcatacaacaaagtacgaatcagaacaagggttcacagtggatcacgttgaaattgaatagcaagagctagataagc

SEQ ID NO: 48776 - DNA, 416 bp, Glycine max
  unsure (1)..(416): unsure at all n locations
ctgcagctattctantacatatttcattgctgagtctagtttacttctattaccaatttctaaagccaaaacacatatatgggcattttacatgcaaatgtcgtgataattcttaatggggaaacaataacccatgcagtctcctacaatatttctttctcgatgataaatactagttatcaatgaaacagtgttcatccaacataaaagtcaaagggagaagcaaactgagtacctgccaaacttgttgattcctgaggatcaccattatttgtccctttaagtgatatcctaccatgtgagcgctctttccacttcttatatataccagtcttgtttgcctttgttttgcaccactctctgtctttatctaaacccgaatagaanatataaatgttatgtcctaattcttactg

SEQ ID NO: 48777 - DNA, 435 bp, Glycine max
  unsure (1)..(435): unsure at all n locations
ctgttgcataacgctcgctaattgtttattatgaaattgatgtgttattatgacttgattgaattgtgtgattcatgtgtaatgtgattgatgattgaaaattgaattttaaatgacaaagtggtggaattacgtgagttatgtttaagtaagttgtatctcatttatatgatatgtgtatatagttgtcttgtttctctattagttaggaatgtgataactcactccccgtgtgttaattgtgtttggatcctgtgatgatcttgaactttatgttcggnggagcagatgactaggtaaattgctttaaggaaccttgtgcagaagaacgttgggacacaatattctgataggatgtgacattgagacatatgtntctatattaattgcatgatgttagtcaattttaatttacctcattgatttaacaaaaca

SEQ ID NO: 48778 - DNA, 350 bp, Glycine max
  unsure (1)..(350): unsure at all n locations
gatcctcagagtcacctgccgcatgcaagctttcctttatctgagatcattacaatgttcatccttttntaaaacaaccttgncctcaagggtgaagttaggaaagttagcttggaattcaccaacattctcccaagtagcttctgcctcatccgttcccttccattgcactaacacttgaggtactttctggttgccttttagtagagntcttacctgcagcagcttactaggcatgataattggtccactttctgttgtggttaaaaggaaaggcaagtattgttctcctggtgttcctttaaacaacttcagctgagagacatggaagacattgtgtattctagctt

SEQ ID NO: 48779 - DNA, 351 bp, Glycine max
  unsure (1)..(351): unsure at all n locations
ataattattgttaccttatatngatgatatatgtatgtttctttatgtttgatgaagtcatgattaccggtggagcaacatcacctgttttctacaatttgaggcaaagacaccgccacccttganttgcttgtgattgactatgacttggctcttcttttccaagcaatgttgatgcttgaaagatacaagttgatattnttttataaaaaaatatgataaatcataaaagggtaaacataagataaatcactgtgtnttttgggcttcttttcgttgtctggatcatgatactngcattagagatgggggatagtggatcctatgagttgtctactcacaattgagttc

SEQ ID NO: 48780 - DNA, 367 bp, Glycine max
  unsure (1)..(367): unsure at all n locations
tcttccttcttttgtgccttgttcctttcttatttctagaggtgctatacctcgaattatagccttgatacgttgctctaacattntggtgctctcgttctccttgtcaccatgctagactcccatcctcacgacacttcaccacgctcccttgaggacattctcctccgcttgggtgacaccatgaacactgtgaccctcaaacttgacgaaatactccaccacctatccccaagctcttcttccccgaaccctcaaccaaccccaatccagccccaacctaaccctgcacctgcaacattacacaaaatgaaattagaggttctgagattcgatggaactgaacctctcggntggatattcaaaa

SEQ ID NO: 48781 - DNA, 332 bp, Glycine max
  unsure (1)..(332): unsure at all n locations
atcctctgactcacctgcggcatgcaagcttgccgctggagctgacccatcaactgtcctagctcttttaagctggggattcctaggcttttgaccttgacttgatagaacctatttttaagcgaaggcgtttgacttgatcccatgttttactaaagtgaaacaaaatctagtgcgaatcaaaactccgacgtctatcatggatggaatggatgaatgcatgaagaaatgcatatgacatagatgtaatttatgaatacgggaggcccggaaatngtctccttcttagatacaacatcttggggtagcaaagtgcccgatgtatgtattta

SEQ ID NO: 48782 - DNA, 471 bp, Glycine max
  unsure (1)..(471): unsure at all n locations
ggtgactctcggcaatttctntaaagctagtcacttaanaagttgtgtctttngaaagaatcttcagaaacaagtcacttgaagaattgtgacttttggaaatgtatttttcgaaatcagtcattggtaatcaattaccattaaggtgtaatcgattacacatcaacagatgtgactcttcattntgaattttgaaaattaaaacgtttagaaaacactggtaattgattacaagtattgtgtaatcaattacacaagttgaaaatgtttgaacacaagttgtaacacttgaaatttgaattcttaacatttttaaacactggtaatcaattaccaaagagtaaaactcttcggtaatgattttgtgaaaacttcttgtgctattcaatggtttggaaaactttttaatacttatcttgattgagtctttccttgattcctgaatcttgagtcttgaatcttgatcttgat

SEQ ID NO: 48783 - DNA, 168 bp, Glycine max
  unsure (1)..(168): unsure at all n locations
tttacactcagcttcttgcgctagctgtngagttgcgctcttatcatgcttgcctatgttaattatcttccaatgaagcttccttgcactaagcgactccaactcgttgagtgaggttgtcaattcttcaaaagctcgttcatttctctgttactctctacaacaaaa

SEQ ID NO: 48784 - DNA, 340 bp, Glycine max
  unsure (1)..(340): unsure at all n locations
ctgatgacctgaaactctctcaaagaggatctcatacagctggaagtatgataaccggcccacaagcaaaatatgagcaaacataaggatcattgcttgctgctatgagacanaaagattatganagcaggctngattgtggcaacttaagatcgcccaaaccacatagataaaactagcaagaacaacatctttagctggcgggcgaacaactaattngccaacaaccaggataagatccataggagaagcaatattaaaatcatgaccagttaagttatagatgataaccaagaccaaatctaatctccaacccaacttcttctaaaagagagcatac

SEQ ID NO: 48785 - DNA, 248 bp, Glycine max
tccctatgttatcacacatatcaagggaaaacgtaatattgtagttgatgctctttctcggcgtcatgccttactttctatgcttgaaacacaattgattggtcctgaatgtttgaaaagcatgtatgaaaatgatgaaacttttggagaaatctttaaaaactgtgaaaattcttcagaaaatggtttccttatacatgaaggctttcttttcaaagaaaacaaattgtgtgtgcctcaatgttcta

SEQ ID NO: 48786 - DNA, 380 bp, Glycine max
  unsure (1)..(380): unsure at all n locations
ctcttgaaacaaactntacctctggtaatcgattacaggtaatnggttatcgatngccagagagtaaatactctggtaacttagaaanaattggaaaaacttttcttgtaaaacaaaatttgctatgtttggtttttgaaaaatatttttcaatactttccttgtgaagtcttgatttgtttcttcttggtttcttctcttgaatcttgaattcatcttctcttgaatcttgattcttcttgatgtctnttctttaatcttgatcttgaacttgttgattcaatcttgacatcattcttttgggctttttgtcatcatcaaaactacttgaatcatactttgatcatcatcatgaagcttgcttctacactgatgaggat

SEQ ID NO: 48787 - DNA, 349 bp, Glycine max
  unsure (1)..(349): unsure at all n locations
atctaactagggatcgaggtttagtaatttaggctacagcatagagcacataaacatgattgagtagagaaacatctttatatgcatcagctggtttgttagaaagacctaacacctttacctactgctgtcaatcttacttactttgcattttactanttttagcctagacttnatttaanntttgtttaaaccatcaattatcaatgtttctttcaacaattgccttattctgaaattaaccctgcctaatactagttccctgagnttgatactcggattcatcntgtttaattntaaatacttgatgacccgatgccttccagcanaccggatttcccttgaacat

SEQ ID NO: 48788 - DNA, 351 bp, Glycine max
actagaagagttgtgccttgtacccaatatcattacccctcccaagatcaaggtgtcagactttgacaagtacaaggggactacttgccccaagaaccatctaaagatgtattgtcggaagatgggggcatacacataagatgaggaactgctgatacatttcttccaagaaagtcttactggtgtagcttgtacctggtacactaacttggaaccttctctagtccattcttggaaagacctaatggttgccttcgctaggcagtatcagtacaatcttgatatggctctagataggatgcaactacagaacatgtgcaaaaggggcacgaatctttaaagaatcaccca

SEQ ID NO: 48789 - DNA, 414 bp, Glycine max
  unsure (1)..(414): unsure at all n locations
atagaacacaatagcatgatngattagagaaacatccttatatgcatcagctggtctgctagaaagacccaacactgttacctattgctatcaattttacttacttacatttttactggtnttatcctagacatagtttaattctactttaaaccatcaattatcaatgtttctttcaacaatgccttatntctgaatttacccagtctagactgtttcattgnttcgatctcagattcatcatttaattttaaatacttgcaatccgggcgcttctgaaaatcggtttcctgaattattgtcgaagaaaagtgaactaaagaccacagggaatcaaccagtattatgcccgtgtcggacctaattaaaaagttatcagttacacatgttattttctcttatcgtgatctttgt

SEQ ID NO: 48790 - DNA, 130 bp, Glycine max
tgcagcttcagtctcatttgagcgctcgataagttctttttcatttgacatccgagaaaaagctatgtcgttgaattactcgacttacgtctctatttgcagctcttgaatattacatgactcattcgga

SEQ ID NO: 48791 - DNA, 195 bp, Glycine max
agcgtgtcgatatatcacctaattcaatctgtcatccgagtaaaaagttattggacgtttgttttggtacgagcgtacatattcaacttggagcgtatagatgtattacgggactcgatcggacaaccgtgtataagagggattgtgaaaaagaatttgctaagagcttccggtgaaatttggagcgtctcgata

SEQ ID NO: 48792 - DNA, 244 bp, Glycine max
tgcattcattcgtatcgtccacattgcttagagaatatatgaggcactcgttgtatgaaaagattattgctctaggtctagagtttcaccgatttcttacctaaataaaattgtgtagagttcaatcctatttataaatcaacaacaatccaattttgtgctttcattaaacacattcagttcagtatttaaaatatcaagctgtttacggttatccaattgagattcaatcattcttctatat

SEQ ID NO: 48793 - DNA, 418 bp, Glycine max
  unsure (1)..(418): unsure at all n locations
tattataatcattaaattctagatntaattattatcataataaatttcttttactatgaataacatttgttttgtggcattatataaatcatgagtttttcagtcacatttatctgttgaagagattttttttttttgagaatcccttntgcattattcaaacttgttgctgttcatcacttacacattcttatacatttgatatttatttgggcatttcttttaatttggttcacctatttaataactaatgttgatttggtgaattaaacacttctagctgatttttcatatatttcaatgatgtacattttgatgtgtgacttctactgtgcacaaatgctatgatgctaatcacacaaacacaagacatcaccaaggggcatgcatgatgaaatgacangcctctagttagtca

SEQ ID NO: 48794 - DNA, 297 bp, Glycine max
  unsure (1)..(297): unsure at all n locations
gagagcttagactctntcttggttttttgacttataacaaaattgattctcatcaaggaagctattcctttatggagaatcctccttcggcttatcgattctttgtggattatggcgtcgttctggtcatattcttcatcttatccatattttctatttttctggtcttgagttctcggaaggtcaacaatgggggttcttgaatttgcatccggaatgattcaaaccaagtgtccatggcttggattgcatcacatggtatcagagcttgaattcggagagcaattacaaaatata

SEQ ID NO: 48795 - DNA, 156 bp, Glycine max
tggaggttttcttcgacatatccattgtggacatgtaagttttggagggaataacaaatgactagtggaagttgattatctggagacaattgaaataaatgaaagatttatattattaagccattatgatgttgattatgctggagacaaattgga

SEQ ID NO: 48796 - DNA, 335 bp, Glycine max
  unsure (1)..(335): unsure at all n locations
aattttttgctttaccttctcttncatagntttttctccatgtatcttctcaaatgtcttgtgctaaatgttgttaacatgattctttagagttttcaccgattaaacttgctatagaagctagaatttattttctatggctcaaatttcttgttcttgttcttgaaccatgaattgtgttgagtttacggtcctttgaattttgtcttggtattttttggggctgaaacctaaaccatataattcttacaaaaatattaaagtagaagaaaaacctcaaaatctagagtgacttgctcacctattatagttttgcatagaagcatgtctagtca

SEQ ID NO: 48797 - DNA, 216 bp, Glycine max
  unsure (1)..(216): unsure at all n locations
ttcattgccctgctctcagtcaattaaatatatatctagtctctgatttcagatcagaatactcggcctccncaaacattgcatacantattttatcacanatattacttttatgtagtaccatgtgtgcatgtaagttngcgcatgatcccaactctttgtaattgtaggcagtaaattacctagtaccataataatattgagtttaattaaata

SEQ ID NO: 48798 - DNA, 307 bp, Glycine max
  unsure (1)..(307): unsure at all n locations
tcctagccttctaaccccctgatcatgctcgcggcttctctcgacatgcctcacgcattncattctgcatggcttctgtcgtagccttctagatacggtggggaggacctttccctttgtggtctagcactccttgcttcctgcacctcccttgctattgacaccccttccttcatctttcccgtaacaacatgtctcaaatgggtagcggaatctggaagcagacaacatttccacaacattaattacttttagttttgtcatcaccgagttacacactgtctttcgctttggnactttcattctc

SEQ ID NO: 48799 - DNA, 406 bp, Glycine max
  unsure (1)..(406): unsure at all n locations
acttttcttctatccccacctaacactttccatttctcaatggcttatattcatcgntatcgcagctattctgattattgctatgtacgctgtctatccccttgaatttctagttgtttcccatcttctggtatttaaacctttgtggctctttatgaccgcccaacgataataggatggacaattaaagaaaaaaaaacgaaacgattaattaagtttctagtaattaaattatggagttttgaatntttggttcttaaattattttttntaaaaattgatccctaaagaatctgtaaacttatggagtttggttttaaaccatcttnttaanaaatngatctctaaagacnnttgtcgtgtaaaaatagtctctactctctnattgtaatgtnccttatcaagt

SEQ ID NO: 48800 - DNA, 255 bp, Glycine max
  unsure (1)..(255): unsure at all n locations
atcgccataagccaaaatcattttggcttgtgaattnttcaacctcatagttcacagatgccatattttttcattctgcgctcactgcaccagtttgttgtgaattctgagagagaagaatatgaagatcaaagcaatgatggataacgcacgtatatctagttatgagccaacacttcaacattgtttctttactaatgaatataaatccacattacaatcttctttaatctgtagaaaaacagaatgaacaaa

SEQ ID NO: 48801 - DNA, 261 bp, Glycine max
  unsure (1)..(261): unsure at all n locations
cgccgcgaaggtatagtacgatgatccttgtgtgcggcgcagcttttctgcgggtgctgcgcgtggngtgttttcttcacaggattgtttgcgaagaaagtgtacgtggaggagaattacagagttggaaggccgttcggggctctgatgggtggcggaaggaggctgctggcggcgcacgtgattcacatattggtggtgtgcgggtgggttactgtgaccatggcgccgttggtctatgtgcttcatatgatgaaactg

SEQ ID NO: 48802 - DNA, 540 bp, Glycine max
  unsure (1)..(540): unsure at all n locations
ccctggtgacccattgaagcctgacccttgtataccnnctacanncgnnantcataatattaggtttagacgagccaattttttataatagcctttatctangctatacagatgctagcgtggcgctacattaacacacatctctagaatcacatatggaagccgtgagccatgctatattgagtggctgaatcatcgtttggcgatctagtacattctatgtggcgcgcacttgactgaacaccacactactcttttagctgacattgagctggtgctcctaatgtgtgtacctcatacatgactaatgctgactcgcgtgaatacgcgctgctaactggcatatcgaatacatctaggatgaccaatgtgcatgttgacgtctacatgactcaaacgacttcaaagtcgttgaactgtctacgactttccttctcgtggatgactggtganatgtcaccctgagtgaatgcatggtgatcttcttagcataggcgttgacatgatcgacttcaccttacgttttaaatgtaccttatc

SEQ ID NO: 48803 - DNA, 425 bp, Glycine max
  unsure (1)..(425): unsure at all n locations
ctatccatataaagtatcatatncatcattgcttacctcttgatatggttgcagtttcaccaagtttattcctcaattgactgtaattctcaataagagctgcctttttactagttaccttgattacaaatataatagaggtttacatttctatacatatagtgacacatatatttttgcctaaggattcaagcgaaagctgtacacatatatttttgcatctttgataagcattgctgaaagaagaaaacattcttctttgtaccaggaaacaataactctaatctaaacaacaaagttattcaaagaaataggaaacaaataacgcttacactaagggcattggcatctcaacacacacacacactacatatgtatttggtaatcataatattatatcatttaaaagtaaatcaagttgtaca

SEQ ID NO: 48804 - DNA, 232 bp, Glycine max
  unsure (1)..(232): unsure at all n locations
gctaccgtgtctacaacttgcaaactaagaaactcgtcatcagtcgagatgttgaagttgatgaatatgcttcatggaattgggatgaagaaaaagtggagaagaacgttcttatactcgttcaactacctccagaagaagatgaggaagaaaacccaggtgaaccaccttcacctccatcacaactacaagaagagatggagtgttcgtacagaanaatttgcaccagtag

SEQ ID NO: 48805 - DNA, 151 bp, Glycine max
  unsure (1)..(151): unsure at all n locations
cgttgactntgatgattattgcctcataattaagtcatacaaaagtatgatctttttaaaggttaaattactcattggatctctatagtttcaagattcttaaccttntagtctctatagtttgaaagtggttcttttagtccctatagtt

SEQ ID NO: 48806 - DNA, 468 bp, Glycine max
  unsure (1)..(468): unsure at all n locations
ttgtatacactatgacacgtatattttattaactcatcccttataattatatttgaaggacaaaacttatagtatccagtaagtgcttatagtgttctccaattaaatgttagagtttcatctcagtaatttctttaataaatgtttgcatacaaattacgaagatgaaactctaattatgattagagaacaaaataaaacatacctatagaaattctttcacacacaaacttaatgccattcaatagaacacaaaaagtctagatatggtggcttatctaacatcctcaacatgtctcttagcttgttcaataatctctgaaaacactttgtaattgttcttgtgaatgaaaaggttgcctgtntcgggtggctgaagactatgaagagttctctgttatgttgccactatgcttctctccgttgtctgcatagtctctttgtagtgatggtagtctttcataaata

SEQ ID NO: 48807 - DNA, 472 bp, Glycine max
  unsure (1)..(472): unsure at all n locations
tatagaaggttcgttcctaatttctctacaatngcatcacctctcatatgagctggtgaagattattgtggcatttacctgnggtgaaaaacaagagcaagcctntgctttgctcanagaaaagcttactaaggcacctgttctagctcttcctgacttttctaaaacttttgagctagaatgtgatgcctctggagtgggagttggagctgtattgttacaaggtgggcaccctatngctttatttagtgagaaacttcatagtgccaccctcaactaccccacctatgataaagagctntatgccttaataagagccctccaaacttgggaacattaccttgtttccaaggaatttgtcattcatagtgatcatcaatcacttaagtacattagagggcaaagcaagttaaacaagaggcatngcaaatgggtagagtacctagagcaatttccatatgttatcaaatac

SEQ ID NO: 48808 - DNA, 385 bp, Glycine max
  unsure (1)..(385): unsure at all n locations
gcaagctntcgcactctcttcttcttctaatctccgnctatttaaaccgtttctgtgtgcatttgagcatcgngttcggcgcactcgagcatcgtcacaagtctctgcttcttctccttcgctaccatacctagggattgttcgtctcttgtagtgcttaactctactgagctttaaaagattggctaagattttggtaaaacataagcacttaaacaatgaaggaaagctggagttgctgcacatgatgtccaacgttatgtcaaggaataagatcgggctgcacaatgcacaaggcaagataaaatgtcaaatgaagaattgaagttgcaggatccaccatgtcggatacaatgtcctgacatcctgcccgagaatactggcg

SEQ ID NO: 48809 - DNA, 440 bp, Glycine max
  unsure (1)..(440): unsure at all n locations
ataagcttgacctttgaaaactgattctttgaancctgagnacaanaacccagctgaacggccagaatttaataaagattttcgcgttttttaaaaaagcgattttacaactgatgttaagttacatcgatttctgaaaaaaccgatgtacatttaaacgttacatggtttctcaaacccatgtttcaaacttatgttacagcggtattgggaaccgatgtaactatcgttacattaattttcaataatcatgttacacacttcattacatcgattttacaaaccgatgtatggatcacagtttacattttccccggcttactaacatcggataaataatggctcttcctctcggtaaaaaaaaaatggggtaagaatttaacctttacccagggatttttttctttgggaaattaattataaaaaatttgtctttcact

SEQ ID NO: 48810 - DNA, 237 bp, Glycine max
gcccagcttaaaaactcaagttacagaatggatctggggcttaatgcaagatggtgtgcttaacgctgctcaataaaaatttttcaaagaataagtggcgggtagtgcatcatccacgctaagcccactagttaaggttcaattaccatgaagatgttgggcttagcgcagtgatgtgcgcttagctaaactattcagccaaccaatcatgggtctatgcgcttagcgagagcaaac

SEQ ID NO: 48811 - DNA, 412 bp, Glycine max
  unsure (1)..(412): unsure at all n locations
ctagaacattttctctgaattatctttattctttctagactttagcttataaacttaagagtttaaccatgtctaggtatcctatggtaacatctcactttttatcatttcaacagtctaaaaacactttccagtcacacgacaaaacaataacactatctatcatagacacatgaaaaatngagatgttacacttaatgggacgtccacaatcattgacctacatacccatctttattcattataaagagtagaatataatgtttttcacacaagtgagtgggttgatataacttataaatgtattaatatatactnttaaaaataacgagattagtgtaagagtagataaaagcaataagagtttgtgtattttacgagaaaaaacttagatcagtactaagtacgttgt

SEQ ID NO: 48812 - DNA, 301 bp, Glycine max
  unsure (1)..(301): unsure at all n locations
acctacgcgcatatttttatatactntgnagattatatattctctacatttctatataggtgtaagaaaaactctcaaaacacttagaacatattaagagaaaagattaagtgctgatattgcacattcgtctataagacacttataaggtagccattgtatgaacaaaccacaaaaatcgtttgatcttgattaaagccaagaagtggtttgctaggacaaagactactgggttgcatcaagcttgtggtagaagttgatttatgaagacaaaagcggcctgtgacaaaatacttatgac

SEQ ID NO: 48813 - DNA, 393 bp, Glycine max
  unsure (1)..(393): unsure at all n locations
ggagggtgttcctgatcgttcttctaccttgatggagctttctatcataactttattatttttgcttctacgtttcctatgtattatatttagttggaccttttgtgtttcaaatgttaaattgcaccttttgtatcctgtgggtgtttattaatgtcatgtgtaaataataatttgtttgcttttgtagcaatggtaacatttgtatcacatacttattatttgtgtgtgcattctggtgtttcaaatattgaattgcactctttgtatccatttctgctgagtaaattgcttatttgngttcaatctgtattaatattggaaaataaaattctacttgcagctcttgtatttcaaaaattaatttatacattgtttggcggatgtctatga

SEQ ID NO: 48814 - DNA, 548 bp, Glycine max
  unsure (1)..(548): unsure at all n locations
atattgacccatcgaaangtgacnncnattagtagaaccgncccccnannacgcnaaannccagnntngtntacaccgaggancatcgtgatttgtgaggcagacgatagttttattgtgaatattgacgctgcgacaacaaacggtagccagtctgagatgattcatacacaggcttaactcttgacatcagtctttacaaccaatgacgagactgagtctgtcaaacgaaaattacagacgacttctatattatggaaacatgaatgttgaaacacgcgggacatagcatggtcatgatgaatggcaatgctttgtaacatgtcgaaattgtcgtactgagtggcaactgaaaagcacaatatacttattttaccaataagactctatataatcgctagattgcgatataaatcacaaatggattcttcaattcgtctcatagtctagacaattagcatgcgatacttgaattaatgacactgagccaatatactctaacatacctactgtttgatgcaaatatttggaactggaatgacaaaacg

SEQ ID NO: 48815 - DNA, 354 bp, Glycine max
cgcacaagccccgagccaattctaacgataataactttttactcggatggccgaaatagatctgtaatatatcgacacgctcgaaactgaatgatgaagctctaagcctattcaaacaacaataacgtgttactcggatgtccgattcagagacgtaatatatcgagacggtcgaaattgattgctgaacctatgtgccaatttaaacgacaataactatgtactcggatgtctgattgagtcccatcatatatcgagacgctcaaaattgaatgttgaccctctgagccaattcaaacgacaataactttttactcggatgtctgaatgagtctcgtaatatatcgagacgct

SEQ ID NO: 48816 - DNA, 339 bp, Glycine max
  unsure (1)..(339): unsure at all n locations
atcataatattaggatactttagataagaaacatataattaatctatcacgactaatgaaagtagtttagttagttggttttaattaataatataaaaaaattaatcttttattcctaaaataatcttataattaaattatttaattgataattatatttaataacatttctcatagttcgaaaattatttttctacccaataagtgtgacatatattgttaataagtcaataaatgcatctattttcatagaaatgagtaattgtttcattaatggatctataataaattacgagtataaaacaacaatggatatatcntaaaataagtctatatttt

SEQ ID NO: 48817 - DNA, 394 bp, Glycine max
  unsure (1)..(394): unsure at all n locations
tagganaggtctcacagacttagcctattgttcatgagaataactgttgcagacaatattaagacagcttcccctaggaccgataatactaaagagtttatggggttagtgggagagcgttntcaaacagatgataagtctcttgttgggacattaatgattacattgaccactataaagtttgatggttcatgtactatgtatgaacatgtcattgagaagacaaacattgcaacaagacttaagaccttgtgaatgactatgaatgagaacttccttgttctggttattttgaactcatcattgtctgagtatggcctgttctaaatgagctataataccgngaaaggataatagaatgtgcatgaattgcacaagatggtagttcaagaag

SEQ ID NO: 48818 - DNA, 154 bp, Glycine max
aattaataatacaaactatactctccaactacttagatatataattactacctaaatctcggatagatagttgcgatgatatctacttattattgagagaggagacaatccaatgcctacgaagtgttatgaggcaagcaacgctttgttttta

SEQ ID NO: 48819 - DNA, 283 bp, Glycine max
  unsure (1)..(283): unsure at all n locations
actaagctcgtggacagctggacatgatatatgtcagggtgccgngttggccttcggntcanggataaatgaatgtctcacattatttccatgacacacatgcaacaatgatgaattggaaattttatgcaaaactagtcatgcatgcaaccatgtggacactcaagcatcaagttgttatggtcatgtgacactatggctcaagattcattttccctctttaagtcaacctagtgttttcaaaacatgtttttttttgtatcaattcatgcattcatccgag

SEQ ID NO: 48820 - DNA, 378 bp, Glycine max
  unsure (1)..(378): unsure at all n locations
ttctaagagagcacanatcctagatntactttatttgtcttttcaatctacttagctcactcacttagcctttcacttgactttgttctaacagaacacacacttatttgaactcctcttcccccccccccttttttttacacataaaatattttattaatttgctgtgtgttggtgtttcttacctttaaaattaatccacccaacaaactcccccaaatttgtggcaaaattgtcttaaaccaatgtgctctcctaaaacataagcaaggtaaatggagatgacagttcaaggctcaagggttcaattgacaattacaattcagctcagagatgggtgaaaatgatataatcattgataaacaggtaagctttatt

SEQ ID NO: 48821 - DNA, 433 bp, Glycine max
  unsure (1)..(433): unsure at all n locations
ctctcccncgttggcaacatcaaanagccatagtacgtggtaagcatcacaagatggtttgaataaaatcaaatataactaaagttcacataatcattcataagtgaaaaccaaatataatccaatcattcataagtcaaaaccaaatataatccaatcataaaatactaagtgccaaataccgaaagataacgaaagttcagaaaatgataacttanaaagcatagccaaatacacgggctacaataataatctaaaactaagaaggtggtggaagatcgaagcaccgatgaagataacccacatcctcttcaagctgggtgatgtgggtatccatgccatcaaagcgaccatccaaggaatcgaatcgaatcgttcaccaacataggtgcggaggccccgtaattctgaaagaacttcattcataagagct

SEQ ID NO: 48822 - DNA, 364 bp, Glycine max
  unsure (1)..(364): unsure at all n locations
agctntagtgcanatactgagaagaatccaaaggaagtatgttcagttgttatgacaagaaacagaatggcaattcatgttgatgaatgtacatctgaagagaaggtggagggatattaacaacaactgacagcttagccggcactggaaccaataaaagagagagagttgtggaagaacaataggagagagagataccaatacaagagagtgaaatatgaataacgatgaatgaagaacaatataaaagagaaacaactcgattgagaagaactccaaaaagacaaagaataggttgatgatgagaagaagaagagcaagagtgatgtttcaagatagaaaaagagagagattactttagctg

SEQ ID NO: 48823 - DNA, 323 bp, Glycine max
  unsure (1)..(323): unsure at all n locations
tcgataacaataaggcttgtttcgatttaaataaagagtttttccttctgaagaaacttttctaacttggaaatatttcttctcactactaaaaaaaatgctttcaacatcgctactttaacatcggntttatgaaaaccgatgttaacaaaagaacaatggcatttttgtaaataaattggatttgttaacatcgatttttgataaaatcaatgttaatcattttttgttcaaaaacccccttttcatcttcagccacatccactctcacttactcactcagtcactcactcattcgttcttgtccaaaagccatctttcat

SEQ ID NO: 48824 - DNA, 449 bp, Glycine max
  unsure (1)..(449): unsure at all n locations
ttccttggaagctaggtgctgtgaacaaacttctattgaaacagcttgttcaacccttgttttaacaagggcactagagaaaccagcttctctcatgaccctactaatgctagggtcatcaaggatagagactatgagctgctccatctcaatcttcaaggccagaatgggttgctgctggttctcaatcgaaccgcggcgttggtgagcctgagcacgcttgaaggctgcaaccaaagcatnggaaagtgagggagtggtggaatatggaggactcacaagagggcttggtgtgggtgctggcaaacggttgatggaaacattgaagcaaagttctagtgccttgtattggagagggtgagagtggcattgaacgaaaacattgcggagaaggcctgtggaagtagcaagcatgacagtggcaatgtgaagaggggcacttgagcatg

SEQ ID NO: 48825 - DNA, 315 bp, Glycine max
tgcttcgacgaatgagaaaactggggcaaatgaagagggtgaggatgaattataagcccatgctgtgactgccattccaatacagccaagtggtccaccaacccaacaatgtcattactcagccaataacaaaccttctccttacccactgctcagttatccacaaaggccatccctaaatcaaccacaaagtctgtctaccgcacttccaatgacaaacaccacctttagcgtaaaccaaaacaccaaccaagaaatgaagtttgcagcgagaaagccttagaattcaccccaattccagtgtcctatgctgac

SEQ ID NO: 48826 - DNA, 400 bp, Glycine max
  unsure (1)..(400): unsure at all n locations
gtagtgaggctgggctgcaataaacaatggtttttctaagattcattagcttaaattataggagagcacgaatcctaaaaataaccatttttttcttttccatttacattcttctcaactcaactcacttgccctttgtacttagctttatttaaaacttacaatgtttttttttattacaatctatttactgcctggaatacatcctcaatctgcaaaatcttgaatatatggggatggtctcttaaggctacaataccattgnggtccccagaaatgtgttgagggtgtccacatcgaactttatcaagtgccctctcactttcacctgctntggtgagttatcttcaaggtcatagaggtttgcgtagaactccttgaccaccacgacatcaatact

SEQ ID NO: 48827 - DNA, 325 bp, Glycine max
  unsure (1)..(325): unsure at all n locations
ttcagaaataagaatcctagacagctctcacaanaaaattggtgttcacctcaagaacaagaagtacatgaccttgatagtggagattccagcaagactcagtcagatccctctcgggttgaacggccctatgaagtggaagtgtcatctgagggaactgtctcagaccatgctgtgagagatcaggaaacataactttagtggtttggataaaaaaaaatgaaaccatattctttcttgatgctgaagccttttcaccaatgcgctagaattnttgtaggtatgacgagtgaactagcaaaaatataggattggtgagaacatg

SEQ ID NO: 48828 - DNA, 245 bp, Glycine max
aaaggtttatgtaactcagattacttgagcgacagattgagatggcatctttgttcgagcaccatctgaagtagtcagtgttttaaccaatctcatagagctattgccggaacggtatgaactcccaattttcatcttcagactgctcttgggttgtagctcgaaatatacttcttgtatggttctcatacttattactgctatggttgaatatctaatggtgagtggaatataatggagtggat

SEQ ID NO: 48829 - DNA, 343 bp, Glycine max
  unsure (1)..(343): unsure at all n locations
cggtcacgagtaattaagaattgttctttataaatataacatatttaaagnttttggtgttatggcggtgtcagtgctgcatgattgaaaatctgtcaagttcatgtggactgctatgatactgatttcaagcttagattcaaagagttaatttggttcttgtgtattttgatgattgagaacttactaaatcattaccctgagggtatgtgaccaaactatgccatttcaagtgcctataacatgtatctgagtatattatctgcatgattatccagaacggattagtngcatatatgtatctgttaacattgttataggtggataaatgatgctagaaaat

SEQ ID NO: 48830 - DNA, 251 bp, Glycine max
aagttagaacatatttccattgagctggcatatatgtactaaataaattcattaaggcaacaaaatggaacggcccaccaaaccacacacatgagctggtggaccaaaccctaagtaaggagtggggcctgttatagctacagatgcttgagtcattatgtgggtatgcttcctaagaaactgtgttttctttatatgaatatattaatataccttcctttcaaccaatgaaatcatgtatcaaatcaaac

SEQ ID NO: 48831 - DNA, 351 bp, Glycine max
agatgtaagacaaaattttgaaagaagtgtatattttgaaacaataagagctaatatacaatcagatacctgaaagtgataatttatgttgctatgatccctaacaatgtataattagtccctgttagattacatttatctttacatgatcttgtatatattattacacaaaaacttatgattctgattgatatgtaattacctaataatcagtaattgattgatatgtaatcaatattgattctgatttctccattataaataaagatgagatgtggtcatctaagacacaaaattacagtaaaactaaaacactgctatatggtatcaaagcttaggttattcttgaca

SEQ ID NO: 48832 - DNA, 421 bp, Glycine max
  unsure (1)..(421): unsure at all n locations
tgccgcatgcaagctngtagaggacttcgcacaagcattttccaagattgttgcaagagggagggtgattgatgcattgcatcaagaagcgaccatgtggatggataagttcgccttgaccttaaatggaagtcaagacctcccacggctactatccaaagcaagggccatggccgaagtgtgttcaaccccaaaggaaattcatgggctaatcaattattgtcaacacttgatagatttaatggcccatataattggaaatcgctagggtttgttgtaacacttttgtgaaatcttggctagatgaaagcttttgttccttttntataaaaagaaaagatctgaaacttgtcgcgttgtctaaaaagggtcttgaggtggatctaagtgctttgatcattcattagcatacatattcatg

SEQ ID NO: 48833 - DNA, 365 bp, Glycine max
ctatgctgcatagtgttacaatagacctactctacctcagcagcaaaatctaccacagccgaacaattatgacctctccagcaacagatacaaccctggatggaggaatcacgcttatctcagatggtccagccctcagcaacaacaacaacagcctgctccttccttacaaaatgctgctggcccaagcagaccatacattcctccaccaatccaacaacaacaacaaccccataaacaaccaaccattgaggcccttccacaaccttgcatcgaagaacttgtgaggcaaatgactatgcagaacatgcatgttcagcaagagaccagagccttcattcagagcttaaccaatcagatgggac

SEQ ID NO: 48834 - DNA, 112 bp, Glycine max
tacaatgcgcattatataaaatgacatgtacagaaaatgtatgatcatctcacgagccctttgacttaacagaatttaaaacatacaatgttaaattaaattacatactata

SEQ ID NO: 48835 - DNA, 345 bp, Glycine max
  unsure (1)..(345): unsure at all n locations
agcttgaccttcggcaaggcattcaccatatacgtattgtcgacgaggacatcccgaanatggattntcgtactcaccatggacattntaagtataaagtcatgtcgttcggactctgtaatgcccccttcgacatttcaggcgactatgcatgatcatgttagaccatttcttcgcanaattgtcgtggtctttnttgacgacatctttgtcttcagctcatcactttcaaaccacctcaaccacttggaagttgtccttaaaaatctatatcagggccaattatttctatgccattctaagtgtttgtttactcataacaacttacactacctaaggcatatt

SEQ ID NO: 48836 - DNA, 395 bp, Glycine max
  unsure (1)..(395): unsure at all n locations
agcttcaagaaaaacggtctcagcaaacttcttattttcagaaagaaattctatcaatagacctctcaattttaatggagagggttaccactactggaaaacccgaatgcaaatttttattgaggcaatagacttaagtatttgggaagccatagaaatagggccatatatacccactacagtagaaagaattacaatagatggtagcacatcaagtgaaagcataacaatagaaaaacctanagatagatggtctgaagaggatagaagacgagtacaatacaatctaaaagccaaaaacataataacatctgccctgngaatggatgaatattttatggtttcaaattgtaagagtgctaaggaaatgtgngacactctacaattaacacatg

SEQ ID NO: 48837 - DNA, 443 bp, Glycine max
  unsure (1)..(443): unsure at all n locations
tatccattagtatgactttcanactcaattcctattatatnnttgttatgccatcatttattttcaataaacccgggtggaccttatatatttgattatgaagacaacatacataccaatttgaaaaaagtattcagtttcaagtgctactcctaaagaactactaatctcagtctaataagaatgacattaatatcactgacattaaagagtattgaacaacatgatgtctgacaagcaacagatcctacaatcttaatacagagtgcaagtttggctactgacaaagctatgtggtactgctcactgatcggcaagtgtaccaatttgcacaagtaatataaaacggttagaccgagtatcgtatcctcagggaatctgtatcacttggacattgtacattaactatgcaaacatttgtatggatacaagcagagtaatat

SEQ ID NO: 48838 - DNA, 178 bp, Glycine max
aacggaacttatctgatcataatacaacaggacaatcactttatgaaaccctttttggttggaatgaattcttaactcgcggaattaggaacaatcctcctaatactttctggactgtagccttagtgtatggggtttttaagcaagtacatttgatgcttgctttataagctaataa

SEQ ID NO: 48839 - DNA, 434 bp, Glycine max
  unsure (1)..(434): unsure at all n locations
cgaaggtggatacttcttcacccctccattanattcctgaaacttaatgagaatcagagaaatcgtacaattntctttagcaaacatattaattactctacatggcttctntattggcgtggnattaagtgtggtccttggtttccagttagcctcaaaccatctttcctcggaacaacttggattcattcactttcaatatttttaccgtcccactggccaacaaaacaattgagaaataaacatgtttaaatgaaagctaaacacatacaattatacagttaaaacagacatatatttatttcccttttaagttaagtacaaacaaaggttaaagaaatttgttacttaagggtgttgtttaactgaacaaaacgttagatattccttccactaactaaatgagagagatacctggttatttgacttctaag

SEQ ID NO: 48840 - DNA, 366 bp, Glycine max
  unsure (1)..(366): unsure at all n locations
gcttctgatttcaatttcgatcgtcttgatctnatactgtactcaatctgacatccgagttaaaagttattgcggtttgcattggctacgagcttccgctttcaactacgagcgtctcgatatattactggactcaatcgaacatcggagtaaaaagttattgtcgttagaatttgttcagtgctttcgctttcaatttggagtgtctcaatatattacgggactcaatcgaacatccgagtaaaaagttatcgtcgntagaatttgctcatagactttgtttgaatttgctacgagctttcgttttcaatgtggagcgtctcaatatattacgggactcaattggacatccgagtaaaaagttat

SEQ ID NO: 48841 - DNA, 386 bp, Glycine max
  unsure (1)..(386): unsure at all n locations
ggaattaaatcaaactaaatggctgagtgtaactgaacattgtggcaaccaatagtcacccccaacagccaacaagtcagccaccatatggtctcccaaaaggctgatgcctacgttgccaattgggcccttattacaactagaactaaagcccttttagttgattaacccaaaacatattnttggtcagccaactttacaaggattgggccattatttagacaaactaaacactctaaaattgaaataaagtggtgtcatttagtcctccatgtgggccatgatacaactcacaaccttggacttttctccttgaaacttgtgcttgtattcaaatagtatggacagcacttgttgaagagcgtcttggcttctcttgctctacc

SEQ ID NO: 48842 - DNA, 248 bp, Glycine max
  unsure (1)..(248): unsure at all n locations
tcctactatcgcctagagctagatgaatgattatgacaaacccaagctaaagaaggataaaactatcacttgcttgcattcaggacttggaaatcatattttcaccaaaatcaaagacttggaaacacctatatagatgtgggacaagatccacaatggatttgacagcaataaanaggtcaaatctgttaggcttctcatattgaagagagangttgaatcaatgaaaagacgaaggacaacaaatc

SEQ ID NO: 48843 - DNA, 427 bp, Glycine max
  unsure (1)..(427): unsure at all n locations
ctccggagtccaattgaaacgggtttcttcctatattgttgattcctctttacattggttgatttccgaaactcgatctctccctcttcattgaggattgattcttcaaattctcgtgaaaaaaanaatgctcggttatattgcctaatgcatgancctttttttttttttgttgttgaaaatttgaatgtgggtttgccttcaaaatttggtcttgtgaggagaggagattgttgctggtgtttgtagagtgtcttggtgtttttgaagatgaagagaacgaaaagtgatcctcccaactcgaggaggtttagattgtctcattttttgtttggcattgnggtgttgtacttgttgtttgtgtcatgtaagtttccacacgttttgagaattggatcaacgttaagtggggatgggagtgaagata

SEQ ID NO: 48844 - DNA, 435 bp, Glycine max
  unsure (1)..(435): unsure at all n locations
gtcatctnggataactctgaagccaattgcttctctatcatctcagccaagtcctccattcccgcttgtctcatattacaagcactctaaataccaaaacaaactcttaaggaattttcaactcccagcgataaagattgttacactgttaaccaattaccaacgaaatcacacatgaataaaggtcaatttttcaattatatggcaattcatgattggatgacacgcctacattcttgttaacactgttgcttgttaggaaaaaaaaagagtaaaccaccatttgagtctgttacattagttcttacatatagtccctagctaagagctaaaactaagggaaatttaaataagttcctgaaaatacaatctgtctatcacattagtccaaaaatataagaaaaatgtgaatttaatgatatattaataaatgtt

SEQ ID NO: 48845 - DNA, 427 bp, Glycine max
  unsure (1)..(427): unsure at all n locations
tgatgatgtcgagaagacatcacatgtntgtcatcatcaaaaaggtggagaatgtgaatgtatgtatacatgatnttgatgatgtcaaagaagaatcaaacaaggctgcttcaaatgataagcatttgcttcaacaaacaaagccttgtttcaagattcactaaagaccaagccttgccttataacagagtgctttcaagatatgcaaggctctggtaatcgattaccagaagacagggttgagaaatagctgttgaaaaagatntatgaatttgaatttcaacatgtaatcgattaccagcaacgaaactcctgaaattcaaatcaaaagtcatgactcttcaaattataactgtgtaatcgattactcanacattgtaatcgattaccaggtgaaaagttttcagaaaatatgctaacagtcaca

SEQ ID NO: 48846 - DNA, 280 bp, Glycine max
gatagatgaccatttgctgagcatagttttttaaaagcttgtctgaagccactctttatgttaaacatcagagcaatgaagttccgatgatttcactttatgtcgatgatcttttggcgacaggaaataatccagggatgattcaggaattcaaacaagaaatgatgaaggtttttgagatgacagatctcgggttaatgaccttctttcttggatttgaaataagcaggctgagtatgaagtcttcatctgccagaagaagtatgtcaaggaaattttg

SEQ ID NO: 48847 - DNA, 100 bp, Glycine max
cacagtaaacaagaatgggatgtttttagagaaacagaagtgttgaaatgaggatatgttgcagtattacaatgaaatgggtgcagttttttccatgggt

SEQ ID NO: 48848 - DNA, 364 bp, Glycine max
  unsure (1)..(364): unsure at all n locations
gcttgtgtcgcactttcaactgccgattctgaatatttttctgtaagaagntggggggctcaaagtctttggatgaagcaatgacttgaagactctggagtaattcttaatcatattcctatgaaatgtgataacacaagtgctattaatctaaccaagaatcctgtcatgcattctagaactaagcacatagaaataaggtatcattttctaagagatcatgtgtccaaaggtgactactactttgagttcattgatagtgaacataattagcagacattttcacttaaccttttgttagagatagattctctcatattagaaatgaactacgcatattggatgcatctagcatagaataaca

SEQ ID NO: 48849 - DNA, 349 bp, Glycine max
acatggtctgatggggcctatgcaagttgaaagccttggaggaaagaggtatgcctatgtttgtgtggatgatttctccagaattacctgtgtcaactttatcagagagaaatcagacacctttgaagtattcaaagagttgagtctaagacttcaaagagaaaaagactgtgtcatcaagagaattatgagtgaccatggcagacagtttgaaaacagcaagtttactgaattctgcacatctgaaggcatcactcatgagttctctgcagccattacaccacaacataatggcatagttgaaaggaaatacacgactttgcaagaagctgctgggtcatgcttcatg

SEQ ID NO: 48850 - DNA, 179 bp, Glycine max
  unsure (1)..(179): unsure at all n locations
attccaacactctatagctgatcactccttttttattcatcacacagatgaatcccttactacttgtntatggtagtaacgtaggcattgttggaaattctatggatatgataactatgttcaagcagattttagataatcaattaggcatcaacgatatgagcattcttaagttcttt

SEQ ID NO: 48851 - DNA, 409 bp, Glycine max
  unsure (1)..(409): unsure at all n locations
tcgagcanaatcagtccacgaaggaggcatatttgatatcatgaaatctccaagcataatgtcaggcaaaacgattcctttcaatttcatgtcatagacaatgttttgaaattcatggatctgatctgaaatagattntccatcaatcatttgaaactcaatcattttttcacaagagtaacgacttaaacctttgtcagcagatccatatttcaattcaagtgcttcccataactcaacagaagntttggtatggcaaacaatcttatatatgttatcagccaaagcacttaaaatgcgtccatgacataaaatatctntatcaganacatcatgcttaatggttgcatcagtttgaactatatcagtagaggaagtgaagttttatttctctttagaaatacagagt

SEQ ID NO: 48852 - DNA, 306 bp, Glycine max
  unsure (1)..(306): unsure at all n locations
agcttgtagaattatggggtacccatcacatgtggatcttgtggcggncgggcgatggtgcacaacaagttttccacattcacaatgcgcgcataaacccaccatcccctggtgcccaccttcaactgagctcacgtactcccacgtagcccatattctcgtttctctcaacaccgggtccccatcaatcctcccaagctttcacaacatccaagcaaaacaacattcacacagcacaagctatcacagccaagcaaaacaaagcaaaggcagaatactctgccaaaacaccaaccaaaaatcaca

SEQ ID NO: 48853 - DNA, 346 bp, Glycine max
cgtaatcgatatcacatatacctgaatcgattaccagagcagattttcataacatattatcaacagtcacatctttttatgtggctcttgaatggctatcagaggcctatatatatgtgactcgagacacgaatttgctaagagttctttagaacaaaaaggtcttatcctcttaaaaagtaaaatcgttctatcctcttacaaattccttggccaaattacttgtgattcaataaggaattatttgaattctcaaattgttcaatctatctctctcaagagagatttcttcttttcttcttcttcattctgaaaagggattaagagaccgagggtctctgtgtgt

SEQ ID NO: 48854 - DNA, 237 bp, Glycine max
tatcataattgaatagttagggtggaccacttagcttttcactaataacaatggatggctttgataacacagccaatccacatttgagcatacactcaattcaaagaatttgaagtttggcacgcagatggggcatagttgctttgctaaaacaagaagcttttttgtctctccattgaaacacattttttgacacttatgaagggctgcatggctaaatcttacaacgtataaaac

SEQ ID NO: 48855 - DNA, 293 bp, Glycine max
acaaagatataatatatgtcttaatacatccctcacggaattgcttctagcgcctgttagaggaattcaagttgataatgaaacacaaataatgatatgttctcctaatatacacattgaacagatctttaaatatcttgcttgggttgaacttgtacattccagttcccgcttaatacaattatattgtatgtcaggactattgtatcatgtgcaattaaacttatcgtttgtaataaaaccctttaaattgcataatggagaattgacttgataatctgattagcttacat

SEQ ID NO: 48856 - DNA, 297 bp, Glycine max
aatcgactaccagtgtttctgaacagaaggaattcaaattcaattgcgaagagtcacatcctttcatgaaatgctttgtgtaatcgattacaaggatttggtaatcaattaccagtgataagttttaaacaaaaatcaaaagatgtaacctcttcaatgggttgcagattattctaaaggtatatacttcttccaatggttttctggactagacttgaagagtctataaaagcaagaccttgatttgcatattaaaaaaaattacttacaacctttacaaacaacttttacacatat

SEQ ID NO: 48857 - DNA, 295 bp, Glycine max
  unsure (1)..(295): unsure at all n locations
tgcactcctccaatgactatagcatcatttctggcgctaaactatcgagagttggaagccatcttctcaattaaattcctggactcagcatgggtcatgtctccaaaggctccaccactagcagcatcaatcatacttctctccatattatagagaccttcataaaaatattggagaagaagctgctcagaaatctggtggtgagggcaactggtgcatatgttnttaaatctctccgagtatacatatacgctctctccactgagttgcctcatgcctgaaatatcctttctga

SEQ ID NO: 48858 - DNA, 330 bp, Glycine max
  unsure (1)..(330): unsure at all n locations
agctttgcatgtctagagatctctagagatagaaagtgtccaagntctatagagttttgagagattttcctatgagaagactgacagagaactgagcaaaaagaggaagccatcttgagagcatgagatgagtctgtgagtgattgtgaggttctaaaggtggaggagacatccacactactagtatttcttcaatccttcatttttctcttctctcttgtgaaaggaagcttcccaaatatggagagctaaatcctttgttggttcttctttgtaggtacttgatgtaaatatctgtctatatatttaatgatgttatatgtgtgctct

SEQ ID NO: 48859 - DNA, 336 bp, Glycine max
  unsure (1)..(336): unsure at all n locations
tatgcgagacggagaccaacatgctagctatcattgtcaagtaccaagaagagttaggtctagccacgacccacgagcatangatcgcggacgagtatgcccaagtatacgcagaaaaaagaggctagaggaagggtgatcgactctttacaccaagaggcaaccatgtgaatntagaggaagggtgatcgactctttntttctctttcgtctcacccgtattaagttagttatgcttcattagagttatgggagatttacggaagcattacgggtgtcccggaagccccggaatcccattntccaacaaaatggggggtgtggtggccanctagc

SEQ ID NO: 48860 - DNA, 437 bp, Glycine max
  unsure (1)..(437): unsure at all n locations
tgcggcatgcaagctgggaaggtgacaaacaacttgctgagcaagatgtgacgcactgatcgcgtgcctgcgngacagattcccttccagattcctcctatccgctaagcgtgtngatacctcgcttagcggatgacactcactaagcgcattgagcccgcttagcaagacatcaactntagtacttcttcaaaataactcctntttgcctgagattgaagaaaatttgacattaattccatacacaaggcttctactgagcacaaataaaaacaaagaaaaatntatttacaatcctacaaaaagaaccataaatgggggaaaatatatacantttgtaaaanatttctatacaaaagttagttgtataagacggctaacanactcccccaaatttacaggtttgcttggtcctcagcagagaaagaacaactcac

SEQ ID NO: 48861 - DNA, 441 bp, Glycine max
aatttctaactttagaaagtttcttctcactcactcatgatgatgcatgatgcacaaaatatatgatatggactaagatgcaacattcaatataacaaccaatacaaatgccactcaaaagagttgggaatgtaaaagatgaaacatcttcaagcttttctccaagcttaagctttagtcttcatgtttctcatgttgctccccctatctctaacaatctccccctttttggctttgatgatgctaaacttgaatatgacgttgagtgcatatggagggtctgagtcttgagattataaacttgcttgtcttagtcaatcctgaaagttcttaatccttaagatatcatctcatatcatcatcatcatcatcatcatcatcatcatcatcgtcgtcatatatcatacttaataattctattgatgctgatgcaagaaatat

SEQ ID NO: 48862 - DNA, 447 bp, Glycine max
  unsure (1)..(447): unsure at all n locations
gacaaagagcttattagtcaagatcacttcatgataacaaagatgatgatctcaagaatcaaagaatgagttcaagattgaatcaagaacacttcanagttcanaaggaaanttgaattcaagaatcaagaatcaagtttcaagattcaagttccaagaatcaagatcaagattcaagaatcaagaaaagactcaatcaagataagtattaaaaagttttttcaaaaacttagaagcacatgaattgttcttaaaaccttttaccaaagagtttttactctctcgtaatcgattcccagattatngtaatcgattactagtagcaaaatggttttcaaaaagctttcaactgaatntacaacgttccaattgattacaaaatgctgtaatcgattacaatgagttgtaaccaataccagtgtgtttgacccgtgaatcaaattcaat

SEQ ID NO: 48863 - DNA, 320 bp, Glycine max
  unsure (1)..(320): unsure at all n locations
cacctgcggcatgcaagcttgagaggatcgatggngacctggtgttgagagttattaggatatgggctacgtgggagtacgtgagctcagttggaggtgggcaacaggggatggtgggtttatgcgcgctctgtggatgtggaaactcgttgtgcaccatcgcccgacccccacctagtaccacatgtgatgggtaccccataatcctacaagcttgagatgaggaagtgttgaagggtgaaactttctgcttttattggtgaccacagagtggtacctggagatatgtcgcgggggtcacgagaccttgtngacgtcag

SEQ ID NO: 48864 - DNA, 405 bp, Glycine max
  unsure (1)..(405): unsure at all n locations
tttcctgaaaatatctaaatttctcgccaaatggcgtttcttctccatatnggaaggtaccataggatatggtacttccgcaccttcattcatagctttntctctcttccttctctctagcttgttcacttctactcctctcttcactcttatntttttcatctttctcattctttttcattttctttntctttctctacttctttntctttntcttggccatttaatttatttttcttgaccattatttgtttttctttttcctgattgctttcacctctcacatcatctttcttatcatcagtacctttcttttcaacagctntcttcttgggcacgacaacactatccttatcctccacctccacaaacttattactccttctcatcacaactntgcattcc

SEQ ID NO: 48865 - DNA, 402 bp, Glycine max
  unsure (1)..(402): unsure at all n locations
agcttcaatgaagggaaaaaatgagaggtatggggagttttatatngaaggaaaaaaagagggagagaagntgaactttcaagtgtttctcccaagtttctcattcatcaaaggtacaacaagtggtacacatgctttcatttatagcctaagtagcttccttaagaagctttcttgagagacttccttaagaagcttctttgagaaacttccttaagaagctagagcttatcgacacacaccgctcanataactaagcccgccttcttgagaagttgcttaaaagcttccttgagaagattctagaaagctagagctactacaccacctctatatagctagctcacctcatgcaaaacatgataaacaaaaagtcctatacaagacactcaaatgcctgaa

SEQ ID NO: 48866 - DNA, 321 bp, Glycine max
  unsure (1)..(321): unsure at all n locations
ctactctataaatagaagcatgtgtaacacttgttgtcactttgatgaatgagagtctcgtgagacacaactcaaagttcaacttctctccctttttctttcttcaatntcgtgctcccgcctctctctttntcttcctctgtcttttcctccattgaagcatcctctccaagcttcttatccaaggctcatcttggtggtgaagctccttcttccaaggcttattccctagtggatggcgcctcctcttacctattctcctttgtctttcgctgcatctccatggtggaaaatcaccattaaaggacctcattgaagctc

SEQ ID NO: 48867 - DNA, 382 bp, Glycine max
  unsure (1)..(382): unsure at all n locations
gatccttaagcaccgcagctgcagctaacacctaataaatgataagttataaagtttatccatcaacaataaatcactctagacaaaagctgaaccagaagtccaatgattaaccaccatataaggcagaaattaaaactattaaagtcaacaagcaaaacttaaccactaaacaaaagccaaatggagatccagaatttaaataactaaaaaaggaatgatagatctttgatggtgtggacacgttcaccaaaaagaatccaagtgaaattncacgggacctgcatnccccaatacataccttcatgaaaactaaagaaaattaagagtgaagtagtaacataatgaaactacttcaaaaaatgccaagtagatctattac

SEQ ID NO: 48868 - DNA, 407 bp, Glycine max
  unsure (1)..(407): unsure at all n locations
catgcatgtgcacaccatatntactttactgagatcaactgatgcattctatttgtttgaatagataatgtatactactcttataatggagagtacaactaacacaataatataatagaaaatagtgcttaagccattcaagtcaagtcattttgaatctcatcattagtatcatacatctatatgtgtcagagagaaggagaaacatgcatggtaatgcataacacaacanaacattataagataacatgctttctaaacccaccaaggtaaaaaagtttcatatntcatgaaatagcatggctttctatggcggaacaatgatattaatntggtgaagtagtcttgagaatgctagttaatcgttttctgaattgaaaatatactcgaaaacacaaatgtctcat

SEQ ID NO: 48869 - DNA, 265 bp, Glycine max
ttatgaccatttaagcaacatatacaatccaggatggaggaatcatccaaaatatgagatggacaagtcctccacaacaacaacaacctattccttctttccagaatattgttggtccaagcaagccatatgttcctccttcaatgcagcaacagcagcaacagtcacaacagagacaacaaagcattagatgagttagtgaggaaaatgacaatccagaatatgcaatttcagcaagagacaagagcctctattcagagtctga

SEQ ID NO: 48870 - DNA, 192 bp, Glycine max
  unsure (1)..(192): unsure at all n locations
ttggaatcatagttatactaagacatgtttgagnggacaagaaaaaagaaggttttgaaaggggggaaggagaaaccaatttgtgaacctgagccagcgctaagacctatggtaaatgtaaaaccggcccaacatatctctatttcgaactattatactctcaacccataatatactctcattttccttatt

SEQ ID NO: 48871 - DNA, 402 bp, Glycine max
  unsure (1)..(402): unsure at all n locations
cctgaagttctagtcattatttacgtttcttctttgttccatatattttttgcattntctattatattctcttanaaaaatgccaaataacaataactacacatttattcatantaaaagcgaattgaggtgtttgtagaattaattctgaattaacatggttctatagaaatgattgtaagtaaacataagtttgtagtatataatatgactattgtttggaaaattgctaccaaaactgattttgtgggcactcactaaaatgacttgagttcaagagtacacattgaacaaatagcatgactaataatacgactcaagttagtgttgattcaaaagctatttgtaagagcctccaatataatgaacagtctaaaacttagactcatgttttaaaacaat

SEQ ID NO: 48872 - DNA, 267 bp, Glycine max
  unsure (1)..(267): unsure at all n locations
acttacaaatatattatacacacacttatgttgttccagcatccaagcatcatgtggcattgtcattatgcagcatgagtagtagtagtacatcactcaattttgaagaatataatgcctttcatcttgtcttctctgctaccggaagcacaagatatgatagagaacatgcatgaggagaggctttagattgttagtcgaatcctctgattcatttgtcgatccagatgagtatactctctatttggctntaaaaacatatatgat

SEQ ID NO: 48873 - DNA, 373 bp, Glycine max
agcttatatcaaagtacattaaatgaataatatattttattataggctctatacaaaaggtataaacacttagtctaataatttataatttaattatattttaagatatcttttaaatctactaatttattgcaaccacagtaatattggatctttaatggaatcttaaatattctaaccactaataatcagtctttattattgataaaaattaaatttaatatcagagatttacattcttccacctactaagactcatttgatagactaataagcagtctaatatcatacttaagagattataataaaacaatcaaacaattatcttaacaattccaaataattatgaatgatttaagaattttctttagca

SEQ ID NO: 48874 - DNA, 414 bp, Glycine max
  unsure (1)..(414): unsure at all n locations
catcgctatccatattatacatcttgcatttttttaaacatattctatggatctccatantggcatcatatcggatgctcaattgtgttagaattaatgtcttatgtgaaaggtatgtgacttatatacgaactaataagtaaataattaacgattaaggactaaattgtaattggacttaatataaaacagttctagagctaactattatttgatgggagtggtggttataaaaggcgtttaatatccactaacgtcaaataaggttctcttccttaccagaaagtgttctctctcacccatagtcatcaagaacggagacaggcagaanaggaagacctanggaagtaaaatcttattcttctcctctttcaaggaaatagaagtgcacaagagagaagttcatatggagaa

SEQ ID NO: 48875 - DNA, 450 bp, Glycine max
  unsure (1)..(450): unsure at all n locations
tatttgcagttgtcaataaaattaagttcatttntcttccaatatcaaatatcacatttccttaaaaaaaataactttttatttctactcatntttcaagtggagcttctggtgacaggactaatgtatgctttcaagtatcaatgtttcaagtttgtactttgtattttaactcttgtacttgactgtccatgaatatgaatatcggtgttcattcccttctggtggtaaaataaatttcaagtagtgcatggttctctaaggattaactagtcactgcattagtctttaaagatattttcaccatagtcttttatagatctaaaccatatatttgtatctttgaaagaattagtagaaattctcttgcatgactaatatgataactctataatctttggaggactaagtagaagaattactcacaatgggatgtatntattatactgt

SEQ ID NO: 48876 - DNA, 419 bp, Glycine max
  unsure (1)..(419): unsure at all n locations
agctntaacctcattgtctctcacagtctntagatttgttagccaatccaatccttgtgtccggactctcagccacttatgatagccgccgatgatcccattactggttccnctaagctctctgtcctttcttcacaccgcatcacatgccttgcgaactccttggagtacctttgcattggggtcattgaaaccccgtgtaatgaaaggcgtgatgctntcatctaatggcgctcctctcatggngtagccaagctgtcttatggcgaggacaggattataattaatacaaccccttgttcccatcaagggaacatttggacatccctcgcatgaagatagaatcctgattcttccttccttctagcgagggaaccaattaacagacgcccctccatgctagccaagagttggtccca

SEQ ID NO: 48877 - DNA, 445 bp, Glycine max
  unsure (1)..(445): unsure at all n locations
gctagagcttagctacacacattttgtctataactaagcttatctncttgagaagcttccttaagaagattcctaaagaagctagagcttagctacacacacctccttgagaagattcctgaagaagctacagcttagctacacacaccccctataatagctaagctcacccgcacgccgaaagacatgaaaatataaaaaaaggccctattacaaagactactcaaaatgccctgagatacaaggctaaaaccctatactactagaatggccaaaatacaaggcccaaaagaaggaaaaaccaattctaacatttacagagaagagtgaatccaaccttgacccatgggctcaaaaatctacccttagggtaatgagaaccctatggcctttntagtagatctagcccaatcctctttgagtgtctattcaatacccttggggg

SEQ ID NO: 48878 - DNA, 260 bp, Glycine max
  unsure (1)..(260): unsure at all n locations
ttggatggccttgattttctcaaggtccaactggaccccatttctaccaactacaaaacctaagaaaactatattatctacacaaaangacacttcttatattgcatagaggtgttttctaagactgaaaaaactgtctgagatgtcctaagtgatcatctangctcctactatacactaaaatatcatcaaaataaacaactacaaatctacctatgaaatcccttaagacatgatgcataagcctcataaaggtgctt

SEQ ID NO: 48879 - DNA, 412 bp, Glycine max
  unsure (1)..(412): unsure at all n locations
ttttatggattgatgctcttaagacgactgtgtatataatanatccgagttccaacttatgctgnctcaaagataccttntgagttattcaacggctggaaaccaatttgcgacatatacgcgtttggggatgcccgtctgaagtaagaatctataatccacaagagaagaaactagaccctaagactattactgggtatttcattggatatgctgaaaggtctaaanggtataggttctattgtccatcccacaacactaggattgtggaatcaaggaatgcaaagcttcttgaaaatgacttgatcaatgggagtgatcaatttcaaaacatttcttctttaagggatcactatgaagctgaaccttctaggacaagtaatacgttggtagtcattctcacccctcaagt

SEQ ID NO: 48880 - DNA, 360 bp, Glycine max
  unsure (1)..(360): unsure at all n locations
gcttctagcacactccttatattttctcanagatcctctctgntaaatcatggaaaagtgttttgtgaagatgcagaccatatttcgagaagatccaacggttaatgaaggctgggcagcgtttttaccgaggcagcttcatgtagctttctctagaagcttcattaagaggcttcctctagaagcttcctcgtggcttctttgagaagctacatccttatctatccacccctttattaactaanttaacttccttaaaataattacggatgaaaataacgcaacannatatccnacatcaaacattattactaataatatatagatatatatatatcagggtggtacaattatcactca

SEQ ID NO: 48881 - DNA, 192 bp, Glycine max
  unsure (1)..(192): unsure at all n locations
cttcaaactaagctcctctgtctgggtttttagagagagaaaggtcctgttccatttatttgaaaatttgctggtgaaacctgagagaaccgacttgaaaggaagctgcctgagagctggatgagttgtgagtgatttgaggttctaaggggaggnacatccttccacttgaatttctcaatccttatgttc

SEQ ID NO: 48882 - DNA, 459 bp, Glycine max
  unsure (1)..(459): unsure at all n locations
ctgaatggaggctctggtctcttgttgaatctgcatgntttgcatattcatttgcctcacaagttcttcaagggaaggttgcggaggagcctcaactgtttgctgttttggggctgttgctgttgtttttgttgctactggattggtggaggaacgtatgctctgcttgggccagcaactttctgaaaataanggtgctgttgttgttgttgttgctgctgttgtgaaggaattgaccatctaaggttgngatgattcctccacccaagattgtacctgttgctggagaggtcataattgttctgttgtggctgcttttgctgctgaggttgaggaggtctgttgtagatgtttgcagcataagcttcaggctgttcaattgcttcagattgttgcacagaagggcaaaggtttgtatggtggcccacagaggagcatanaccacagagtctggcgata

SEQ ID NO: 48883 - DNA, 240 bp, Glycine max
ttatccatatacaatcattagatgcaatatttaaataactttcattattggataagaaaacattctcatcatctgatgccacggcaatagtggtttcaccttagtctttttcattgagtcaatttgattagcatggacagctccagccctttgatctctcttcaagaatttgcactcagacttcttatggtctaactctccgcagtagtagcaactcaagcctttggatgagacttgatc

SEQ ID NO: 48884 - DNA, 399 bp, Glycine max
  unsure (1)..(399): unsure at all n locations
cagttgcatgaaccacacatgatgactcattaattcaatggtttatgttatatttntttttcttccattntctttcttagataaactcaaagtaaaaaagaaaacttttatctgtttctgggacaccctnttttgagtaaagttgtttgtacctctttctaaccactttatttttcagcattggaagtctagggaaagacaactcaacaggcatagtcacgaaagtgatcttggatacagcagttcttagggagactaccaacggtctcagaattaagacttggcaggtagtatctcaatcttgatgaaaattatcttaatctttcaataaatatataatgtcattattctagtttttatcattattatcccttggtgaaagaatatgtcacacccctt

SEQ ID NO: 48885 - DNA, 241 bp, Glycine max
  unsure (1)..(241): unsure at all n locations
ctgcatctgacaaagatgatggcaaatcttcttcangatatgcnctctctgtaaatggnggngcattcagttggaaaagttccaagcaagctacggtagcagattcaactactgaagcagaatatatagcggcaagtgaagccgctaaagaagttgtctggattaataagttcatatatgaacttggtgtggttccttcaatagaagagtcnggcccattattgtgcgacaataatggggc

SEQ ID NO: 48886 - DNA, 440 bp, Glycine max
  unsure (1)..(440): unsure at all n locations
catgcaaccttctcactatanatagcagncaaactttttcctttatatggcatattactnggagctantttttgttggtatactctatatccgacaaactcttctatacatattatcaagttcttaacaatatctataccgtacatacaccaaggttaaactgctacaagttccaaacatcaaaactaaaagcctgacttcacattggtgaattaaaaacaaaacacccatgccatgtctacataaaaaaggagcaaatcagtactgaataggcttaactggttctgttttctgtttcattaactccatagctcatgaaagaaaccctttgtgtgagtagtaatgctactacactactcatttgagtatgattctaatatgataaatgtactacatactatgctacgattacgaattccatctaagaaaaactaacacaa

SEQ ID NO: 48887 - DNA, 315 bp, Glycine max
tgatcactatgttgaggagcggaggaggagtgctccgcaggactagcatgaccgccgcaagaggaaacatcacctgttgctaagaatgagaagcaccggtgtcaacatgagatgaaagaagagtagcagcggtgttgtgactagtacgagcttctgcaaattctactttcacaatcctgatgactattatgagcttctgcaagtctgcaacgttagtctcggactccgatatcaagacgacatagtattgtctcgcctgtgaatgatatccaagtaagaatccagatcgaagagacacagcagaagccatgttta

SEQ ID NO: 48888 - DNA, 158 bp, Glycine max
  unsure (1)..(158): unsure at all n locations
ctgaagagccgagagttaccatntaagagtcgattgtatgatattttatgacaagttgaaggcttatcanaggtcacagaggagcttgtccgaatagttgagtaggacgacagagaacatgtgggctatctattgtcaatacacagagaagctaaatc

SEQ ID NO: 48889 - DNA, 455 bp, Glycine max
  unsure (1)..(455): unsure at all n locations
agtctttttgagaanactttcttgagaatctatagcttttctacacacacctctctcataactaagcttacctccttgagaagctttcttaagaagattcctaaagaagcttgagcttagctacacacacctctctaatagctaagctcacctccttgagatgagaagctagagcttagctacacacccctataatagctaagctcacccccatgacaaaatacatgagaatacaaaaaaattccctactacaaagactactcaaaatgccttgaaattcaagggctaaaccctatactactggaatggcaaaatacaaggcccaaacgaaggaaaaacctattcttatatntacaaagataagcgggctcatacttagcccatgggctcgannatctacctaaagctaatgagaaccccttgggccttccttggatctctggccaatctacttg

SEQ ID NO: 48890 - DNA, 224 bp, Glycine max
caatcaaattaaatcttagagggggaggtgagaatttgcttactatttcccattgccacatcatatagtcacactttgtgcatgtacttcatgctttacatgcctcatgacacctaagcacacttagtggagaatcttggaattgatcctggatcattgggctgaaccataactaaaattcactaatcataattagtgaaatcttggctccaaagtttggctcc

SEQ ID NO: 48891 - DNA, 280 bp, Glycine max
  unsure (1)..(280): unsure at all n locations
attgcacgtttggntaggtcgatntgactatatcattggcaagacttcgattactgatcnaccttcatantttgcgaacttttttgagctcggcaccgcgccangtcaatagataagttttggtgtataatgatgatgataacgttacaacctaagacttgtttaaattacccaaattcttccgccattanggccgaccgtggttggcccgagacgagatatcgtttgagcacaagctatcaaaatattggaactatttacgcanataaataatttaaag

SEQ ID NO: 48892 - DNA, 145 bp, Glycine max
  unsure (1)..(145): unsure at all n locations
gctccttaagaagactcctaaagaagctagagcatagctacacatacctctctaatagctaagctcacctncttgagatgagaagctagagcttagctactcacccnctataatagctaagctgtaccccatgacannaaaacat

SEQ ID NO: 48893 - DNA, 445 bp, Glycine max
  unsure (1)..(445): unsure at all n locations
gtcttttgttcggtgttactnatttttnnntaatcgctgagtctgtgtcgacttatggcgatttgactcaagtgtctttatgttatttcaccatggaatgcacaagacaaggaaatagttaagcgccctccctaggatatcctggaaaagacttcccaccagagtaccttgataaaaactgtagaaagcttatggagaaaatgaggaaaagaagaggggacacaattaggagaaatgaaaagtgacttagttgttacagacttcttatcaagtacacagtgtcacagctctatttacagtcctcttaatcttttgaactctaaattttgaactcttaactttgaatttgaatagtatccccccttactatctctgactctagaatctaagtactctcctctttatgtactactcttatgactggtatccccctttcttctccctt

SEQ ID NO: 48894 - DNA, 218 bp, Glycine max
  unsure (1)..(218): unsure at all n locations
tgtcctccattctagcccgttttcttggatccatctctaactagaaagaactcanaattccttagaccataatcgctcacgttaaacaacaacaatagaggctaanataacaatatgcgcttagagggatatatctcgctcatcgcgctctgagaaacataacatgtcggcttatcctataagttgccatgatgaaatgcgcttagcttatgtaaact

SEQ ID NO: 48895 - DNA, 191 bp, Glycine max
gcttctttgcgagcaacacatatgatgcatacgacactcatgatgatcaccaacacacataagtgtgttaaagtggaactaccaatgtggaattgctacgtggcaatcatatacatgcagttggcatggtgcaatgcgccactttcatctcttcataccttgctctctcttatattattatcactgtatca

SEQ ID NO: 48896 - DNA, 245 bp, Glycine max
  unsure (1)..(245): unsure at all n locations
tttaaaaaaaaaccgatattaacaacatgatgttaaggttaacatcgattgtctgaaaaaaaaccgatgttaacatttcaaacgttaaccatcggtttctcagaacccaatgttaacaaacttatgttaacagcggttattgngaaaccgatgttaactaatcgttaacatcaattntccaataatcgatgttaacatcacttcattaacatcggatnttcacaaaaccgatgttaatggataca

SEQ ID NO: 48897 - DNA, 324 bp, Glycine max
agtatgcttcgacacaaaacaatgtgaaatgagagatatgcatcatttaaaaaagtatcacttgcgcccaataatgcccaatatcacagaactcaatttagatggtaataaataacattcataacagcatgtcttatgtattgaaaatgaaacactaatctatcttaattatgttggtcaccaccatcgctacttacttaatgtataaatcccaaacctgttctatatacaattgaattgacttgcataaaaatatgcctctttttgtattgtttaattgataacccattgaaactcattagccagctaactttcagcttaata

SEQ ID NO: 48898 - DNA, 264 bp, Glycine max
  unsure (1)..(264): unsure at all n locations
ttggatagttaagccttattctaggccatacagacttcagtggcttagtgaagataaagaggtaanagtgactcagcaggttgaggtgtgtctcaccatggaagatataatgatagggtgttgtgtgatgtgcgtccaatggaggcgactcatatactgttgggaagaccatggcaatataacaccaaagcagtgcatgatggcttcaccaacaagaattctttccagcaccatgaccagaagaatattcttaaacctctaccc

SEQ ID NO: 48899 - DNA, 253 bp, Glycine max
  unsure (1)..(253): unsure at all n locations
agaagtggaactgtgaagtgtgtctcataagactntcattcatcanagntacaataagagttacacatgcttctatntacagactaggtagaagctntcttaagaaaactttcttganaacttctttgagagaacttccttgagaagctagagcttagctacacacacccatctaaaaactaagctcaccttcttgagaaggtccttgagaagctagagcttagctacacacacccatcttnaaaactaagct

SEQ ID NO: 48900 - DNA, 117 bp, Glycine max
ttacctatggcttacagcttaattggtccatcatcctgttctgatctaccctatgaaccgcgatatccatactgcttcctaactcttgtcttcttacccgatccatgcttgtaactc

SEQ ID NO: 48901 - DNA, 278 bp, Glycine max
  unsure (1)..(278): unsure at all n locations
ctcctctttaagaccatgctatgtgctcgtgattggtctctctctccccttcgaagctngagctcattattgcttcctcacaaagctccacggaatntatctcggccatgctcttccttgcaagccctcttggtttctcgntcaagggctcttgcggtagctgcattntcttctcgtaactcggcacactccttccggatgtgtgtagcgactaacttgaatttttctttggcaagtcttgctntatctagttctgctttaaagctcggacttcttca

SEQ ID NO: 48902 - DNA, 87 bp, Glycine max
gcatgtagaatcaccctaattctgatgtcctatgctgacttactctcatatctagtccataattcaatggtagccataaccccagcc

SEQ ID NO: 48903 - DNA, 225 bp, Glycine max
  unsure (1)..(225): unsure at all n locations
ctgtttagggctttgtgatgatgttggatgttatatgcctgaaatgctgatggataactattagagatgaagggtaaaattaacctanggttagaaagtgagaatgtggtgtatgagtggaaaaggagtgagactntgagagntggaagggtaagtctgaattctgtggtaaatggagggtaaaatgagttaatcctagcttgaaatgtcatttaggacatgtga

SEQ ID NO: 48904 - DNA, 613 bp, Glycine max
  unsure (1)..(613): unsure at all n locations
ttatgtgatctctcagtcacctgcacgcatgcaagcctgtaatcaataccagaggacattntcagaaantatctccaagagtatcaactttcanatggcttntacatggccatcacaggtctatttatatgtgacttggaacacacacttgctcataattgtacagaacagagagggttgtatcctctcanatagcataatcttcttatcctcttaagattctcttggcaatacacttgcaattcaataaggatttattngagtgctcaaattgttcaatctatctctatcaagagagagttcttcttctcttcactctaattctcaaaaatggattaagataccganggtctctctgtgataaatatcttaacacaaatgatggattgtccttgtgtggncacaactctaaaggattnacaaatagtggactctcattcgttgcttgggactgactangccaagttgggcgaccatataaactgagttgccttctcttgctaaactctntattatcatgcttacattatatcacatcgttaatcgatcattgtnacaaagcatctctaccaactcgacntgtgtgaatcacatatgatttaatcgtgacttt

SEQ ID NO: 48905 - DNA, 238 bp, Glycine max
  unsure (1)..(238): unsure at all n locations
tggcatacaacctcctcccatanatacaaacatcaatgtaaatntagagcaagcttatgcgcatatttccttacgaacgttcacttgcacaagacatcctattaactaagaaaaatgcacccatatacaatcaaggtagcttcattacctagaatattacatgtacttccaaggtgtatntgntacttacatcacacacatctccttggctgaattacatacatgcatactcaaagca

SEQ ID NO: 48906 - DNA, 327 bp, Glycine max
  unsure (1)..(327): unsure at all n locations
gagttccagtgcacattcgtcttcttcttgtgtccagtcttcttctgatcttcattcatagtgnngcttccttctatgtccagcatcttgggatgttcccagcctttgatgacagctntccaggttctgctatccagtgatntgaggaaggccaccatccttgctttccagtattcatagttggttccatccagaattggtggtctgttcactggtcctccttctttctccatgttcatcagaaattatctccctagatctcactcagtgacttcgagtgcccgctctgataccaattgaaattctgatactggggacagatgtcgt

SEQ ID NO: 48907 - DNA, 553 bp, Glycine max
  unsure (1)..(553): unsure at all n locations
atgagactgatnggcctctnnatactcaanctngccattttccantnaaantggaacatatagcatactgcgctttgaatgtctatatctttatagactctatanggggagagagaaatgtgcagctctcggagctgacagagatgaagctgaatacttatgagtcttcaagagtcgactnagaataagtgaacgcttgtcatgacaagaagctgatatagatagaatttatgccaagcctacaagttctgctattcaactcaagaatgaagctattcccaagcgagtaaagtctaatggtcttaccattaccataacgatgtaagcctatgagcactggaattttgacctaatcaacacctgaattaacagttaggactggcccaattgaacttcccacggggacttgaaaataccacattgcattcagaccctaagacatatgaagcaaacgaaaaaccttatgaggaccacttantattttatatctttgtcttcctgctcctctgggcccacggtaccatccgccttctaatactcttggccccttccg

SEQ ID NO: 48908 - DNA, 138 bp, Glycine max
agttctaattcatatctggcttgcttcatgctttagactactagacctcggggctgaaaagcagatgtctgaatgcgacctctctaattggatcctctaaagtaactcatgaagaactcttgaggcttatcttaatca

SEQ ID NO: 48909 - DNA, 101 bp, Glycine max
acgtcatcaggcaccgggcagctcctcatatcccaccacaccgaaaccctaacgtatcgggagtcacgaggaggagaagaagatgacgatgacagctcgca

SEQ ID NO: 48910 - DNA, 566 bp, Glycine max
  unsure (1)..(566): unsure at all n locations
tggagagcagcgngatgcagctgggttannctcanatacttanaaaatcacactatcaactttgttgagtcaagttatgacacactcgannagtcaactgctgcatacgcaccaactntaattgctactcagtgataacaattgatctctctcttaaccaatcacatgagaacctgaaacaccattgatgcagatccacatatggacatgtatctgaagaatgatgatttaataatgataccacacttggacattgcactgggctacttctacatctgttgttacagagctggtaatcataactaccattttaacctcatggtttctgttaatcccaatggtacagtcacgaatcgatgatatgataaggacacatgttctgatatattgtgtcataccacatcaattaatctgatccctgcaccgtataatgcaatgttttaatttaagggacctactctttattacagcctaagattgaacgagtgattgtatcaaacaggatctgctctggtccanacacattttgtgtagagtgagatgacanggtcatacaactgcatcag

SEQ ID NO: 48911 - DNA, 241 bp, Glycine max
  unsure (1)..(241): unsure at all n locations
ctataataataatatcctntcttttcatctagcatcaagtcaaataacatattatgaattnnnttttggcttaattgacaattntaccatcaatcattcattatgttacgaaatttatcaattaagttttattcntattaaatttattatccaatnnttcataatttgtaaattttaccatccatgctttttccaatgaatgtatcgtctaactctcaacattntagtaatttaccatcta

SEQ ID NO: 48912 - DNA, 444 bp, Glycine max
  unsure (1)..(444): unsure at all n locations
ctctgtggtcaacannacaaagtaggaagacccacgctntctcacatcaagcttatnggattatggngcacccgtcatatgtggtactatgtggcgatcgggcgatggtgcanatcaactctcccatctccacaagtcaggcataagcacaccatccncagttgcccaccttttaaatgagctcacgcactcctacgtagcccttatcctcgttcctttcagcaacgggtccccatcaacccctcanagctntcacaatatccataacatttcaatttctttgtcatgaaactaccctaaccatgaanacaaagtnaaggcagaaactctgcccaaactcattcaatttcacagtttntctactacatgcncagaacatctcttcgtctgatcgtaaccatggataccttgacatttactgaggtnctaatacagaattaattt

SEQ ID NO: 48913 - DNA, 173 bp, Glycine max
  unsure (1)..(173): unsure at all n locations
tatttcatgtcaactgtgaatattactcacataaactatggatctacaatcataaaaccanagatgaatcatttgaaacgtcacaaactggagaactcttactgtgaatcagacagaaatgagagttaagaagtactctctcaattctcccatttctcctttacccactctta

SEQ ID NO: 48914 - DNA, 229 bp, Glycine max
  unsure (1)..(229): unsure at all n locations
tctcttcacttttatgtagcagccattgtaatcaatattgatcctcatcaccatgcanaagtactgcataccanagaaaacannaatgattcanatggtatttatagaactaacttaattaagaaaaccaanagatggtgattagagcttgccttcaatgtcatganaacaatcaaagagagagagatagtaacaggaatttgaaaatccaaaatagtatgagtgagct

SEQ ID NO: 48915 - DNA, 212 bp, Glycine max
gaaattgtgctatacagcttgacgaatggcaattactgttaaaatttttcatagtgaatcttactcgaaattatataggatggcactagaggtatacttgaactatacatatctaagtttcaaactcatctttggactttgtatatgcaggaataatatgtcactatagatattgcttttgtaacatatactttgatgatactgataaaaaa

SEQ ID NO: 48916 - DNA, 246 bp, Glycine max
  unsure (1)..(246): unsure at all n locations
cattacaccccaagccatgggtcagcctggaagatagagaaacanacagtatagtaagaagaaagggaaaacagaatgtaatgtgttccggaatgggaagtgaaagcatataacagggtagagcataccattgcaggcacaatgatattgatggcaactggaaagagaggtgaatgatgatgcagcaacagtggttggaccanaatggaggaataaagtgccacaacaagagtatgacaatgacac

SEQ ID NO: 48917 - DNA, 449 bp, Glycine max
tatcgcggcgagctttacaaaatcaaataaaattaagatagagataaacttattatctgttctgcattccggtattcagtctagcaacactaatagttccatctcttgtaaactctttacgagttgaacacacggtacatccttcttgattaggattctgtgaaaagaaccactgctttaatcctttcagaataaaataaatgttctttaaagagatgattgtcaataagatattctaaatcttatgtataacatgggtgacacagaatttttgtagatatactgtattcaaaaacctttctttggagataactttaggatgaacgacttaagggttcaggagctgtggctaataacatgaagagtgttagaatgtttatagccgcggagcgaggaccccccccccgcccatccaccccccccccggctcacccccccccccccccccc

SEQ ID NO: 48918 - DNA, 239 bp, Glycine max
tcttctctggattcaatattacctcttcagccatcaaagtgacagtgtcattagtgatggaagctcgcttgtggcgattctatataggctggatctttgagcttcaatgaggtcctttaatggtgaatttccaccatgaagatgcagccgaagacaaatgacaagaggtgagaggaggcgccatccactatggaataagcaatggaagaaggagcttcaccaccaagatgagccttgga

SEQ ID NO: 48919 - DNA, 500 bp, Glycine max
  unsure (1)..(500): unsure at all n locations
tatatactgtatggtatgtnattntttatttttnnnnaatggagattctgcagtagctgctgctgcaactgtaaaatctggactgtgttattcaattgttttccaattgtccatctantgctaactctgatggatgctctggctcttgtgaaactgatgtcttgcatatcattgcctcacacttctcagggaggttgggatggcctaactgatgctgtttgtgtgtctgtgtgatggggagaagattgctgtggccatacatttgaagaagacagctctgtgtgtctgagcttaccattaggaggtgatctcatcacgtgattgtgtgaagtatattttttgtgtgattgtgctagtatgagtatgtatatcaatacttagcttaatgtcagggtgatgaggaagttttggtgtaaagaccaaccaacctgcaagacttttgtaagcattttactttctagtctgtcctttcttaggtgaacatgtttacccctccttaa

SEQ ID NO: 48920 - DNA, 223 bp, Glycine max
  unsure (1)..(223): unsure at all n locations
atatcaccttcttaattgtacacatggngcactgcgcccncanatgcgcaagtaagaagagataatattccgggctctcgtgtccgtaaaatgcattcatatcatgcatcgcataagcatctcttcataacatcataatggacatnatcctgcattgtccgttatcatattccggcctcacattntgcatgagtcattgcatcatcatatgcgttcaacatac

SEQ ID NO: 48921 - DNA, 154 bp, Glycine max
atggtatctcaacacacgtcacttagagactagcaaacagcctacattgttgcttacagatccgagattgaaattgagtaactgagagagaaagctttgtctgatctacacacttacataagagcatcttatgaagacaacttcctaaaaatca

SEQ ID NO: 48922 - DNA, 384 bp, Glycine max
  unsure (1)..(384): unsure at all n locations
gattcgtggtagaaaaaaaaatatntgtcagaggataatctttanatgaatttaatatttaaatgatattcttgatttcacccagagatcttaataaaaaatatgcacctccttttatatttcttttttattgcatgacagtgaatgcggctgctctataaattactaattataactgaataatgattcttgaacggccttacatatgatcatgacatggatctgatttagagtcaagagaaatagtaccatccccacaccgacacgacttgagctttatgctgcttnggtaatatgattataatgttanttaagggtaatatttatactcaatttagattatttagccctatttttgatattatatataatttgcatacttag

SEQ ID NO: 48923 - DNA, 684 bp, Glycine max
  unsure (1)..(684): unsure at all n locations
gtgtatatctataggttccgngtgntntantatntnttttnnnnnnnntnatatgctctgtcagtcanctgctgcatgcangctggggataatctgcctgacgaaggatcgacggttagtaattangctacaacatnaccacaagacacgatgatagagaatatatttatgctcaactgttgtttaaagacctaacattctacctactgctgtcattntagtcaccttgcattgtatagtttgtaacatataagcttatgttagacttgtttgaaactatcactcatacatgttctcttaacaatgcttctattctgaacttaattcactctaacgctagttccctgtgttcgatactcggattcatccgtntaatatataaatacttgacgatccggtgtgctttcctgaaaacccctttgtaatttccttggacatatatgaacanaattaactgcattgnggagtcaacagtggcgctcaccantatgtaaccttngatgctcctcgggccagcctatatcaactgtttgccggtnattgcgtatntggtcagaactcatcacnaancgcagagcttgggtgtcgtcatccacgtggaacgccgtgcttccctcagagtgcactgtatcaacngcccacatctggccatcatagttgacactacaatagaactatatcggn

SEQ ID NO: 48924 - DNA, 265 bp, Glycine max
  unsure (1)..(265): unsure at all n locations
tcggcagcgggcaacagatgcaccgccatcacctctagagttcacctcagctcatccataanaagggtagagcgtngcttacgacctatggccgaccaagtccaaagtcaaaggtaagcanagtactaggtccgtgaccaacaagccatcacgcgtncagctcaagacgttaaagaagcgctactaggaggcaacctagtaccttntanatctctgcttgttattngatcactntntggttctcaagtcatagcaggacacacct

SEQ ID NO: 48925 - DNA, 218 bp, Glycine max
tgcttgtgatttttggtgggaaatttggccctcacattgctaataaatgagcttattataacttatgccgaaacaggaactaatttaagtttcgtctaccgtagtaagcaccggagtacttatatgaatgccaactctatccatctatcctagcctatttgatattatgacattagccagtgaacagaatattcatggtacaaagattttacgtaaat

SEQ ID NO: 48926 - DNA, 88 bp, Glycine max
cattcatagtaagagagttttacagttaatatataaacggagatatcatcatagaatttgttctcaattaaccaaccaacatgacatg

SEQ ID NO: 48927 - DNA, 215 bp, Glycine max
  unsure (1)..(215): unsure at all n locations
ctcgtggcgataattatntcaccatatgggtcagagcggcttcttataccaatgtcacgaggagtgtggtggtcatattcataatgatagaactgtattttcgatacatacttcctaataagatcattactgactatggcaccaatctgaacaacaaaatgatgcatgagatgtgggtggagttcaatatccagcatcataactccactccctat

SEQ ID NO: 48928 - DNA, 210 bp, Glycine max
  unsure (1)..(210): unsure at all n locations
catttcattgatgtggagcacacacactgttattcatacttacagtattttgtagatatacttgactgtgtgtgtatgctgctctactctgaccatatcattcctntacccagtgtctgccccacatttgggacaaactttgctgtgacatgcagctcccccaaatgtgggacagatttgtcttgaccaagctttctatggatgatgctc

SEQ ID NO: 48929 - DNA, 283 bp, Glycine max
  unsure (1)..(283): unsure at all n locations
ctacataattcaatagataatcaactagtattttttgtgccactagatgcacaccacnccagtccagcccaacacttatatagttctggtttgggtttctaaataaatgggatgctcaattgctgatgcgtaacnntgttagtaaacctgtaagctttaagctcgacttgttaaaaaaaaanatanagcttgaacttgacttatgtagctaattcttaacttcattatnnttgccctttttatgacaatntatcaattantatttaatgaacattttatgatg

SEQ ID NO: 48930 - DNA, 642 bp, Glycine max
  unsure (1)..(642): unsure at all n locations
tctctgagtttggatgatcttactttattttttnnnatnatgatcgcgcngctgcagctngtcnggatgaagagacatcttcttcgacctggtaatcttngattccatctcattgaatcgcatgtcaacttgtaactccaaagtatcaaacatttcaccaacaaaggttngaagaccatcgaacctttccataatctnttgaagaatagaggaatcttctccaccttgtagatgttcttcttcatcaatgggttgagcaccccttttcacccaagaagccatcatgctctttcggtaaccaaaggatgcaatcacaatagcgcctattagaaaggatctcttgatggaacataagggtcagaatcaagagggatgtaaagtgttgaaggngagagtgactagggtggatatggcatggagctattaatcgcactgcctatgcatgcgatatatactaagtgtcccaatcaattgtcgacctggtgaaaagccacatacaataagacatcttagaacttggcatggttgagatcttgaacanatacgcacatgaatatgaagatgagcttcaaagcataacatgagagccctcgctatcgctggtgtgcaacaacgtggatatcacaaaatcaattcatatat

SEQ ID NO: 48931 - DNA, 227 bp, Glycine max
  unsure (1)..(227): unsure at all n locations
gagaagttgaactntgagttgtgtctcacaagactctcattcatcanagttacaacaagtgttacacaagcttctatttatagactangtagcttccttgagaagctntcttgaganaacttccttgagaagcttctttgaganaacttccttgagaagctagagcttagctacacacacccctctcataactaagctcacctccttgagaagcttccttaagaata

SEQ ID NO: 48932 - DNA, 479 bp, Glycine max
  unsure (1)..(479): unsure at all n locations
tttgttaagntactntcnnnaaacctcggctacttggaaaaaggaaaaagagtccgataaaaatgcttattttacgaggcaattttatgatgcgggcacacaatgcggggcccacaatccaactatccattgtaacaataattgttaattttttcagaaacatagtttaaaatcaattatatggactttataactgatccatattattctggtgatctcaagggataatattaactctgaatagaatggtataatctaaataaataaagatggcaataatattaattatatagtgcttctgattgttgtataaacaaaaacaattctgctatgaataaataatcgngattttataagacttttgttactattacagagttttatatattttaaaatagtatggcacccacatttacccacccccccccccctgccccgccaccccctcccttctcacccccccccccccccccccccct

SEQ ID NO: 48933 - DNA, 248 bp, Glycine max
  unsure (1)..(248): unsure at all n locations
gataatacctanaccanaatacanaagcataatgaaactaaacgagtctataaaaacaggctaaatgaaaaatggtaaatagtaataaataaacatagtttagtctctcaagagtcaagactatagtcaataatatggtataaactntactaaaaaaatggcacctagctaggggtagaagtactccctccannacctaaaaanaatctaaacctaaatataaataaatattaaataaactttatctt

SEQ ID NO: 48934 - DNA, 186 bp, Glycine max
  unsure (1)..(186): unsure at all n locations
gtactatcangccaagaagatattgtgtatgatgggtatggaatattacaagaatcatgcttgtccgaatgattgcatactgtacagacatgaatttaagatatgtgcaaatgccctatgtgtgttgtatcacattacanagtgaaggatgatgactactgtaatagtgatgaaaactcaaagaac

SEQ ID NO: 48935 - DNA, 254 bp, Glycine max
  unsure (1)..(254): unsure at all n locations
tctctctctacanatngttaatatgctntganggccaacttgaaatactttgngaagcctaatttaaaggacaagaagcagccatgggctgagtngatcaattntggtgaactattaatatngngctcattagataataattaagcccaacatactcatnaaatntaaccaacttttagaataagattattttcattttaattgtatttnggcctatttttttgcttgaatggtgctacttttactgtatttta

SEQ ID NO: 48936 - DNA, 93 bp, Glycine max
gtagatacggagatggacaagaatatctgctgtattgtgagtagcattttgaaagacgcctctgtgcctgaagctgatgaatatgtcccaaca

SEQ ID NO: 48937 - DNA, 210 bp, Glycine max
  unsure (1)..(210): unsure at all n locations
actgggcaaataaagagggtgaggatgaaggagaaacccatgctgtgactgccatccctgtgtggccaagtttcccaccaacccaacaatgtcattactcaaccaataacaaaccttctccttacctactgcccatntatccataaaggccatncctaaatcaaccacatagtctgtctaccgcacttccaatgacgaacaccaccttta

SEQ ID NO: 48938 - DNA, 137 bp, Glycine max
  unsure (1)..(137): unsure at all n locations
cttgtatatgcanngatatagcacaaatatcgcttatatcatatatatgtatgtataggtagcaagatacactggacatgcatgtatgtagcagaatacctcacaaagatatacttattgttagatagcacaatacc

SEQ ID NO: 48939 - DNA, 206 bp, Glycine max
  unsure (1)..(206): unsure at all n locations
caccgagtctaagagctatccanagcttaagcctatcccttaggggaaaccctcattctntagtcattcctctctntctttctgttagtcatctagccccttcttccatccacattagcccctgaagtgtataatttctcatggccatgaaaggctaaacctccattgttgggatcctagcangtagggatggaaatgagtcaagc

SEQ ID NO: 48940 - DNA, 226 bp, Glycine max
  unsure (1)..(226): unsure at all n locations
ctacttgtcaatagatagagatattcanatatcaataggttagagataacctctcaattanggagctcgactactaagggctgagtatccacgttcttgttgtaggactgacgtggaggattaacacgtgtcccagagtgccatgtangatgtcacatgtatcttgtgggtcccggacaatacaataaataatgtctnttataaatngatctattagttntataca

SEQ ID NO: 48941 - DNA, 661 bp, Glycine max
  unsure (1)..(661): unsure at all n locations
gatattagggattgttnttatnnattttnttttnnnnnnnatnnnataatgatctngatagtcattctgcacgcatgcacnctngangaatatggngtacncatcacatgtggtactatgtggcggtcttgctatagngcacaactaagttgtcacatctataatgcgcgcataaacccaccatactactgttgccacctncaactgagctcacgtactcncgacgtacccatatcctcgtttctctcaacaccggtgtcccataatatcttccaagctttcacaacatnctatcanaacaacattcagatatcacaagctatcacatgcaagcataacagagcagaggcagaatactctgtcataacaccaaccaaatcacagctgttctcacttaaagaccccagtaacagttcctcgttccattcattagccatggattactcgaaaattactgtagtcttagacataacctacatttgacgttggatctacagcaacatcataactcctctgactactcttcacagcagcaatgctacattttctgacttgtcaaagtctgtgacattcacagagaatcttacaagtcatatatgatacacacttgctcattcatctgccagtanagcgtcagtgcgaatatgttcatattgtaatg

SEQ ID NO: 48942 - DNA, 258 bp, Glycine max
  unsure (1)..(258): unsure at all n locations
gttcttcacatcctctgctaagaacaaaagcttaagagagaaaataacatttcaaggacttgagtaacacacttgtagtgttcannaatttagaanttgatattaatnttgtttaagaaaatatgtatctagaatatntaaataaactcaacatgaagcaactatgacananagttataaatatctgcagaatgttatcaaacttaaaatttgacgacctttaagactaaattatanaanaattagtatcgatgaata

SEQ ID NO: 48943 - DNA, 165 bp, Glycine max
tcacaacttctgtattctagttctagcatactcatatattgcgggacttgatctgacatctgagtataaagttattgccgtttgaatgttctcatagcttctgtattcacattcgagcgtctgtatatattacgggactcgatgagacatctgagttaaacatta

SEQ ID NO: 48944 - DNA, 643 bp, Glycine max
  unsure (1)..(643): unsure at all n locations
nnaatatgacttctcagtcacctgcacgcatgcacgctngtctngccccngatatantntaggtactcatgttcactatgaattacanattccttgcgataaaggtagtgtngccatgttatcagagcctgtactaaggcatacaactccttatcatatgttgaatagttaaggggacgaccacttaactatacactataataatcatatgtatggccttcttgtatcaacacagtcgctatcactaacattgaagcatcacactcaatttaaaagattgttgaagttcgcaacaaagtatggtggcttagttatctctgcttaaaacactgaagcttcttcttgttctcttcccatctgaaccaacattgtcttgatcacttattgagaggtgctgcaatgtgctanaatcttcacanatcgtctataataacttgctaatccatgacaactcctcacctctgtcacggacttangtagatgccattattgaatagtcctaaccttatcctcatcatacttgactccttatgaagcacaacagaagctaataacacatcantgatatgacaaaagatgcatggttcaagagtggngtacaatgttcttgtctaacacagcgacgacagcctcacatatctag

SEQ ID NO: 48945 - DNA, 252 bp, Glycine max
  unsure (1)..(252): unsure at all n locations
tttggtcagagcttcaacattcaatttacagcgtctcgatatattacgggactcaatcagacatccgagtaaaaagttattctcgtttcaatttgctctgaggttcagaattgaatttcgagcgtctagatatattacgggactcaatcanacgtcctagtaaaaacttattatcgtttgaattagctcagaacctcanaatttcaatttgatcgtctcgatatattacgggactcaatcatacatctgagt

SEQ ID NO: 48946 - DNA, 229 bp, Glycine max
  unsure (1)..(229): unsure at all n locations
ataacaagactctctatgantggtttaaatatacaatctntgcatatgagaatgcttcagacatattaatatagctatcagatgggcctaaaagagatgttataacctgtcaaggatacaacatatacaggtatttattntacacanaagcacaagatgacaaaagtacaatgcagaacagcggggtcaccctaagggctgaatctcaacactttgcatgtgtcaatga

SEQ ID NO: 48947 - DNA, 224 bp, Glycine max
  unsure (1)..(224): unsure at all n locations
cctacacacccnctataatcgctaagctcacccccatggcaaaatacatngaaatacaanaaaatccctactacanagactactcanaatgcctcgaaatacaaggctaagaccctntactactagaatggccaanatacaaggcccacatgaaggaaaaacctattatagtatctacaaagataagcagtctcatacttatcccatgggctcaaaatctaccc

SEQ ID NO: 48948 - DNA, 454 bp, Glycine max
  unsure (1)..(454): unsure at all n locations
aacttggcctgaacgccctactacttagntcaccttggtgaatttattgtttccatttacattaccaatttgctctttttttagatggatgcctacacccttgcaagatctttctgcctctaggcaatgccaatcttgtgccaatttgacgtatctctttgacgaagactgtgagagaactggttctgagtgtcatagaacagttgtcttgatcctgcctcataaacttcatctttattgcacagcatttgcttggagatacatgatcttctaacaatgcgagtgatatgtgcggcgtcttaccacgacttgtcaacagagtcatctgatacttccatccggacttcttaagcattcaatgacaactatgacagggatgtacagatttaatctgaggttgacaccattagacaattctactatttgtagatgaactacgaattttttgaccccn

SEQ ID NO: 48949 - DNA, 449 bp, Glycine max
  unsure (1)..(449): unsure at all n locations
ttctcaactattaatgatgattgcttgtgtcagtatgtccaaggaatngngtatcgagcaattagtttagaatctgggaccatctgagangtgtgatagaatgcattagtgaattanggatgagcgagagatgaatagagaattgtganatacagtggatcaagcgaattcgaagtccatacctagaaattcaatcatgaagatcgatgtcaccatccaagtctagtatttcaatctttacttaactattntattggcattttaattttattggcaattatatttatggtatttanttttgagacattcacanaacagaattacanaaacctagttcttagtaaataatacatganatcctctttattccttggagacaacctgacatagttaatactacatataatgngtacacttggctatagctgattaatgtgaataacccaaca

SEQ ID NO: 48950 - DNA, 222 bp, Glycine max
  unsure (1)..(222): unsure at all n locations
tcattcagcttgaagagaatgtcatganacactgtatataccagaaggtcagtgggagtaagaattgtttccttgtattatacgtagataatattctacttgccggctaatgaaagggtatgttatatgaagtgaaacaatttctctcanagaattttgatatgaaggatatangagaggcatcttatgtcatangcatanagatccatagagaaagatctc

SEQ ID NO: 48951 - DNA, 675 bp, Glycine max
  unsure (1)..(675): unsure at all n locations
ctttgtggtgttatttnatntnnttnnnnnnntnatgctgactctgctgcacgctcgcgatgtctnnttcagtcgctcaatggaggttnggcgcgtattatgttctggcatattggcacgncgcaccatacatgttacgngtgcaactaactaaatacactaatatgctactcggtaaattctctcttgctgatcttatntccttatatggtattaataagagaggataacatgctgtataaccacatgtgggccagctatgctgtatcaatactaaaatganataacagaatgataattctcataacagaatgaccacagaatgatgattgaatattcagcaagaatccgtggtgcgcttcagacgtattcttctgaatgggcctgcctctnggtaagtcctcttggccttctatcaccatgtgtcctgttgtatcatataacctctacgagtgngaatgaactgtatgcaatcgctttatatcatcaaagtacaagctgtggcacctacantatagngatctctgtgatagaactctctcattgtcacgtcangcttctngtcctcaagagacatgactggtcaagttcttctgaagaatgcatgaactctctcatactgaatatttgcatcctatgtgaggtctacccacnctattctagatacgagtagag

SEQ ID NO: 48952 - DNA, 190 bp, Glycine max
  unsure (1)..(190): unsure at all n locations
ctcatatgttctaattgcaagtttggacatacctgattntntntcataatagaaaaaaacaattcatcattaagaaagaaacggaatatatttggacaaaacactacatattgagttatcaaaattcataagcatataggcaagaacttcatcattacttgtattgcaacataccagaattaaattcaac

SEQ ID NO: 48953 - DNA, 240 bp, Glycine max
  unsure (1)..(240): unsure at all n locations
ctgtgtctctggctcataacccagcaagtgtgatgcctctnntgttgtctanctccatggggccatcaacaatctacatgctagtttatgnttttttttttggaaggcagannatatatatatcattaataggtaaaacagtaccagaggtaccaaatagtagaaatacaaggcaccagagtgctaccctccataataacacacatactcaacagaaaacattcagacccaaacccatct

SEQ ID NO: 48954 - DNA, 229 bp, Glycine max
  unsure (1)..(229): unsure at all n locations
tcgcttctctatggaaaacanatgcacttctgcattgtatatctgttaatggtcgtatagctattgacattgtgttccttcagaagtagcagaatngttcttggcttcaccatggactntgtcatttcagcaataagtgttntntcagctntagtcaatcgccccgcatatggatgtccaactaatgactnggtcaattcatgaatatgcacttcacanatcaacttca

SEQ ID NO: 48955 - DNA, 238 bp, Glycine max
  unsure (1)..(238): unsure at all n locations
tttgtccacaaatggttggaaaggcaacaacatggacacagtcatttagacatcctatacaattcaattagacatcctaatgcatatataaatcacaccaaatataatgtcaatttacatacaagcgcatattttaatagcaactaaataacacanactgcctaataatatgaacaaattcatgtataatctataaaaaagcaaataaaaacacaatacacagcanaacatgatccct

SEQ ID NO: 48956 - DNA, 321 bp, Glycine max
  unsure (1)..(321): unsure at all n locations
tcttactctcctanggaattagcctctttctactcagaccttntagctntgggagccaagttatcccttgcattctagacttcaatcattggtgatagccgcctatgatgccattgctacttccnctaagctctttatcttttctttccaccctattgcatgctctatggattctctgaagtatctntgcattagcttcactaacacctcgcgcgatgatttcttcgttggtaacaacattgaggtggtaaggactacctgcgacaatgcatcatcacaagagganaactctaaatgagacttcactattatcaagtgagt

SEQ ID NO: 48957 - DNA, 615 bp, Glycine max
  unsure (1)..(615): unsure at all n locations
tggtcgtgcagcgngctgccgctcgganngatgntngnngacctgcgttagagaaactaagatatggtctacgtgtgagtacttgagctcagttggaggtggtcaacaggtgatggtgtgtttatgcgcgctctgtggatgtggaaactcgttgtgcaccatctcccgaccntcacctatgaccacatgtgatgggtaccccataatcctacattcttgagatgatgaagtgttgaatggtgaaacttccttgctttattgttgaccacatagtgttaccttgagatatgtcgcgggggtcatgataccttggtgacgtcagggtgggngctaattgcctaataccatagcttgaccaatctccgacccaatccngtgcatattgcggcntatagatcgtgtgatgacctatacaggcgagcttctgtcatctacagataaatgacatatacacaatcatgaggctgtggggcggcctcgtgtaatttgtggacatgtgtatgtgtctctgtaatgataccatggttggtattgagatatgcccccccacgaacgacggacacgccctctcacccncccgggtggtgtctgtctcgttttttcaatatcgtattg

SEQ ID NO: 48958 - DNA, 125 bp, Glycine max
  unsure (1)..(125): unsure at all n locations
cattcataggcttttctctcttgcttctgtctagcttggtcactgctactcctctcttcactcttaattattgcatcgttntcatgatttttcattgtctctttctntctctacttctttntctt

SEQ ID NO: 48959 - DNA, 607 bp, Glycine max
  unsure (1)..(607): unsure at all n locations
attataatgacgctgagagtcacctgcangcatgcacnnctnntgtacncacgctctctgcantatatacacactatgcatctntctttcanatccacttgtcttctcgatcctgatggatgctgataccttctatatcttctaagaactctacagncatctccatcacaccatctaaaagttgccttctgcatttaaaggcttcatcctcacctatgatggtgaagttgcgcatcatctttatgacatgtnngtgctggttggaaacggagataagtgtanggtatntcaacttaagtggtacgtcatccttccttcattcatcctcccgaaatgtggcgtgtctccacactgcactttcctatttattcctctatcgtaaccgctgtcacttgctgctagacgacttatgatattatattcttcaccatggtgtactctacggccttgtactctctcgaattttcaagngcatatgtgatgcatattctagcacattctctttgtatgaagagctcattgcagttccagtgtgggagaacttcttaatctgaccatcgctttgtttgtgganctgggcacgaccatgctttttcttacttgtccg

SEQ ID NO: 48960 - DNA, 305 bp, Glycine max
  unsure (1)..(305): unsure at all n locations
cagctgtcaatgagagagcctacctaatggtctctggggcttatggtgtgttntgaatagcatcttgaagcaattgaagcattccanacaagataaacttgagccaaaatattcgagagagatnattgcattntntgcttcaactctctctntgagagtgactcacttctgtatnntaacttgaaactataatagttaaagtgagaaaacacattccagtcaaaaatacagatactctntaatattgtaagtcccacaatggttggcaaagttgaaatctagtggtgaaactcgtctacttgaga

SEQ ID NO: 48961 - DNA, 686 bp, Glycine max
  unsure (1)..(686): unsure at all n locations
atatgttgcgtctgtgcttgcnctattncttcnctattttnnnnnatgaagacgatctntagagtcacctgcacgcatgcacgctnttgtcactcacccatatctggccttcacattaactataactattatcgctgacaacaacgtctaggaattcttgcacgctagatacaaatgcttctttgaagcagcttgcaatgtatcatacatangcgcatgttcttattgaatagtctcttgtccaagatcacacatcatatcctccaagcaatctctcatttctacatcaaacggtatacgttgggacccaccttgcatgtctgtcaattcaccatgccatatccaccatggataattcttcttaactccatcacacaacagatgctctngtatgtcgtngagtattntgtcatctcctttcaaacaatttatcgacgaacaagataaaatatggtgtcatgcggtcaaattctgtagaagcataatgcaagaactgttccatgcctctcttattctcagggctcatgcgactntcattcactccaactcaatgcatctaagaataactatgtggactcacagagtattcatgcatgaagactcacttttattaaggtgtgcgttacccatgacaagagattttctgtngttagtcagaggtcatatatttgtgagtgacaaatccg

SEQ ID NO: 48962 - DNA, 110 bp, Glycine max
gtgcgtttatatatttgatctattcatcgtatcttgcttcatgattgagttaaatgcttcactgtatgtcttgcgaatgattaacagtatatgattgtttatacttctta

SEQ ID NO: 48963 - DNA, 468 bp, Glycine max
  unsure (1)..(468): unsure at all n locations
tatctgcgttagcacgagctgcanctataaaacctctaactgtctcaatgatttgncacatacctctttttcttttggcttaatatagccaactcttacaatatcaccacttatcccgcatctattgattccactgtgacctctccacctcggtgtccttaatgcatngtttcactcctcctcaagctctgctcttctcctttcatcatgtgcatcttcatgaactatgcattgatgggagggatgaatgtatataatacatctcatattatttgagtgtgttgggtgattctactagttgatctatctttcagatttgatgggtgttggataagtctgctttttaaaacagcttcaatagggttgatccatacttggtgtttactttttcggccttcgcgtatggggtggggtttttttttgttttagtttgttactttgttgcgtggtttctgcttttctttcttt

SEQ ID NO: 48964 - DNA, 201 bp, Glycine max
  unsure (1)..(201): unsure at all n locations
ctcttannattgtgctccactcttatacanagttggactagctcatctaggtccctatatggaaggagttcaatcttgtccctcacttccatattaanggccataaggaacctagcaatgcttgttctntcatcctacataagtccagctcttaanaggagtagtttcatatggtggatatattcttcaacactcatactc

SEQ ID NO: 48965 - DNA, 606 bp, Glycine max
  unsure (1)..(606): unsure at all n locations
ncctatgactagaagtcacctgatgctgcaactnntgggtactncttcttcttctcaattatgtatanggtgataatatctggtctgtttacaaaatgagccgactcatgaacataaacaagagggatgggaccgtactcanacttnattaatgatgatgccatctgactacacanaaccaatgcaagtgttactctctacccttctcactatccctgttctgttgctgttcttttataaataagaccccaacgcatcactgttntcattctaaaccttaaccaccgcgccgaccactactgtgtaatggatatggcgccaccaccgtatatggagagggagaattgtcgatggagggctgcgatttctatgtctatgatgttactcgataggactgtcctactacagtgagggtcctgtgaggaggaggcgtatatgatgatatgactctcctctcgagatcgtataaggacggtgctgcataatggntcattgcgtcatcggaatgtacgaatgtatgactgattgagcagtcatatacatctgagttactggttctgatcatgcatagtcgncatggaatgaatgtggaattaaataaagatt

SEQ ID NO: 48966 - DNA, 101 bp, Glycine max
  unsure (1)..(101): unsure at all n locations
gtggcaacatactgttgcttgctngcttgtgtattttcataataaagatagactntcgtatgctttctctcggttttggaagacaaatgtgatnttttctt

SEQ ID NO: 48967 - DNA, 274 bp, Glycine max
  unsure (1)..(274): unsure at all n locations
tcttattcctctccatagttcataataagtctntttaatcaatggtcccatctatattatgttttgaacatagcangctatgtttaccgcttctccctagaangttttaggaaagtgagtttcacaaagcatggtcctagccatttcttgcagaagtttatnntttcctttcaactacccgatttgttgaggtgttctcggtgaagagaagttaaggaagataccattctnttcatagaatgatttanactcaacattctcaaactcaatttca

SEQ ID NO: 48968 - DNA, 234 bp, Glycine max
  unsure (1)..(234): unsure at all n locations
aacttaatggctgagtgtaactganattgtggcaaccaanagtcaccctcaacagccaacaagtcagccaccatttggtctcccataaggctgacgcctangttgccaattgngcccttattacaacttgaactaaacctaactaannaccctttagttgattaacccanaacatanttttggtcagacaactntacaaggattgngccattatttagacaaactaaacactct

SEQ ID NO: 48969 - DNA, 108 bp, Glycine max
gttcatggatgagcaaatgcttgcatcaataacatctttcttatggttcatgctactacgtatgtctgacataagctccgtttatagtataataaaggggtataatta

SEQ ID NO: 48970 - DNA, 700 bp, Glycine max
  unsure (1)..(700): unsure at all n locations
ttgattagtctctcntcttcatgtatgtatcgttgtantttttattttattttntggtttnttnnnannnnnnnnnnnnnnnnaaagactgcatgatcnacagacattatgnatncanncnccctnnataacatgttatctaccaatttttattctccatangtattaccaactccattcctcgnacaatcagatattataaactcacatatacaatccatctcctaagctctgagagttaactnatatagtactgattgttgtctaatatagactatcatagggatgtctatttacacatattacatgtcttaataacaataactatgatggggcatataatataacataactcatggtcacataatataaagacaaacatacgagaggcctacgtgtttatatatactcacatgtctatgttatagaggtctgatgggtgatcaacatggnancacgtggattcttcatccttttcaaccgtgacaagtatcattgggtcttctacatgaatctcctcaacccttgttcatttcttgtaacacacttgctctattgcacccccacatgacatatttgtgatcgatattagatatcgactgactggatctctttatcatccattaatgatgaaggacatacataatatagctatattcaatgtgaagngnnnactctgggcctctcacacccacccacg

SEQ ID NO: 48971 - DNA, 163 bp, Glycine max
tctcctccaagcacttcctcagtattgctgctacgttattcctactgtgtgtcactcgatctaattctcattatgagatcttgaccactcctgctattctcaccatagaatgatagtacccataaaagatgtatggcgtcctttctcctatcgagcatgctaa

SEQ ID NO: 48972 - DNA, 242 bp, Glycine max
  unsure (1)..(242): unsure at all n locations
tcttctcttggtgngccatctaagtcttcaataccaagtaatcttcttctctcaacttctctggcgtcctcaatcattatggggtaattgacctgaaagtaggatacagaaagaatcattggatcttcatangcaaagacaatatgattgggagatgcagtggtgtagcaagaacatagcatanatctgaattctanagagacaaaatggccatacgacaattcaacttagttcttctactc

SEQ ID NO: 48973 - DNA, 209 bp, Glycine max
  unsure (1)..(209): unsure at all n locations
tgatgaatagtttgtgatgtttgaactggtgtctagatatggactagtacactgcagcgaacatatttgacagcangtccaattgtggggtttccaaaggttagtgccatccttaagtcatgaaatatggatngacaaaagtatacattattagtgctcctgcacttactatctatatgttagatacaatggcgcgcacttgatgagat

SEQ ID NO: 48974 - DNA, 101 bp, Glycine max
aacctttgagtaactcatgataatatatgtaaaaatatgtaatgacactaatcaatcacttgttttagtaaaagtactgggacgtcttataaccatgactt

SEQ ID NO: 48975 - DNA, 243 bp, Glycine max
  unsure (1)..(243): unsure at all n locations
tacaccccgtattccactgttccaagatgaagtcttttcgcggttcaaccgaaaatatggcgggaattacctgtcacaanggagtactcaacgaccaacccctcgtgtttccattagctatcttggattaccgtagagcatccaccgaggatccctgngaggtgttcatgcaatggaatggtatctcacctgatgatacctcgtgggaagactggaatcagctgtgtgaaaactaccaccttg

SEQ ID NO: 48976 - DNA, 279 bp, Glycine max
ataatgagtgaatgaagttttacaagatgttcgtgacagattgggttgagtgagatagggttaaccgacccttgtactatgaaaaatatcattgaggatttgagttctcattgacagaattatatgttatatcatgccctctatcgacagtctatcttgtaggactgaaatgttatattctctaaggttgtgctagcttgctacagtccccgtaggtttgcgattaagaaaccagaaatagtgcttggatggggtgattatatagcctagtggggttat

SEQ ID NO: 48977 - DNA, 234 bp, Glycine max
atctgtgatagtgctcgaggaaatgagaaaggatgttcacggggagatggacagaagagaaaacaaagagagtatgataacctcgacaatggcgatgagaagaagtccctaagctgacccggcggcgtcttggtgaaaggcggacgattgctcagtacatggaatatgatagcggcagacagagaaaggtacgttggattctgacggatgatatcttcacacgtgtagcacaat

SEQ ID NO: 48978 - DNA, 459 bp, Glycine max
  unsure (1)..(459): unsure at all n locations
actgtgaaaatattatttataatnaattttatattatttnntnntnnnngggcgctaggcggtctnnnnnnnnnnnnnntnntcccaacnagtttttttctcanctctaccnnnaaaaattgacaagcaacgctgactctggctgcttccttcaaaataggatatatcaatacttgtgtcctctctcctcgccaataaatcccaagataccgcgaacttctggctcctttctttgtcaagacgatgctaacgtgaatttttgtctacttccttgcaaaaatcgctagaaccgctgatcttaggggtattcgcttcaacacaagacaccctgatcttttgtcctccctgccaaatcaacaccattagatcttgatctctgcctataaaagaacgcacgctgatattgtcctcaatcaagactcgcgactgtttccatgggtnntccgccccccccccccg

SEQ ID NO: 48979 - DNA, 203 bp, Glycine max
atctacttcaggaccaaatttctggtgcgtcctgtattgttagcttcatattcacttttaaatcccagatttgtactggctttaagaattagggggaaatctcaccagaaattctggtaaggaaggcttctcaaatgagggtgggtaagctgcatcatccatagggaatgttgactactgtaccacaagttggctgattatct

SEQ ID NO: 48980 - DNA, 622 bp, Glycine max
  unsure (1)..(622): unsure at all n locations
nttttacacggcgctgttagtcgacctgcncgtcatgcaagctangagctcgtctactcacaacnctacggngagtttttataatcttttttgcaactcggccaaggtgactntgtttactaaatttgctcgcccattggtttgaggatgctctactaaggatgtcagacagttgattctgagntgcttgaggaactcctcatagcctttttcaatgaattgccttctttgcggttatgaaggctngtggtaagccataactacaaatgatgctcttccatgtgaactntntgcacctttggtgtatgatntatgccacgggctctgcttcaattcacttggtgaagtaatccacaatgacaagaaggaacttgtattgtacttttgcaatgagaaatgtactaagtccattctcatattgcgagagctaagaagaagtatactatgagcttctcagtgatgtgcatggacattgtgaattcctaacatcttgacactttacatatcagtgagtgtggctcagggtggcagtattatgggtggagactatgttgcatgtgcatctccgngtcatgcataatgactgtgcactggaggctgaattcctactctaatgtgttag

SEQ ID NO: 48981 - DNA, 235 bp, Glycine max
  unsure (1)..(235): unsure at all n locations
gctccttcttccttggcttattctctagtggatggtgcctccnctctcctcttctcattntccttccgctgcatctccatggtggtaaatcaccattgaaggacctcattgaagctcgaagatccagcctccatagaagctccacaagcaagcttccatcaattntcgatcctcgtgtcttcttggtgtggcttcaacgctcggtccttttgngcgaccatcctttctaactctg

SEQ ID NO: 48982 - DNA, 357 bp, Glycine max
tatctagctctcatgaaatgacgcgggatttcctgactttttggctttatcttgccctaatcaggcattgtggaagttagtcttaatcaacacgaactggtaccatgtaagtataggataagaaatagttggtgtattcatgagattcatcttgttgcacatgtattaaaagactacccatgaagggtatcattggaagctaaaatttaattgggatgctctctacccaactttgctgaaaatctactcctaatacttaaaattgcacctttactggcaaaacacctaagcacctgcatatgcctctgttatacattcaatgtatatctgtgtgcctgattttcttgaaatgtcatt

SEQ ID NO: 48983 - DNA, 543 bp, Glycine max
  unsure (1)..(543): unsure at all n locations
tttaaactgcgctgcgcatgcangctagacagaggaanntataacagatanntgcgagaaatacagccacttttttgctgataaagtaatggtgggctaatctggagaggaagccacttcanagcagcagtaactgtaacgagaatagaatanggtgactnnttagatgatcannatattagaanaatagaacaatgaacagtcaataagttactttgagcccaattagctacaacgaagcattaataaaattgaagcattttttttcttttcattagtaggagatctagcgcaaggcttgaaagccattcaaaatcttatcttatcttatatacaaanagaggtgagcgatcatgaaataatttgcactgtatggatatttgaatttgcgcttgggccaattctttaaaatatcatctactaaattaaagcgcaacaaattattacatatatgacttcattatacatcatacatttacggacaaattaatccacaccgtttctatgtacaatagttaaatattaaatatatttaataaacat

SEQ ID NO: 48984 - DNA, 203 bp, Glycine max
tacctatcgtctttacagtcttagattggagccatccatcctgtgtcatcttagcatatatccgcatatcatctgttcctactttgcttttaccatcatgctgaatctgaacctctgggactaccctcataagtactcttatgctctttagacactgttgagcgatatcacctgtctagactgctctataatatcattctctt

SEQ ID NO: 48985 - DNA, 612 bp, Glycine max
  unsure (1)..(612): unsure at all n locations
attatacgcgctgtgctgcagctatgactgcatctttctaacantgctngttcaaccttctattatcattgtcgtgtgctatacanacaccaatagtctcctcgataagtcttctatatggagtattctctgtccgcanacttaaaatgacttacacaccttgatacacaacctactatctgattntgtaaaatgtgttggtgtattacttacttatganagtttacgacaatctaataataacccctcttgagaatgttggtcaatacagaataagcataagtcatgtgagctagatggcagaaacaatcgatgatgatgcttagagtataaagatcatgtgtaatccctttngattagaattggttggatggaaatggcagtggggtaatggtagatcttgacatgggacttataatgtgattaaggatggtcctatgagaatacacacagtattctactcaataagctctcctattacacttctctcgagtttataaatggcgacgctatatatatacattgagtggatcttctcaatangagataactacctctcatacatgaatggttctataggtgtgttatgactcacccacccccacaccccct

SEQ ID NO: 48986 - DNA, 257 bp, Glycine max
  unsure (1)..(257): unsure at all n locations
cgttgaaattcanattcaaatgtgaagagtcacatcctttcacannaaaagcttgtggtaatcgatacacntaattggtaatcgattaccagtgatagtttctgaacaaaatcaaaagatgtatctcttccaagagttntcaagtttttctaanagttgtaacttttccaaaagggtttaaagattntctaanaggttataactcttctaatggttctcttgaccagacatgaagagtcaatanaagcaacactttg

SEQ ID NO: 48987 - DNA, 116 bp, Glycine max
acatcaacacatatatttactcgatgctgattagtctcgaatatatcacacgctcgatattgaatgtggaatctctgagccaattcaaactacaataaggctttactctgatgtct

SEQ ID NO: 48988 - DNA, 704 bp, Glycine max
  unsure (1)..(704): unsure at all n locations
atttgctactctattttatttttnntattnatatgtagttgntatttnntttattattatatnntnnnnnnnnnnnnnaatcgctgctagctcagcatcatgtcagcnncnnnntnnntacgggaccctcatcnacattctantaatatgtttnttctcttgtattggctcacagcatcaacattcaattatcaaggtctctgatatattactggactcaatcacacatccgagattaaaactatcgtcggttgaataagtctcacacgttcaacaatcatatatcgagcgtctcgatatgttacaggacttcatcatacatccaagtaaatagctattgtcatttgaattggcttagatactccacaactcaatttctagggtctcgatatattaccggactctatctgacatctctatgaaaagtaattgcttntgagataggtccgacgtctaacattacctttctgaccgccttgttatttactggaattcatacatacatctcacccataaatattgtgtttcgattgtttcgaaattacacatcatcttctacggtcttattattattgacctaatcaacactcatatcaactacttgattntattgtttaactctactattatttcatcgtcgtattattccgagtatgcgacttcaggaatgcgtannnnctccgnncctccctcactctcccccg

SEQ ID NO: 48989 - DNA, 197 bp, Glycine max
  unsure (1)..(197): unsure at all n locations
acacaccactatattatgatgatggatggctcacattctcacagaggtgaactcatcacttgcanagtgagctttcacaactatcatgacatgtataggaatatcaatgtatttaaatcacaaaatgtcaagacacttnttatttcaaaacaattacgcatttctcgaacatatgctataattcaaagaataacatg

SEQ ID NO: 48990 - DNA, 149 bp, Glycine max
gaaatacgcatttattgtccttagatgcccatcacagtatgacgttgcattacatggacgtacaaagtgtgtacctaaatagactaatcaaggatgaggtatatgcggaacaacccctaagtctgagagctctatctacacttatcatg

SEQ ID NO: 48991 - DNA, 259 bp, Glycine max
  unsure (1)..(259): unsure at all n locations
agcctctcactctcactntccgtgacccanagcaatgctgtatatgcatctctgcctctgaatatataaatattcttttcactgctatgccgcanaacttctgatcccaccggccaccactctctctctctctctctctctatatatatatatatatcccatggctactgttatttcttctttctctttctccactctcactcaatcttcttcgcagaggaacctcaccacactctcttccaattcaccaacctttcgc

SEQ ID NO: 48992 - DNA, 89 bp, Glycine max
cactgtaagttatcatctgaattatagctttgtttaacacgagtatgtaaggcataaaagaatcgaataaccaacctctcactactggt

SEQ ID NO: 48993 - DNA, 178 bp, Glycine max
  unsure (1)..(178): unsure at all n locations
acatggaacagaaggacataagttaaacgtcattcatctcttcacatggacgtatntttctctatattnacatatatagtcacatgnacaatttattgggtgataacatatatggtacatatttcttccaaatattactgttaaactcaccatttaatttgatttaaactgaactgat

SEQ ID NO: 48994 - DNA, 110 bp, Glycine max
  unsure (1)..(110): unsure at all n locations
atgactcagacaatgagaagagttgcagtttggacaatgagcaagccaacatctatgatggaagctngcttatggngcttctatggaggctgaatctttgagcttcaatg

SEQ ID NO: 48995 - DNA, 272 bp, Glycine max
  unsure (1)..(272): unsure at all n locations
tcatatatcatatatatngaatgtgtgcccagcatgctttatagactcttcatgtctggtcaaagaaatcattggaagaagtatgactttngagaanacaatattaagaagtataactcttaacttttntcanaactattcactgngtaatcgataccacaatggtgtaatcaattacacaatgtatnntctgaannagtgtgactcttcacaattggatntgaattccaacattcagaatcacttgtaatcgattactaatatagtggaat

SEQ ID NO: 48996 - DNA, 53 bp, Glycine max
tacttcgtactatctgtttgatccgttccgctgatctctggtatatatatata

SEQ ID NO: 48997 - DNA, 657 bp, Glycine max
  unsure (1)..(657): unsure at all n locations
attcgatgacttgantactcaagctcgctagatcggtaaaaggantgcagcanagtaacgattccaagntcaatttcatctcatctacgctngattctttgatccagaacaagatgatttcgacatcttcccatggtgttgcgagctcacagaaatcgccatttctggtacgcaatatcaagcttgaaatttcccagattttgatggtaagaacgtcctcgactggatntttcatgctgaagcaatttttgatatttatgggactgtgatagcgagagattgccattacctcagttcatatggatgtccaagggagaaaatctgggactgttgatagcgagagattgaccattataccagagccctttgacacccgatatggcccaatccatatttgaatgccctatgagcacacttcttcaaataaacctagactggntctgttgctgaantactacttgctgatacactcttcanatgaacccagaaatcatatggatgtcctatacactcacccattaactnnggtaaggttgtatncttagctaaagtctatgaggaanatacacncaacacanacccagaattactctataccgcaatagcccancacatacnncacnnnaccccatttanaaagccctctcttctctttcg

SEQ ID NO: 48998 - DNA, 240 bp, Glycine max
atatgtatcttgggattattctaataaactatatattgatggatatattaactaaagttaaatctagtataaggagatagcttctcccaacacaactaattaagttatatatgtcttactatagagatgaccatatgtatatctaatagtatctcaaataggattgtgtttaaagaggaaagaaatattggtcatctttattatgctctatttgtattcaaatataacttcatgtatgta

SEQ ID NO: 48999 - DNA, 336 bp, Glycine max
atgaaatgtgagaaatgttgatataaagatttttggattagattatttatatatctaataattacatatatattaaacttaatttctttttgtaaatgtacttattccccctgcatttgcttcatttagtattactaatcatctatgtaaattaatttagatatgaaataaataaagataccagatatgctacctatttctttccagatcactatgtagagtcacctcgttatcaatgaccatgctgataggaagtaaatccgatgatgaaaaatgaacaggacatatgtcatctaaatatttatatataaagaattatctgacaaaaaatactta

SEQ ID NO: 49000 - DNA, 102 bp, Glycine max
tttacggagctgatgttccgaaaaacagaccctaattatgtgagttgactatcaacgacatacttgactggagcgacacgccgttaacagagccaattaagt

SEQ ID NO: 49001 - DNA, 228 bp, Glycine max
  unsure (1)..(228): unsure at all n locations
caacattcaatntcgagcgtctcgatatatgacccggactcaatcagacattcgagtaaaaagttattgtcgtctcaattggctcagagattcaacattcaatctcgagtgtctcgctatattccgggactcaatcagacatccgcgtaaaacgttattgtcgtttgaatnggctcagaggttcaacattcaatttcgagcgtctcgatatgtcacgagactcaatca

SEQ ID NO: 49002 - DNA, 663 bp, Glycine max
  unsure (1)..(663): unsure at all n locations
tgttatattcttttntttnnnnnnntnttgtgcgacttggccgcganctctgagtcacctgcggcatgcangcttgtcataggtcanatagatatttgtaccaattgatcaatacgatatataacatgtgtgtgggccatcgttgaccaatacaacgagaatctaagtctagcggcaacccatgaacacaggctagcagattagtatgcaaatgtatctgtgctacaataagaaatggaagccagataaagagtgatcgatgcaatacacacagaagcaatgatgtggatggataggctcgctctcaccttgaatgggatataagagcttccaagactgctttccaaagctatggcgtagcatacgtgtactcgcgctccaatggaagtcatgggctccttgtatatcggcaacacatgatcaagttgatggccacataattacgagccaatatcgcggctatattctggttattattacaggaaaacattgttggctctaangaatataatgtagtttcagactgtctctgttcaaaatctatgctagtgcagtggtttgctacttatcttaagcttgcatcatgttangtcgttgtacatncntactacattgtcgtctgttggaggtaaagcatacntacacacttaagcaccctataag

SEQ ID NO: 49003 - DNA, 508 bp, Glycine max
  unsure (1)..(508): unsure at all n locations
ntatcttgggcacttganactcagcttaccaatcctagcaaactatcgtgctagcggttctatgtttcaccaatccttacgctaacgagtcataactaacccagcatgcactagcagattcatgcacatatgacgctaacagaaccttcactaacgatgctctctgacttagatgcatattttactagctggcagacaaggttacaagagtgcgatttctatctgcnacctcctagcggactactccacgctaaccgagttctggcaaaaataatcgaattaaacgcngctagccacgttgctagcagcctgttagaaacaattgtttcttgctcctatgcaacgccgctacgaaagatcgaatgctaagtgatgaacacagttcaccacatttcagatacagaactcgctctgcttcttcctcaaattgccatttgcttgtctcttttgctttcactgagctcatatcctgcagtagtctgttgtnntctctnctcgccctcaaccc

SEQ ID NO: 49004 - DNA, 287 bp, Glycine max
  unsure (1)..(287): unsure at all n locations
gagtctcatatcggnttaattggataccgatatctcataatcgactacactattngtttgagacaatgaattgattattaaggagtctctgctntaatcgattaccaaagtggataactgattgctctctctcattaagtgttagaggtaacaatacacttagtcggtacttaggcatatatcaatacatcgtctgagtattctnatgtcggatgagcacttatgatactagatatctatcatacttgtgataatgatactatagatatcatacaacgtatatattt

SEQ ID NO: 49005 - DNA, 183 bp, Glycine max
  unsure (1)..(183): unsure at all n locations
tgctagtgnngtgtgaccttttcacanagtgggtcaaagcttgaacctttgcaagcatcgcaactcanaccaacnncgtataaattcctntggaagaatgtgtagaagcaaagcttcatggtgaatcaagaatgattcaaagatgtntngatgataacaaaagatgatgacaaaggtgatgac

SEQ ID NO: 49006 - DNA, 239 bp, Glycine max
  unsure (1)..(239): unsure at all n locations
tggcatacgaacctccccaataacacanacatcaatgtanaattagagcgaactcatgcacatacttnctttcgaacattcactcgcacaagatattcttctaactaagaaaaatgcacctatgcacaatcagggcaccttcgttacctagaatatntataccgtacttcaaggtgtatntgctacctacatcacatgcacttccttngctaaatntacatacatgcatactcaaagca

SEQ ID NO: 49007 - DNA, 648 bp, Glycine max
  unsure (1)..(648): unsure at all n locations
atttaaccctgagctgangtcatgcacgctgagctnngntcaaccncgtaatccaaggaatgganantctgatcgttcatactncaacatcatcttatanggatgaatgactctggcatactntaagcttatgcactgagaatgtatatatgatattgagatgcccgaagacacaccatttnctagttaaccatgcattaggtaccatgtgcaagtattntgttattatgtgagactggtttatgatcccaacatgggtggctcctaacacatgatactaataatgtagtgtgaagtttcacgcttcccccttctttgttntngntntgtagacganaacgcattgatgagcaaacatganaacatatggtgtgtatttngcagatcataaaggttgttgactcatatgcatgatgatgccatgactcatgcaaaatgtgaggctgtgatatgataacngacaaatgcatgatatgtccattatgatgttatgaagagatgcgtatgcgatgcatgatatgaatgcattntactgacacgagagcctcgataatatctnttgtactcgcgcatgtggggggcattgcccatgttacaataagatgngattggacgttcggtttnccgccacgacccactcccccacct

SEQ ID NO: 49008 - DNA, 581 bp, Glycine max
  unsure (1)..(581): unsure at all n locations
nnttatctagctggtgtgctgccgctgtaatctatgtgaatggttatggcctctgganatnactaccaatggtgggtaatcaattacaaggcttanaaatgaagacaagaagctaagatggtctctgataaatcgataccaangngtgtaatcgattaccaggcttgaaaacgagattangaagctaggagagcttctggtaatcgattaccaaggggtgtaatcgattaccaggcttaagatgggactggaagaatgtggaggcctctggtaattgataccagcctgtgtaatcgctacacagaggaacatgccactggtaatcgataccatgtatgtgtagtcgatacacagtgccttttcaagttacatgtcatgagctgtgtaattcgagttgcctctggtatcgatacaaggctgtgtatgataccgagatgaaagcctgnatatcctctacttcatgtacggtatacgccatgtgtgtgctantagattcctaagagttacccttctttcttctgacatgcatgcgccactatcatgacgatgtattganncttatggaactcttcgcctacact

SEQ ID NO: 49009 - DNA, 241 bp, Glycine max
  unsure (1)..(241): unsure at all n locations
gattctcgaagtgagaaaattctctaattgggatngattctagatataggtcaataccaattatgctatagtctgaaccaaggaatatatactaactcaatagcgacaacaaccttcacatgttacctatgctgaagtatgctactntagaatgatctgtcgtgtgaagaagtgttcgattaatggagtngagctatctacattgttatatcatgttatcttcatgagaaggaacctacat

SEQ ID NO: 49010 - DNA, 212 bp, Glycine max
  unsure (1)..(212): unsure at all n locations
ggagacccattgaccagcactaatataaatgatgatctcagacactcagctatccaacatacccattntacatagaagcccatatgctctagcatgtagaggaggaactcccagctcactgagtcatatgctttcttatagtctagcttagagactaagcatcttttcttacatctccttgcttcatcaatagcctcattagcaacaacact

SEQ ID NO: 49011 - DNA, 129 bp, Glycine max
  unsure (1)..(129): unsure at all n locations
gcatagaatcgcggatgagtatgctcaagtgtatgcggaanaagaggctataggaagggtgatcgactctttacaccaagaggcaaccatgtggatggatcggttngctcttactctgaacgggagtca

SEQ ID NO: 49012 - DNA, 395 bp, Glycine max
  unsure (1)..(395): unsure at all n locations
tctaatctcgcaggtaacgatatcaacaaattgtcggcaaccaanaacaaataaacattgaatcagaacannaaacaattagtaccttgatttcgagtctgagaagctgcaaatgcaagtaacaagagagataatanaagcanacaacaaaatacgaatcagaacatggttcacagtggatacgttgaatgaatacaagactaatagcaatgcgagtccattcagagagagaacatcaatgaaaccatgcttatggagcttgaacagcaatcgtcaattaggtgtaaatgaaacgttgggagacaatcaaagaactaccatttgcaatggaagtgctaccttacgaatatcgtgaacaattcatcacactaaaaaaaaaaaatgttatgttgaaa

SEQ ID NO: 49013 - DNA, 236 bp, Glycine max
  unsure (1)..(236): unsure at all n locations
tatctcttttatcttagtgagagtgattctcctanattcttgagtgattcaagaaccaccctgctgtatcanaggactntcacnaacctttgtgtgttgccctcgctgganagagtgattctttccttccaatcatctccacccttgttctttcanaccacaattccagaaaatccacctctgcccaaaattatctcgtgaccataactcccagtttacacanctcaaataagtga

SEQ ID NO: 49014 - DNA, 219 bp, Glycine max
  unsure (1)..(219): unsure at all n locations
cactgaagctagtgngcatccatacatatntaattatgaatgcaactaaacgagtgtctcacatgatatgtcaagatcccttcanacattctcaagctgtngtttgagttccncttcacttganatgagcctctctacagcttacacagaatntcaactagaggaaaattaacatanaatgaatcttaatattgaatgatggaaagaaaatagaataat

SEQ ID NO: 49015 - DNA, 235 bp, Glycine max
  unsure (1)..(235): unsure at all n locations
cagttgaatattcctgtgttccctgtatgccttctcatcaaaattcagaaaatttagagcccaatatgctgtgtgttccatttcaactcggaaatgacatgattctccatacaccagttgataaggagataagccaatcggggtcttgtatgaagttctgtaagcccacagtgcatcttccaatntggttgaccaatcttttctagttgacgccactgttntctctaatatcttc

SEQ ID NO: 49016 - DNA, 611 bp, Glycine max
  unsure (1)..(611): unsure at all n locations
nnaataatgactgtgantactcaagcctcannactacaagaaagaaaatatnttggtganagatantggaagaagatgatggaggatgtctcctccaacctctanaccctanatctctctngttttctggactaagctctntntatngctcanaacttgtnctcccgttgaaactccgccaacctcggtgtttaaaggctcttggactcttcagcttccgaaggctcgcttagcgagcatgtctcactgagcgcgaagttagtgaatttcgcttagcgagcatggacgcgctaagcgtgagaagagacaacatcctcactgngcaagctggctacacgttggnggtgcagatctttgactttatctcttctaagaattctcaatccgtaacangattgatgcctactaagcgatgcatcttgctanccaatctgcctcctaagcgagtcatagcagctttacctctcttcttggctgcactgagtggattcacataagcacanaatggattctacttatanatccacataagaaaatatgttaatctacaaaagacataatagagatatgcattctacaannttcatcaactagcttcaaagaactagccn

SEQ ID NO: 49017 - DNA, 279 bp, Glycine max
  unsure (1)..(279): unsure at all n locations
aaatatattgcatgatactacattcgaaagtgaatgagccagcangcatacgacccttcatatcagcattttcattccaaaccatgttacgagcatcatgactataataaatatttttgcagtcatcaacgatggtgccctcaaaggtacaccttgactacttaatnttttcggtgaataaaatacggactgatcaataacaatattgaatttatgcaccttataatagatgacaccatcactgaatttctagttattatagaagacacagactaactc

SEQ ID NO: 49018 - DNA, 620 bp, Glycine max
  unsure (1)..(620): unsure at all n locations
attatatgtgacgctgacgcgngcactctnagtcacctgcggcatgcagctngtcttcntaaagaaggtatgtaattccttgtacatagagccttgttagattgcagtaaaccatagcgtgtgtcttctcctctgaagctgaggataacattgtatatngatgcacgagaacgtgttgccgcagtcattattagaagaaattagctgagtatgtgttatggttgatatgtgtggaggtagaatgaaacttgaacaaatatgaagatgatagtataccagatgctgtgtattatatagaagatagccgcctgtgtggaaaatatctttgttttttttcatctcttgtatanaaaggcaagctcttatanagaaagatgctcttactttntgtcatttagaaggtacttttaatattcaaatcttacaaataaactatataatgtattgttataactggtatttattaagataataagtggtggactactattctcccgccctaaagaattgtagagaatcaaggtatataactaagangaatctgatattttaatacaagagctcagattgtcttatatacaagtagaattagtggagacacatgagagagattatcgaat

SEQ ID NO: 49019 - DNA, 356 bp, Glycine max
  unsure (1)..(356): unsure at all n locations
gtctcgttagcttattttgagaatggaggattatatttatgtaatagatgtaaaattgatcagaaatatgcttaaactaanatgtattaccgcaatcttacttatatcactacttactaactgacntcatggataatattaagaaaagatggaaacacaaacatactacgcattatttgcaatggtccagaaaaatatattgttctacaatatctatttagaggtattgagttgaacacataaatgtaatgagacctcttcactattattatttaatatattataaataatattaaatatatatttatatattatttatatatattacaaaatattataaatactgacctaaaact

SEQ ID NO: 49020 - DNA, 248 bp, Glycine max
  unsure (1)..(248): unsure at all n locations
cactggtaatgtgtctactatcatngtgataatctttttctttgttattgtgggtgctacatgagctgccaagtctctccatctttgtgcgtatcctttgaaagagtcgtgcgctctgtatgcacatgttgtgtagttgcatgctatccgaagccattatactgacacagcctaacagaggcaaccattatgtccttccaagaatggactctggaaggttccaagttagtgtaccatgtaacagctac

SEQ ID NO: 49021 - DNA, 104 bp, Glycine max
ctttcgttcattcttcgtcggtcttcggtcttcaatcggtaagttctcgatatcgaacttttcaattcattgtatgtaccctcggtggtcctcacttgtttcgc

SEQ ID NO: 49022 - DNA, 104 bp, Glycine max
tttatgtttattttttttggttaaatatgtgaatgtttgtttgagattggaaatttggtattaagaatgtttgagaatagggaatatatttgttttttgggagg

SEQ ID NO: 49023 - DNA, 155 bp, Glycine max
ctgttttggcaagatgctggagatctgaaaccctatgaagacctcaagtgagatgtcagatgcactgttggtacaaattcgaaatctgaatatgaaggaggaagaatgtattcatgactttcacatgaacattcttgatattgccaatgcttgca

SEQ ID NO: 49024 - DNA, 166 bp, Glycine max
  unsure (1)..(166): unsure at all n locations
gctctaagataagtcaaacgacaataacttataactcggatgtccgatcgagccctgtaatatatcgagacgctcgaaatcganaacggaagctctaagaanagtcaaacgacaataacttttgactcggatgtccgactgagtcccgtaagatatcgagacgctc

SEQ ID NO: 49025 - DNA, 508 bp, Glycine max
  unsure (1)..(508): unsure at all n locations
tatattgctctgtgtgtgttntttttttncntttttnnnnntttttagatgacctgctgctgccgcctactgatgtanataatanatngtagtantgttttgatgtctcttatatgatanagtatatgtcttacacattacaactaactatgtaataattcctctcaagtagttgttaggtgtattgtgcaagaaacataactatacgacaacattggcttatgacatatacactagtgtaatatgcctgataaaacatatgtatatagctactataaatgttgcattattacatagtgccagggctcattaattactatttaaatgcctaatcaataaatgctatacttgataattcctatgatcaacaagcttctgcgaattatattatatctatgtgaaaagtacatctcataacatcttgatgatatagaatactactacccatttacagaggacttaactgctttaaagttattagtcagggctattcccactatgacccacc

SEQ ID NO: 49026 - DNA, 213 bp, Glycine max
  unsure (1)..(213): unsure at all n locations
gcttcgttacctagattattacatgtacttccaaggtgtatttgttacctacatcacatacatntccttngctaaattcacatacatgcatactctaaacactntggctatcgaanatngcatacgtgcacatcctggtatntctgatacctatacatacacaaactntatgataaatctngactatctacacaataaggtgctacatttcat

SEQ ID NO: 49027 - DNA, 641 bp, Glycine max
  unsure (1)..(641): unsure at all n locations
tttttgaacgtctgangcatgccgctgtgagacacttcanacgacantanatnttactcggatgtctgttttttctcgaatataacgagacngctcgagatgaatgtggaatctctgagccaattcaaacgacaatatagttntactctgatgtctgattgattctcgaaatataaccacacgctcgaatatgaatgttgaacctctgagccaattcaaacgacaatatactttttctcgtatgtgtgattgagtcccgtaatatatcgagacgctcaatattgaatgttaaactgttagccaattgctacgacaactatcttttactcggatgtctgatcgagtcccgtattataccgagacacttgaaattgaattgtggtgcgtgtcagccaantcataacgacagcaaccttatgacttcgtatgctttgagtgagaccccgatatataacgacgacgctctgactctgaagtgtcgaatctctnaccnagacncatactacgaataacttttgactcggatgtctgatgatgtcggnaagaaccagaactngaaatggatgttgactcttatcaatcaacacactacttgtctctatggtggtgaggcggattaatgaactttgattattttaaag

SEQ ID NO: 49028 - DNA, 229 bp, Glycine max
  unsure (1)..(229): unsure at all n locations
cttcaacattcaatntcgagggtctcgatatattacgggactcaatccgacatccgagaaanaaattattgtcgtctgaattggctcagaggttcaacattcaatttcgagcgtctcgatatagtacgggactcaatcagacatccgagtaanaagctattgtcatttgaatntgctcagagattcaacattcaatttcgagggtctcgatatattacgggactcaatc

SEQ ID NO: 49029 - DNA, 131 bp, Glycine max
tatttttgagataattattgaaagggatgtttttgggaaaaataaataaatgtttgttttacagatgtattatattatgagaggggtatgttggtgtataaggattatttgatgggtatggtgtgtttaaa

SEQ ID NO: 49030 - DNA, 221 bp, Glycine max
  unsure (1)..(221): unsure at all n locations
taagtagtaaagtaaaatggaagtccgagtgtcaagtccacaaggactntgtttgtacttcgaaatggtgtatatccaattntcaagcaattaatgaattgattaaagatttatgaaaagaacaatanaatanattaacataaattaaactaatttattaaagtatgcaaggaaagagaaacaaactcttgaagcgtangtngattcagaatgtggatatg

SEQ ID NO: 49031 - DNA, 114 bp, Glycine max
  unsure (1)..(114): unsure at all n locations
gatacagcangggagaatctaacacantttcctctgacanacactntgtgatactcatcactctttctgtctgtatgtcagagggaatgttgacaatgaattccctgactagac

SEQ ID NO: 49032 - DNA, 248 bp, Glycine max
  unsure (1)..(248): unsure at all n locations
ctctcgagaaatccaatgctcattatctntaactcggatgtctganttangcgcataatatatcaagacgctcgaaatngaacaacggaagctctctagaaattgaaatggtcataacttttcactccgagggtcgantcaagtgcatgatatatccagacgcctcgaaatgaacaatagaagctctcgagaaattcanatggtcataacctttaacttcgaggtccgattatgcccataatatatcg

SEQ ID NO: 49033 - DNA, 414 bp, Glycine max
  unsure (1)..(414): unsure at all n locations
gtatgtttttttnnnaattgcgtagcacgagatgataatattgactaagtgctatatgatattgtttgtaatgatcgtaaataaaaaaatgagataggtagtggggtatgagcaataatatggtggtagtgcgttcatttaaactgctgtagtgattatgaatggtaacggaacagtgtgtgtaggtttataatttagttggcttttttatttgtgatgatttttgttattatatggtatatgttttatgtattgtaatttaaaaatctttgttgtgtatgttatgtttttttatagttgtttgggatatggttggttatttgggatgttttgtttttgttttgtgtgattttgatgggatttgtaattgttttgntttgaataaaggcacgcccccccccccccccccccccc

SEQ ID NO: 49034 - DNA, 640 bp, Glycine max
  unsure (1)..(640): unsure at all n locations
atttagatctgcgacnagcacctgctgcatgcaanctnttacacatntaannagagtataannagnantcaatttattttnntctttactccttacaatctattatatgctctgttataaataaattctatgaacacaacatgtatgacaacataaataataattatttaatatattcaagtcaacaattctctgtgtggaacaattattccatattcaccaacgtacatctgtccatgtccgtaatttagaatgtagtataaaatancaatggatattatgagctatatcccgctacacattatgacacatatatgagtattgntcccataacataatttgtttggattngttactggggctaatggatgggtggacaatataggagaaatttgggttatcctacaaaatcttagagaacgtcattgaattattatatatatacactaaacaaaagctgacgagtcatctgggtgtttcaaaactgaactctgcatatctcggtagctgagtgccattagtctcgtatcttcaaccttgctcagattcagggggatctattgatttactcaccatcaatgatgaccactatcttatactgtgaagaagatcctctactgtaatgcagcggcactggaag

SEQ ID NO: 49035 - DNA, 202 bp, Glycine max
  unsure (1)..(202): unsure at all n locations
tcatcacttgcgggaatggattcgtgtggaggacccctcantatntgagacagcccacggaacaagtgcttggtggcttcttgagaaanaccctgaatatnttggtctcttcaatgaggctatggcaagtgattcccgaatagtatacttggcactcanaaatagcacttcagttattgaggcgctagattccatggtggat

SEQ ID NO: 49036 - DNA, 656 bp, Glycine max
  unsure (1)..(656): unsure at all n locations
attaatactgcgtgatagtcgacctgacgcatgcacgcttnntttgaccttgaacaacattaactnctctttataaccattctatgtgctcgcgaactggnctctgtgcttccctttcgcaaacttgagttcactaatgctaccccatagagctgcgcgataattgtgtctgccatactcttcctagcgagccctcttggtgtcttgttcatcggctcttgcagtaatngcattctcttgctcgaacccggcacactcacttcgaacgtgtgtagcggccaacttgaacttctccttggcaagttgtgcccttcctaactctctatcgagagctnggactgcttcgtgctcttccggtgctcataactctcttctcatacgaccttgatcgttgcgagccaatctaaacctcgtatatgaactttcatgcatngcgtggcacccaccaatgangccattacgaatgcctctaagctcttgatctntccttaaccgngtctcccatgccttatggtatctttgtatagtcttggaactgtgggggcctagatcgcgtacgaggaatggagacattctntcgtactgccgggtccactangtgtgtacctaggtaggtgagtgcagccgcgtatggattaatacacactccgttctct

SEQ ID NO: 49037 - DNA, 161 bp, Glycine max
  unsure (1)..(161): unsure at all n locations
atctgcactttatgcagannatttgctgtgaaatgtgcagcagaattntgtataagtgcagaaaaatgcttgtgtatggttggctgtggaaagggtagtgcacatggggttctggacattggatagtagatcccaacggtcaaaatgtaggcttatgtact

SEQ ID NO: 49038 - DNA, 206 bp, Glycine max
  unsure (1)..(206): unsure at all n locations
tgcatggagtggctgaaagaatggcagaaactcccttatacttcaccttacatcaatgcctctcattnggatccccgtactgatgtatctgagagaaagatagtnggagtcttccatgagctccttcatctcacactccataagcanactgagcgcaagaacgttagcaacttgcgtagacccttggccctacctcatgaagttac

SEQ ID NO: 49039 - DNA, 594 bp, Glycine max
  unsure (1)..(594): unsure at all n locations
ngtganacccaactntcttctatcactctctntngtcacanacagctcctatcacactttcttctcanactannaataacccanagaagaaacatgtcanggctataatgacangaagcaagaaagctagagagaatatgaagcannaatggggatccacttcagatgccacanagganggttttactanagagaacctagtgccagaaaanaaggtagaggagagggagatacctaacatctccaaggtaagtattcctttccctcanagggtaanaaataagcaataagatgagccagttaaaaagttattgatgtaatgaagagactgcacatcaacatttctttaattgagaatatttcaccaattggcaaantatgtcaagtacttanaagacatactttatagtaagaaaaaagtgcaaatcttgcattgtggcttatggaaatgcctattgtgtctaaggaactanaccaaagtanaagacctngactttacanttctgcatatangaagtctatttgaaaatgtngtgtacttganggacatacattatgcttactctnnntttaaaacacactacacgccttccg

SEQ ID NO: 49040 - DNA, 663 bp, Glycine max
  unsure (1)..(663): unsure at all n locations
tcccataatttctattaattattttagttttgttttattttnnnnnnnnaatcatggtaactaataactcnaaacnngaacatataccacttgttcccattttcgcttgtcgatatacacacacaaggtttgaaganaagagacttctatcctataagcaacgtgctgacaccataggctgtaattggatggcattattggcaattcggagggtattgtacgcgtcactatccatgttgacacattaatgcaattgtggtcacatgagcatgaactactaccaatatatagatgatgttacaccaatgaacacagtcttacagcagtctccgcacagtggtgagctctatggaatgaagacggcaatacttcttatgatgaagcatggaacactattcctggcccaactaactagttttgccataggttggctaaattaacaaggatatagaatgagatggatagtgtttaccatctgaccaccgacaaaaatgtattatatgtggagctgaatggacaataagcgcctatgccatgcagactacacggcgagaattcatgtatcgattatgtctgtacataactactcgtatcgttatgtttagtgatagatctacatgtctgcncnnnatgaatcnncgccgcacccctcgcaactccctn

SEQ ID NO: 49041 - DNA, 199 bp, Glycine max
tcttttatgtggactattgtgtggactgttgcgagaaaagcgttcttttctttccctattggatatcttgggggattgggctgcttgacaccatttgtaatgcttataagttcttatttgtttacttgtttttttctcttactttgataaggatttatcagtcatcaaattcttttgtaataattctcttgatcttagt

SEQ ID NO: 49042 - DNA, 415 bp, Glycine max
aacgttttaaaaattaagtaaaaagcatttttaccacttcacatattttgttgggtgtatcagcatttctgctggagcccaaagcaattgcctcgatttgctggcgagggttattgtgtcattttaacaaatagattgtgggtgtttcctggactcgcattttcagatcagttatcaaaagatttgttatcattctcgtagagacttcagatcagttttttttttattttatttttattacggtcttgttttgatgcacaacaatttatgaccctttgtgttcctctaacttttttctcttcattccaaattaattaaaattttctcaacttcgaaaaagaaatcaacaaactaaataagaagcacacgtctgcaagctggaacagggtctctgatgactacttcaagcatgcta

SEQ ID NO: 49043 - DNA, 123 bp, Glycine max
tgttagcttacgttgtgttccctaagccatctaagaattaaatttcgcaacttttgctaaacggctccacatgttgttaaacggtattgttttttttacaaaggccagctaagcaggccatgt

SEQ ID NO: 49044 - DNA, 417 bp, Glycine max
  unsure (1)..(417): unsure at all n locations
ggtgttattgaagaacatgcttcctgaacataacacattgccgaaaaatcactacgaggaaaaaaaagattttgtgtccagtaggaatggagtacaggaagatccatgcatgccctaatgattgcatattgtatagaaataagtatgcaaaactacggcaatgccccacgtgtggggtatcacgatacaaagtgtagtctgacgaattaactgatgatgcaagaaccaaaaattgtcgtcctgcaaaggtttgctggtatcttccaatcataccaaggtttaagcgattgcttgctaatagacatgattcanaanacctttcatggcattcagtggacagaaaaagtgatggcttactacgacatcctaccgattcttcataatggaagacaattgattgtttgtatccagagttta

SEQ ID NO: 49045 - DNA, 350 bp, Glycine max
  unsure (1)..(350): unsure at all n locations
tattgacgaaggagctagtgtggatgacgaacggatgtcctccattctagccctgtttcttggttccatctttaactaaaaagaactcaaaattccttataccaaaatcgttcaaggtaaacaacaacaatagaggctaaaattaacaataggcgcttagagggatatagctcgctcagcgcgccctgagaaacataacatgtcggcttagcctaaaagttgccatgatgaaatgcgcttagcttatgtaaacttggcttagcgcaaggcttacaacacaaaatttggttgagttacctgngcttagcgattcagcctcgcttatccacaggtagttcagcataaggatg

SEQ ID NO: 49046 - DNA, 410 bp, Glycine max
  unsure (1)..(410): unsure at all n locations
agcttgcttgcggagcttctatggaggcttgatctttgagcttcaatgaggtcctttaatggtgattttccaccatggagatgcagcgaaagacaaaggagaagaggtaagaggcggcgccatccactagggaataagccatggaagaaggagcttcaccaccaagatgagccttggataagaaacttggagagaatgcttcaatggaggaaaagaaagagggagagaaagagagaggggggagcacgaaattgaaggaagaaaaagggagagaagttgaactttgagttgtgtctcacaagactctcattcatcanagttacaacaagtgttacacatgcttctatntatagactaggtagcttccttgagaagctntcttgagaaaacttccttgagaagctttcttg

SEQ ID NO: 49047 - DNA, 370 bp, Glycine max
actaagcttcaatggtcaccgcttcattcttgtggcaatagattacttctatcaatgggtcgaagcggcttcttatactaacgtcacgagaagtgtggtggtcagattcataaagagggagctgatttgtcgatacggactccctaggaagatcattactaacaatggcaccaatctgaaaacaaaatgatgcaggaaatgtgcgaggatttcaagatccagcatcataactgcaccccttattggccaaagatgaatggggttgtataagctgcaaataataatattaagaagattgttcagaagatgacggtgtcatacaaagattggcatgagatgttgcctttcgccctgcacggatatagaacct

SEQ ID NO: 49048 - DNA, 437 bp, Glycine max
  unsure (1)..(437): unsure at all n locations
cttaaaattgaataaaacgttcagattctgctggtaatcgattaccatatatgtgtaatcgattacataggagaaaatttgaattcaaattttaatagctggtgtaaatcagttttggccattagtaatcgattacatccgctggtaatcgattaccagagagtaaatttcttggaaaagactttntagcttaattttcttggccaaaccttttgctacnttcaatggaattcccttcctatntaatataccctttctaagactctatagactgtcttgatcatccatcttgaatatctntaattgctttgtcttgaataaagctttgagacgcatgtgatctnttggcatcatcaaaacatcggcttgatcctttgtctacatagaacagaaagaccttagaaccctaaacaaagctctgaataatgaatggcata

SEQ ID NO: 49049 - DNA, 415 bp, Glycine max
  unsure (1)..(415): unsure at all n locations
taagcttacttactcccatacttctaccatgtgtaaaagtgttgttttcttcattctgccacaccattctgatccggagaactatgcatagtgtactgggtaataatcccatgttcttgaagaaatgttgcaaatggacctggtgcttgtccatcctcggtgtatctaccatagtactctccacctctatctgatctcacgatcttaatttgttttccacattgtttctcaacttcagccttaaaaactttaaagacatctaaagcttcattcttataatgaaggaagtagagagacatatatcttgaatgatcgtctataaaggttatgaagtcattcagactatgtgcattcatgtctggacaacatatgtctgtatgtatgatntctaataaattagaacttctttttgcac

SEQ ID NO: 49050 - DNA, 177 bp, Glycine max
tggaaggaccctctgtgataccttggtttgatgcttcacccctaatctcagtctcaccagctccaccattattttctgaatggtcttctttagtattcttccccccaattattttcctccgattcttcgctggtgttccattaagatatgtattctttatgacgaattttatgaaat

SEQ ID NO: 49051 - DNA, 109 bp, Glycine max
cccgatgagagtgtgatccttaaattgtgagagaaatgactatcatttagtactgatttttgcatgaaactctgaaggatggatcgaatgcatgaaaatgacgatgatg

SEQ ID NO: 49052 - DNA, 340 bp, Glycine max
tgataaccaagataatgaccaaaaactctaacgtctagaacacttcatgttgaccaagatgatgatttccagaatcaaagaatgagttccagattgaatcaagaacacttcaaggttcaaaaggaaatttgatttcgagaatcaagaattaagtttcaagattcaagttccaagaatcaagatcaagattcatgaatcaagaatcaagagaagactccctcaagatgagtattaaaaagttttttcaaaaactgagtagcacatgaattcttctcaaaaacctttatccaaagagtttttactctctggtaatcaattaacagattattggtatcgatta

SEQ ID NO: 49053 - DNA, 337 bp, Glycine max
  unsure (1)..(337): unsure at all n locations
gtgccatgttctcagaatgtgccaaatcataatgctcagaatcagaatgctcaaaattataatgctcaagatcaggatgttcaaaatcaccaataatagaatgcacagattcaccaggtatggaatgctcaaaatgatcaanaggtataaaatgatgcctaactaatatgtgaaatgtcctatctatctcatgatcaaagggttgtaagtcagatggattgcctctagtcatacactacattcatcatgcacacaactagttgccttgtcatataaataaaggtgtagggttgaactacagctacccttaaaggatattcaaatgacttgaaatttt

SEQ ID NO: 49054 - DNA, 364 bp, Glycine max
agcttccgctaaacgcaacactcatgggctaagtgcgaggaagactctggaagaagatgagatgtacaggttcgctaagcgcaccacttcagttcatctgctaagcgagaaaggcacgtgctaagccaaaattcactaatgtgcactaagcggtccataagtgcactaagcgcacaagcacgaacaaggccacctatttaagcctgaaatcagattttagaggggaagtttggattgggattctagagagaggtccaagttccagagaagtttgagagattttgctgtgtgaagatctacaaagaccagagcttgaagcaagagccggtttgagagcttgagatgagtttgtgagtgattgtga

SEQ ID NO: 49055 - DNA, 424 bp, Glycine max
  unsure (1)..(424): unsure at all n locations
gtatacagaatgcttgttcaatatcatacacactagcattggctgaggtaaaaagtggagataatatgtcccaagtcacacagttgagttatcttggatttatcaaacaaatgacagaggaaaagagatgcaaatcataggattctgaatagggtggattaatttagtttatatatatatatatatatatatattttggcacacaaatatgttctaaaaatataagttcctttgagcaaactagagaaagttatgattcaattgtctataataaatttataaattttccccttaaggaagattaaaaaacaaagttcgttgttccagctttcactgtaaacaggcagatatanaatattatgtctttgctgttggaattggtctaactatatttaacctttactaangctccaaaatattttat

SEQ ID NO: 49056 - DNA, 371 bp, Glycine max
  unsure (1)..(371): unsure at all n locations
atgatgttantttatgggaagtgaaagatggacctcaaggttctctcattccatgattaatcttatattgttataacacttgctataaaatttgttaagatgttattgttgctgctattattattactaaatttgaatggattgatatgttgatatggaatgaacatcatgatgaacttctacaaatttgcatgaacttgtatgtatgcctatgaacaagatgaacataagaggaattaaaaatatctagccctttgatctttatgcgggatgtgactttagctactaatgctagtacttacttattttaattattattattataactataatgagaatatttatttgaagacaaaaatggtctttatata

SEQ ID NO: 49057 - DNA, 461 bp, Glycine max
  unsure (1)..(461): unsure at all n locations
ttgtcctgaaaccctcntatgtaaattgacagccttatgtctcccttcctgaaaacccactaaaaactgcctaaccctcctgctgttactccataatttattctacaataactgcttaaggcagttacatatggtcctaaatcactacacattcagttacgattaaccctttgtgcctaactagggtttcgaaacatcacaacaaagacagaccattgaacaatggattttcatcatcaacatacaacagagacataccttcgatggaagcgcatacacgaactccacaaacgcgaactcgacaatgtggttgcagtcacagaagcgcagcccagtttgcgacaaacacgaactcatgcagaaagagaaacaacaataaagccctgtgttaaaacgacgaatgcctaatgttaaaacgacgaacgcctaatgttaaaacgaaaggacgtaccttaatggat

SEQ ID NO: 49058 - DNA, 409 bp, Glycine max
  unsure (1)..(409): unsure at all n locations
agcttaagagctntgatctaataatgattatcttgaacaaaacaaaaattctctatattcaattgctaaaaagataatgtaggagatgaaaggccctttggagaagcgcaggcaactcgagcatgcttaaaatgaatctatgactgcattatttacatggattgaagcattcaatgaactgaagcgaagccattttatttgatccgctaaatcctgttctattgtagattcttgaatagatttgtaatttgttgacattttttgtcattcatgtaatttcctttcaaaaaatttgcactttaattatctaagttacgggaatgtgtatntcagttatcattgtccttgtttacttcttgaattgcataagcatttctagataaaaccttnttgataaaatagggtctat

SEQ ID NO: 49059 - DNA, 409 bp, Glycine max
tgaaggagaactggatgccatggttaacttggtaacctagctggccttgaatcagaaatttgtatctgtcgcaagggtttgtggtttgtgctcctctgctgaccaccatacagacctttgcccttccatgcagcaacctggagcaattgagcagcctgaagcttatgctgcaaatatttacaatagacctcctcaacctcagcagcaaaatcaacctcagcagaacaattatgacctctgcagcaacacatacaaccctggatggaggaatcaccctaacctcagatggtccagccctcatcaacaacaacagcagcctgctccttccttccaaaatgctgctggcccaagcagaccatacattccttcaccaatccaacaacagcaacaaccccagaaacatccaaca

SEQ ID NO: 49060 - DNA, 424 bp, Glycine max
  unsure (1)..(424): unsure at all n locations
agctntgcaactnnttgtccctggctcttttgtcaggattcaaactattcctatactggacgagtccaaccaaccaatcccaaacaaggtcatattccatcgacttttttggtcatttaaggcatgcattgatgtgtttgcattttgtaaacccattgtgcaaatcgatggaacatggctatatggaagatacaaaaggacattgttagttgcaattggacaagatggtgctaataacatatttccattggcatttgccattgtcgagggtgagatagcagatgggtagcactttttttttgcaaaacttgatagcacatatgacaccacaacatggtatatgcttaatctctgacaggcacgattcaatcaaaagtgcatacagatgacttgacagtgggtggacagcagacaactacatgtg

SEQ ID NO: 49061 - DNA, 398 bp, Glycine max
tcgatgttggtctgaacaaaggcaaatttgatcatcctactatgacgactgagaaaactggtgcaaataaagagggtgaggatgatggagaaacccatgctgtgactgccattccagtacggccaagtttgccaccaacccaacaatatctttactcagccaataacaaaccttcttcttacccaccacccaggtatccacaaaggccatgcctaaatctaccacaaagtctgtctaccgcactttcaatgacgaacaccacctttatcacaaaccaaaaacaccaaccaagaagtgaattttgcatggagaaagcctgtagaattcaccccaattccagtgtcctatgctgacttgcttccatatctacttgataattcaatggtagccataaccct

SEQ ID NO: 49062 - DNA, 431 bp, Glycine max
  unsure (1)..(431): unsure at all n locations
agcttgtangattatggngtacccatcatatgtggtactaggtggcggtcgggcgatggtgcacaacaagttttccacatccacaatgcgcgcataaacccaccatcccctggtgcccaccttcatctgagctcacgtactcccacgtagctcatatcctcgtttctctcaacaccgggtccccatcaatcctcccaagcttccacaacatccaagcgaaacaacattcaaacagcacaagctatcacaaccaagcaaaacagagcaaaggcagaaaactctgccaaaacaccaaccaaatcacagcttttctcacttaaagaccccagtaacaattccttcgatccaattcgttaaccgttggatcgaactccaaaatttactggaagtctatagtgcataagcctacattttgaccgttgggatctact

SEQ ID NO: 49063 - DNA, 400 bp, Glycine max
  unsure (1)..(400): unsure at all n locations
agcttaacaaaaggcatgcgatatgggttgttttcctagagcaattcccttatgttatcaaacataaaaagggaaaagggtatattgtagccgatgctctttctcggcgtcatgcattactttctatgcttgaaacaaaattgattggtcttgaatgtttgaaaagcatgtatgaaaatgatgaaacttttggagaaatatttaaaaattgtgaaaaattatcagaaaatggtttctttagacatgaaggctntcttttcaaagaaaacaaattgtgtgtgcctaaatgttctactagaaattttcttgtttgtgaagcacatgaaggaggtttaatggcgcattctggggtccataagactctataaacattacaagaacgattttattggcctcatat

SEQ ID NO: 49064 - DNA, 357 bp, Glycine max
  unsure (1)..(357): unsure at all n locations
atcctgactcaccataaaccttgaccctatgtgataatgtcaattcttaccctcggaagcaaaaaaaagggggagagggaaaatntccaatcaaagaggaagcataaaggagagaaggaaaatgtccaatcaaaggaaaaaaagagaggaaagggaattcccaatcaaagagtgngagaaagcaaaaagaaaagaaagaaaattcccaatcaaagaatgggagaaagaaaaaagagaaggagaagaatgaaagaaagctcctgatcaaggatcgaaagaaaacagaagaaatgtgcatagaggtctctggaccaaacaatatctgaacaaatacagaatngtcgccaaatgaacaaa

SEQ ID NO: 49065 - DNA, 420 bp, Glycine max
  unsure (1)..(420): unsure at all n locations
gcttgaatcaacttacactggttttttttcttgtattggtaatcgattaccagagagtaaatactctggtaacttagaaaaatttggaaaaacgtttcttgtaaaacaaaattgtgctatgtttggtttttgaattattttttttcaatacatcccttgtgaagtcttgacttgttgctttttggtttcttctcttgaatcttgaattcatcttctcttgaatcttgattcttcttgatgttttttctttaatcttgatcttgaacttgttgactcaatcttgacatcattcttttgggctttttgtcatcatcaaaactacttgattcatcatcatgaagcttgcttctacacaccttaaaatgatcctctttgcttttattgngtaaaatggaccattcaaagcatgaaatcaacaca

SEQ ID NO: 49066 - DNA, 397 bp, Glycine max
  unsure (1)..(397): unsure at all n locations
gccatcatatctcagacagtacctgagtatgtattcaaaagttggagtgctcgtgatccatggcttgaggattgaagcttaaggcttagtcagcaatttagggatgtgagaggttacaatgtcccatgcgggttcatcaacccggttttcacagtcaataactttgagtttcgctagttcaagctttttctaatatgtgaggtagggagaataatggaaataatgaaaacggaaaaaagaaaagagcgaaaataaaataaaattgaaatggcaagaaccttggcagcgatggcgtggatgtagcaagcccgaacgaagccagaagtagaggcccaatcagcgcccttgttccgagagagggcaactntggcggcaacaacaatgaggtcaatgacgt

SEQ ID NO: 49067 - DNA, 428 bp, Glycine max
agctttgaatctgattcgagaacttgatatgctatgatgaaagattcggagacaatcaaagattatgcggacaagcttctcggcattgcaaacaaaatacgtcttcttggcactgaaattcttgactctcgaattgttcaaaaaatacttgtaacaattccagaaaaatatgaagccacattgacttccttggagaactcaaaagatctttctattatcaccttggcagagcttttgaccgcacttcaggctctggaacaaagaagactcatgagacaagaaggtactactgaagggtctttggtagctaaatcattggacaaaaaaaaagaagggcaagtcaggaagtttcaaccacaaaaatggtagcaaatcctctcatgattttccatcatgtcctttttgtaaaaaaaaaatatcatccacag

SEQ ID NO: 49068 - DNA, 381 bp, Glycine max
tgatggaaaaggaggtgttagagaaagctggagtctatgtgttatgcccatcgttctggtaaatagaaatttatcttaacttataacgcgtttggtagggaagaatttgaaagcttggaagcaatgcctactccatgctgaattttcttataataaggtattaagctgtactacttattctccttttgaggtagtttacgggttctagtccactgccctttcttaatttgttaccttggcctaacacttctgctttgatgaatacgaatgggctttctaaagccaattttgtaaagaggttgcatgatatagggaaaacacaatttgagaataagaatgaacaatatgctggatattccaataaggcgagaaagacaatga

SEQ ID NO: 49069 - DNA, 423 bp, Glycine max
  unsure (1)..(423): unsure at all n locations
agcttattaaagaacttagaanaactcattattttcttgttcacacatcgttcgcgtgtatgatatccactcgacaaggtttgaagtagaggaaactttcaatcctataacgcaacgtgacagacaaaagtgggcagttaacttgaatgaccattattgtcaatgcgaaaggtattctgcgcttcactatccatgttcacacattattgcaacttgtggttatgtgagcatgaactactagcaatatatagatgttgtttacacaaatgagcacatcttaaaagaatactccgcacaatggtggcctcttaagaatgaagcggcatttcctccttctgatgatgcatggacacttatccctgacccaactacaattcgtgcgaaaggtcggccaaaatcaacaaggataaggaatgagatgga

SEQ ID NO: 49070 - DNA, 268 bp, Glycine max
  unsure (1)..(268): unsure at all n locations
ctaagcttctatatagctgaaccattttatcaataaacacaagttgagttntattcagaaaattagagtttatctcttttatcttagtgagagtgattctcctaaattcttgagtgattcaagaacaccctggctgtgtcaaaggactttcacaacctttgtgtgttgccctcgctggaaagagtgattctttccttccaatcatctccacccttgttctttcaaaccacaattccagaaaatccacctatgcccaaaattatctcgt

SEQ ID NO: 49071 - DNA, 252 bp, Glycine max
cggaagctctcttgataatctagtggtcataaattttcacacagatgtccgattcggggaaataatatatcgagacgcacgaaattgaacaacggaagctctcgagaaatttgaatggtcataacatttcactcggatgttcgatccggggacataatttatcgagacgctgcgaaatgaacaaccgaagctctctacaaattagaatgggcgtaacttctcacgcgaatgttccatttcgggacataactt

SEQ ID NO: 49072 - DNA, 336 bp, Glycine max
  unsure (1)..(336): unsure at all n locations
tctatggtctatngtcttctgcagatcaccatacagatctctgtccttctttgcagaaatctggagtcaatgagcaacctgaagcttatgctgcaaacatttataatagacctcctcagcagcaaaaccaacaatagcagaataattatgacctttcgagcaataaatacaatctaggttagaggaatcatccatatctaagatggacaagtcctccacaacaacaacaacatgtccctccgttccagaatgctgctggtccaagcaagccatatgttcctcctccaatacagcagcaacaacaacatctgtcacaacaaagacaacaagcaactg

SEQ ID NO: 49073 - DNA, 442 bp, Glycine max
  unsure (1)..(442): unsure at all n locations
actacgctgatctgaactgatctgatcctgaatcaatttcctgttgaaccttgaagtgttcttgattcaatcttgaactcattctttgattcttgagatcatcatctctgctatcatgaagtgttcttgacctttgagctntttttcatcacctttgttatcatcaaaacttctttgaatcaatcttgattcatcataaatcttgcttctacaagatggatactgttgcttcaagaatttgatttagtcatcaatgacaagaaaggttctgaaaatgtggtagcagaccacccatccatattggtgaatgaagatgtcacttcaaaagaggctgaaataagagataaatttcctgatgaatctttgtttttgatcgcaaggagaccctggttcactgatatggctaatttcaatgcggaaggtgtcataccaaaagatctaa

SEQ ID NO: 49074 - DNA, 411 bp, Glycine max
  unsure (1)..(411): unsure at all n locations
cttgatatattttatggacttatgggcactatgaacgacaaattccttgggataaaggtagtgttgccatgttttcaaagcccatactaaggcatacaattgttcttctctaagcacagtcaagacagattttaaataatcaatatgcaaatcaagtgaagcgctatagataagaatatcataaaagtacaccacaacgaactttcctatgaactctctcaagatatggttcattagtctcatgaaagtgctatgagcgttagttaggccaaaatgcataaccaaccattcatacaaaccatattttgtttaaaagcagtttccattcatccncttctctaacctaattgattgatccacttttaaatcgatgtagagaagtacatgcatcatgaattcatcaagcaatca

SEQ ID NO: 49075 - DNA, 464 bp, Glycine max
  unsure (1)..(464): unsure at all n locations
ngcatgagttacattctccctctntctcaagtctattcttaattcttcttgacatcatcaaaatcttcatgatttacattctccccctttntgatgatgacaaccacctgtaggttaggaacaacaacaaagaaaaaatatctatttgcatatagtttactcccccttggttttgcaatgattgcttatatgagacacttgaagatttcatatttttcatatgtaaacaaattgtctcataaacaatagataatttttcttactattttatcttttatctttctctccctctttgtcaacatcaaaaacaaatcatgaatagagaggagaaagatgttaccacttgttgcaatgtatgagaatcaagtgataccaaaagggcataaaacaatcattcaatattaaatcaagcaaaacaagtacaataacacatcaatcaaacacaatcaaatacaatcaataat

SEQ ID NO: 49076 - DNA, 365 bp, Glycine max
gcctcttaatgaagcttctagagaaagctacatcaagccgcctcggtaaaaacgctgtccagccttcattaatcgttggatcttctcgaaatttggtctgcaacttcacaagacacttgtccatgatctgaccgttgggatctttggcaagatgtctggagtgtgctagaagcctcttaatgaagcttctgcacgaagcctcttaatgaagcttctgcaggaagcctcttaatgaagcttctagagaaaactacatgaagttgcctcggtaaaaacgctgcccagccttaattaaccggtggatcttctcgaaatatggtttgtaacttctcaagacactctcccatgatctacaccgtgggatc

SEQ ID NO: 49077 - DNA, 356 bp, Glycine max
cattttgagaagtgatcaatattacaccgaaatcacgacaaaggggagccaaaggtgatacccgtatttcatggtggtttacatcctactgcgtgatgccattgtcctttaattaaaaacttaagggcaggaacgaacatgtgctatgcccatgatcaatcaaccatcatcttacgttcgactcaagatgtgttaaagaagcgttactatgaggcaaactaataccgttaaaagtcccaattttactaattgtctatatatttgataccccattttatttgcgacctacaagtaatatataatgaaaaaagggaggatatacttttgcaagaaatttaaaaaaataggtactccct

SEQ ID NO: 49078 - DNA, 408 bp, Glycine max
  unsure (1)..(408): unsure at all n locations
agctngctcgtcttgctgatnattatcatgtctacttttctgangatgaccgaggaacaattagggatcaacttgaaacttatgtgcttcaagtgagaagaaatgcttctttttccacttgtgaagatgttcaaagtttggctatgaagatggttcaaactgagaaacatttggtatttccattggtttataaacttattgagctagctttgatattgccggtgtcgacagcatccgttgaaagagctttttcagcaatgaagattatcaagtctaaattgcgcaataagatcaacgatgtgtggttcaatgacttgatggtatgttacaccgagcgggagatattcaagtcgcttgatgatattgatattattcgaacacttaccgcanagaagtctcggaaaggac

SEQ ID NO: 49079 - DNA, 522 bp, Glycine max
  unsure (1)..(522): unsure at all n locations
cgttgattcatgcacttgacattccgttcactatataatcctccgctngacatgaggaagtgttgaagggtgaaactttctgctttattgttgaccacagagtggtacctggagatatgtcgcgggggtcaagagaccttggggacgtcatgtggggtgctattgcccaaaaccaaacttgaccaattcctaaccaacccgggcataaggggtcagggagaacctgtgatgtacctaagcaggcgagctcctgtcagtctacagataaaaggaaaacaagaccacaaagcaaggacgcttgtgatggctggccagctgtgaattttgcgtaatatgtggattgtggcctcttgtaatctattaccaacggtgggtgatctattacaaggcttaaaatttaggacatgaggctaagatggtctcttgtaatcnatttccaacgggtgtaatcaattaccacgcttgtataccaggtcctgacagcttggtatanttctgnnanccnnaactcagggtgctatn

SEQ ID NO: 49080 - DNA, 391 bp, Glycine max
  unsure (1)..(391): unsure at all n locations
agcttctcccncaattttctataaagtggttgagaagtgaagtagaaaagggttcagccccttatgcacttctctctctctcgaaatagctgaggaaaattagttccgtgaacaaaatccaagccgaggcgcttccgtaacgtttccgtgagtaattacgcaaagattctcgaccgttcttcaagattcatcgttcgttcttcgatttcttcagtcttcaacgggtaagtacctcaaaccaagcttttcaattcattctatgtacccgtggtggtccacattttgtttcatgtatttntaattctcgtttcatttactttttatacccncttttgacgtgcttaagccatttatttaagtcatttctcgcttaatctaaaaaataaatata

SEQ ID NO: 49081 - DNA, 436 bp, Glycine max
cttagcttcccaggaagcttctcaatgaagcttctcattgaagtttctcaagaaagcttctcaaggaagctacctacgctataaatagaagcatgtgtaacacttgttgtaagcttctcaagaaagcttctcaaggaagctacctaggatatcaaggaagtttctcaagagagcttctcaaggactaagttcttcaaagttcaacttctcttcctcttttctttcttcaatttcgtgctcccccctttttctttctctctctctttattttcctccattgaagcaccctctccaaacttcttatccaaggcactctcttagtggcgaagctccttcttccatggcttattccctagtggatggcgcctcctctcaccttttctcctttgtcttccactacatctccatggtggaaaatcaccattgaaggatctta

SEQ ID NO: 49082 - DNA, 412 bp, Glycine max
  unsure (1)..(412): unsure at all n locations
agcttcacanaagnntatatggcttgaattttgcaccgagggagnggtacaagaagtttaatgagtttatgagcaactcaggattcaaaagatgtgacatggaccattgctgctatngtaaaaaatatactaatagttatgttatccttgtcgtgtatgttgatgacatgttgattgcaggatctagtatggcagaaattaacaggttgaagcagcagttggcagaaaactttgaaatgaaggatcttggtccagctaaacaaatccttggtatgagaattcttagaaacagatcaaaaggaattttgaagttgtctcaggagaaatatatacacaagttgtttgacaagttttaccttgaagattctaagaccaggaatacccctttgggatcttatttgaaagtttcaag

SEQ ID NO: 49083 - DNA, 503 bp, Glycine max
  unsure (1)..(503): unsure at all n locations
gtgatcatgcttgataactgtaganacgtcaanttataattgacgcggttcatgatgaagtaggttagaataaagtattngttttattcgtttcgcanaaaggctagcaccacagcgaaaataagacaccatgctgctaaataagataccagtaaatatgttgggttaaaaactagagcgatatgcctacatcttttattgcacactattagcgcatcgagaactctcccgctttgattgatatcacatggacagaaaaactcgtaacatagaagaagggggaaagacctcgtggttatacgacatatagtttctgcggaaaaaccggttttaaccatttcgtgactgatgctgatgcacgtgataatactataaagctggtagtgcacaaatttcttgtaaaaaaaggaggatagttaccttttgtaggacaaatttaataaagaataagaatatctctacctaacatggtgttttaaacacatgaaaactgtatagtgata

SEQ ID NO: 49084 - DNA, 292 bp, Glycine max
  unsure (1)..(292): unsure at all n locations
atatcttttgcaaaanctcgaacaaacaaaattagagaagaattttagtgctggcatttgcttcacattataaatgacaattacgcaaagaatatctaagagtaaattgcttcttggtctgaaatgccctcaccaaccctagctgagttgtccccactcattcgtggagccttgatgtgcaacactatccgtattggacttgcgtggttaagtgacttgtaagatccacanaccgaaagggatttttcgatgggcaactgctgtctgcatttttcatatttcgaaatgatga

SEQ ID NO: 49085 - DNA, 301 bp, Glycine max
  unsure (1)..(301): unsure at all n locations
tacccatcacatgtggnactatgttgcggtcgggctatggtgcacaacaagctttccacatccacaatgcgcgcataaacccaccataccctgttgcccaccttcaactgagctcacgtactcccacgtagcccatatcctcgtttctctcaacaccgggtgcccatcaatcctctcaagcttccacaacatccaagcaaaacaacattcaaacagcacaagctattacagncaagcaaaacagagcatatgcagagaactctgtcaaaacaccaaccaaatcacagctttttctcactta

SEQ ID NO: 49086 - DNA, 386 bp, Glycine max
  unsure (1)..(386): unsure at all n locations
agcttgccacccaactcgcccaggcaagttttgttgtctttctccagaagcaacagccttctggaggaatcttctggagggcccaagtgggcctggttgctatttgcacccccatttttactaaatacaccccctgcctttttttggtgaatcttttttcgtaaagctacggaaacttacgaatatcgtaacgatacttgttttctttccgtaatgttacggaaccttgcggattacataatcatccccntttttgacttacggaatgttacggaacctcactaattgtgcaacgatgcttccatttgatttccgatgtgtcacggaaccttacggattgtgcatcaatatnttctgttgatttccggcacgtcacagaatttcac

SEQ ID NO: 49087 - DNA, 430 bp, Glycine max
  unsure (1)..(430): unsure at all n locations
cttatctgtattctaaaaataaataaaacttagaacgattgaatgacttttcaaagataattacctaaaccaaaatacaaaagcataatgaaactaaacgagtctataaaaacaggctaaatgaaaatggtaaaggagtaataaaaaacatagttagtctctcaagagtcaagactatagtcaataatatggtataaactttactaaaaaaagtgcacctagctaggttagaagttactccctccagacctaaaagaaaatctaaacctatatataaataaatattaaataactcttatcttatttaatgttagtacttctagtatatccttcatttaataaaaatttatttccggtgaatcagctctatattggattcccacaagtcttgcagatgaaccacttgttctaattntctttttttntttgt

SEQ ID NO: 49088 - DNA, 401 bp, Glycine max
gcggaagagacacagtgagaataataataatgcttccgggaagaaaaaaaatgctttttatatttttaactgaagggcaaaattgacctttcattgaattgctgggtgcaccagcaatattgctgggtgcacctagcatatcccatactagtacccactattttaaacacattaattatagtttaaatcttttctttcaagagaactataattcttaataatcatatttataatggacattttattaacggagtccaaatttattttggtaatcttcaaagggattaatataaactctgaaaagaaaggtaataatctaaaagaaatgaaagataggcgaataagaattaatttagataagtttctccgtaattggttgtaataaaaacataaaacaaaat

SEQ ID NO: 49089 - DNA, 441 bp, Glycine max
  unsure (1)..(441): unsure at all n locations
gcagccgcagctgacctacaaacacaatttccatgttcttatttttgtctnnnatcgacactgcactcacaatcaccacattcacttcttactttcttttctttcttctctcctcacttttcatctccatgcaaagccatggaggattttccctacattaatgtggagggtcttctgtaagattattgtcaatctgactcatcaactcctatgatcacttttttttcttttcatgtttccttttttcattctatatatgttattctccttccttgattttttatatcactcaatgtcaaaatcaatcaatagataattttttaactctaattccttaactgagaggacccttataagttaagttatttactttcaattttttaanatcttaataaaggaactagtttttacatataatgactcaagattacatatgaacaa

SEQ ID NO: 49090 - DNA, 561 bp, Glycine max
  unsure (1)..(561): unsure at all n locations
cttcttttattgttgtctttgttggtttactctctactccgtgtttnttagagtgttcatgcgtgccgngcacttatatactacgcttatgtgggacgcttttgtgtgagttgaggacactgtctatcaaacgtttattggttgtgaagccagtggtgacctatgacgaaaagcacatgggtggtaatcttatgtagatattataaagtatgggagggtcgacctaaagagtacttcttggattcacaatggactatagagaatactccggttgttatgtaagaattgtttatcacaaccttttcaggttctaacgagaacttgagggaggggagatatgggaccaaccagtattaaatctctgtgnggnggtgcggggtatgggttacataatgctacatatacacaagaatgtgttctaacaccaaacctcacattcatctaccactataattccattatgcgtaacacaaagaatggtgagagtgagaacacaattatatgacacagacatgttattacatgtcatatgntaaaaaattgagtaaaactgtactcacg

SEQ ID NO: 49091 - DNA, 389 bp, Glycine max
  unsure (1)..(389): unsure at all n locations
cacacctgctctgttcacatacaactttagaagtagtaatcccccaattactcttcagagctctttcctctatttaaagggatggacactacacccttttgggatgccttttactgagggccctctaatgaagatgtttatagatactctntcggatttgactctaacatggagtgttatgctcaaggaggattcttctaatagaggtattttggattgactcttttctaaccttaccttttctatttgacactcctttcttgcaagttacttttaaaatttgtatccttatatagaccttgaatgtaataattgtagatgtcattacatgaacactaaaattatcatggnnggaaatgattntgagtctttagaaaactcttcaattt

SEQ ID NO: 49092 - DNA, 412 bp, Glycine max
  unsure (1)..(412): unsure at all n locations
gagtatgtaaaactcagatattgcactatgaacagtgttaaaattctgatgtcattctttctgaattatcagaatagtttatggtttgcaaattgcttgtaggaacaatgttttgaaggaccaaagatctaaaaccctcaaacaacagagagaggaaaaacggaaagctgatgaagctagtggagatactaaagcatggaatagtctgttcatgcgtcctgatacagtatgttcttgaaacttgataaatngcaaacccttattctagtatttcagtttttggtgaatagctgagtagtcaacagtaaattaaaattctgaattatgcttatcaatatcttaacttttcaaataaaataacaaccttttcttattagttntcagcttttccccaatatggtgcttgcccatg

SEQ ID NO: 49093 - DNA, 386 bp, Glycine max
  unsure (1)..(386): unsure at all n locations
taaattttgagaacaaaaaaaaacaatcaaaaataaaaattgttaccttaactccctcttcctctatttctaattatccaagttttttacttattcatgcatagttnttttactgaagtgtattattataagtatttatataactatttttttaattaaaattagagttttactgtggtaaagtgttcaatttttattgtctttattgtgcgagttactaagtgaaactctaattttagtttaaaaacattagaaaaaacatttaaggtactactcttacgttttataaaaaaataaatagaatagattntggcatatattatgaaatacaaaacaatacttagtcgataaattntaaatagacaaaaagtaatcaattcacctaa

SEQ ID NO: 49094 - DNA, 330 bp, Glycine max
acacacacacactgttttctagtcaatcactcacataaagtttcggtctccccctttgggttttaatttatgctcgtcttaaaactaagttgattactcatgtgagttcttgaggtaacgccgatttctgttcccctttggcatcaacaaaaaggcaaagtgcatagcaagtttgaatcatacggatacgccatggaaaaatataagccaaatcatgaagcattaaccatgaagcatgaacaaggaatatatcatatataaaatccacatagtcaaataacataactaatatttgttcaacctaccgtgcaataaagaaatagaaattgt

SEQ ID NO: 49095 - DNA, 400 bp, Glycine max
  unsure (1)..(400): unsure at all n locations
gctaagtatgaaatcgattgggattctttcttgatagaacccaggaattaatatatagataggaaaaacaaaaacaaaatatccctgctttccagtttccagtgattgtcattctcatgcctcgtgatggaaatttaagattcacatacccaattgcccctcggtgtaattaccagaagtcaagcaaagcataacatattactaacatttgagcatcaaaattttcctttaatattaccatgtactgtgggagaagaaagtattcatataaatntaatagttacaacttatagggatgtggaatactactgaagcaatcaacgaaccaagttaataactgagcaaaatttgaaggggaaaatgagcatacctataattaactaataaacaaagatatttc

SEQ ID NO: 49096 - DNA, 112 bp, Glycine max
  unsure (1)..(112): unsure at all n locations
tctctatgtcgtctattttaggagactatcggtatttgcagagttatagattactgtctcgatcaatttccgtgtcgcttctaacnaaaanaaacgctcacacatgtgatcn

SEQ ID NO: 49097 - DNA, 159 bp, Glycine max
taactcttcacactggtgtccgattcatgctcatcatgtatctggacactctaaattaaatcattctgaaactctcgagaaattcaaatggtcataacatttcacactgatttgcgattcgggggcataatacgtctagaggctcgaaattgaacaacg

SEQ ID NO: 49098 - DNA, 525 bp, Glycine max
  unsure (1)..(525): unsure at all n locations
tcttcttttattgttttgttgttttttctttctggtttctgtatgatctggacccgaacctgtatctagcttgcaggctttttacatagatgcttttctactcatatggctttatacataaaaaatggattcttaacatttccaattagtttcaccactggggtttggtttaaaagataatgcatggagtgggggaaagactgtcagaaactcccttatactatatcttaggtttaggcgggttatttggatccccgcaccgatgtatctgagaaaatgatagtttgagtcttccattatcggggggtggggcacttcataagctaactgatcgcattatacggaggaacgtggggggagcttgtcctacctcagaattgactaaaggatttgagcgtctccctggtattttatatctacataaggatgattcccaacagttgttctatggaagctaaaaggtatgaacctgtgcaaatcttgcctttgcatattaaaaaaaanaaatgcctnttgaaaaaggcg

SEQ ID NO: 49099 - DNA, 282 bp, Glycine max
ttcaaagggaagctagtatttgaggtgcacaggtatggcttcactgatggtggagcttgggctgatgggaacccaaaccaagtatgtggaaaagtgactgcagatataaagcaaacatctaccttcttagtggaccaaggatggccattgtttgtgagtgaatttggtggagacttgataggcaccaatgtgaatgacaatcgataccttaactgttttctggcactggaagctgagcttgacttggattgggcctattggactcttggcggtagatactac

SEQ ID NO: 49100 - DNA, 453 bp, Glycine max
  unsure (1)..(453): unsure at all n locations
atagcaaataaatggttattgttgttaatactgaattaatgagggttattctaccccccattgatagattcctttgcttccattttgtaagtttagcctcgcattggctaataatgggctgccacacagacctatttttatagctgacccctacaggaattccaaggtaagacaatggaatatccatttgactacaattgaaagaagatgctgcctccctacacaagctctcggatttgcccacacacccaaattttctcttatgtgaggttatcttaataccagagaccaattcaaagcttctcaggattattattaggaacaaagccagcaccatatcaccctgctacctaacccatgctacaaaagtccatcccccacactcccaagctaagtacatacacctagtgtacattggagaacattgataaannnaantgtaaatctgaacat

SEQ ID NO: 49101 - DNA, 398 bp, Glycine max
  unsure (1)..(398): unsure at all n locations
agcttattggaaaggacttaatcanatccatatcagacattttgataaaataaaatgctactacacaaaaagactatgcaagaagaaagtgaaatttttctctctacgactgttataaaattaaaataaaataaaagaaataaatgagaagaaaatacaaattcttaaactaaacaacagtagcaaaataactttgttagcaaaataacagaacatgaatcaacaatacactatattatacaataagcataaaggaaaataattcaagagagaaattttgttaacatgggttgaagcgcacaaatgctatccttaaggagaaaatgtccttgcattggtaaaaaaatctgatttcgctctttctccaaaatatgacaatcgtatacagcaaaagaata

SEQ ID NO: 49102 - DNA, 257 bp, Glycine max
ctagttccgctccggagtatgatagtcaccgctttaggagtgctgtacaccagcagcgcttcgaggtcatcaagggatgggcgtttctccgggagcgacgcgttcagctcagggacgacgagtatactgatttccaggaggaaatatggcgccggcggtgggcatcactggttactcccatggccaagtgggagccagaaatagtccttgagttttatgccaatgcttggccaacagaggagggcgtgcgtgacatg

SEQ ID NO: 49103 - DNA, 364 bp, Glycine max
  unsure (1)..(364): unsure at all n locations
agcttaaagtatgcccgagtcattttctttgtgagatgttgntgaagnattggcgatcagaattgccattccttggattatagggttgaaccaagctcatgcttttacaaaaaaggttcatcaagtcaagttgaaatatggaagtaaccgtcttgcaaaattggggcaaaagatgaatcgagtcacatcactgcttcgtctactgccaaacatatttaggattattgatgtccttgttacttccagtttcaccttgacaaagatgtcatggaccatgttgaaaatctaaattgattcaaccccatatcctgcgtaaaaattcgcaatacttcgactgtacatcattcgcatgcatccatgcttt

SEQ ID NO: 49104 - DNA, 429 bp, Glycine max
  unsure (1)..(429): unsure at all n locations
aaacataagagatgagttcaattgtatatttgaattgtttgtgaaatttttttgacaagtcaaaactttgtctaagacagaagaaatgaacttttaaaaagattcatcctaaggtgaatatataaataattgggtctagctgggaggaacacaatttataaaatacttaagcaaaaatctttttgataacttacaaactgtacaattaaatctctcttttaattagggttaagtttaagacgattcaaccttatgttaatgataacaacaaagaaaaataataaaaataaaacacaattagccaacattatgtattcaaattgaattgattcttaaaataccccacatgtttatttttaaatntaccaatatcgcttaccgtacaatactatatcaatgtatgtatgaaacaaccatgtnanaatcaca

SEQ ID NO: 49105 - DNA, 426 bp, Glycine max
  unsure (1)..(426): unsure at all n locations
agcttgttcttgattnttntgaagttctttatcaaccttagaacaatatatttggccttcatttaattgtctttggtcttggcgaccacgatcaacaaagtactttcgacacctactatatgttgatttcaccaacgctgttatcgatatgttgcaacaatccttcaacaccttaatcacacattctgagaggttggttgtcatgtgaccatatcttcatccttctttatcgtaagccatgctctatttntcctttgaaatgcgatcaatccatgttgctacggttggactcaattgatgaaatttttctaagttttgatcaaagacatgcttgcaaggagtgtagactacataaaattagttaccaacaacaattgttagtacatatcagacttaaattaacttcatgttagaaaataaatctta

SEQ ID NO: 49106 - DNA, 392 bp, Glycine max
  unsure (1)..(392): unsure at all n locations
ttaagtcatcagagtcacctcccctatgccaacaatcttgcttgtgacaaggttgcccgtcttcactgtaccaaaatcccctttntgatatgacgagaaaaatccttcataagtagtaacatggaaggatgctctagattcaattatccatgtaaaataattagatgcaatatttaaataatattcattaccaataagaaaaacattctcatcgcctgatgtcacaacagtagtggttctaccttcattcttcttcttttggtcaatttgattagcatggacagttctagtcttctaacctctcttcaagaatctgcactcaaactttntatggcttgaatttccacagtagtagcaactcaagcctttggggtgagacttggatctttctc

SEQ ID NO: 49107 - DNA, 153 bp, Glycine max
  unsure (1)..(153): unsure at all n locations
tgaaggtgcgtaccncgccattnttcatagtagaatcttggttatgtgtatactnatatggtgatcatctctttctccatcatggtaggtgccacntgagtggccaagtctctacatctttgggcgtatgcttggaaaaaccgtgcccctttt

SEQ ID NO: 49108 - DNA, 310 bp, Glycine max
  unsure (1)..(310): unsure at all n locations
agcttgccatgaatttgggctttttcctatatattgaggttacttatgatgggaacacgggatggtcccgatggcagcttatggtttgcttttgtggccattgcaaggaatgaaccaagatgtgcatgaaccatggtgcatggcaagacaataatgagtagtgaacaacttgcaatgtccttaaattntcttaatatataaacttagtactctatttgaccactcacatgttttcctggcgttttctaaattatcctgtcatgcaactgcaataatcttagaatataggttgtacatcatggcttaatta

SEQ ID NO: 49109 - DNA, 431 bp, Glycine max
  unsure (1)..(431): unsure at all n locations
accgggacatgtggatcgtgtgggtngatggatcatcaaacgttctagggcatggcattggagcagtattggtctctctagacaatcaatgtatacctttcatatccgggctggggtttgactgcaccaacaatatggttgagtatgaagcgtgcgccctggccatccaggcggcaattgactccaatgtcaagctactcatggtgtacggtgactcagcactggtgatccaccagctgagaggggaatgggaaactatagaccccatgttgataccctaccaagcctatatcaatgaaatggctggttcctttgatgagatcttcttgcatcactgttcccgagaggaaaataaaatggctgatgcgctcgccactttggcgtccatgttccaactaacaccgcacgacgacctaccgtacattgagttc

SEQ ID NO: 49110 - DNA, 416 bp, Glycine max
  unsure (1)..(416): unsure at all n locations
accttaagtcacctgcggcatgcaagcttgtagaatggctagacatgatacatttctttgtttggtttggttcaaggataaaagggatgccccacattatttccatgacacaaaaatgcaaaaatgatgatttggaaactttatgcaaaactggtcatgcatgcacctatgcggacactcaagtgtcaaatttttatggtcatgtgatgctagggctcaggattcatttcctctattttaatcaacccaatgtttccaaaatatgttcttttatcaatttgtgcattcatccgagtccatttcgggcttccgaaaaaatcttcacagcattcacccttcaggtgtagacacattnttccaaaaatggttatgatncaatgaatttntttcaaagaaaagttggaaatcgtctcttt

SEQ ID NO: 49111 - DNA, 552 bp, Glycine max
  unsure (1)..(552): unsure at all n locations
gttactttatttttgtttctgcttggtttcccgtacttagtgaactttttagtgatctgcatgcacgcccttataatctccgcttcttcatatagggtgtctctaccaatggcaggatatttattataaccttgtgcttccctaccaagaagccatggaagcaatcagtattgcgcttggcgactattcctgcaagccttcacagacgaggttaacaatagatgggtcaaaggagccccttgtggggaactgggggtgaggcttatattcagagggtgagcttccattcactacaatagatatatacgctgatgtgagggagccctgaattcatccaatccatctgtcatggaacctcggggtntgatgagatgaaatatgaattggcaagacactaaatcataggctgtgtctaaatccactataacaccatgcgcgacctcatagaccttctagccttcgtaagtgcctcattaccaaccagaacaccatggagcacttgctagtccttacaaggttgtttgnttaataatgagaaaatcatgacctact

SEQ ID NO: 49112 - DNA, 586 bp, Glycine max
  unsure (1)..(586): unsure at all n locations
cttctgcaccgnacacctatatccnntaaccgggcanaccgtngggaacantagatatgactataannntanaccnaaaaacgaggacananancntcgcggattgatgcgtccgatgtacccgccgancnnaanagncgacccgcacgcaagcgagcgcccccaacagccaagggaggcaacattcattcaacacaaaccaccacagccaagaagacagggcaaaggcagaaaactctgcccaaaacaccaaccaaaatgacaacatatctcacacaaagaccccaagaacaatgccctcggaccaaaacgctaaccggcggagcgaccccaaaagctgaccggagagctctagcacataagccgacataaagaacggcgggaactactagcaaacatccagaactcatactacacgacgccgtccacaaccagcaaacacataagcacagtccgcacttgcgcacaattctgcagacaactacacagaaaaaaccgccaaagcgagagtcgaaaaccacaccaccctatccaaactagccaaaacaaacctaaagcgcaaagcgagacaccatggcaaaccacn

SEQ ID NO: 49113 - DNA, 328 bp, Glycine max
acgacaataactgtgtacttggttgtctgactgaatcttgtaatgtattgagacactcgaaattgattatcgaagctttgagctgattctaacgacaggtactgtttactcggaggtttgatagactcccgtaatatatccagactctcttgaggtaagagcgaatctctgagataattcagactacattaactttttactctgatgtatgattgagtccctgggatagcgaggcgcttgatattgaatgtggaatctcttacgacggggaacgcggtagcttttactctgagtctgatcatttccgaatatatttaacgctctatat

SEQ ID NO: 49114 - DNA, 318 bp, Glycine max
actgaatcagacatcagagtaaaaagttattgtcgtttgaattatctcagagcttcggtattccagtccgagcgtctcgatatattacggcgctcaatcagacaaccgagtaaaaaagttattgtcgtttgaatttgctcaaggcttcggaaatcaatttcgagcgtctcaatatattacggtactcagtcagacaaccgagtaacaatttattgtagtttgaagttgctcagagcttcggcattcaagtcctagcgtctcgatatactacgggactcaatcagacatccgagcaaaaagttattgtcgtttgaattt

SEQ ID NO: 49115 - DNA, 231 bp, Glycine max
taatctggagtatgaatgtcgtcactgtattatttttttgttgaggaatagtggggcacaaaacggattctgtgtggagttgacaccgaccaacggtgatgcattaactggattcttcctgacaaggaaatatgggtagaaaaacaattttctcaggtaatcggactgtgtaaaggtctattgacacataggtgcttaaggaaccaaaggttgatgtcatcattgtatcaa

SEQ ID NO: 49116 - DNA, 403 bp, Glycine max
  unsure (1)..(403): unsure at all n locations
ctgcagcttcgggcatgaccatgcccctgttcttggttgntagacacaggggatacaatggctttgaattgctcattccccaagtccccactcttctggatagtattattagtgtggagaatgcgccgtggatcacggggtttcatgcgaatctttcctgaatcatcttgtagggtttgtgcctgattgtgccaaccaaatgcaaaaatgtaaactacagttagcttgacgggactttcataacactaaatagtgactttcaaattccacaactaaattcattcataatcaaggatcgcgatgttaacattntcaattcaatgtttagaagaaatagataattggatattaagaccatagccacaagtgaatattcaaaaatttacttcagtatgtatattta

SEQ ID NO: 49117 - DNA, 318 bp, Glycine max
ctatatgagacatcttgtctaacaaatgcacgttaacgagaactcgcctgtgctttttcttccatgctataggtatcaaagtcattgatccaatcatgtttgatgatcgggaaaatgaggcctgtaatatactgtgccacgtggagatgtagtttccccctgctttctttgacatcatgactgacttgagggtgcatctggtcagataaatcatatgttgtgggcctgtatatctacgggggatgtactcggttgagcgatacatgaagatcttaacatggtatacagagaatttataatgcacacaaacacccattg

SEQ ID NO: 49118 - DNA, 424 bp, Glycine max
  unsure (1)..(424): unsure at all n locations
agctagccgcccagctcgcccaggctgctttgttgcttcctccagaagcaacagccttctggagggcccaagtgggcctggctgctatatacacccccctttntactaaatgcaccccccttttctatattttttgaaattctttttccgtaacgttacgaaactttacgaatttcgtaacgatacttattttccttccgcaaggttacgaatccttacggattatgtatttactcttttttggctttcaaagaagttacggaaactcacggattgcgcaaaaacacctcttttcgatttccgccacattacggaatttcaaggattatgcaagcctgcttccttttggatttctgagacgtctcgggacttcatttattgcatgtcatcaagcaataatccccggacgtaattagggtatgac

SEQ ID NO: 49119 - DNA, 446 bp, Glycine max
  unsure (1)..(446): unsure at all n locations
tcttactcccttgacattcactgaaggaggtagcttgtcaatcacatcaatcttagctntgtctactacaatccccctcacagagattatgtggcccaatacaattccttcttgaaccataaaatgacatttttcccaattaagcactatgttggtctcttcacatcgttgcaagactcgctctaaatttgctagacagcaatcaaaagatgagccgaaaacatagaagtcattcgtaaacacttcaatgcacttctccaccatgtcagcaaatattgccatcattcatcgctgaaaattcttatgagcattgcaaagatcgaagggcgttcttctataagcaaacacaccaaaagggcaggtgaattctgtcttttcttggtcatttggatccatagcaatctgattgtaaccagagtatccattcaagaaacagtgaaatgatt

SEQ ID NO: 49120 - DNA, 394 bp, Glycine max
  unsure (1)..(394): unsure at all n locations
acacttcttatgttggttagagctcggagaaagcctcaccttatgaccgaaagtggtacaacaaaccaccgagaaagtttatttaatccaggaaaggtgaggactgctcaaagtangcaaaaaatttatcatgataagaggaggaaagatctggaattcgaggttagtgatcatgtattcttgagagtcactccatggactggggttggtcaagcattgaaatcccgaaaactcacctcgctttattggtcctttccaaattcttaagagagttggccctatggcatacgaaattgcattacccccatctctttctaatcttcacaatgtctttcatgtgtttcaacttcctaagtatatttatgatccatcccatgtgattgaatnggatgat

SEQ ID NO: 49121 - DNA, 330 bp, Glycine max
  unsure (1)..(330): unsure at all n locations
agctnttgaaatcaaactctaccacttgttatctattacaggtaattggtaatcgattaccagagagtaaatactctggtaacttagaaaaatttggaaaaacgtttctttgtaaacaaaattgtgctatgtttggtttttgaattattttttttcaatacatcccttgtgaagtcttgacttggtgctttttgggttcttctcttgaatcttgaattcatcctctcttgaatcttgattcttcttgatggtttttctttaatcctgatcttgaacttgttgactcaatcttgacatcattcttttgggcttttngtcatcatcaaaact

SEQ ID NO: 49122 - DNA, 409 bp, Glycine max
  unsure (1)..(409): unsure at all n locations
ataattttgagtatgacgatcaatgaatttaccctgtttaaaaatttaaaggggaaaaagaagtgaccaatgcttatgtataatgttgatggctcttttggatttggaatgtataaagtgcaactttatggtaaaggctccgttcattcaaaaaaaccattctcatgcttcagcctcctttttttaactgctgcattggggggtaggcatgatttgaaccaaacttttggtcttggcagtcacatggagctgaatataaantttgttacttatgtgacttcctatcactcttttttcacactctagagggtaatgatgtccttataaaagcacanaagcagtcggaagttggaacctgttataacactctttctttttttttacttgtagaatcactattaagaggaat

SEQ ID NO: 49123 - DNA, 217 bp, Glycine max
ggaaataaatctttaataggtcttttataaccaccattatatttattaaaaatgtcatttatcaatcatttattgtacttttttatattagttatatacatataatatttataaaatttgtcaatagtgcagattgtatatagaataaatgaaaataaattggaaaatgaatgaaaagtaaattaaatgtgtgaataaataatatttaagtgtataa

SEQ ID NO: 49124 - DNA, 205 bp, Glycine max
gtacttggataaacatgggaggttattacttgactctttcataagaaactaaagttgagattcgacttgttatgtgttaaaagatatgacaaaaagcaaggaaattaattaattatatatataacacttgcatataatagaatttaaagataaatttgaaatagtgtatttaataaaaacaaaaacttaattgaagttgaatttg

SEQ ID NO: 49125 - DNA, 466 bp, Glycine max
  unsure (1)..(466): unsure at all n locations
ntatattgatgccgatcacgcgaccggagagccaacagccgcctgcaagcttgcagcatagcagaatgcatttttgtttgataaaaaaacgcaggacgcgacctatggaagaacagcccttatgatgggaccgcacgtcagattattaatggacaccagaaagtcgtcgcgcaaaaacacgcacccccttagactatgataagatgcaccgatgatggaaaaagggagagaaagaagcgtgagaaaattccaagtacttgacagaaaattaacgcacacggagaacagactcgggcgaaaattccatacacagtttgagacttgaggaagccaagctagactcacaatgaatggcacacaacggagaccaacaaacagattctacccgcaaagatacaagttaatcaaatgggcattataatagggtcatagcgaaactgcgaaagcctacgtacgattgaagaag

SEQ ID NO: 49126 - DNA, 252 bp, Glycine max
tctacttatgtggcagggcgggcttccttcaccttcttgtcttcaacgcgaactttgaccattgttcttccttcccgcgatgcttcttttcgtgtccgcctgagtgggcttatagcctaaaccatacttcccacgatttccttgggtatttatcaagctagttatgccgccgttgttttttcctaaacccatcccgggttcataaccgttccccaacataactcgggccatcattaccgctgcatcggacag

SEQ ID NO: 49127 - DNA, 353 bp, Glycine max
agcttataatatatcgaggcgctcgaaatgtttactttagctcttgagaaattcaaatggtcataacttttaactcggatgtccaattcatgcgcatcacatatagagacgctaaaaaatgaacaacggaagctcttcaaaagataaaatggtcttaagttttcacactgaggtccgattcaggcttataatatatcggggcgctcgaaattgaacaacggaagctctcgagaaattcaaatagtcataacgtttaactcggatgtccgattcatgcgcatcacatatagagacgctcaaaaatgaacaacagaagctctcgagaaattaaaatggtcaaaacttttgacact

SEQ ID NO: 49128 - DNA, 398 bp, Glycine max
agcttaagcatgaccaagcttaattgtatgctaaaccaagcttaatcaagatgacttgctagggaaaatgagttattggattgcaagcttaagtgtggattgaataaggctaaagcatgactgatcttaagtgtgggttgatccaaactttagtgagactaagcttaagcgtatgttgagccaagcttaaatgtcaggatgaaaatatacataatgtattatgaatgacttccaaatgagtatggaaggagatgagagagccctttcccattttagtcatggggagagtgtgtaaaacgcgacatgattataatgtgcataccacatcgttcaagaaataggatcttctagtgatggctagttatagaggcaagctttggagaggatatgtcgggagc

SEQ ID NO: 49129 - DNA, 415 bp, Glycine max
tcttaagtcacctgcggcatgcaagctttctaagtttctcagagtggacagttatttgatatccataaactgggcaagcccaagtcttaaaaactaatttccgatagttaggattatgaagcaaaacttgcataaaacaaaaacttaaagcaaaagaacctatgtcgagttgcatagttagcaagaaagaaccatgatcagattgagatcttgtcaaggtgcagcaagaaatcgaattctagaaagacagactatcatcattacatatcatgcgatcgagacgcatatcaatgtgatttctaccatgtcttccattagaccaagtgtaggcatttcctatggttggaaagtgcattaaagagcaattgctcgtccatgcttgaaattcggcacacgagatttggtaaggcaaaca

SEQ ID NO: 49130 - DNA, 506 bp, Glycine max
  unsure (1)..(506): unsure at all n locations
gtgttctgcctgaggaccataactttaagctcccttgatcgggtatctctctacagaggagagtgttcttatctgtctcacggacgtacgantcggtgaaataatatatcgagacgcacgacattgggcaacggaagctcttgataaattcgaagggggataacatggtactctgatgttcgatccggggacatgaggtatggggaggctcgatattgaacattcgaagctttcgataaagtataatggtcggaacgtgttcgcgaggggggagggggggacataacttatttagactctcgaaatggagcgagggaggcgcgggagtaattttaatggttgttagtctatacacggatgttctttttcttgaacataattgatcgatatgactgatattgaacatctgtagcttctcgtaaatgcgaatggttataactgtttacactaatcgtcgtattcggcacactaattatttaaaagtaggaattgataatgggatctcg

SEQ ID NO: 49131 - DNA, 394 bp, Glycine max
  unsure (1)..(394): unsure at all n locations
agctntacagcatattttagtaatgacccttcttttctataattaaaataacttaatgccattaacctagggaattaaaaaaaaacttaatggctgagtgtaactgatattgtggcaacaaaaagtcatccccaacagccaacaagtcagccaccatttggtctcccataaggctgatgcctaggttgccaattgggtccttattacaacttgaactaaacctaactaaagcccttttagttgattaacccccaaaacatatttttggtcagccaactatacaaggattgggccattatttagacaaactaaacactctaatattgaaacaaagtggtgtcatttagtcctcctncatttgggccatgatacaactcacaaccttggacttttc

SEQ ID NO: 49132 - DNA, 319 bp, Glycine max
  unsure (1)..(319): unsure at all n locations
tttgccgctagtcttctgtatgtgcgatagaaaccggaatgaccaccttgatgagnagcatggaattcttccaaaaattttggaatgcaagttgatttctcaaggatgactaggggattattataataaagtgccccttgtttatatacaaatctagcattgatattttccccctgtcctttcttcacttcttcgaggagtgggtgaacttctcatctgcgtgcacctcaacattgagttcttggcaatccagccatactgggaagtaaatcatatcgttcatgttcatttcatctctactacgggacagagcatcaac

SEQ ID NO: 49133 - DNA, 427 bp, Glycine max
agcttgatgtcattcaaaacacactatgtttatttttatgaagactaaacatgcattgtttatgtaattgtattcattatgcgatataatttgttgtaacccgttacttaccaattaatattattaagtactcgtttggttaagcaaggaaattgttggtccaacaaaaatcattcatgcgtgcagcatacatcattgtcataattgacaacacataatgacatgcatgcgtattacagtttgagcgcgaaaacacattggctgacttgactacacattctgaaactagcagtcgctcgacaacacattgactgacttgactacacattggcgacaacacattggctgacttgactacacattcacacgtgtttatttttttgtaaacaaagataagtaatggcttggtcacaaccatctatatata

SEQ ID NO: 49134 - DNA, 217 bp, Glycine max
tatatcgagacgctcggaattgattatcgaagctctgagcatgatcaaacgactataactttttactctgatggctgattaagtcccgtaatatatcgagacgctctaaagggtatgccgaagctctgagcaaattctaacgacaattacttttgactcggatggctgattgagtcccgttagatatcgagacgctcgaaatcgaataccgaagctc

SEQ ID NO: 49135 - DNA, 375 bp, Glycine max
  unsure (1)..(375): unsure at all n locations
tggttcaaggataaaatggatgccccacattatttccatgacacaaatgcaaaaaatgatgatttggaaattttatgcaaaactggtcatgcatgcgcctatgcggacgctcaagtgtcaaatttttatggtcatgtttctgtttttgtttagtgcggngcgaaaaagtcgctagcgcacgggattttggttggtaatcaaagggagaagaccattttaggtcgtggtttcctttccttctttttgttcatttggtgacaattctgtattgttcagatattgtccggtccaaagacctttctgcacatttcttctgttntcctgcgatccctgatcaggagctntctttccttctacttcttncttttttacttt

SEQ ID NO: 49136 - DNA, 411 bp, Glycine max
  unsure (1)..(411): unsure at all n locations
aagcttctttgtagacctcgatcggtcatgttccttttctgtgtcgaccgtcatttntttcgatccattttggtgaataatattttcttgccgagatgggctaatgtttttctggccgaataaatgggaaaatgccagtttcggccgaaacgaaaagtctgttgagctcgcacaaaaaaacctagccgacctacattttaaatttnttatgcaacaccaaaacaagaaaacttcctgtgccgtgaggaaaaataaacatttcattacagctatcgtttttaaaaatagaaatgtgcagcgactgctgaaaaatattcatcggggcttntttacgaccgatgtcggctattgagatgtcaattcaattcttgaacgaaaattgcatgatgtcggttaggaaatgtttcatcg

SEQ ID NO: 49137 - DNA, 373 bp, Glycine max
agcttcaccggatgacgccgatcgatcttttctaaccgacgtcatgcaaatttcgttcagggattgaattgaaaactcgttaggcgacatctgtcgtgaagtagcgaccgatatttttcagccgacattgcacaattctttttagaaaagctcgctggtcgataatggtctttttacggcagagtaagttttcttgttttggtgttgcataaaaaagttacaatgtacttcggctaggtttttcgtgcgagttcaaccgacattgtgtttcggccaggaaaacattagcccacctctgcaaaaaaaatatgtgctaaccgtcttcatgcatatttcattcaacgattgaatagaacactcaatagccgacaac

SEQ ID NO: 49138 - DNA, 105 bp, Glycine max
cataaaagttattatggatggtgaatcaatagttacctgtttccacagaaatggttcatatgagtggttggtgtacatttcaaaaaatataaaaaaggagtgatt

SEQ ID NO: 49139 - DNA, 437 bp, Glycine max
atgtctcgtattggtttaatcgattactttcttctcgtaatcgattacatagttggttttgagactgtcgcaacctacccttttgcgggcgagcgaggcgaggctcacgggtgcgtctttcaaaggaggaaaagcgcggagttgccaccaacgtttatttgtggaaaacgtcagataaatcgaaggaaactggtcataaagaatattccagattctggagttgtatttacgtttgaggaaggtattagcacctctcacgtttgtcccaaaggacaacaaccttaaattataattgtgtgtaaatgtgtacctaaacttttatttctttttttattttgaggtcgacaaaagcggggctcttgctcctacgtaccctcgatcaaagaggaagtcagacctacgtagttctttcaaagggggaataagcgatcttttta

SEQ ID NO: 49140 - DNA, 438 bp, Glycine max
  unsure (1)..(438): unsure at all n locations
agctanaggtggctcctatccttctcttagagagccagctaagctccatcccccttctgttggcagcaacagtcaagtcataagtatcatctgattgagcattttgttaagacttttggcaagtgtacaacttgtcgttgcaggtttcacatttataaaagagttcgtctcctagggacttgagttacttaactcattaggataaaggttattagtttaatagttatgtataaattcaatcgaatgtcattggttttgtcttgattaactaaaggcaacgtaaagtaaaagaaaagtaaaaataatggatttacagaaataacaaaaatacaaaaaatatggaaataacataatttagtgcgacagaaatacgtaaattatggaaataacaataacaacttgaattaatttaggaaaacatagaagtggatttcatca

SEQ ID NO: 49141 - DNA, 427 bp, Glycine max
  unsure (1)..(427): unsure at all n locations
atgtctcgtagtggttgaatcgattattgttaaaagatgatggaactcaataaaccaaaaggggggtgaattggttttaaaaaaaaaaagttactttaaaaaaaatagagttgcagaagaaaaaacttttctaaacgaatcgtatcacaaaacaaatatgaatcgaatgtaatcaatacttaatcaatcattccttacacatgacctttcattaacttcctttctttcagaatcacaaaacttgaatctttaaaaccttgataaaacttgaatgagttgattaaaccttgaaggagtgaaagatatgaacaagaganaaagacacaatatcttatactagttcactcactatttctagagaagcttatctagttatcaaatccacaacctgaattatatttccactatcgttagacttttcaaaagc

SEQ ID NO: 49142 - DNA, 418 bp, Glycine max
tagcttcctttacaacagagagaagatattttgttgtgattaagaaatacaagcggcgaggatgtctttctctctctagaatctctcacatgcagaagctccttgagaaaaatggccaaaatcccctccacaatctaatttcaggcttaaataggtggctttgtttgtgctagcacgcttatcgcgattatggaacgctcagtgtgcattagtggatttcggcttagcgcgtgtttttctcgctcaacggatggactgaagcggtgcacttagctggatgacccttcactcagcgcagatgcacaactcatccttctttcagattcttcgtcacgctcagccgaggaatgttgcgctcagtggatggctcgctaaaccagaagattggcttaacgagaggatgataatcaacacttca

SEQ ID NO: 49143 - DNA, 362 bp, Glycine max
  unsure (1)..(362): unsure at all n locations
gagccaattcaaacgacaataacaatttactcggatttctgattgagtcccgtaaaatatcaaaacgctcaaaattgaatgttgaagctctgagcaaattcaaatgacaatcacttttttactcggatgtctgatggagtcctataatatatcgagaggctggaaatggaataccgaaggtttgagcaaattcaaacgacaatattgttttactcggatgtctaattgactcccggaatatgtggagacgctcgatatggaataccgaatctctgagcaaattcgaacgacaataaattnttactcggatgtctgatncagtcctgtaatatatcgaaacgctcgatattgaatgttgaagc

SEQ ID NO: 49144 - DNA, 332 bp, Glycine max
  unsure (1)..(332): unsure at all n locations
agcttctacttatgtggcagggcggttctttcttactttcttgtctccaacgcgagctttgaccactgttcttccttcccgcgatgcttcttttcatgtctgcctgagtgggcttatagcctaaaccatacttcccacgatttccttgggtatttatcaggctagttatgccgccgttgtctttgcctaaacccatcccgggttcataaccgttccccaacataactcgggccatcattaccgctgcatcggacagacaaggctgcccaaagagggagtccacggaggaaatgctgaccacctcanaagactggaaagcagtttctatcgat

SEQ ID NO: 49145 - DNA, 292 bp, Glycine max
gggagtgaacgcatgcacattttatctatatacaattggttgttggttgcttgaatcttgatttcaggtattgtatggtcatcatcaaaaagggggagattgtagatgcaattacgtttgagggtgtgatgatgatcatgatgatgtgtttgaattgatgcaaatgggcttttcaagattaaaatgggagagaatacgttaagattacaagtcacaatattaatattatgactagaatattaggaaggtaattcttaattgaattagcaaaggtttggtcaagtgatttaaa

SEQ ID NO: 49146 - DNA, 430 bp, Glycine max
  unsure (1)..(430): unsure at all n locations
agcttgtaggattatggngtacccatcatatgtggtactaggtggcggtcgggtgatggtgcacaacaagttttccacatccacaatgcgcgcataaacccaccatcccctgttgcccacctccatctgagctcacgtactcccacgtagcccatatcctcgtttctctcaacaccgggtccccatcaatcctcccaagcttccacaacatccaagaaaaacaacattcaaacagcacaagctatcacagccaagcaaaacagggcaaaggcagaaaactctgctcaacacaccaaccaaaatcacagcttttctcacttatagaccccagtaacaattccttcgatccaattcgttaaccggtggatcaactcanacattntactagaagtctatagtacataagcctacattttgaccggtgggatct

SEQ ID NO: 49147 - DNA, 453 bp, Glycine max
  unsure (1)..(453): unsure at all n locations
cgcgtgtaatacttgcttctgggttaaatggaggaattngatgaatacattactaaacgtggatcatagacatagaaccaaacacttagatctactaattcactttgcataaaagttttgtttgaataaatttctctataagctcttatagaaaaaagaaactaagaaaaaatgaaaagtatttttctcataagcttaaattaatttgtatgagttaaggttttcagggaaacttattttattttttcttttattattttcgntttcaataaacgctcatggagaaccttattcaattacggcctaagtgttatattttcttaagttgctactagtatgacacanaacattggaaggatgttatgataatatgcagttcttcagaatagaacacttaatggagacagaaaccataagcacgatgttatagttatatacaatttgtctttataa

SEQ ID NO: 49148 - DNA, 398 bp, Glycine max
agcttgctgtaggccataaatcgccttgttatgtctgcaaacttgttgcttgttggaagacacaaaaccagggggttgaatcatgtaaacctcttcctcaagaacaccattgaggaaggcattattaacatctagtttctgaagaggccagttgtgagacagcaagagaaagaataagtctgatcgtgacaggtttgattacaggggaaaaggtctccttataatcaaaccccaattgctgatggaagtctttggcaacaagcctggctttgtacttattaacagacccatctggattttccttgaccctaaaaacccatttgcacccaattgttgttctggaagcaggaagatcaaccaaggtccaagtgtcatttctcatgagtgcatcatactca

SEQ ID NO: 49149 - DNA, 332 bp, Glycine max
gaccacagaggggtacctggagatatgtcgcgggggtcacgagaccttggcgacgtcatgtggggtgctattgcccaaaaccaagcttgaccaatcccgacccaacccggtcatattcttgtagggagaacctgtgatgtacctaagcatgcgagctcctgtcagtcaacatataaaaggaaaacaagaccacaaagcaaggaggcttgtgatggctggccacctgtgaattatgcgtaatatgtggattgggggctctggtaatcgattaccaacggtgggtaatcgattacactgcttaaaattgaagacatgaggctaagatggtctct

SEQ ID NO: 49150 - DNA, 430 bp, Glycine max
  unsure (1)..(430): unsure at all n locations
agcttctccctcaattntctataaattgttggttatttgaagtaganaagggttcagccccttaggcacttctctctctctcgaaatagctgaggaaaattagttccgtgaacaaaatccaagccgaggcgcttccgtaacgtttccgtgagtaattacgcaaagattctcgaccgttcttcaagattcatcgttcgttcttcgatttcttcagtcttcaacgggtaagtacctcaaaccaagcttttcaattcattctatgtacccgtggtggtccacatnttgtttcatgtatttttattctcgttttcatttactttttatacccccttttgacgtgcttaagccatttatttaagtcatttctcgcttaatctaaaaataaaatatatttccaccgatcgtttgaatggtatcatnncgtaatttc

SEQ ID NO: 49151 - DNA, 488 bp, Glycine max
  unsure (1)..(488): unsure at all n locations
cgtggtcatgcttgacgcacctattcctctaagcttgcacgtatgatacctacataagataggtaatattatatatatatatatagatatatatatatatagtcatatatatatatatatagatatatatagatatgtttagtcagaataataccttgtagatgcatgtgtgtgccaaaaaaatattcgcaaaatatagagcatggtggttatgtagctataaaccctgtatatgcttgtatatagccaaatattctcacaacacatatangcgnagggggatgtatcaagatacctcggacacacatgtagggngagggtgagctggaggaatatacccctgttgacggagaaaactccttctgaaataaagtaggcttcccgacggattagtcataatatattctgtctaagttatacacctttgcacatacgagggtgtgacgaaaaacacgtgcttggaaaaaaaaatttatctttttagaaaa

SEQ ID NO: 49152 - DNA, 419 bp, Glycine max
gcaagcttataagaacaaaattgcctcaatcattttttatatgcatgtgaattaggaagcatcaacaagaatcaagccaaggctattgtgcaagcaatcaatggggcaaaacacaccaaatgattatgatgatggatggctcaaattctcacaaaggtaaactcatcactttcaaattgagctttcaaaactatcatgacatgtagaggagaatcaaggatttcaattcacaaaatgtcaagaacttttattttcaaaacaattacccatttcttgaacatatcctataattcaaagaaaaacatgcaaagtcgtacatgcacacaaaattgacccataatattaaactaaaaattacaagccttaaatgaagaaccatgatatcaccatatctttaaggaattttggagctttggaat

SEQ ID NO: 49153 - DNA, 151 bp, Glycine max
  unsure (1)..(151): unsure at all n locations
actccaagaagatctactcntgagcttgtgggtgttcaaaagctagacaaaatangtaacgttgggaagaacaaggcttgacttgtgaaccaaggttacttaccataggaaggtatacattatattgaaacttttgctcctgttgctcatc

SEQ ID NO: 49154 - DNA, 441 bp, Glycine max
agcttatgctgcaaacatttataatagacttcttcagcagcaaaaccaacaacagaagaataattatgacctttcaagcaatagatacaatccaggttggaagaatcatccaaatctgagatggacaagtcctccacaacaacaacagcttgtccatccttttcagaatgttgttggtccaagcaagccatatgttcctcctccaatacagcagcaacaacagcagtagtcacaacaaagacaacaagcagttgaggctcctcctcaaccttccttagaagagttagtgaggcaaatgatcatccaggatatgcaatttcagcaagagacaagagcctccattcaaagtatgacaaatcagatagggcagtggctactcagatgaaccaagctcagtcccaaaattctgaccaattgcttcacaactgtgcagaatcaaaa

SEQ ID NO: 49155 - DNA, 471 bp, Glycine max
  unsure (1)..(471): unsure at all n locations
gggtacccatcacatagtggactatgtggttgtcgggcgatggtgcacaacaagttttccacattcacaatgcgcgcataaacccaccatcccctgttgcccacctccaactgagctcacgtactcccacgtagcccatatcctcgtttctctcaacaccggggccccatcaatccttccaagcttccgcaacatccaagcaaaacaacattcaaacagcataagctatcacagccaagcaaaacagagcaaaggcagaaaactctgctcaacacatcaacccaaatcacagcttttctcacttaaagaccacagtaacaattcctttgatccaattcgttaaccggtggatcgactctcaaaatttactggaagtctatagtgcataagcctacantttgactggtgggatctactagcaaacatccagaactcattatgtactactntntccacagccaaccacacaca

SEQ ID NO: 49156 - DNA, 401 bp, Glycine max
  unsure (1)..(401): unsure at all n locations
ttcaatcttcttttaagatttctttgggcttttagtaattntttttattgtttctatttctaactttcttgtgataactcagaatgactattttttcaaagtgacattttctccctctcataaccattctttctctcatttaaagaattaaataataaattggtaaaaggatcaacgatcagtttctaaacataactaatgttcgatggaagtaacattttaatggagttaactcccatttacatcaaacaaggtctccgtcttgatataagattataagagtatcatgaattgttctggattatttttgtgattattattgcattcanccatttgtttcccttcttaccatttcaaactaaggtattgcataagctaatccctgatgcatncaactcgta

SEQ ID NO: 49157 - DNA, 446 bp, Glycine max
  unsure (1)..(446): unsure at all n locations
acactataacactcaagcttctcgggccattcctgcgaaggcaaacatttggttgttagtttttaccaagaaatgctacccttaaaacaaaaatggcatacaaccccctccaataaatacaaacatcaatgtaaatttagagcaagcttatgcgcacacttctttacgaacgttcacttgcacaagagattgttataactaagaaaaatgcacccatatacaatcaaggcaccttcgttacctagattattcacatgtacttgcaaggtgtatttgttacctacatcacacacattgnctttgctaaagtgacatacatgcatactctaagcactttggctatcataaattgcatacgtgcacatcttggtatttctcatacctatacatacacatacttcatgatgaatcttgactatctacacaataaggtgctacatttcatg

SEQ ID NO: 49158 - DNA, 391 bp, Glycine max
agcttagtggcttagtgaagatgatatttaaaagtgactcaacaggttgaggtgtgtctcaccattgggagatataatgacaaggtgctgtgtgatgtggtcccaatggaagcgacccatgtgctgttaggaagatcgtggcagtatgataccaaggcagtgcatgatggcttcaccaacaacatctctttcaagcaagctgacaagaagattgttctcaaaccgttatctcctcaagaggtttgtgaggatcagataaaaatgagagaaaagaaaaagagtgagacactcgagaggaaaaagagtgagacacttgagaacgaaaagtgaggaaagaataagagtgaaacactcgagagggaaaagagagaaaacaaaaagagtgaaacac

SEQ ID NO: 49159 - DNA, 414 bp, Glycine max
  unsure (1)..(414): unsure at all n locations
ctccagacatcttctcagagatcccaacggtcagatcatggacgcgtgtcttgtgaagttgcagaccaaatttcgagacgatccaacggttaatgaaggctacgaagcgtttttaccgaagcagcttgatgtagctttctctataagcttcattaagaggcgttctctagaagcttcctcgtggcttgtttgagaaggtgtctcaagaggcttctttgagaagctacatccttatgtatncacccctgtattaactaaattaacttccttaaaaataattacggatgaaaataacgcaacaaataatcgaacatcatacattattactaataatatatagatatatatatcacggtgttacacatcatatattgagacgctcgaatttgacaatggaaaaatcnnnaaaaaaaa

SEQ ID NO: 49160 - DNA, 222 bp, Glycine max
  unsure (1)..(222): unsure at all n locations
agcttctgttgttcaattntgagtgtctcgttatattatgcgcctgaatcgaacatccgagtgaaaagttatgagcatctgaatttcttgagagcttacgttgttcaatttcgagcggctccacatgtgatgatcctgaatcggaccaccgtgtgtatagttatgaccatttgaatttcacgagagcttgtgttgtcaatttcgacggtcttaatatgtgat

SEQ ID NO: 49161 - DNA, 406 bp, Glycine max
gtgggtggttttgttttttaaattctaaccaaaaatggctaaagtagacataggaaaaaatgataaaaactattttttgccaaactggtaaatcttatcttaaacatcttgattaatgtgttgacatcctagattattgtactaatctccctatggatatgtgtactcagagtaaatttcacatagagataaattacaatgcgacttagtgcgcagttcaattcttgcactgatgaaaatatagttcaaatagtttttatttctctgtcaagcttcactaaactaatcacatgtatgtatgtatatatgtatgtatgtatgtatgtgataagcatgaaaataagaattaagaacatataatcactgcaattaaatacatacatgcatagatgatacaacatagagt

SEQ ID NO: 49162 - DNA, 287 bp, Glycine max
attacttagtattattatagtaatcctataacatgaatctaacagcatacttaaattcacatccttaatctccgcttataagatttcttccatttatgacatttaacatggggtctggggacctatctattactgagagaattcaattaatttatgccggtaacatatttgtgatgcactaggtgagtaagggaatgttcaagaatgctgatcaccaagcatgggggagattaaggtggagccttgtatccatagccacattccgaaacccagcacaataggcaatt

SEQ ID NO: 49163 - DNA, 577 bp, Glycine max
  unsure (1)..(577): unsure at all n locations
acccaactgaaacacctgagataccaagcgtcatggtnggtgttataatgtacagcaacntcacgcnnnnnaagcaaccnnacagagtggtnaatagacgctgacgtaccacacgccgaancnnaaganangaactgcgcgaagcacgcaccctgaaccaccgacacaagttctatgtctgtgctacgagaaccagcagcccgcaaataaccacggccagacagcggaaccccacttggtcaccaaagacaaaggcgccccagaaactgagacccccgcaaacgaaaacaagaaaccgacgacgccagcatgggaagcccaaaggaaggaatctcgaacacagcgacacccaagtccttaaatccaaaaaagaagccacaacacctccgaataccaggaagagcacaaagcccaagagcgccaccgaagagcggcggggacacgaacacagagccataaagtccagactgagggtaccgaaccacgacaagacaccgcacgcgcaagggcggtgaaaacaagggcgaaaggaggggaaggcacctgaacaaaactctgcaaacaagtgccatacacc

SEQ ID NO: 49164 - DNA, 531 bp, Glycine max
  unsure (1)..(531): unsure at all n locations
tgtcgtatatcaaacacgtttgnttgagtccttgcatcacgcgacactatngaagactcaagctgtcttgcgctgtttactatacctttagggtatcatgtttttgtatctatgctgctagacaagccgaacgtaagcccattaatggtcctgagaaggagaagcgttatattcgaacatttattgggagctcttacctagagcttgcaagcctacccatggtaccagggagcttacccaaataacacgcaattttggttttgtgcatagatgcatatatgcggcgtttatgctgggacacgggttttccctttatggatatataaatggaaatgncgcttcctaaggagacgcgctcagagcatcggttacttttgagatctgacaatgctgatagccgtctcacaccttgaggtcgagaaattgtgttgatcgatgataggcgctggaaactgtaccatgataatcactctcggatttgtgaggataagagctatagaaaagngnantnatataggtttgtttgtctaa

SEQ ID NO: 49165 - DNA, 420 bp, Glycine max
  unsure (1)..(420): unsure at all n locations
caagcttggagcatgagtaggactccttctcttcttctttgttcttgngtctattatgtgtgtctaaccttgaaaagtatgattttaagttttttaagttattggtttttcaatgtttactgaaatcttcacttagttttacgttttcccccatgtatgttctatttcttgatatattgcctatggtgcactgaaaatgatgtggttgctatcttgttgtatcaatatagttaaggactgtgcattgtgacttttggatatattagttccgtttttgtagttcagctgttatctgacaagcatccttatgctctgnttgccaggtatttcaaaattgaaccattacctggacgaaagtaagattctgccttcccattgntggttattctgggttggcttttattcttanaatcaatggat

SEQ ID NO: 49166 - DNA, 193 bp, Glycine max
  unsure (1)..(193): unsure at all n locations
taggataaggggngaaaatttacatttaaggaacgaaggagggggaggaatgaaagaggaacttgcgatgaatgaggatacagngagtgggtttaaggaagggatagttatatgtgtgtgataggtaaggggggtttttatgttattaataaattgaattgtttaaaaagtagagattttaagagatataggg

SEQ ID NO: 49167 - DNA, 436 bp, Glycine max
  unsure (1)..(436): unsure at all n locations
agcttgngcccattctgattcttcttatttctactcaactaggattctcaaagaaggagcctccaactcaaacgggagcacaaccttcatcccatacaccaaagagaaaggggttgccccaatagatgtgcacacagaagttcgataaccatgcaatacaaaggggagcatctcgtgccaatccttgtatgacacggtcatctcctaaactatcttctcgatatttttattggcaacctcaattgccctattcatctttggccgataaggcatggaattatggtgttggaatttgaaatccttacatatttccttcatcatcttggtgttcagattagtggtagtatcggtgattattttcctaggcaacctatatcngcaaattatctctttcttgatgaatctaatcactacattcttaggcacactagcatat

SEQ ID NO: 49168 - DNA, 335 bp, Glycine max
  unsure (1)..(335): unsure at all n locations
aagaactaatgaataacgtctaataacggttgtacctttggaaatggttacggaaaacgttacggaaacgtttctgaagcgcctcggcttagattttcttcacggaaacgattgtnccaaggagaatttaaagagagagaagtgccaaaggggctgaacccttttcttcttcacttcctcccctatttatagcaaaatatgggaggtggttgccgcccagctcgcccaggcgagccaggttgcttcctccataatcaacagccttctggaggaatattctgtagggcccaagtgtgcctgggtgctatttgcaccctcaattgtactaagtacac

SEQ ID NO: 49169 - DNA, 359 bp, Glycine max
agcttgtaatcgattacacacttacttgtatctaataacagaggagattttcagaagatattctcaacaatcacagcttttcatatggttcttgaatggccatcaaaggcctatatatatgtgacttgagacatgaatctgctaagagtttttcaaaacaacaagtgtttattctctcaaaaagcaaaatccgtttatcctcttaagaactccttggccaattcaattgcaattcattaaggaatcatttgagtgctcagattgtaaaatctatctctttcaagagagagtcattcttcttctctttctaattcactaagggattaagagaccgagggtctcttgttgataagaattct

SEQ ID NO: 49170 - DNA, 60 bp, Glycine max
tgaagctctgaaccacttgttaggcaagtggctctcagatatcttaagaagggggggggg

SEQ ID NO: 49171 - DNA, 302 bp, Glycine max
  unsure (1)..(302): unsure at all n locations
agctngagttgaggaagtgtagaaaggtgtatcttcctgcttttattcgttgaccacagagtggtacctggagatatgtcgcaggggtcaggagaccttggggacgtcaggtggggtgccattgcccaaaaccaagcttgaccaatcccgacccaacccgggcatagtcggtcagtgagaacctgtgatgtacctaaacaagcgagcttctggcagtcaacaaataaaaggaacaaagaccacaaagcaaggatgcttgtggtggctggccaactgtgaatcttgtgtgatatattggttat

SEQ ID NO: 49172 - DNA, 387 bp, Glycine max
taaatatgagcagatgttatcagaccttacaaagaatctcctgctatgaaaagttgtcgcatgtaagttgatgctaattcctttttctgctactaacagataagttacttattgtgaattatgttttctttaatacctttctattaatgatatttggatacaactacagacatgtacacagtggaatatcaaaaacgaggacttcctcatgtccatttatttttatttttacatgccaacaacaaatatgcatctccaaacgatattgatcatattatatcagcagaaataccttgacagaaagatgatccagaactctataaattagtgcaaaatcacatggttcatggtccatgtggaattttgaggcccgcatctctatgcatg

SEQ ID NO: 49173 - DNA, 429 bp, Glycine max
  unsure (1)..(429): unsure at all n locations
agctngcccagagaaggagtccacggaggattatgcttaccacctcaaaagactggaaagcggtttctaatgactcctctacggcctccacataaggcatagaggatgggcagctcaccaagatgtcttcctcgcctgatatgatgaccagatgcccttccactacgaatttcaacttttggtggagtgtagagggaacaactcccactgagtggatccacggccgccccaacagacagctgtagggggggttaatatccattatttggaaggtaacttgacaggtgtgagggcctatctgtaccgggagatcgatctcccccctaacctctcggcgggtgccgtcgaaggcacgaaccaccattgaactcggctttatgtgggaagcatngaatggtaatttctccaaagtgctcttacgcatcacgt

SEQ ID NO: 49174 - DNA, 268 bp, Glycine max
  unsure (1)..(268): unsure at all n locations
agctagcaatgaaagatattggggatntattagtcntggtgtcaatcatagacacacaagaccaagggccatatttcacacatatgttaccatagaatattatgatagctcattaggcacaacatatatgacattctgtagactgctactatagcattgcacatggaagatagtagtatgatatattaaatgaactcatgcattcagtaacacaaatgtgcttaatatgaatgctcaaaactattaacttgtgtgatcaactggaaat

SEQ ID NO: 49175 - DNA, 365 bp, Glycine max
  unsure (1)..(365): unsure at all n locations
aaggcaaatatgatcatcctactatgacgactgagaaaactggggcaaataaagagggtgaggatgagggagaaacccatgctgtgactgccattcctgtacggtcaagtttcccaccaacccaacaatatctttactcagccaataacaaactttctccttacccaccacccagttatccacaaaggccatgcctaaatctaccacatagtctgtctaccgcactttcaatgacgaacaccacctttagcacaaaccanaaacaccaaccaataagtgaattttgcagcgagaaagcctgtataattcaccccaattccagtgtcctatgctgactcgctcccatatctacttgatatatcaat

SEQ ID NO: 49176 - DNA, 344 bp, Glycine max
  unsure (1)..(344): unsure at all n locations
agcttgaaagtgtgtaacccaaccatttttatttattnggttgggntgggggcaaaattgaggcctctccaaagtgttttgcaggggtataccaccaactgcttgcccttcagtggcatatccgaggcaaggcttgaagtcagctagattgtggtggggaatttcatgcatctcccctgtggtttaagagacatgtgcatgatcagattgaggttgttggctctcaatgagtatggcagtggagttattgacattctcactgggagtgtacgccacattgggtggtgtatatttgggaggcaagccatatggcgggaacgcatgcttgttttgaatttgcacat

SEQ ID NO: 49177 - DNA, 516 bp, Glycine max
  unsure (1)..(516): unsure at all n locations
cgcgtttgaagtggtaccattgcatgagcgcatanaatactcaagatttctataggagatatcaagctcatcaaaagggaggtctctatctgttcacttgagattttcacagattcaaatctctcagggaatgcattcacatcttggtcagaaatcacttcgtgttcactctctgtagcatcagaccgacatacagaaagtgcctttctctgcgttttgagaagagggggacaatcagctttgatgtggtcatatccttcacacccacgacattgaaattcttttgtgtgacagggcgtcttatctggaattctctgggattcactacctttncggagggggagagagaaattccagacacggtggttctgtcttccgtccattctgttcaaaactttgttgaactgtttcctacgaaacaactgtgttattagaccctcttagtgtcacgtgctactcatatctttctcttataaatggacaaacacaannatttnttttnttttagaccatccg

SEQ ID NO: 49178 - DNA, 245 bp, Glycine max
tttcaatttcgagcgccacgatatagtacgggacacaatcggacatccgagtaaaaaggtatagttttttgaatttcctcagagcatcagttttcaatttcgagtgtctccatatattacaggactcaatcagacatccgagttaaaagttattgtcgtttgaatatgctacgagcttctgttttcaattgcgagcgtctagatatactaagggacacaatcgttcattcgagaaaaaagtgaat

SEQ ID NO: 49179 - DNA, 389 bp, Glycine max
  unsure (1)..(389): unsure at all n locations
agcttctgcgcacacaaaggaactatttctatttattatgaaagcaacttcacacttacatctgcagtaaaattctcaatgttacagaaaagtcagttcagagaatcaatctttagaatccgatgggaagcgaaccatctaaccacagcctccgtgatcgtcttcccaacatgatctctctctctctctctatatatatatatagcttgtgagtcaagatcttgaagccatttatagagtgaggttccgaaatgaaagaagaaagggggagagtgaaatgtgaccacgcacgctntccgaatntaatttctggaagtaatcaatgtttaacgcttctaaaatttaattaattttcagaagtatataataattttgtggaaagtaatttc

SEQ ID NO: 49180 - DNA, 463 bp, Glycine max
  unsure (1)..(463): unsure at all n locations
tactgacctactgtaatatatnaacaattgttaaacaaattatcatttcaaagacaaacagcactgaagctagtgggcatccatacatatttaattagaattgcaactaaacgagtgtctcacatgatatgtcaagatcccttcaaaaattctcaagctgtgttttgagttccccttcacttgaaatgagcctctctacagcttacacagaatttcaactataggaaaattaacataaaatgatcttaatatttgaatgatggaaagaaaatagaataatgccacanaggaagagtttcaaaaaaattgaagaacaaaagctagtttagatgcatacaatacaactacaagcagtaacaatgttgtaacagtaaacaacataccttagttatcaaaggatccttaagataagcaatgagtgaatatataacccactctgcatcactgcatttgattaacaata

SEQ ID NO: 49181 - DNA, 442 bp, Glycine max
  unsure (1)..(442): unsure at all n locations
ctgcagctgagaggataatatgaatccttctatctcagctagagtagacattntttcctaagagacgggtaccaattttctattttccacattacttgtccaaataaaattgcaaatccacttatatatcatattcaaagtatatataggccaggcataaatatgaaagctatataatagcatactttgaacaatagaattgactacttgaacatgacgcacaaaagaaaggagagaacttttccaagatcccaattcaacctaaacaatagccacacctcttgcattctagtataaaaccttcatcaagcaagagttntaggtcccatcctcgaatggatattggaatcaaataagctntatctacttgctttttaatcttgtgaaacttctttggctgagaactagagaccaccacagtaaaatactcatcttccttaac

SEQ ID NO: 49182 - DNA, 233 bp, Glycine max
  unsure (1)..(233): unsure at all n locations
ccccaaagcaatcaaaggacaagccaaacaaagggcaagcccatggaaaaatttatcatgaaggaggagacctctcttctcttttaccagtgacagaagtggcattgttttcatcgacttgggaatccaagctactaacaccattagaaacagtagcaacaacatcatgaccacatggtcgggtaatgcataggcaacaanttgtagactcacagctagtgcctggtgctagg

SEQ ID NO: 49183 - DNA, 396 bp, Glycine max
  unsure (1)..(396): unsure at all n locations
agctntcattcctatttcttttctcacttctgcattcataattaaaacaaagtactagtgttacattacacacaaatatactttgtttcagtttcttctttaaatgaaatattaattatgcttgaagaatcttttaaaattccaatttcctcaatttgattatctttatatctcatggaagatttttaataacaagttaatacataatgtaattaaagttttcaattgattaattttttttttaaatgacatccataataaacaattactatatatacaaaagaaaacaaaaatcgttaaaacacatacttaaacaacaataatcataactagtatggatgtatgattntctaaatgttaacacaaatctatgttgtaattcaattntacatcatg

SEQ ID NO: 49184 - DNA, 440 bp, Glycine max
  unsure (1)..(440): unsure at all n locations
aaaactcagcttgtggagtatgtggtacccatcacatgtggttctttgtggcggtcgggcgatggtgcacaacaagttttccacatccacaaatcgcacataaacccaccatcccctgttgcccacctccaactgagctcacgtactcccacgtagcccatatcctcgtttctctcaacactgggtcttcatcaatcctcccaagcttctccaacatccaggtaattcaacatccaaatcatcacaaactaacaaaccaagcaaaacatggcaaaggcagaaaactctgcccaaaactcaaaccagaatcacagctttttctcacttaaagaccccagtaacatttccttcgtcccaatttgttaaccgttggatcgactcgaaaattntactggacgtctctaatacataaatctacatgttgaccgttgtgatctact

SEQ ID NO: 49185 - DNA, 439 bp, Glycine max
  unsure (1)..(439): unsure at all n locations
agcttccaataaccctctctaacatttgttcatgtgttcctctaaaggttcaatactttttatggagggtgttgcaccacaagcttccaactagacagaatctaccatggagggggactgttatgaatgaaaatacagagcaagatgcaacaaaaaagcttgaggcagaagcaaaagaagaagaagagcacaaaaggtcaaaaagggtaattagtaagccacgataccttgaggattatgcaaccaaatgaggctgagctgggaatgttcttctagaagcagaatccacgaatcctctgtgccgttaggggctgtctccttgttagcacaatgtccaaattcctccaaggcatataaggccaaaatctgttagaatntgtatctagaatatgcagtagaatatctatatatatgaggatatgtaattctaatggaaaaa

SEQ ID NO: 49186 - DNA, 221 bp, Glycine max
ccaagctgttctcccatagacgctgaggtcacttggactacataccagtaaattgaaatctagagcctaggaagaactccttttagtcttctatctaatttaatgtcactatcagataacccaagcggaagggggtgaataccaaagtggagaacaaattgagaagcagccttatacttcctggattggatctttcagaggggccaccatactttctaaac

SEQ ID NO: 49187 - DNA, 318 bp, Glycine max
  unsure (1)..(318): unsure at all n locations
agcttctccataatttccacatgtctcacttacaggtacaagggaagtattctccaaattaaaaaccctatattacgctagcccttcactcttccctcactctaggtactcttcttcgtggtatccaaagcccagaaacaccccttcataatattgtcaatgtaggtgaaatcccttgccacagttcccccatcaagagactngaatatcggaatatgcttccccttgagaatgtccttcgtgggtaatggggacaacgccaaagagcatgcaaaggagggcaacatcattgaggttggtgtcaacgacaaagatgct

SEQ ID NO: 49188 - DNA, 460 bp, Glycine max
ttactaaaccaatcacatacacacacacacacacacttacacacacacacacacacacacataacatgaaaatcaataattaaaagcatataattgctgcagctaaatacgcacaagcacaaaagacacaacacagagttttctctgtcaatctgagttgtaattgtttggagtattacaattctaacttattttaattattctacatcatataattacgcactttgataatcaccaactaattaatctaaaattctatttttaaactaattgtatagtcatttatgaaaatgccctccactttaaacttttatgacttaataattgctttttaatgctatgacatctagatcaccattaatgcaccttaattatctccacttaattattgctttcttctttccgcgtctaatttctattctataccacaatcaattattacaattaggcattaatgagt

SEQ ID NO: 49189 - DNA, 407 bp, Glycine max
agcttatttctgctaacttcgatctatgtgggatgcttttgttattactaatgttttttttccatggtggtagtgagattaaaaatgaaggtactggcaaaagtcttaaagtgaacggttacaaaatcaaaccttttcttgagagcccctaagtggaggagggaattgtggcgaacctctctttggtcttgccgccaattttatgttatgatgtgccttgaatggtgtgacatcctagaatttctactcgaaattttgtaagcgttacattttaaataaatatatatatgtattatccagcgtatatatatatatatatatattcggcagaagtatgtacattgagagagaaatacgcgggttagactaattagcgaagagtaatccataactggacagttatagat

SEQ ID NO: 49190 - DNA, 396 bp, Glycine max
ttgcataatgagaactgtccttatacatgctttgctattgacatctgaagtctaagagctctgggtagatgggtctgctaaagctggaaatgggactaaagtataagatgcagggaggcctactattggtgcataggataagggaacatcatcggctctgagctgggtcttccttgcctctgaaaaattaattgtttggtcattcgcattctaacagttctttatgagataggctaagtcaatgatcggtcttaagttctcttatgaggtgagagcatgagatctaacttcattcaacctacacatggctgcgattaaagctgtgaagcctatgagagaagagttagactaagccattatggttatttgtcagagatcaaaccactaatggtcatg

SEQ ID NO: 49191 - DNA, 333 bp, Glycine max
agcttaagaacccaaacttgtttctttaatgcaaggaaacatgcttatggctaggaatccaaaatttggttttaggattagaaaagcatgaaaatagggatttgtttgtaagaatttgggctgccccatgattggtacttcgcacctaagtaacgtgggaaatgcttttcaatggtgtgtagatatatgtgtaaatataaagggcatgaaattctttgtaaagggtgaaggaatattgaggtcccttcctaaatgaatgtatgataccacgggattcccttttgaatgcaagtatgtgcataatgttaaatatcttgccaatatgcataagtg

SEQ ID NO: 49192 - DNA, 397 bp, Glycine max
  unsure (1)..(397): unsure at all n locations
cccaccattttgtcatagaaaacactggttatgtgtctactattattgtgatcatctctttctccgtcattgtaggtgccacttgagctgctagatccctccacctctggacatattgcttgaaggattcatgctctttttcacacatgttctatagttgcatgctatccgaagccatatcaaaattgtactgatactgcttaacgaaggcaaccattatgtcccttcaagaatggactcgggaaggttccaagttagcgtaccatggaacagctaccccagtaagactttcttggaagaaatgtatcagtagttcctcatcttttgcgtatgcccccatcttccgacaatacatctntagatggtccttggtgcaagtagtccacttgtacttgtc

SEQ ID NO: 49193 - DNA, 467 bp, Glycine max
  unsure (1)..(467): unsure at all n locations
gatccttaagtcacctgcngcatgcaagcttcctccaatactcgtccttgaatcttcgtcagtttagtataatggctgaattctgactgaggtgatctcttggctctagattttccttgattacggccctctcaattataacctcttgttctactggtttccaataggattctccacacattttatctctaaacatattcatctcttcctttgaatgaatatggcagttcttgctcttaactcatccaatgttgcaagcggtttcttacatagactattcaagaagggaccaaacttcaatgccataatcattgaggtgagcacaacttttgggctcaagtttcaaattcgaactaagactaatgagaatctcttcatgaaatcaagtaattcatcttcttcttgcttgatgttggcgaatgccacaactatcaaatggtgtggtctgcttatcatgtattgagctc

SEQ ID NO: 49194 - DNA, 380 bp, Glycine max
  unsure (1)..(380): unsure at all n locations
cccgttctgacccaaattaatatcttttctagacagatagtaagcattcttgatggcaatgacaaattaatcatgggagagaacatggagagcatggaagattggagagaaagaaatgcttgctctttgtcactggttaagagaattcaagctctacgaatacaatgaaaagttgcagaataaaatgaaggaacaaaatgggaaataattgtttgtaatatatagaaaccttgtttgtaacacaagagtttttttttcttacattgnatctttgggctntggctatttttcataggggtggtcgacctgatgaacctgaaccaaagtgaaggagacaatctgggttgttttgtaacatatataatgggcaatgatgatct

SEQ ID NO: 49195 - DNA, 416 bp, Glycine max
  unsure (1)..(416): unsure at all n locations
agcttaaacaaactaaatgattaaagaattcttctngacattgtattttccataagtataatcctcaattgataatgtcattggttatatatgtttctttttcgctgaaaagtttaggtgagttgaattttaggagctcttcaagattatgatagacctcattcataaaaggcttataaagatacttatatatatattacattatcacccatgaacaaacttatcaaattgatagcgaaaatcacactcacatccttttggaataagtttgttctttaacaactgaatgttgtacatgttaatattatggtcaacttattcatccaatcatagtcctctttaacgtgtacctatttgtggggtgggtgtggaggtaacaacaaaatttaaaggcgtttatagattaaaatcatgta

SEQ ID NO: 49196 - DNA, 192 bp, Glycine max
tctgacttacgggtataaacttattgtcaattcaattttctcagagctctggatcatgattatgagcgtggcgatatattacaggacggatttatacattcgaagaaaaaggtaatgttcttatgggggtgagaagagcgttccgtcttcaactttggagctgtttcacgataaagtgaggacactgagtcc

SEQ ID NO: 49197 - DNA, 364 bp, Glycine max
atccttaagcgacctgcggctgcagcttgagcaatgaaatgacatatcttatatcacggatgtccggttgagtcccgtaagatatcgagacgctcaaaatttagatccgaagctctgagaaaattgaattgacaataactttatacacggatgtccggttgagtcctgtaatatatcgagacgctgcaaattgaaaacggaagctcgtaggaaattcaaacgacaataactctttactcggatgttcgattgaatcgggtaatatatcaagacgatcaaaattgagactagaagctttgagcaaattgaaatgacaataactttatacacggatgtccgcgtgagtcccgtgatatatcgagac

SEQ ID NO: 49198 - DNA, 404 bp, Glycine max
  unsure (1)..(404): unsure at all n locations
taattcggtctttaatgattacattgatatntttggtatatttattcatgaatactgatttcaggatctaacaagtactattgatgccactttgcaacgaacaatcatacacgataacaattttggccaatatatagctattgctttctcttagttttgtgagaggtaagtttcttactgtctgtgttgcataaagtttaattttttattgaattaaattgtatactccgtagaaaatgttattttatccctttccttctcactccaaatttaatttgaatattacattacacaatgttgtcaatatgatgtttttctttttttgcattttaggttaccaataattttgatattcataaatttgcattgtattcccatgtgttgttaatatgtgacactggtgt

SEQ ID NO: 49199 - DNA, 227 bp, Glycine max
  unsure (1)..(227): unsure at all n locations
tataaaatgagaagttcntattcattacgttatctaaaaatcttgggatggatccaagtgctccgatcatccatttgcatactcatgttttggtggcatactcaccgttgtttatttctttaggaatttcatcataactaagaaaacaccaaggcacccctataacactcgatccagaaaaatggataatgaagagggcatgcaggaacagatgaaggccgatctat

SEQ ID NO: 49200 - DNA, 356 bp, Glycine max
acttggtgcagtatcatgtgtacatccctggaccggaattattatatttataagtttcatctcatgtgtgataatggtcaatacatttctagaggtttcaatcgggtttgaacccgtataataataacgtgatgcttcgtattgctggcgcctgttttatcatttgctttctttccagcgggcggagttccactttctacaggaccattttcataggacactgtattgagctgaccctgcaaaacaaagtccatctaatgtgtaaaaggttgatctatagcttttaaaacgaacactaagaatctgaatatctgttgttgtggagactttattgatttgttgtaattaactacata

SEQ ID NO: 49201 - DNA, 363 bp, Glycine max
agcttcccatccatcaaaacattattctctctctccaattgaaaaccgtagaagacatcctgaatgcagccctgactgcaaaatttaagaaagttacataaaaattatttgttaaactataaacaaagaaaagtgagtttgatgcctaagatgtaagcttgtttattgttaaaatttatgatgggaactctatcatactaacccatccagaattaatatttctcagccaaccatttttatcagttcaatgctgtaaaaaaacattaatatcctagaaacaatgtaagattatatagtggcagaaactttcaattggttgagcctcacaaatcataacgattaggcatcggatgccaatttaaa

SEQ ID NO: 49202 - DNA, 457 bp, Glycine max
  unsure (1)..(457): unsure at all n locations
cagcttaagaataatggtctcaacaaactgcttatttctatattgaaattcaatcaatagacctccaatctttaatggagagggttaccactactggaaaacccgaatgcaaagttttattgaggcaatagacttaaacatttgggaagccatagaaataaggccttatatacccaccacagtagaaagaaccacaatagatggaagcacaacaagtggaagcacaataatagaaaaacctagagatagatggtctgaagagtatataagacgagtaaaatataatttaaaagccaaaaacataattacatctgccctacgaatggatgaatatttcacggtttcaaattgtaagagtgctaatgaagtgtgggacactctacatgtaacacatgaatggcacatagatgttanaagatctatgataaacacattaactcatgaaatatgaactatt

SEQ ID NO: 49203 - DNA, 426 bp, Glycine max
  unsure (1)..(426): unsure at all n locations
agctcgcatgagaggctntagaattattatttaacatatgtggggttntagaataataagatgcatttaattttcataataattgttatggtgctctcgataaaaaaaatgtaggtggttggttggtttacatgcaataattattattattactacaatgcaattttagatagtgtgaattattatatttgttgaacatcaatattaatattctgttatgtttggtagtttactacattcatttgtttctttattctgaaaattctattgattttattttgatcttcttttgcaagacttcatatatatatatatatatatcaaaaactatgaggtggacaaatctttggctcaaatgtgattctcaacttgtaatcttagcttttagtaataacaatatagttctttggaaactcaaaactaaat

SEQ ID NO: 49204 - DNA, 378 bp, Glycine max
  unsure (1)..(378): unsure at all n locations
tctcggctcatgctgngaacgcctntagctcaacacttctgcagtctaaggcacccacccagagggaagctccccaagttccaactccgaacgcgactcgaccagccggtaattccaacacgacaaggaacggccctccgaggccgttgccggagttcaccccgctcccaatgacgtacgaagatcttctaccatccctcatcgccaatcatttggccgtggtaactcccggaagggtcttcgaaccccctttcccgaggtggtatgaccctaatgcaacttgcaagtaccatggnggtgccccggggcatccatcgaaaaatgcttgcgccttaatacaaggtccaacatctaatggatgccggatggctgactttc

SEQ ID NO: 49205 - DNA, 422 bp, Glycine max
  unsure (1)..(422): unsure at all n locations
agcttaagaaaaagatggcctcagtattcttcttatttccagaagggaattctatcaatagacctccaatctttaatggagagggttaccattactggaaaacccgaatgcaaatttttattgaggcaatagatctaaatatttgggaagccatataaatagggccttatatacccaccacagtggaaagagtttcaatagatggtaggtcatcaagtgaaagaataactatagaanaacctacagatagatggtctgaagaggatagaaaacgagtacaatacaacttaacagccaaaaatataataacatctgccctgcgaatggatgaatatttcagggtttcaaattgtaagagtgctaaggaaatgtggaacactcttcgattaacacatgaaggaactacggatggtaaaagatct

SEQ ID NO: 49206 - DNA, 391 bp, Glycine max
  unsure (1)..(391): unsure at all n locations
acatgggaccaactcattttattttctataagaagtcgtatccaatcaaggtctgagagaccatacaaggttcctaacgatttctaattatgtgggccattaagtctatcatatgctgacaatagccgagaagcccatgaatctcttcgggggcggagtaagtgtctgccatcgccttggccttggctaacaatcggggaagttcttgactcccgttcaagggaagagcaaaccgatccatccacatggttgcctcttggtgtaaagagtcgatcacccttcctctaacctctntttccgcgtatacttgngcatattcgttcgcaatcctatgctcgtgggccgcggctagacctaactcttcttggtacttggcgatgatagctagcat

SEQ ID NO: 49207 - DNA, 332 bp, Glycine max
atttattatgaaaacattcaagttcaaagagacttggaactcatggcttttttacctgtttccccacctagcatgcgactctagaattatgctttcttcttgcggtgttattggaccctgcgtgtggtctggcctcaagtaattcacccatcttaatctgcagctcttcccatttcgtttagtggtgtggagagaataataattgatcaatcatttggacaaaaaaagagatgataaaaacgatgatgaagaatgatactcatgagtcaagagttaagaataatataaaacatgatctccaaaggctaaatgaaaaacttatgtgtaagggt

SEQ ID NO: 49208 - DNA, 407 bp, Glycine max
  unsure (1)..(407): unsure at all n locations
agcttgtatgattatggcgtacccatattttgtggactaggtgacgatcgggcgatgacgcaaatcaactctcccacatccacaaatcaaacatgaacccaccatcttcagttgcccaccttcaactgagctcatgtacccccacgtagcccttatcctcgttcctctcagcaccgggtccccatcaacccctccaagcttccacaatatccaagaaattcaatatccaaacatcatgaactaccctaaaccaagaaaacagggcagaggcagaaaactctgcccaaaactcattccaataccacagctttccctactcaaataccccagtaacattctcttctttccgattcgttaaccattggatcganctcgaaatttattggaggccctagtacataagtcta

SEQ ID NO: 49209 - DNA, 326 bp, Glycine max
gaaggtcttaaattttgatgagactctatcaggggaaaagagaaagttgcaactcttggagctgatagagatgaggttgaatacttatgagtcttcaagattgtacaaagaaaaagtgaaggcttgtcatgacaagaagctgataaagaaagaatttaggctcaaccaacaagttctgctatttaactcaagagtgaagctatttccaggcaaggtaaagtctaaatgggctggaccattcaccatcaatgatgtcaagccttatggagcagctggaattattgacccttagtcagaaactttgaatataatatggatagtgaatg

SEQ ID NO: 49210 - DNA, 318 bp, Glycine max
  unsure (1)..(318): unsure at all n locations
agcttgtgtgaagaacagatncnctcnattcatagcttgcaggaagtagcttagcaaaggccaatgttgagtgtacagcaattcattgagaaggtggcctggcctggggctcgacctttttttgtgggggataatgaaagtttaatagcccaggcacctcaacagcatgagccaaaaccaaaaaatgatcactcatctgaagccaccatctctggagctgttgattgtaaaaaaagaagattaaagacgagatccaatgaggctgctcatcatggaccactgccagcgtcagctgatgcaccatttccaggagtggat

SEQ ID NO: 49211 - DNA, 447 bp, Glycine max
  unsure (1)..(447): unsure at all n locations
actatatatccgcaccaatggtctagtttagggcccccccccctctctccctcacgggagactctctctctctgctctctctcttctatttttcgtttttagtttgaggctctcttctctttctcttttattttcgttttttttcaattgcagctcagacttttagttttatcaataaaatttcattctctatttgattaatggaaggctaagtccgcagcgttgttttcccttgaggatcaagcacagttctctttgaggttctattattactgttaaattctgtttagtttttcctcttcactaattactttgaatttgttgcttttaattcatgcatgcttagtgcttggattaatgtctctgcgcttaatnntacgtcatgcttaatgatcgcttatgagtaattggtgtatgttgatgcttaatacataatgaatgccttat

SEQ ID NO: 49212 - DNA, 402 bp, Glycine max
agcttgccgctggagctgacctattaattgttctaactctgtgagactggtgagccctatgctcttgaccttgactggatagaacctctttttaagtgaatgctattgacttgatcccatgttgtactaaagcgaaataaaatgtagctgcgaatcaaaactgcgacatctatcatgggtggaatggatgaatgcctgaaggagtgcatatgacacgactgtaatttaagagtgcgggggcccaagacattgtctactttgtagacacaacgtctatgggtagcaaagtgccccaacgtatgtatttaaaacggtgacccagaccttccattgatttgtctatagaggggatcaagacacaacccctatgcgatgcatatgcataaggcgcactatcatgac

SEQ ID NO: 49213 - DNA, 264 bp, Glycine max
tttcggacccccgacattccggagcagcctatggaaggagagacatcccctagatgaagaacatacctcgataaggaccgatgctatgcataaaccacaagacttcgatctgaggagacggtgaagtcggaaactacaggggaggagtgcacaagggaacaaagaaagggggagataaaacaaggaacaaaaatggcaaaaaaaggtaagagcggaatttcacaaactgttatttaggaaagatgtcgacagagcagaaagagc

SEQ ID NO: 49214 - DNA, 398 bp, Glycine max
  unsure (1)..(398): unsure at all n locations
agctttctccgcgaggtacgtttgtttatttcgtgtatgctaagnttcgctatgagtggtttgacccgaattgggagtgcatcggataacattttgtttgcgattgcacaggctccgctaacgtgcgtgtgttgctgggttctcttcatcaaggtaacactaacttatatacttcatttgacctatattattttttctgggtagtaataagtaatgttgcatgatttttagtaaggtgttattctgttcgcactataacagagaatcaaccatgatttctatagatggatccacagggttgttgaaattgtctgcaattgctttaacattttactgtccaacagagtgcgcttcactatttgttgtttaacatantttttggttcttgagcaagtaat

SEQ ID NO: 49215 - DNA, 156 bp, Glycine max
  unsure (1)..(156): unsure at all n locations
cttagagatcatgtgttataaggctacaactacattgacttcattgatagtaagcatcaactagcagacattttcactaaaccgcttgctagagataggttctttttcattagaaaggaactangcatattggatgcatctagcatagaataatat

SEQ ID NO: 49216 - DNA, 336 bp, Glycine max
  unsure (1)..(336): unsure at all n locations
catgcttgtgtaaatgtaatatccacctgaacgacgctgccatcagagacactgtctgcgtttcgattttcttctcagacacacgtgtggtctgctgtgctggattggatctcactcccagtcacggtcaagcctcttcaattggattctaccattgtgcccgcctcaattggcccgattatatatatatttctcgaccattatgacaggacttcatgatatagagatcttcatgattatcgatcancctctatatcaccttattctttgtgaataatatatgtaaaatcggttttaaaatatatctctcttatagttaaacatctaagataataa

SEQ ID NO: 49217 - DNA, 274 bp, Glycine max
aactctatgactaactttgtcttttctgcacctttactcacaaagttgaactaggcctcttacactctactaggcttcaactgaggaactttgagaagaaaagaacttgtgtatacactattcttgggctcaaatgtagagcactatcagtggagaatgtaaacactcacgtgaaactaatactctctccctcatatcttttggctaagaaaatgatgatcacaatctttgattcaccttggtgttgtgaaactccacctttatgtgatctgtg

SEQ ID NO: 49218 - DNA, 377 bp, Glycine max
  unsure (1)..(377): unsure at all n locations
atctctcttctcttaacttcctctgcaagtgtttgattcattcatgtgcagcacgagatntatgaataaatcttaccanatccgaaatcccttaatatgacagaacttcattgttaaacaatatgtcatttctcattttccacaatgaccagtgcactcncatacaaaccagtttccatgcctatttccctttcttacagtcaatggccaaagaatgctgctganactggtatataacgtcttggggcaaggctacttgaacatccaatcacttataacaatttccatatttgatcaactgcatagcatgtaagtagaatatgatttngttntttntctctagttcatcatagaagggacatctgtatatatcacct

SEQ ID NO: 49219 - DNA, 515 bp, Glycine max
  unsure (1)..(515): unsure at all n locations
gtctctactttaatcaatatcgattgctcctctntctataagtgtntaagaagtatacaagaagactctaatcgattactttgaggatctaattgattacattgttcttgagttggttcccaattttgggaagaatactttaatcaattgaacagataatctaattgattagttcattgaaataatcaattacattgtatatttaatcgattacaggcagttataattatcttctttatagatagttaccttctgttctcttcaaaatacaatgaaatgaacttctgagtgagctcgagtcacgtgttgatattatntaatgagataagagaagaacaatgcttagatataatgactcacaacttctaatctttcgattatgaagatgttctgtgataagtgacgtgtgatactttcttgagttaaaaatacacctctttagtcaaagcacggttgcgaaaggatgatcangtgtgctatcttactctagtttcgcgttagtttacacatacttg

SEQ ID NO: 49220 - DNA, 170 bp, Glycine max
tctaatgtcttaagtattcctctgacattttgcttgatggatgcctgacggttattgtactgctttgatgttggtagtgaattgtgtgcgggagtaattcgatggataactcactatcttactgccattgtatacttgtgtgacactatagctgttcaggtatcattctt

SEQ ID NO: 49221 - DNA, 267 bp, Glycine max
  unsure (1)..(267): unsure at all n locations
atgtcgcggggtcaggagaccttgngaacgtcaggtggngtgctattgcccaaaaccaagcttgaccaatcccgacccaacccgggcatagtcagtcagtgagaacctgtgatgtacctaaataggcgagctcctggcagtcaaccgataaaagaacaaagaccacaaagcaaggatgcttgtgtggtggctggccagctaagtatcttgagtaatatttggaatatggcctctggtaatcgattaccaagggtgtgtaatcgatta

SEQ ID NO: 49222 - DNA, 157 bp, Glycine max
ctgcaaacactcctgagatgaatatccagtcccattggagccgtaaactgggatctgggatatgccaagccttaatggaaaccatctgatgatgatgtgagacatggcccatagactgctagaatgtggggccgagctcagtctgtcatgacttttc

SEQ ID NO: 49223 - DNA, 64 bp, Glycine max
cgaatgttttgaatggatgccataaccctttctgtacctgcttagaccagtcatatttgtttgg

SEQ ID NO: 49224 - DNA, 201 bp, Glycine max
  unsure (1)..(201): unsure at all n locations
gtgtgattttcgaaatctgcacttatgcagaatcttgctgtcaaataggtgcagcataatattggctttgtgcagaanaatgcttgtgtgtgatgggctgtggaaagagtattacagaatgagttctggacgtttgctattagatcccaactgtcacaatgtaggcttaagtactagagacttctatgttaaatttcgagt

SEQ ID NO: 49225 - DNA, 142 bp, Glycine max
  unsure (1)..(142): unsure at all n locations
actaccttccactaatatatagaantaatactcagaaggaagggatgggcctngattacgcccatctaatctacctaattaaactaattacacaaaacaaagcccaaactcgcaacctaattgttcaagtgtagaggttctg

SEQ ID NO: 49226 - DNA, 273 bp, Glycine max
  unsure (1)..(273): unsure at all n locations
tctcagcttctctctgagttgcatgatgcctgaatgtctntntgatggcagtggtcctagatgcattgaaagaattctccaagaacaccctcttaaggtcatcccagctgtaaatggacctgagagcaaggtagtataaccaatcttttgccactcccttcagagaatgangaanagcctttagaaagatatgatcttcttggacgtcanggggcttcatggtggaacaaaaaatatggaactccttgagatgcttatgangatcttcacctg

SEQ ID NO: 49227 - DNA, 163 bp, Glycine max
  unsure (1)..(163): unsure at all n locations
cacacaccggtagtgtacagtgacacagaatgtattatcctcaatcatagagccctctattcttcttgtattntctttcaaaaccttaactatctgcaagacatanatggaacattcacgaacagaggataatgatatatgaagacttaatctcttcacatgt

SEQ ID NO: 49228 - DNA, 495 bp, Glycine max
  unsure (1)..(495): unsure at all n locations
ttggatgactctangagctgccttccatctgcagatgagcatgctgcttgctgcaacgtatcagcatgagcattatgtataaagtttggatttattcaatcaacttcacagaaatatgcaagaacacctatgatcaacatgtcttggtttgtaccttgtgaacacggaccaagctgacaatatcagatttttgaaagggaattgtggaatccatatcanaatcccttggaacaagctcaattcccacctaacacagaaagtgatgataataaacanactgtctatgagagagacaganagagtttgctgaatntaagacaagagtcttatgaaccacttcatatgagaagtgaatacagttatgtggataaggtcatctacgtagcatatgagtatgtanaattctcaagcaccatatagctacttgagcctacttcaacttcacaaagaatggtgaactganacccatacttncatagatgtcaacagtgacaa

SEQ ID NO: 49229 - DNA, 246 bp, Glycine max
  unsure (1)..(246): unsure at all n locations
agttacggcatatatgggtactcagactctgttcatactntatactcccaagcgcatatatntgtnttcttntttgtttgttatacttttgcaactttaattntatactacacctttctttattgattcaaacaaaacttcagaagaacctcttcaaattcggatatggattctctatataattgaaaagcaaaagaggaagaataagtgaatatattgtactttctgaaaaaaagtgagttaaat

SEQ ID NO: 49230 - DNA, 528 bp, Glycine max
  unsure (1)..(528): unsure at all n locations
gggaagtacagtcttcatcgtatattgctagaggggtactatgtatatggaatgaggagacattcagactatanaacaagttgattggagatgagttcatttacctggaagggacatggcatgcagatggtggcaaantcctgatagtgaatatatactcgccatgtgatgcagttctgaaaagatattcgcgagaacaaatcagacagataaagcatgcaaatatcggggacttatgcttgataataggagaatttaattgtattagaagaccctcataaagaatacgcacttgtctatcgatgcaggatgaggtattatgaangaaattatgactgactgcntattatgggtngaggtgtgtcctctgtggacgaaattcacttgtattaccaaatggacggcaaagcagatggcagagtcttgatcactaatggttgctatgaaggaacaccactatatgacatactttcatactgccatntgtgaactcctgccaatgtgccaagctttcgctttgatatggtt

SEQ ID NO: 49231 - DNA, 451 bp, Glycine max
  unsure (1)..(451): unsure at all n locations
atactcagctctagccactggactacctttgaataatccttgatagccctttgagccttgtntctctttccttgctntgaagctcnactacagccttaagtgagaaaccatgatatcaccatgtccttcaggaatnttggagctttggaatngntntangaataagtgtggngggttnttgtttcattggataatatgtntngttggctatgcttcatgatgtaatttgggccatactcgatgtacattgtatattggttaaatagtggacatgctgaatgagaatagtgttctcanatgcctacaaaaataataataataataataataataataatattagtattactaatctgaaaagaaaagaacagcatanagttgatgaatagacttaatggaaaagatgatagactcttgttctactttatgttaaatntatcttaggcttctt

SEQ ID NO: 49232 - DNA, 268 bp, Glycine max
  unsure (1)..(268): unsure at all n locations
tttattgttgaccacagagtggtacctgtagatatgtcgcgggggtcacgagaccttgtggacgtcacgtggggtgctattgcccataaccaagcttgaccaatcccgacccaacccgggcatagtcggtcagtgagaacctgtgatgtacctaagcatgcgagctcctggcagtcaacagataaaaggaacanagaccacatagcacggaggcttgtggtggctggccagctgtgaaacttgattgatatgtgagatatggtctctg

SEQ ID NO: 49233 - DNA, 535 bp, Glycine max
  unsure (1)..(535): unsure at all n locations
tctccgccttcttcttctccgcgaggcttctctctgtcatttgcattctaggtatgtggccttcttcttagctttgctcttgctatgcactgtatgtgtaacatttanggtaggttagttgaaccttacggtagatgaaccttatggtagaggacgccggantaaatggcggaagcttggtgacggtgagccttcctgaagacccgttatgggttcttgcggaacttccacaagaagatcttccggaagatttccggaagaaaggttcttccggaagtaatgaaacgattttcggaataacaggtcttccnganagctctcngaacacctctttcggaatgggttcngggatatgtactctcganatattcccgaagaaggtcttncngatacctttagtggtccggaacactttcngaagatcttcttcngaacattcgagaagacttcttcgaagtttntttttacaaatattatttgtaattgttagttattttatatcattagtgagatttacaatattaattaatactat

SEQ ID NO: 49234 - DNA, 366 bp, Glycine max
  unsure (1)..(366): unsure at all n locations
cgtaccatccgaaggaatatctgaatgtgtaggggaggtngagggtgtcctcatgagtctacccaactgagacacataatattgccacgacatgtcagttatataaacataaatgtcatcatgatcataaatgtattacaacatatatgtggacatgtcagtgatataaacatagatgtcagctatataaacaaataaagtctacattaacttcaaaatattcagatacataaatatattacaattatgcgatatgtcatatacattaccagtacaaacataagcagttatgtatgattattctcccataacccctcatcatgatcatttggatttgcatgtacaacatcaatctgatcttcacca

SEQ ID NO: 49235 - DNA, 557 bp, Glycine max
  unsure (1)..(557): unsure at all n locations
gcttcccacaagtcttaaanatgactaggaactagaatcctattcacacaatggctttgggcagtccatgaaggcacaccacctctctaaagaacaaagtctttaccacacaatcatcatccactntatggtaaggaatgaagtgagccatctttgagaacctatctaccacaacaaanatagagtccttgcctctcttggaccttggaaaaccaagtacaaaatccatggatatgtcagtccaaggagatgtggggataggcaaaagggtatacaaaccatggcttatgaccttagnattagctttatgacatacaatgcattngacaaaatatttattaacattatgttntcatttttgccaaagaaatgatcatgcaaaatgcctaaagtcttgtaaaccctaacccatcaacctccctcatgggcttctctaatcaacaattcatgcaaagaactcttagcacacacaaaatttatctttaaaataaacctcatgcttaagaatcatatgagaatntctcaacaatcaacaactaagaatatatataactaca

SEQ ID NO: 49236 - DNA, 537 bp, Glycine max
  unsure (1)..(537): unsure at all n locations
atgactgcaggngatccgacgcattcagcnttagnnagagtctnnncacacnntttcatagtagaatactcgggatgtgtctactatcattgtcatcgcnntttcgncatagaagagccactgtgagctgtcaagttatacacctttgggcgtcctcttagaagaattgtgcccccctattgcacatggtctgtagttgcatcctatccgaagacattatactgacactgtctaacgaaagccaccactatgtcctctcaagaatggactctggaaaggttcatagtagtgtccacgaacgctcccaatagacttttggaagatgttcaagatcctttttttcgctgccccatctccatatacattttaaggncttgggcacgatcctctgcttgcaattcacccttaactcggaggtataattggttagacacctttaagtacaagctatctccttctatggccgactccttaagacactttatttgctaccaggtttcttgggatcaaagtattgggatctaggcttaattcact

SEQ ID NO: 49237 - DNA, 399 bp, Glycine max
  unsure (1)..(399): unsure at all n locations
tcttccgtaacgttatgaaactatacgaacttcgtaacgatgcttgttgtctttccgtaatggtacgaaaccttacgaattacgtaatcatgcctcttttgccttccagaatgttacgaaactntacggatcgcgcactaacacttgcttttaattgtccgcacgtcacgaaacttcacggattgtgctacaatgctcttcttttcactttcggcatgtcacggaacttcacgaattgcctaacgatgggtgccaaacaccttgtcacgaatcgatacaagacgcanaatgaccataatttgtctctgcgttntgttggacacgatcgagcctgggcggcgagacacagaatgaccataattngtctctgtgtgccactggacacgatcgcctctatat

SEQ ID NO: 49238 - DNA, 169 bp, Glycine max
  unsure (1)..(169): unsure at all n locations
tgacttcgcgtaagcttgtgaaaggtctnttaccatgccagcagagagataaagtctgatcatcanngtgctactttaagggctttccacttaattccttattcagctacatttgggaaaatgaacanatcttaagtaacctgccattatnnttctggcacaaaatata

SEQ ID NO: 49239 - DNA, 277 bp, Glycine max
  unsure (1)..(277): unsure at all n locations
gaagagaaaatacaactctaaaaatctaatattggccaaattatcatttaatggactgaaattatttaatatttattntgaacatacacaagattcaataaagatttaaaaatatttcaatctacttaattcacaaaagacatgttaaaattatttattttgacatatngacaatcgagattgaaaatccatgttattatccatttgatgatgaacattgagatcacatatttagaataattttacgtccacatattgaaatacttttattttttat

SEQ ID NO: 49240 - DNA, 608 bp, Glycine max
  unsure (1)..(608): unsure at all n locations
actctgcagtgacctctgagtcttnctgcnagcatcnaccctgngngagtgatgacttctctnttctgaaggcagcatcatacaatccacccatctttntcatgtacatgtgtctnttcaaggtcttgagtntagttctcctcttgaccgcattccagtgtgctcttcttgagcacttgaacgtggcccattctcaactccaccctaatagttgggccatggtgagggcctttgaggtcctatgccctttcttcaacattcggcccagtgtgctggtgtttntgtatttcttctagatggagttaatggaccaaaaatggtggatctccttgaacatcctgtccaagaagtngttcaagttgactcgaatgtgttnntcggttgaaggaccattncttanaggttctgctactaacatcatgactgatgcgctgcatngatcttaacccggacaaggagcccgcttccgtctagtacagcttgatctaccggntaagtcttcacaggatctgtgaccctgtgagaggcaacaactattttgacactgcggctcatgaccaccggcatttctctcataatacaatcctgctactgacataagacacttg

SEQ ID NO: 49241 - DNA, 162 bp, Glycine max
  unsure (1)..(162): unsure at all n locations
cctcgcgacngatctgcgatgttagctcagaaatganacaactcagaagaaaaagtgganggaggccgatgatgcggntggcaaggtcctcanattctgacaggtactgtcccactgtccctcattgtgtcaatntgaacaaggcccctatanggtcttcat

SEQ ID NO: 49242 - DNA, 609 bp, Glycine max
  unsure (1)..(609): unsure at all n locations
ntatgaaggacctntcagtcttctgcaagatgcnaccctcttactcacaagccagtggtntctctcaagcacacaagtgtntcatgctagtgtcaattccttccaacaactagcaatcaattcccaattttgcacttcatctcattccatganatcatatacatacaatgtggatcctaaggactntattaagcttgtaacgtggctgggttagcaaagaattcattggtttttatggatgcanagcttatggtttangagagcattcacatanttccctatttcttanactatcatgacttccttgctatatccctcttntatttgttatcccattaacatcacacaatattctattanggtacaatngcttcanggtcctatctttcatttcaatgttttnntttacaatggcattgtgccaattttgcagttacattgattgtgtgatgtgtacaatccttgacatagaaagttcaagaactcctcaattaaacaaacatctttcttgacatgctttctcacctatacaaatggcaagtgtctttcttcactatgtcaaaataatcatctgtatgtcaaaagtcagaggtctcattctgtccgatg

SEQ ID NO: 49243 - DNA, 123 bp, Glycine max
  unsure (1)..(123): unsure at all n locations
cttttcttgcatnggctatgtggcaatgtaatttcaactagtagactgctacacatgttcgtagctagagggaatcatntttttatgctcagcanagataaatatatataagtaatctagtac

SEQ ID NO: 49244 - DNA, 367 bp, Glycine max
  unsure (1)..(367): unsure at all n locations
atggtggtgtatgtgctgcatgattgaaaatctgtgaagntcatatggattgntatggtactgatttcaagcttaaattcanggagttatatatgnttcttgtgtattttgatgattaaaaacttactaaatcattaccctaagggtatgtgaccaaactatgcatttntaagtgcttataacatgcatctgtgcctcttctctgaataattatccagaacgaattatctgcatatatgtatctgttaacatgtttatagttggataaatgatgctcgaaaatgggcaaaatgaatagtggtgtacgattctgctgtcatggataantgccanaattggcaaagcatttaatgtttaataaataaac

SEQ ID NO: 49245 - DNA, 124 bp, Glycine max
cacctttaaactactctttctctatgctattgaaacacctgtggcctcattggtctaagctctcatgcacttcttacaatctgaccagataccttctatgttaaaaaggtcatggagggatgag

SEQ ID NO: 49246 - DNA, 84 bp, Glycine max
  unsure (1)..(84): unsure at all n locations
gatctntgagcttctatgaggtccttcaatggtgacnttttagccttgtagttgtagcggaagatanatgagaatatgcgagag

SEQ ID NO: 49247 - DNA, 281 bp, Glycine max
  unsure (1)..(281): unsure at all n locations
gagctgccactctccttatagaaatgatgtanaatctacagccaaagactcgtgaaaggtgggtcattccaaaacatctcctgtggtctctcaagaaagtgagaaattagaagatttcagtgcatatgagtctcatatggctaccgaacctgatcctccacagctcaattctgatatcaatcagagaccaaacagggtcactaaacctcctgaaagatatggttttgaagacatggctgtctatgcattacatgcagctgaagacatagattcatatgaac

SEQ ID NO: 49248 - DNA, 466 bp, Glycine max
  unsure (1)..(466): unsure at all n locations
tgtcaaggactcacacganaagatgtaggggcgaaactcgaaactctgtctgaagcttaaatttagagatactgtaaactgctgaacattgtgcagcacagcatatttcatcagcctattgaagagcttgggctctgccataccgcgacacgtgaattcaagattgagcatggaaactgaaccatctctgccagacagaacgcgagacacanaattgttgaatntgacaacatntttaaagagggtngtatcgaatccaagataagctagacgctttcataggtncttccatcttttatacaagacacacgttngtacagcatattntgtgtccataaaatccattatgtggagcacaacacagtcaggcaactcactcagcctgtccctttcctcttctctgcactattgctcgcttctgtggctctatctgtcgcatcttcaaattactcagttctttctttca

SEQ ID NO: 49249 - DNA, 69 bp, Glycine max
tctcagctttgcttatgggttgctcttggctaatgggaaggctcaaatggcattgattgttctgctgat

SEQ ID NO: 49250 - DNA, 232 bp, Glycine max
  unsure (1)..(232): unsure at all n locations
ctgtctaggcctggattcaaggcgggctgcagcaccggctctggttccctaactgtactggaaacggntgccgnggctntatcctctatggtttctggagtttaacatgacctccgagatggaagccatntgatcttttatggccgatagatcggccttcatctgttcctgcacgccctcttcattantccattttctggatcgagtgttataggggtgccttggtgtttct

SEQ ID NO: 49251 - DNA, 539 bp, Glycine max
  unsure (1)..(539): unsure at all n locations
ngatgattcgaattatctccgctggcgacaacacgttataccagtgatcanatcgcacaagctgcaacgatntatcgttaatccagttgtttcgcctcgtaatctcaccgaggatgatcnatattgtgatcacgtcaatctagagtatgaaatgtgggaagttcaagaccaaacgcttcttgtttgactgcagtctacactttcaaagtctgtgttgtcaagagttctaggttccaaccattcctattaggtttgggacanaatccatgaatatttcagtctccacactaaatcccatgcgctcaactccgcattgcgatgcatgcagtcactcttgatgganaatcgattgatgaatattngcgcanaatcaaaggatatgtagatgaactggctggtgtaggtgttcctgtntggcatgangagtatgtngatgtgctccttgaaggatactgtctgatatgcacctgtaattctatcattgagagtaagaacacgctccatcaatngcagaaattgaagctcttctctatgatcat

SEQ ID NO: 49252 - DNA, 368 bp, Glycine max
  unsure (1)..(368): unsure at all n locations
gctgcatctccatggtggaanatcaccattgaaggacctcattgaagctcacagatctagcctccataaaagctccacaagcaagcttccatcaagtggtaatcagagcacaagagcttcaagtatgtgctccataaacctcaattaatattcagctctaccttctcctccattgttgcttcttcatatttctccatgtatctcctcatatgtctggtgctaaatgttntaacatgattctttaaagttcaccgatannactgctatgaagctagatngatttctatggtcaaattcttgtctttgtcttaccatgaatgtgtgagttaggtccttgaatttgcttgtattttatggtgaactgcatc

SEQ ID NO: 49253 - DNA, 305 bp, Glycine max
  unsure (1)..(305): unsure at all n locations
tcgcttagccacatgaatcccagcaagaggatgagtgtgcgtccttaaaagatgaacttgcttagcgcagtatgcgcgcttagcgagttctttcgaanacacatatattcaatgaatactgatgaactcgcttagcccagcaaactcgcctaacgagttcatcacattntccagaaaaaatggcatttgttntcttgcactnnttttagcctctaagaggaaaatcanacatgcaaaccaaccaaaatggcttctacagtacagacatatanntaagtctaatcttntacttcttctaaaaacat

SEQ ID NO: 49254 - DNA, 193 bp, Glycine max
  unsure (1)..(193): unsure at all n locations
cactcatgggctaagtgcgaggaagactctggaagaagatgagatgtacaggttcgctaagcgcaccacttcagttcatctgctaagcgagaaaggcacgtgctaagccaaaattcactaatgtgcactaagcggtccataagtgcactaagcgcacaagcacgaacaaggccacctatntaagcctgaaatc

SEQ ID NO: 49255 - DNA, 427 bp, Glycine max
  unsure (1)..(427): unsure at all n locations
gtctctacggggtggaggttgtgccatgttctcaaaatgtgcaatatcagaatgctcagaatcagaatgctcaaaattataatgctcaagatcaggatgttcataatcaccaataatagaatgcacagattcaccagttatggaatgctcaaaatgatcaaaaggtataaaatgatgcctaactaatatgtgaaatgtcctatctatctcaggatcaaagggttgtaagtcagatggattgcctctagtcatacactacattcagcatgcacacaactatgtgccttgtcatataaataaaggtgtaggtttgaactacagctaccctcanaggatattcaaatgactcgataatttgtgagcaaccttataaatgatgagaagatagcacaaaccagttcagacanaaattcaaagtctaactatg

SEQ ID NO: 49256 - DNA, 658 bp, Glycine max
  unsure (1)..(658): unsure at all n locations
cttatgacacccatntctgtttatatatataantnannntntcactnnttntanttatttnntnnnnnntnntnnnnnnntnnnnnnnnnnnaagacccgaaganacgtgangantgtaaccccanannnncnccnanaangaananagagagcatacagctatgtgtgggatgcttatacatatatagnacaangngaccctccatacactgatgaacaataatatatggttatgcatgaagcttaacttgataactcaacactcaccttgtagaggtgattctacatagtactgatacacctgacagtcaccgatagaaaaaccaatctgaggatatttaatngacgtgttcctccaacgaagcctgaatgccaccctatgcgtttgtgctcatacctgatagttagttagtagtgaatacaacatcaatagaagcttccatagagcgatgcgcgaaacaaatatccattggagccaattctatcaactcccaataaccacctatttgcggccgagcatgttaaatctaatcaaggtaactactgactgcgccgccataacataatctgagaaaaataagattggaacccttcttgccggacgactatttaagtaaattgaaataaccgtgtggcaatctattctgacaataacag

SEQ ID NO: 49257 - DNA, 483 bp, Glycine max
  unsure (1)..(483): unsure at all n locations
aataaccacaattagggtatctagtttttcggtgagatcctaagtattctcgcaagttctgatccaaaatgagactaatatttagttcgagacttaatgacacttaanactcctcatcatccctaaagatgtatntngcaggaatcaaattcaaactctctatgtatattcatgcctgtataaaatactttatggtttattgtaagaaattaattataatgtactaatagtttaaaagctttntatgctaccaatcaattatagaatactatgtatgacaatatnggttatttattgttctatttactgtannaattaatatattaatgtaattacttcagtgaccagtacatatccatattaataatatatatctaagagatctttatcgattatccaacaagattataatataaataattttcttctaatatttaaataaataattattacgccacttgactaatcatctgctctctatat

SEQ ID NO: 49258 - DNA, 270 bp, Glycine max
acagatgggctgctgacacccttaactgaaccgtgaattccattctcgaagtattatggacaaaaacttcaccattcaacgttcttggaacgcataaactcaaccctctcccactgttaattgaccacgctaataaataatgcttctggttttggtcatacacgaacactctgatttcctatcacaccagagaatgtatacacaactgctgactgtatctacgcatatgatcatctctgcttcacaaacttgtatccaacgatcactatt

SEQ ID NO: 49259 - DNA, 642 bp, Glycine max
  unsure (1)..(642): unsure at all n locations
atatgcggatctctgagctactccgctgcaagctgtataatataaccaatatcagtccacttagagacttagtgaagatatctgccaacttatcattggagaaagtggggtacattngtttcatattggggtacgagaatcttgattgaaaatatcctttatgaattttccataatgctctattntagtttggcctattaatccttgagcttgacttgattntattcattntttcttccataaactactttcagggtcttatctcttcattttttatttggtggttctctcattctctatcaatgntgngagcgtgtattgatattcttttctattttatntaattatatnttagtgggacgttatgcttatcattttctacatctacaactttcatattcatcaataaaataagtgtttatatgccatgatgcaaatccaaatcacaatntgctttatnctaacatttttaatatatttaaataatgtgtgctctaaagtataaattaacatgtattctaatattatntcttcatgtcacaatcttaagaaagactacnatataaagtgtgagttntttttaaagtgtccttaaaaaagtctcttaacacatggtgttgctataaacaatatatcaatatt

SEQ ID NO: 49260 - DNA, 507 bp, Glycine max
  unsure (1)..(507): unsure at all n locations
caacatcttctattcatcactagcttcatctnctataaatcttanacattccaccattttttatccgttanaacatccacatttatgttcacacttcacagcctctagaaggaaaaaaaaaatagaacttgcggctntttccccccagcaaaaatagcaatataccatctatnttctcaaataatattcagaaacaagagagcanaaagcanaagacttattnntccatttaaaaagaaaaataaagaagtgacacttttaatncaattatagagaaataaaatcaggatctttgngaactcaanttagctcctcttcgttntatcccaagaaaaaaagataataaaactagaccttcagttttcacttcacatgatacaatacaattgaaatctggtgaaaaatatacctataatatgcttcnaattctaataactatatgtaatatactggtgaacagaagttgagtactcgcagaatgctatcatctcatctcactacatacac

SEQ ID NO: 49261 - DNA, 410 bp, Glycine max
  unsure (1)..(410): unsure at all n locations
tctgctgaccaccatacagacctttgcccttccatgcagcaacctggagcaatngagcagcctgaagcttatgctgcaaatatttacaacagaacctctcaacctcagcggcaaaatcaaccacagcagaacaattatgacctttccagcaacagatacaaccctggatggaggaatcaccctaacctcagatggtccagccctcagcaacaacagcagcctgcttctttcttttcaaatgctgctggcccaagcagaccatacattctcaccaatcaacaacacaacaaccccagaacagcaacagtgaggccctcacaccttcctcgagaactggggcaatgattgcgacatcagttcacagagacgagctcatcaagctaccatcaatgacatactctcatgataca

SEQ ID NO: 49262 - DNA, 198 bp, Glycine max
  unsure (1)..(198): unsure at all n locations
gcgttaagggcacnataactgcctaaaaaattacgcccgcctgcactcattgagacgggtgattattaacatctgcgactggagcatccaacgctgatgactgatcgcacgctcacacctgcgctgctatatttgcctgggaaacgggcaaaattgctatgcactttatcaactgtaactaccaggatgtgacaaacg

SEQ ID NO: 49263 - DNA, 64 bp, Glycine max
  unsure (1)..(64): unsure at all n locations
agttatcttctaactccttanacttcagtcgctgaaacaccactactaatatttttctagtagt

SEQ ID NO: 49264 - DNA, 389 bp, Glycine max
  unsure (1)..(389): unsure at all n locations
tggtcttccataagatgtgccattatgtgcacttgcagtgtatgttggtgaanacaggacaagatacattgtcccaatntcatggttggctcatccacaatttcaaagcttgctccanagagctgaggaggagtttggcttcaatcatgacatgggccttacaatcccatgtgatgaagttgtttctgagtntcttacctcaatgattagatgagaattaagggataagtgaaagaagtacacttattgtgcatttgatcactcatatgaggcttatcatcaacaactaaaagctagctagctccttttcaagtgcagaattctaagagactaatactgggttttntnnttttttttaactttttggattgtaattgatatataccttg

SEQ ID NO: 49265 - DNA, 349 bp, Glycine max
  unsure (1)..(349): unsure at all n locations
ttgatcatcctactangacgactgnagaaactggngcaaatgaagagggtgagaaagagggagaaacccatgctgtgactgccattcctatacggccaagtttcccaccaaacccaacaatgtcattactcagtcaataacaaacctcctccttacccaccacccagttatccacgaaggccatccctaaatcaaccacaaagcctgtctaccgcacttncaatgacgaagaccacctttagcacaaaccanaaaaaaaacaccaaccaagaagtgaattttgcagcgagaaagcctgtagaattcaccccaattccagtgtcctatgctgacttgctcccatatctac

SEQ ID NO: 49266 - DNA, 180 bp, Glycine max
  unsure (1)..(180): unsure at all n locations
tgatgctcagaaacagcaatatccaccactccttcagttggtctgcccangtatttgntgattacagcangggagaatctaacacattttcctctgacnaacactttctgatactcatcactctttcntgttgtatgtcagagggaatgtngacaatgaattccctgactagacttttat

SEQ ID NO: 49267 - DNA, 436 bp, Glycine max
  unsure (1)..(436): unsure at all n locations
tctgacattcaccacagattctgccttcttctattttcagattgngaatgcctctcacagcacctttgtcaatgattntcttcatgcctcttaagtgcagatgttncgaacctttgatgccataattgacttcatcttctttggaggatagacatgtggaggagtagcttggttcttggggtgtccatanngtaacaatgtcctttgatctgctgcccttcattagaacttcactcttctcatttgtcaccaagcattcttgacttagtgaagttacanttgaatcttcatcacacagctgactgatgctgatcaaagttgcagtcagtcccttcaccagcagtacttttgtcagactangaagtncatcatgaactagctnntccattccaatgatctnttctttagagccatctncaaatgtcacataactagt

SEQ ID NO: 49268 - DNA, 603 bp, Glycine max
  unsure (1)..(603): unsure at all n locations
atatgttgatcactcgtacacgngatcctctgagtcacctgcggcatgcaagcttatactcatntntccatctctctgtgtatgagcggatgaccgataatatttatcctcctgttntcttagatctcacttgatggagagagtagggatgtactcattgacacatactagcactgtgtattatctctaccatttctcctgacatcaaccattcatactataccgtttataggactatcataaataatcattcgacataaccggggcaactccgggaaaacttatccnaagattactaggctcacgaaatgctatccatgtgtcattcgtgacatatattacaactcgtncaatgatatgtatgtcataacagcagactttacaattgtacttaaaggatcactcccctacacaaaagatcatggccaaaaccactatctgagggagcttcataaatatcacagtatgatgtaacgtcccttagagagactccttacacaataccatatgttttattattattttaacaaggatagtgaaatgaaatctagacgatagatttcagtgtagatctatcatgccagatgctgttacaagagccat

SEQ ID NO: 49269 - DNA, 389 bp, Glycine max
  unsure (1)..(389): unsure at all n locations
cgctgtacacaagacactgtactgtgcatagagagagtgtggtgaccacggacatcttctgctacatatattcagagaatacaactcgcatgtgtcaccttgagctcagagctgacgtctcactgtactatntatgactgacgcccatagcagaggacaaaagagattaagaatggcacgacgagacactataatacttgcttggtgtgcgatacggcacgaatagctactgaccacgacatactgttgacgatacatcatacttgcgacgagtactgtccatcgctatagacatgaccagagctaagcacgggttttaaactggcattgcgcgcatccacgatgattatcttgctatatcaaacatatctccatgctgtgttgttcta

SEQ ID NO: 49270 - DNA, 245 bp, Glycine max
  unsure (1)..(245): unsure at all n locations
tgcagctcacaccagagagtgcctggataaagctagagaggaagcttcaatcgaagaanagaatgagatagagganggggcatgannatgaanggagaaaagaggagagaagttgacctttgaagtgtgtctcacaagtttcacattcatcaaagttatgacaagttntacacatgcttctatttatagcctaggtcactaactaaatgaaagcacccttgagaagctttcatgagaagctagag

SEQ ID NO: 49271 - DNA, 584 bp, Glycine max
  unsure (1)..(584): unsure at all n locations
acaatgatgagcatctgngctgcagctatgatcatgatgtgatccttgcgcctattgctaacatntcttttanggtgganggaccattgataaaatgtgttccanagtattttattgtatnttaattaatatntgcttgggtggggagagnttgcataatgcttcaagtgcatgccatanaggtataagagtgggaagaattttgcatggagttgatgtaaacattacaatggtacaacttataaccgggtataatgttgcctcacaagcatactcctctaatcnaaagggatcattagttataacanatatagtggctatgagaggccaaaacacagtactagtagcttagtagcatagcttccatggccattaactgtagaaccatagtgagttgtaaatcattctcttattctcccattgnggactcaattctatgtcttgctattngcatcatagggctggtctggttgctactaaggaccatgttgatgtgaatnactcacatgatgatgttcttgtgtgatganagtgttgatggagctattgaaggaacaattcaatgtcctatgctgatgtggaat

SEQ ID NO: 49272 - DNA, 234 bp, Glycine max
  unsure (1)..(234): unsure at all n locations
tcactcaacttatgctcatatntcttacagaaattgcaattcctcttgaagaactnnttgttaggctatgcacgctgaactgcattcccgaccttgtcgttattgaattctnttatgttatctttcttcacatttctagtaccagataaggctagaaatgagtccaattgaatgccaagaatgattcaacatgaaacttgagtagacttgaggatatagtactcactcatctta

SEQ ID NO: 49273 - DNA, 127 bp, Glycine max
tcgtctcatatattacgggtctcaatcagacatctgaggaatataagtatcgtctgtttgaattgctgagagctcaacattcaattttgagcgtctcgatgtattaccggacttaatcacacattcg

SEQ ID NO: 49274 - DNA, 174 bp, Glycine max
  unsure (1)..(174): unsure at all n locations
actcggatgtctgattggagcccgtatacatcgagacgtctcgagatgaatgttgaagctctcagcannatcaaacgacaantaacttttactcggatggctgactgagatccgttaaatatcgagacgctctaaactgaatgtcgaagctctcatcatattcaaacaacaata

SEQ ID NO: 49275 - DNA, 379 bp, Glycine max
  unsure (1)..(379): unsure at all n locations
gagaatgtgaatgtatgtatacatgactttgatgatgtcaaagaagaatctaacaaggctacttcaaatgataagcattngcttcaagaataattcaagattgcttcaacaaacaaatccttgtttcaagattcactaaagaccaagccttgccttataacaaagtgctntcaagacatgcaaggctctggtaatcgattaccaggaagtgtaatcgattacccgaagacagggttgagaaatagctgttgaaaaaggttntgaatttgaattttcaacatgntaatcgataccatatgtctgtaatcgattaccagcaacgaaactttgganatcanatttcaaagcataacccttcanatataactgtgtatcgata

SEQ ID NO: 49276 - DNA, 204 bp, Glycine max
  unsure (1)..(204): unsure at all n locations
cctctcctcttctccttntccttctactgcatctccatggtggaaaatcaccattgaaggacctcattaaagctcanagatccatcctccatagaagctctacaagcacgcttccatcaagtggtatagggttttagccttgtatttcaaggcactttgagtagtctntgtagtagggactntnttttttgtattntcatgtat

SEQ ID NO: 49277 - DNA, 110 bp, Glycine max
actcgatccattgtcgataagtacctttactactacgtggtccatacatctaaccgacacatgtagagccttgttgtgtcctcttccctcacgggaatctcttcttccgc

SEQ ID NO: 49278 - DNA, 581 bp, Glycine max
  unsure (1)..(581): unsure at all n locations
acatagggctcttagctactgccgcatcacctaaaaaaaagaggctagctattcctattctcgattggaatttatcaatagacctncaatctttaatggagaggggtaccactactgtgaaacccgaatgcatattttatcgaggcaatagatctacatatctgggaagccattgatatatggccttatataccctccacagtagaaagagtttcatagagggtagttatcaagtgaagcataaccatataaaacctagagatgatggtctgagaggatagaaacgagtctatacacctaaatgcaaaacatattacatctgcctatgaatggataatattcagagtncacatgcaaagtgctacgcaatgtggaccttttcgataacacatgatggactacagatgttanagatctatgataatgcactactcatgatatgaatacttatatgaatcacatgatatattagagttgcaaagagattcacacttgtaatatctgcagctatgcgagaatcaaatgaaatctataacatgggctaatgttagttatatgcgtcccataacggtttcgtatag

SEQ ID NO: 49279 - DNA, 208 bp, Glycine max
ctcgaaatgtgatcccatctgatcattgcatcgagattctaaatgttctctccaattctagatcttttctcacttcatcttccagttctcgtcgttgtgcaaatgccatctcgcaagcaatgatatctctcctgattccttccttctctagctctcgccatatgttctctttcttcaactctcattggaacacttcattgacattaat

SEQ ID NO: 49280 - DNA, 158 bp, Glycine max
  unsure (1)..(158): unsure at all n locations
ctccactcaattatatgaaaacacttaaaaattanggaaacttgtacctgtttttgcacctttctatttcatttaactttccgtccctctatctctcctctctttctatgtgatgtgggatataataattcacacacacacacacacacacacatata

SEQ ID NO: 49281 - DNA, 277 bp, Glycine max
  unsure (1)..(277): unsure at all n locations
ttttaaactatttcctataatatttgatatgatatattggttggacaagtaattcctacacacaatacatgaacttgtatgtcgaaacttgtactcgtaaatttaaaattgaacaatgggttctaacaataataatgtctgatgatgaacatntatgatttcttattatctcgatcgcattcgcgtattaaatgtaaatatcttatttgtcagctaatcccaagatctatacactttaatactaaactagatggatcctataatcaacacctttaac

SEQ ID NO: 49282 - DNA, 645 bp, Glycine max
  unsure (1)..(645): unsure at all n locations
aaagtgatnaccngtagcacgngaccctctanagtctacctgcnagcatgcaagccttgatgaatatagtttcgccaatgatataatcatagtgggtctgaaattatgcnaacttgatcatcttgctttgacaaataacaagcctatggcacatagagaggatgagaacgangaaggaacncatgctgtgactgtcgntcctacatggacaaatntcccaccagctcaacaatgtctttacccagccaatatcaacccttcttattacccaccacccaatcaaccacagaggtcaccctatatcagccacaaagcccgcctgccgcacattcaataccagatgccacccttaacatgaaccacaacaccaaccagggaaggaattntcagaaaatatacctgagaaatcaccccaattccatgccatatgttgacttgctcccctatctgcttngatatgcaatggcagtcataagcccaacaaagactcctcaacctctggttctanacatatatacccccacgtgacatgtgcttatcatggnggagttctgggcattccattaacatttgataccctgaacatanggtgaaagctaattgatgcggctgctaaattgaggggatatcctcgtgactctatct

SEQ ID NO: 49283 - DNA, 649 bp, Glycine max
  unsure (1)..(649): unsure at all n locations
caatttggagcatctgcngcatgcaagctantatnntctaataagtcaaaactntctatagagcttaattgatatatgagtcannattgagttattcattatttacacatngtaactacaagcttaaagagcttgactttgttaccgccactaatgtgtccatgttaggatttcaagttactgtanatattaattcttactacttgnatatantttttctttgaatttttttacccttaagtgacatcaacgttcaccccacttgattatgtaagaaatataattnngtgtaaagttatacctgtgtatgaaatctatattntnttatatttataattcanatattatgatatttacatatacagtacctattaattgtatttttaattataataaaggtttcattanaaaactcaaccttttttttgtattctgtttagggtaagggattgctactacatgcangaaaccactctatatgcacattcaacaaaatcattataaccctttatctgctcatnctttcataggctagagacagctccactaantacanaattnggtatatagaatctcatagagaaagtntaattttaaattaaaaagaaatatgantgcaacacggggagttattcactgaaaatatatn

SEQ ID NO: 49284 - DNA, 385 bp, Glycine max
  unsure (1)..(385): unsure at all n locations
gcttattcatcatcaaccactcgatggngttntaattattttattccctaacaccaatgttcccttcctcttgaagctccctcanaagtaagatatcatcaaccacagatcgacaaaagaatggaaccaataggggtcatatgaagaacaaaatgactcctagagaaaataaganncatgaatagaagaagttgcattggcatttggctcatctggggagaatatctgtttttaaaggagaaactggctacaattctatgttctttgtgtgtaatgatataggaggacatcaatcataaataaaattgttaaatgtaataaatgtaaataaactcagttattgaaaaatacaaaattataaacttattttttctaaaaaaacaaa

SEQ ID NO: 49285 - DNA, 104 bp, Glycine max
  unsure (1)..(104): unsure at all n locations
atcttacngcagtacattntgagatggttttgngacaagtcgtccctttatacttgtcgaagtccggcactttgaacttcgagggaataacaacatcgggtact

SEQ ID NO: 49286 - DNA, 249 bp, Glycine max
  unsure (1)..(249): unsure at all n locations
gtgctgagcaccagcagcgcttcgaggccattaagggatggtcatttctccgggagcgacgcgtccagatcanggacgacgagtataccgacttccaggaggagatagttcgccggcggtgggcatcgctggttacccccatggccaagttcgacccagacatagtccttgagttntatgccaatgcttggcctacagtggagggtgtatgagatatgcgatcctgngtgaggggggtagtggatccca

SEQ ID NO: 49287 - DNA, 250 bp, Glycine max
  unsure (1)..(250): unsure at all n locations
tcatctcgtgtggaccttctcaactcacaagtgctntgtcgacactatcacatagctcaacagaaaanacgancgctccaagaccataatgcaactcatgagcatcaatgacactatcagtgaagttgcattcatcgtggatagaaagaaacatacaacaagaagttgtagaggacattatgtgtaggatctatttattactatgaaccttaaattaatctaaggattaanaaacattgtgcatcataca

SEQ ID NO: 49288 - DNA, 114 bp, Glycine max
ctgaaatactattaacttcaggtctattattgagagctttgagttctgagctgctgacattttcacatcactcatccagtcattccattaaccctgagttatttcttgtgctgg

SEQ ID NO: 49289 - DNA, 213 bp, Glycine max
  unsure (1)..(213): unsure at all n locations
ctgtgtggtggtcggcagaagagcatataccacagagtctggcgacaggttcagatttttgattncatggccagtgggttactangttaaccaaggcatctagtttatcttcaagcttcttaatctcggctgatgaacattaattcgtggctacttcatgcactcttctaatgacaatagcatcacttctagtactaaattgttgggagtttg

SEQ ID NO: 49290 - DNA, 342 bp, Glycine max
  unsure (1)..(342): unsure at all n locations
agctgagtgaggaagtgtagaagggtgaaacttcttggctttattcgttgaccacagagtggtacctggagatatgtcgcnggggtcaggagaaccttgggacgtcaggtggggtgctattgcccanaaccaagcttgaccaatcccgaaccaacccgggcatagtcagtcagtgagaacctgtgatgtacttaaacaggcgagctcctggcagtcaacagataaaaggaacaaagaccacaaagcaaggaggcttgtgtggtggctggccagctatgaactntgatngatatatgggttatggcctctggtaatcaattatcaagggtgggcaatcgatta

SEQ ID NO: 49291 - DNA, 128 bp, Glycine max
  unsure (1)..(128): unsure at all n locations
acctagtaaactacccatcatatctcccaaacaccccatacccacgaaatntatgtgagaagaagtctacctaagcctgannattgaagtcccacaacgtagaggtgcgcttcacaactccgaaaatg

SEQ ID NO: 49292 - DNA, 280 bp, Glycine max
  unsure (1)..(280): unsure at all n locations
tacaagagatatgaaatgaaaataggaaaaggaaagaaaagctgggttccctcctagtaagcgctcttttaacgtcactagcttgacacatcgtcctgttatccaggatccaagcgaagaacaatgttcaatctttccatagctccaccatggtattgnttcaaccattgtccgttcactacccatgtcctgtcaagatctttagattgaggatcacaaagctccacaactncatattgtcaaactctattgatagtaaatggttcagaaccacttgatt

SEQ ID NO: 49293 - DNA, 261 bp, Glycine max
  unsure (1)..(261): unsure at all n locations
atggatcaatgcatataccacaagggtagtgggagtaaaatatgttntcttgctntatatgtagatgaatatttacttgcacccaatgatcggggtttgctacatgaggtaaaacaatttctctctaaagaatttgacatanaggatatgggtgatgcatcttatgtcattggcattaagaatcatagagatagacctcaagaatatttaggtctatcacanganacctatattaacaaaaatttagatacatttcgtatg

SEQ ID NO: 49294 - DNA, 606 bp, Glycine max
  unsure (1)..(606): unsure at all n locations
atacgctggngatcctctgagtcganctgcnggcatgcagctnganatgaggaagtgtgganaggtgagacnnttctacttttattcgtgaccacagagtggtatctggagatatgtncgcggggtcacgagaaccttgtgatgtcaggtggggtgctatngcccaanaccaagctngaccaatcccgacccaacccgggcatagtcagtcagtgagaacctgtgatatacctaaacaggcgagctcctggcagtcaaccgataaaagaacaaagaccacanagcatggatgcttgtgtggtgactggccagcaataagtcttgagtgagaattgngatatggcctctggtaatcgattaccaangggatggtaatcgattccaagaacttaaagtgaagacaggatgctaagatgccactggtaatcaatacaacggagtgtatcgataccaggctgaaatgagacaggagctagatggctctggtatcatcacgagggngaattgtaccaggctagactggactgatgtgatgggccttgtatcatataagctggatcatacacaagacaaccctgtatgattcttctgttattatcacgtgtg

SEQ ID NO: 49295 - DNA, 258 bp, Glycine max
  unsure (1)..(258): unsure at all n locations
gacatctgatgacaatagactacagttgttagaaaaactcacctcgtcgttacatacgacanaataacatggtggtgtgtatagatgacatcatccatatattnaagacagtgtccnttgaagatatatctttatcaaaattaataattctctggtgataaacatacaccaccctctcctcgatgaagataaagaaagtggattcttgctcttcaaggaaagaagcgttgaacattatgaaccaattcttaatttcat

SEQ ID NO: 49296 - DNA, 108 bp, Glycine max
actttaatggatatggttaggagtatgttaatcaattagactttacccgtatgtgtgtggatgtatgccttgaacactggcatgtatttgttgaatatggtttctaat

SEQ ID NO: 49297 - DNA, 289 bp, Glycine max
  unsure (1)..(289): unsure at all n locations
tgaccacagagtggtacctggagatatgtcngcggggtgaggagacctttgggacgtcaggtggtgtgctattgcccanaaccaagtgtcgcaacctacccttctgcgggagggcgatgcgtgactcgcgggatngcgtgtccacgaaagggaatacgcgcggagtcgccaccaacgtttatttgatgaanacgttggaataacccggaaagacgtgatctacgaatttttaagtgaaagggtcgggagttgtatttacgcacggtgaatgtatatcaccccacacgtc

SEQ ID NO: 49298 - DNA, 428 bp, Glycine max
  unsure (1)..(428): unsure at all n locations
tactcagcttattctgacctganaagaggatgcgatagttgcacanaagagatagcttcctgatcataatggagctaacanannatttcatgcaagtggaccttattctaataattctgactttgcaatagcctttatccctcttccattcccacctagagcaattccaaacaaaaagatggaagaagtggaaagggagatcttggagaccttcagganagtagaggtgaacatacctctgctagatgccatcaagcagattccaagatatgccaagtttcttanagagctgtgtgatgtgntcattatttctcctatttcttaatcctttntgtcaccaatttaattactggataactctaattggtcaaattatttattcagtntatcaatngngccccacttgactaattggtggtttaattcaa

SEQ ID NO: 49299 - DNA, 244 bp, Glycine max
  unsure (1)..(244): unsure at all n locations
gacaagaaaattgtcactgtactatntctnttnntcttttatgataagccttaatcatactagttctaattaagctaccattatgaaaattaatctttcacacccaagactaattcacagcatctcanaatcacttttataaagcaaagagtttgagagtttgcaatcctaactaatcaactaatcaactntatagacattattggcatagaaaaataacttaaggccatgactacaaacattt

SEQ ID NO: 49300 - DNA, 522 bp, Glycine max
  unsure (1)..(522): unsure at all n locations
gcttcgccaagtatccccattgaaaaacctttattcaaacatttcanagttagtgagaaggcgtaaacgaaaattatggaacttagaaaaactaaatccttaattgaaggcgtaggtgacaatcatagtgaattactatacaagaatggtagtntacttaaggtcataccagatactccccaagcctcggaaaatacttccaaaatggtaacaagaagtacctccaaattaattaatgttattaatgaagatagtgaccanaactctgataacacaactgagataggatcagtgtcagaaaagaatataaatccaattaattccanacactggataacaccctctaaattatattatcaacgtccgactgcccctgaccttctattagaagaaagaaggtgaaacaaatttannagtntagtgcnacaacatctatgaatggacatagatcacanacggagtatacatcatgaatacactcacatatgaccatgtactacagcttacaaacctcccatgatg

SEQ ID NO: 49301 - DNA, 245 bp, Glycine max
  unsure (1)..(245): unsure at all n locations
gtaaattcgagcctctcgacatattatgcgcncgaatcggacatacgtgtgagaattcatgatcatttgaatntctcgagagnttccgatgtntaatntcgagcgtattgatatattataaccctgaatcggacctcagtgtgacaagttatgaccattttgaattgacgagagcttctcgtgttcaatntcgaatatcactatatgtgatgcgcctaaattggacattcgagttaaatgttatg

SEQ ID NO: 49302 - DNA, 362 bp, Glycine max
ctcagctactatatatcgctctgctcgaacataacatcagaagctctcgagatattcatatggtcataacttctcacatgaatgtccgagtctggcgcattatatgtcgagaggctcggacatgaacagcagaagctcttgacatattcatatggtcataagctttcacactgatgttcgagtcacggctattatatatcgccacgctcgaactttcacagtcagaagctctcgcgatattgatatggtcatgacttttcacactgatgtccgatgcgggcgcataatatgtcgcgaggctcgaacttgccagcggaagctctcgacatattaaatggcatgactttcacagggatgttcga

SEQ ID NO: 49303 - DNA, 100 bp, Glycine max
  unsure (1)..(100): unsure at all n locations
tgtcttaatctcattattggtcatgagaaaatctatctttgtgctntcattcctcattcgtcgcattatttnntattaaaaaaatgtgtgtngatctgat

SEQ ID NO: 49304 - DNA, 391 bp, Glycine max
  unsure (1)..(391): unsure at all n locations
tgggtcttcttctccgtgaggcttctccgncttcttcttctccgcgaggcttctctcttcattngcattcgaggtanngtggccttcttcttagctctgctttgctatgcactgtatgtgtaacatttacggtatgttagttgaaccttanggtagatgaaccttanggtagaggacgccggataaaatggcggaagcttggtgactgtgagccttccggaagacccgttaggggttcttccggaacttccagaagaagatcttccggaagatntccggaagaagggttcttccggaagtaatgaaacgaatttcggaaaacaggtcttccggaaagctctcggaacacctcttgcggaaatgttcccgatatgtactcctcgaaatattc

SEQ ID NO: 49305 - DNA, 197 bp, Glycine max
  unsure (1)..(197): unsure at all n locations
tcaacagctttcatctttagagtgggcgcncatcttacggcagtacattttgagatggtttntgggacaagtcgtncctttatacttgtcgaagtccggcactttgaacttcgagggaataacaacatcgggtactaagcanagatccgtcatgtctgcgaacggatagtccccanatccttctacgggcctcaatc

SEQ ID NO: 49306 - DNA, 323 bp, Glycine max
  unsure (1)..(323): unsure at all n locations
ccgctcctgaatatgacagccatcgntntatgagtgctgagcaccagcagcgcttcgaggccattaagggatggtcatttctccgggagcgacgcgtccagatcanggacgacgagtataccgacttccaggaggagatagttcgccggcggtgggcatcgctggttacccncatggccaagttcgacccagacatagtccttngagtttatgccaatgcttggcctacagtggagggtgtatgagatatgcgatcctgngtgaggnggttagtggatcccattcgatgcggatgctctcagccagttcttgggaatatcctt

SEQ ID NO: 49307 - DNA, 249 bp, Glycine max
  unsure (1)..(249): unsure at all n locations
catgttgatcactataacaaanaatcagttccttttagtcaaagtagatctatcacagtaaaacacatcttttgatngtngttggaaactnttagaacttanacttcatttattcttcataggattcgacanatcctgaaagaatgtcttgtgagacaatntctgccaaatgaacctcagacacaaagtactaaatgaagtcttaaatgtcatctnntatattgtatcagatcatgacttattcatact

SEQ ID NO: 49308 - DNA, 305 bp, Glycine max
  unsure (1)..(305): unsure at all n locations
gaagaaatgagtaacgaacctacacgctatcattcaaattctntatgtagaagactctctgtatattcttataaagattgaaaagctctcanaacatcttgaatactctaagacaaaaaactaaatgcttagatttcacatttgtttgtaagatgattaagatntaatcagttagcaaatcaaacaacatatcttcttatttgtatagaaccaacagtggcttggtaggacaaagaatattcggttgttaaagcttggcgatatactttgttgtgagagctaacagtaacagtgacaaatacttt

SEQ ID NO: 49309 - DNA, 292 bp, Glycine max
  unsure (1)..(292): unsure at all n locations
tcgtggctacttcatgcactcctctaatgacaatagcatcatntctggcactaaaatgctgnngagtggaagccatcttctcaattaaatntctggcttcagtaggggtcatgtctccaagggctccaccactagcagcatctatcatacttctctccatgttactgagtccttcatanaaatattggagaagaagctgctcanaaatctggtggtgaggacaactggcacatagtttcctaaatctctcccagtattcatataagctctctcaatcttcttaatatggaat

SEQ ID NO: 49310 - DNA, 387 bp, Glycine max
  unsure (1)..(387): unsure at all n locations
caagcaatcaatggggcaaaacacaccanatgattatgatgatggatggctcanattctcacaaaggtaaactcatcactttcaaattgagctttcaaaactatcatgacatgtagagaagaatcaaggatttcaagtcacanaatgtcaagaacttttattntcaaaacaattacccatttcttgaacatatcctataattcanagaanaacatgcaaagtcgtacgtgcacacaaaattgacccanaatattaaactataaatccgatgaaactaacaacattaacanaataacacgactaacanattaacaaaaccaacanaactagcanaaccaaagaacactaccccnnnccccaatacttaaacaacacattgtcctcaat

SEQ ID NO: 49311 - DNA, 184 bp, Glycine max
  unsure (1)..(184): unsure at all n locations
gtcgtgcgatccttgacattgcgtgaanatgtgtttgtcatgaattggttgcagagaatcgtanaatctttatgttgcggtcgcaattgtggttatatatggatcatgatntanaaccatacntaacaatttgcgctntgtgtttatcaatcgattaattgatgattgaatgtganaattaata

SEQ ID NO: 49312 - DNA, 540 bp, Glycine max
  unsure (1)..(540): unsure at all n locations
tcttggatgtgtcttgatttctcatggtccactnggaccccatttctaccaactacaanacctaagaaaactatattatctacacaaaaggtacacttctctatanttgcatagagggtgtttttcctaaagactgaaagaacttgtctgagatgtcctaagtgatcatctagcctcctactatacactanaatatcatcaaaataaacaactacaaatctacctatganatcccttaagacatgatgcataagcctcataaaggtgcttggtgcattagtgagcccaanaggcatcactagccattcatacaaaccanactnggtcttgaaagcaagtttccactcatcnaccctnttcatcctcgattggtcgataaccactttaagatcaatntttgaaaagatattgcaccatgcaactatcaagcaatcatcaagtctaggaatggggtgctatacttacagtgatgtngtgatagccctgaatctgtcacattctcacgtccatccttttggcaccacacactgcacagacatg

SEQ ID NO: 49313 - DNA, 655 bp, Glycine max
  unsure (1)..(655): unsure at all n locations
tgtgtcggatcttgagcaccgccgctgcagctttcctctttcctataatatggggggaaggaaattataacgtcaaccctcttggatctgaagatcacttaaatagtgagaaaaattggttccgtgaagaatatccangccgaggcgcttncgtaacgcttccgatacatttccgtgggtgatttcgcgaagactttccaccgttcttcgtttgttcttcgtcggtcttcggtcttcaactagtaagttcccgaaatcaaactnttcaattcattctctgtacccttggtgggccccactttnnnttccgtactttattntcatatcatttaccttttgtaccccccctttgacnttgctgtagtcatttaatttaaggctatttctccgcctaattanaaaataaaattaatattcncaactgatcatctcattactggaaccatctttnntaattntagggttgtnttggtttcnccngaaccggntcccttcaccannacantgtngattacngtatatattttatgtannttttggtggctggtatgttntgcggtgcgccaacaatgaaaaggagagacacgagtcacttatctcaaatctgtttgggtcgaacttctgtgatcgagacatctaactcccatgtggccgn

SEQ ID NO: 49314 - DNA, 307 bp, Glycine max
  unsure (1)..(307): unsure at all n locations
ctgattctattatgcatttctgacttgatgacatgagatgaagtctatagatggacctctngctagttgntattaatgaatagcttaaacacttatgcttgagtgaaacaatagctgtgagactgtggtttaagctactttccttgatanttgtcttatgcctaacttcatctaatggtacaagttacantttactcttctctttgaataactgcgtgctttgtgaaagacaagtgatgagggcattntgcttcattcttttatcatgcaatcaataaattttgtgcatacaccttcatacatagtc

SEQ ID NO: 49315 - DNA, 145 bp, Glycine max
acttcaatggagaaagagaatgagagagagagagaaagtggtggggaaaattgaatgaagcaacggagaagaagtgaactctgaagtgtgtcacacaagtttctcattcattcaaagtatcacaagtgtacacatgcttctgtta

SEQ ID NO: 49316 - DNA, 246 bp, Glycine max
  unsure (1)..(246): unsure at all n locations
tacctggagatatgtcgcggaggtcaagacaccttgtggacgtcaagtggtgtgctatngcccagaaccaagcttgaccaatcccaacccaacccgggcatagtcagtcagtgagaacctgtgatgtacctaagcaggcgagctcctggcagtccacagataatatatacaaaaccacacagcatggacgcttgtgtggtggctggccaactgtgaactatgattgatatgtgggttatggactct

SEQ ID NO: 49317 - DNA, 489 bp, Glycine max
  unsure (1)..(489): unsure at all n locations
cgttcctatattattattcattattttttcgtatngtattttttatnntnnnnnnnnnnnttatcgagacttgagcacgcgctgcactgcacctatcatatttcaacaaaggtggccttaccacagtcttgtatccttatcaatatttgaaaaaatttcagctttagtcccatatgctttgaaaatttgaacaatctgttatgagccgcctaactcctggatatgtaaacgccttttggaaaagctattaatcaaagaaagtgctacctatcacgtcacgcactcccggctatccaaagaaatctgcaatctcccatcaagcctgccttaggcgaacgcggcagccacagtgcttaccagcaactcaactgtctactaatcctacacctacacagtgcctaggatgcccatcaacctttaacctgctatcaaattggtccacttataccttatacgctgaagatgcccgacaaatcataccctcagccg

SEQ ID NO: 49318 - DNA, 234 bp, Glycine max
  unsure (1)..(234): unsure at all n locations
gcatctattagcatcactactatattaaccatcaacaagtaaagtctcattaaacctttcatgccattgtttaagaacttgtttanaccatatatggatttcaaaagttgcacattcttgtctcttgaccatncaccacacacgccttaggtngagtcatatatatctcttccgctaaatcaccattgcaagaaagttgcttaacacccatctgatgaatcactaacttatgga

SEQ ID NO: 49319 - DNA, 509 bp, Glycine max
  unsure (1)..(509): unsure at all n locations
natatgcggatctctgtagcacctcccgcatgcannctgttatatcttggtagagcctactaatcattggttagccaaagttgcatcagttactaaggaggataagntactaantgagctgatcagtcgctatgctcatggtggaaccatcgatcctaatatgatgtaatgatgaataatatttaaacagggaattgtgatcctgaaattcacttgaaaactaatttacaaagttctgacctacatggaaggggggggcatctggaagctaaaccttgtaaattgagccatttttggctaaatgcagaaatatagcattatcaatgtgcggttttcacaactaagggacaatagtcctctcagatgtgtgccattccttccacaattggagacgatatgctatactattaccacttatggtttattatggatgtgcagctttaattgcatatgttaactgttatacagtgggagtgcttttattgtgaaaactgattctatcatggttt

SEQ ID NO: 49320 - DNA, 352 bp, Glycine max
  unsure (1)..(352): unsure at all n locations
tgttctccaatgaattatgaggatgtctacaagctgngtcattgagttgacannaagtgtgacaatgtcatctannatggatttgtcacttataaaatgtcaatagatntcaatatgtttgcttctttcatgcatgaatggtttcaaggtaatatcacgcacagggggtcatttgtccagcatctccaanatggaatcttntgagcaagctatttaaccagactagctaatagggtgtgagctgtcanagtgaagccaattggctcatccaggttagctaaaaagtgagttgaagccaattgtgggaagctaccgaagcttctatggttgcttgatgatagaaaggaaacac

SEQ ID NO: 49321 - DNA, 609 bp, Glycine max
  unsure (1)..(609): unsure at all n locations
atactgaggactctgccangatccctnagtcacctgcggcatgcagcttgaaaagaaagggagcacattctatnntttgcgcgtgcgtgatgtgcgaacacatgtcaaatatatctccctctttnttnttngctgaatatcaattatatttccctatcccccttcttctctttcaatggatattaaacgtcaagattgcttctcaaaatcagctatggttcgactnntttntttttgaatctacaggtgtttgacttctttgcaaaatctaaacagttagtacaattataatttgtacaacttttcatcagataatttaaatttgaatccgatgattaatattcgatggagtacaatgtccactattttgaaataagaagcaacctaaaaccaaaagagcgaccctcttgcctatttcggggagtagtcccaccgttgaagtggtgttgttttgttgtttctctgaatgcataaaacaatatcatttcacataaatatcacacctcttaagttagttttgcatactggatgaaattattctncacganncactgtctatggcactgctcaatcatgttatataaacatcaattctacattatataaaat

SEQ ID NO: 49322 - DNA, 343 bp, Glycine max
  unsure (1)..(343): unsure at all n locations
catgcgtgtcgaagactcatcaatattntcatcattctcaatcttggaagggggatttacatcggtttccaccatctttgaccttgcttgcttctggggtttcatagcacgcttgccagcagttcggctgcgtgagtcctttgtattggaaatgggtttagccaatatagtcaccggtggctcagaaccttccaatngttctgagtgctccttttccattgctatcgttgcagcctgatatgcaagatcaaggatgatagtgctgcanaaaagtatagtattncgtgcctcttcaagtgtcaggcttctagtatttcctttatcttgacacttcaacctaact

SEQ ID NO: 49323 - DNA, 311 bp, Glycine max
  unsure (1)..(311): unsure at all n locations
gagaactagtgagagaggtagcanggatcaccatataagaagcctacctcanagtaccatgaacatttcgaaacctaatggtgttcctgcaccaccaaatagcctatgaaacatgcacaacgatagaaatcaggacatccttcacttgagaagctgcaggcctgttcacggataacaacatagcaatacaagaagtagaatccagcgtgcaagacanaaagactgcagccattgccatatatcagaagcanaactggatgtcagaaaaagatgatcagtagtttcgtatgaattaccacataatgcacaca

SEQ ID NO: 49324 - DNA, 517 bp, Glycine max
  unsure (1)..(517): unsure at all n locations
tctggtggacatcttgactngctntccaatctgacattcaccacanattctgccttcttctattttcagatngngaatgcctctaacagcacctttgtcaatgattntcttcatgcctcttaagtgcagatgtccaaatctttgatgccatattctgacttcatcttctttggaggatagacatgtggaggagtaactggtttcttgaggtgtccatangtagcagttgtcctttgatctgctgcccttcattagaacttcactcttctcatttgtcaccaagcattctgactntgtgaagtttacattgaatccttcatcacacnagctgactgatgctgatcaagttgcagtcagtcccttcaccagcagtactttgtccagactangaagtccatcatggactagctnntccattccagtgatctttcctttagaaccatctncanatgtcacatagctagtggatcangggtcaatgtcacaggaatctttgacacctgcatgtgtctggaca

SEQ ID NO: 49325 - DNA, 144 bp, Glycine max
  unsure (1)..(144): unsure at all n locations
gtgagttngtgccgtgagcggaacaaatgcatgtntcttcagttgacatatgaacctaaataacataatgtaattacttggtaaaanatcattttagtcgtatattgataaaaaaaaaatggagacagcaagggtagtgttcgt

SEQ ID NO: 49326 - DNA, 333 bp, Glycine max
  unsure (1)..(333): unsure at all n locations
ctctcatctcanacaagtctatatcatcaatctaaactcgctccaactggttntacgatgaanaccctaccgaatcacaatttgactccctcaacacccaatttaccctagaaatggctcttngtttcactttggtcactcatattcctcattngcacagtctaagctttctcantaaaccctaatgacatttcanactangattaactccctttaacctncanataccactaaatccagaaattggccttccaactctcanagcctcactctttnntcactcataacaccacattctcactntctaaccctanngtaactctacccttcatc

SEQ ID NO: 49327 - DNA, 676 bp, Glycine max
  unsure (1)..(676): unsure at all n locations
tctactgtactcatctactgtatatttatcttttacacananttaatatattttnttnttttnnnnnnnnnnnnnnnnnaatatgcgggagactgangatgcagcatgcaancatntgtaatgaattctaatatcatcatataatggtggttaatancagatgtatctgaatcaatcaactagaaatctaagttcacttcttaacccacttgagccttatataaccaacatatatagccaccagtcaatgctctaactcttcttcttccagacagaaatactcacctaccctaaccctatcctaatccttaaacagtggactatagctggttaaagggttagaaaacaaaatacagacactttgctttcttttgttcattattcggagggtgtagtctcatagataatcaaaaatgattgtgtaactatcatccacttttccaatggccttaagctataattaaattctattgtgattgtcttaaaatgtgagnctccttattatttcttacatctaccaggcctgtataaacccgaaacctgacctagccaactgactgccttagctatattgctgacgttattaacaaactacacgactatctttaccaatattcactattgatcntgtcgacaaattcatgacactgacttactcttttagagaagaagtgct

SEQ ID NO: 49328 - DNA, 127 bp, Glycine max
aagtaagaaatatttgttttgttgtaacaaaactttatgattcaacctatctcattacattttactgtaactcttaatgttgtgagttacagtgcgaatgtgtaatgtactttcgctactcaaagaa

SEQ ID NO: 49329 - DNA, 213 bp, Glycine max
gcttctgtactatgaaaatgccttttttttcttctcaatcatttaagtcagtcttctctcccactccctaccaccaacatattgttctgaaccccccgaagacctcacaacaaattcactggtgcgtcgaaaaaaacctttacttatttttagacatgctactgtctgtattattgctgcttttacttgacgctgtgctatctcttaactaaa

SEQ ID NO: 49330 - DNA, 358 bp, Glycine max
  unsure (1)..(358): unsure at all n locations
atagtgcacggctgagttngtgtgctttcacgaagcattcgagtgcgataatttacgtgtgtatgtgtgtcttaatgccgtcctcggtgagtgtagtcttacaagaggaatactccgacaatgcttgatcaagaataggctacactatcatgatgaatcggagttagtatctcaagatacaccatatgaacacatgagcatngttagatagagaatatctttttagcatcaagcacctattaggaacgccaacgtgttctctactttgagttacacatcatttctctcacgtgatcttctctcattttgcacagataagttgtacacctatttctattcacacttacctttacacact

SEQ ID NO: 49331 - DNA, 252 bp, Glycine max
  unsure (1)..(252): unsure at all n locations
gcgtgtatatgagttatgtccccgaatcggacatctgtgttgaaagttatgaccattcgaatttctcgagagcttccgttgttcaacttcgagcgtctcgatatattatgaccccgaatcggacatctgtgtgaaactgatgaccattctattntctcgagagcttccgttgatcattccgagcgtctagatgagttatgtccccgaatcggacattcgagtgaacacttatgaccattctaatttctcgag

SEQ ID NO: 49332 - DNA, 351 bp, Glycine max
  unsure (1)..(351): unsure at all n locations
taagctcctcgacggagttctccgactatgctcttgtgtggtggaacaagctacaaaaggagagagcaagaaatgaagagctcatggttgatacatggacggagatgaaaaagatcatgangaagcggtatgttccggctagttactcaagggacttgaaattcaagctccaaaaactaacccaaggcaacaagggggttgaggagtatttcaaggaaatggatgtgctcatgattcaagcaaatattgaagaagatgaggaggtaactatggctcgatttcttaatggtttgactaatgatatccgtgatatttgtgagctgcacgagtttgtngaaatggatgatttgc

SEQ ID NO: 49333 - DNA, 415 bp, Glycine max
  unsure (1)..(415): unsure at all n locations
agctccttggtagactgtatggttaggtcactgtgttaattatttatttagaatctctgcatgcataaatacagttgtaaacagagattcagtaactaattgtaaaatctctggtcataataatggatctatngtctctctcttatatgntcctctcccagagctttataaactcaaattaagtcatatctctagttcatgttggattaaacctccacacttgaggtgcaattaaagacggccccaaagaagctgcagctaatgcaagctangggtgacagcaattaaggcagaatccaacaatntctaaagcattagtcttagaagttggctttgacctaactcgaccaacaaaacaacttgtaaggtgagagtgtctctacttattacactactttggcatatcatgagtaat

SEQ ID NO: 49334 - DNA, 619 bp, Glycine max
  unsure (1)..(619): unsure at all n locations
atactgccggtctctnnagcacctgcggctgcanncttcaccagctttttacaccatattcttgtctttcaagccactatttgctctaacacgaatcanaagatttctcgggtcgatntcacaataatgaacactttatcctcttatcaacagataaacagattcaacgcttagtcttttctctcaagatgaacaaagtattntgagagctgttctacacttacaagaattacacatagagctttgtatgcanagaataaaataataagtgcttcaaattatatctaatgccttcacagcttctcgtatttatatgccatctttcatcgagtatatggtatctctaaacagacacattatctctccttaagctagcgtctgaagaagatgtcggttgggcattaaatgtgtcattacatgcacanacttcttcatgtngagaaaccactctangtcactaacatgtagaaaacttcaataggaaaccattccttttgtgtagagcntgatgtcagcatgtacaccctgaatatactagtaatatcgatgttattctattatcggtattgacatatgatcacttgatgagtgaggatggcttgatatcatgtcggattct

SEQ ID NO: 49335 - DNA, 173 bp, Glycine max
ctgcagctttaccttgctttagattggcatgaataatacaatgcaaatcaatgctctatattacatcctaattacctacctttaaaataattatattttaaatgctgttggttataaactatttaaattttttctaatacagggtttgtaacaacaagttattagctattttt

SEQ ID NO: 49336 - DNA, 177 bp, Glycine max
  unsure (1)..(177): unsure at all n locations
tcttcgctcanggaggaaataaatggaanatcgganaactgaagtggaattcggttcaaaacctgcggtgagcttgagggtcgcgaaactccccgatgaaacggaatccgcggaaggacgcgaagaatatggcttcngtgttgccgaaatgaaccgtatagtgatttgaactggtcg

SEQ ID NO: 49337 - DNA, 279 bp, Glycine max
  unsure (1)..(279): unsure at all n locations
gataagtccttgtttggctgatttataagcattgaatcactngaacttgagcggcaattatntccttggagcangtatgtcaattccttctttccttgngacaatgacttccttgactcacctcgacctctctcttactggattcatggngaagattccatctcagattgngaatctctccaatntggtctatctngacctcggaggttattctgtcgagcctatgttagctgaaaatgtagaatgggtatcaagtatgtggaagcttgaatatcttca

SEQ ID NO: 49338 - DNA, 234 bp, Glycine max
  unsure (1)..(234): unsure at all n locations
agagagtgatccaagactttcaaatggatttccacttgaattattaaaagagagatagagatantttaaatttatctcccttaagttgcggagattacccaanaaagtcggaantgttccttcaagtngattatgtgatanatcaagttcaacaagagaagtcaaattcccacagaagttggaatggttccttcaagttgattatatgacaaatcaagttcaacaagagaagtc

SEQ ID NO: 49339 - DNA, 466 bp, Glycine max
  unsure (1)..(466): unsure at all n locations
attcctttattaatatatatgtgaggggtagagggtgtcacacaaagaccctaattatagtgattaaaaaaatcaattaaatgttatagaatttgactntaatntctatatcccatagaatttcatgttcttaaatcttaatcaataagaaaccatcgtctctatgacgttttaagtgactattgtaagagagaataaacctaccttatatgattgttatggattggatgacaatatttgtgcattatattattttctcanattaattaagacaactagtcatttttctcacattattcattatatctatactnnatatattagtatcactacntatatattactatattcatgtctacacaataaaatatattataatattaaatctaaactttatgtatatggaattacaaaagtgtatacagaaatgtaatgaatattgattacgatgatgataanattatct

SEQ ID NO: 49340 - DNA, 203 bp, Glycine max
  unsure (1)..(203): unsure at all n locations
gtggcgatcggtctatggtgcaagtcgactcttcacatncacatatcacacataaatccaccatcctcagttgcccaccttccactgagctcacgtactctcacgtagccccttatactcgttcctctcaacaccgggttcccatcaatccctccaagcgttcacaacatccaagatattcaacatgctaacatcatgaacta

SEQ ID NO: 49341 - DNA, 371 bp, Glycine max
  unsure (1)..(371): unsure at all n locations
atctattacantgaatgctctntaaagaaaaacngtatgctaatctttccgattcagaacaaactcatgcacatatntccttaatataaaacatttatgaatgtgcatatgccgtaaatatcctactatgtatatcaagatacaaagatattcanaacattctatttaccacacatacatanttntttgaaaagaatacatatacgcatgctcaaagtattgtgtcaaaaatacacatgttcatatcttaagtaatntgctacccaaactacctacgcacacttggagtatttattaacatatacatctttnngtgttcatatattgttatatatgcacattggagagccaaactcatgccatgcatacac

SEQ ID NO: 49342 - DNA, 407 bp, Glycine max
  unsure (1)..(407): unsure at all n locations
tactgtatataatacagagtaataactctatttcaagaagattctctattgccctgaatagtatagtatagtaagcctaccagtttaccaatatctttttctttataggaaatactagtaggagacaccttactcgtacgtactatatatagaggacccttctcaatcaatggttcctcagcagctgatgacagatgatgggcatgccttntgctaaagaacaatacaaaaaattctaaataaaatatcctggtccacatctctcactctttggtgtgttccatggttttgtatcaactacctttttgttcaagcttttaagcttttacattttttacaggtatggtactttgcttctacatttcatagtcattatatgaaaccttctctctttgtgataccttcta

SEQ ID NO: 49343 - DNA, 345 bp, Glycine max
  unsure (1)..(345): unsure at all n locations
tcgtcctcttctttagtccagtcttcttctggcttcaattcatcagtgggctntccttctgtgtccagcatcttgngatgttcccagcctttgatgacagctntccaggttctgctatccagtgatttgaggaaggccaccattcttgctttccagtattcatagttgcttccatcaagaattggtggtctgttcactggtcctncttctttctccatgttcatcagaatttatcttcccagatctcactctgtgatttcgagtggtggctctgataccaattgaaattctgataccagtggacagatgtcgtacaagatgtcacgacatcacgcttcagaacat

SEQ ID NO: 49344 - DNA, 344 bp, Glycine max
  unsure (1)..(344): unsure at all n locations
ttctttcttttcgcaataccattagattgaggagcatacggaggtgtcacttcatgaataataccatgcatttcaccaaaaatactcatgtcttaagatgtgtattctccacctctatcggaacgtaaaaatttaatttttctttctaagtgattttctacttctgtttatatactntgaacttatcacacaattcactcttgtgattaactaaatacacataacaatatttggagaatcatcagtacagtaataatatatctcttaccaccacgtgttaacacatcatactatccatacatcattataaccattcaagcagttatttcttcttatacatgtgt

SEQ ID NO: 49345 - DNA, 252 bp, Glycine max
  unsure (1)..(252): unsure at all n locations
ctgcacctctagcccgttctctcccccttggcacatcaaanagccaaagtactgtggtaatcaacataagaacagaaataagaatcanatataactaaagttaacataaccattcacaagtcaaaatcaaatataattcagtcataaatactaagtgccaaatactgaaatataactaaagttcagagaataatgacttanaacatagccaaatacatggattaaaataaaagataataataatctaaatct

SEQ ID NO: 49346 - DNA, 531 bp, Glycine max
  unsure (1)..(531): unsure at all n locations
tagtgtgcaacgtgactcacaaatatnntactttcccctttatatatctntntatttttggggtcgacannggtattgcccttgcttctacgtatcctcaggtgcgatgaggaattcagacctacgtagttctttaagttcaaatgtntgtgtgttaaattgatttttatgttntgaaagattccttttaatcgcaaacaaaaagtcatttaatgcgttagaccttgaaacgatgttttaaatnttgaaaagcggagagaatcgttaaggtgttggaccttgaaacgatcttttanatttgaatagcggagagaatcattaaggcattggatcttggacaatctcagtgatatttgataaagaagtagtatgagtggtntatctgggtntgttataactttaatctcttaagacaattacacactagtgacgatagatgatttacaaaagagaattccatgtaatggaaaatgattgccaaacatatgggacctaggtcataatacatcatctcaaaataaaactaccact

SEQ ID NO: 49347 - DNA, 442 bp, Glycine max
atatcgagctctgagatgaccctcttgggcatctggaggaacatggagtagttttgacttttttaacaaatgcttacctcttcttatcaacttatgaattaaacagcttgcccttttctaaaagtctttggcaaaattaacgaaaatgcccctatcatctagggttcgtactaaatatacagacctcaatggttggtctactaccactttctggttaatcaacatgtttcaaaattggggacaaaatgactggaatttgcatttaaaccatctcccacttagagaattgcatctccagaggggtcattacgtcttttcagcttctactaagcgctcaatcagctatttcttgtgacaaatgatcaataaagatatttttgaaagttttcaaacagcaatataattttttgggaatttgctacaaattttcacctcatgttct

SEQ ID NO: 49348 - DNA, 234 bp, Glycine max
  unsure (1)..(234): unsure at all n locations
tattagatatagntaagaaagaatntctctcttcggtctgtattctcatcttttgttctcatttcatgtgttcattctctgaaaactgtnntttattttaaaagattagaattctgaaaacatgtctgatttgatctcttngtttctgctttcaagaaataaaaacactaataatgcattttcaaaaggaaatgtagtttaaaattgcttaanattacattacttgtcacctca

SEQ ID NO: 49349 - DNA, 168 bp, Glycine max
  unsure (1)..(168): unsure at all n locations
atgtganttgngtgctcacatntaattgatgtcttattctatngataagaagatggcgttacaacaaccacaacccactaacatttatctttttgtggcagaacaagaacgcgaaagataccgaaagagagggtcanaagggtcatttcannggagtttatggaccct

SEQ ID NO: 49350 - DNA, 433 bp, Glycine max
  unsure (1)..(433): unsure at all n locations
tctcagctagacacttgttgagtcagaatactntattattattgacaagttgaatatatgttaagaaatgatgtgaccttttccctttgaagttaaaaaaagtttaaaatctttaataatattgaattgattttcttatagtatatatgtgaggggtagaggtgtcacacgtccgtgtttttggaaaaaaaatcaggtagctccttgggcagcaccctgacctgaaacataaaacgagggaggctgattctctcaccaaactccctcttatcaaaaatgcacaccacggtttgctgtttcgccctaacacatttgcctttgttcatttaggcttggcttctacagagtcactatcttgtttacttcacatgcttatcttaatgcatattacatcggaaattgggcagtatcttaattaatggggtgaggatgc

SEQ ID NO: 49351 - DNA, 257 bp, Glycine max
  unsure (1)..(257): unsure at all n locations
ctatgtattaatgtcatttatcgataatattattattattattaattttattagagggattgaacacaattttttctttttgntcttccttaaccatacaattcacctttggagggttttcatgacttanatatttacataattataaccataactaattattaactagaattataagtatgtattataactataacccataattaatttatataactagctagttataaattggcataacatgatataactggata

SEQ ID NO: 49352 - DNA, 145 bp, Glycine max
acatggactcacagtgtggcggataacttacatactcgacatggtaacaaacactcagtggagaccctgaacaaatgacggctagccaatgatgaatgaactttcctttgggtatggaataggaacaccaacaattgcagtgggc

SEQ ID NO: 49353 - DNA, 329 bp, Glycine max
  unsure (1)..(329): unsure at all n locations
gtgctcatgcaacaattgttagccgtggctatactatacatctngccaaacatagtcaggttagcgataactcgcctatgctntttcttccatgctatatgtagcaaagtcattgatccagtcatgtttgatgagttggaaaatgaagccgcaattatactgtgccagttggagatatatntccncnctgctntctttgacataatgattcacttgatggtgcatctggccagagaaatcaaatgttgtgggcctcgttatatatggtggatgtaccaggttgagcgatacatgaagatcttaaaacggtatacaaagaatctatatcg

SEQ ID NO: 49354 - DNA, 480 bp, Glycine max
  unsure (1)..(480): unsure at all n locations
agaatggtgactcgtagagagatccctgagcaccgcngctgcagcttanacagcctgtggtattgatactacactctatatcgataatcaacagttttgcttgaagaagtttctacttaaaattatctccacacctatgatgatgcacagcaacaatataatggcttgatcacaatctagttacaccatactatgcctctatgatatgctgtaaaccaacattctaagctttaactttctgtcttgactcacttacctagtgtctgactatgtgtgtccctatttacaaggcttgnaagttgtaacttttatacataacacatcttgttgttaatgagttttcctataacatcctcagccatgtcactatgatgagttggagctacatgtttgataataggtagtggtgccatccatgatggagaatacatattctctatctatagactctaacaactattctatgtcgtatttatttgg

SEQ ID NO: 49355 - DNA, 648 bp, Glycine max
  unsure (1)..(648): unsure at all n locations
atgactcgaanaccctctgcnacgngatcctctannagtcacctgcnggcatgcaagcttattagcattacagaatagccatcttgtngtactgggtntctntacatttatattcaattatattaacaactgntgtagatacttaactcaattctaatcctttgcgctctgcacttagatatttaagcctctatgtctttgcaccatcaccaaatataacttcttgtgctaagacatcatagtcaaatggtaagttgtgttttttaaatggtctcgaacagcaaatcaaccactcatttatattgcacgctacaatagcattcaattgtagcacataataanatgcctatnntggcanatcttgctatactgcttaggatatagttaatctttnggtctggttggatgaaccaaaatgatcgatacttcttgtaatgtgtataataaccctatattaatcgcctttctattatcctaattgtcttgatcgagatntgcaagaacaatnntttcctttttcccttgcatacagtatatctgatttgcaaacactatatacctatattatnggtagtatatattatcnttaacgttatctatgactctaaatggctaatcccaattaggacactaattcttacttctccg

SEQ ID NO: 49356 - DNA, 287 bp, Glycine max
  unsure (1)..(287): unsure at all n locations
gattcctctaaccttgattcggctagaattctcanagaaggaacctctacctcaaatgggagcacaacctccatcatatacaccatagagagatgggtttgcccagtctatgttcacaccgaagttcgataaccatgcaatgcaaagggacatctctgccaatcttgatgacatagcatctctgaacatttcttgatattttatagcagtctcaatgcccattatctcggctgtaaggtaaatatggtgtgatcttaatctaccactttttcttatttgtgtaaatg

SEQ ID NO: 49357 - DNA, 552 bp, Glycine max
  unsure (1)..(552): unsure at all n locations
taagggttgttacacttagaagaaacgtcattccaactctcatgtgatgtggtacacaacgttctacttttagtcgacctactgcaagggcagtttcttccgtatacaagtaataggnttgagatcacatatgctgtagcgcttctactcacagaaatatagtcattggatagttaacatattcccctttgtgactatagcacagtntcgggacagaactaggcactctgtgtttcgagttattgacactattctcacagatatagataggctctgctctgagcntcacgtcacactgcactcaataagatatactttcgtgtctcgtaggcgttaacaacgaagaagatcttgttcatgggcgtccatagaagaatgttcttttgccattgaactctgaaagatcgacttccgttagaaggatccatgctacttcttaacgaagaagtgtctcaacttataaacgatatggcatccttgtgctctttcttcccaatggatttcgcaggtccttcattgccttggacaggatgcacaatttggccaagttcg

SEQ ID NO: 49358 - DNA, 477 bp, Glycine max
tggtgaagtaacccggcttctggtgtggcaagtataggttttgcttacaaatagtgtagttgcaaacaaaatctttagtgtcaaagtacatgtgttggatcgagtggcctcagaataattaagaacgaggggtttaattaattattcctaagcctttactaattaaaaatttactcttctaacgcttttactatgttgttaagagaataaggagtagaagagaaacttaaccaaaagtaaaagcggaaattaaaatgcacagcggaaagtaaaagagtacggaagaaggagacaaacatacaagagtttttatactggttcggcaacaactcgtgcctacatccagtccccaagcgacctgcggtccttgagatttctttcaaccttgtaaaaatccttgtacaagcaaagatccacaacggatgtaccctcccttgttctctgtgaacctactggatgtaccctccactagaactg

SEQ ID NO: 49359 - DNA, 460 bp, Glycine max
  unsure (1)..(460): unsure at all n locations
cccagtgtttccaanaatggctctnttatcaagtcatgcacacatccgggtccatntaggcattcaagaaaaatctttcattgcattcaccctgtangcacacattcttttttctcaaaaacctttttgtgttatgatccgggaattctccanagaaaactggcagtcattntcttcttcaaaagcgtggtggctnntttagttntctttctcagatnttctccttcactcattttcttcaagcaatcttttttataaaaggttagtactcggcaaagttggtgtcaagttacatttatcgaatgataaacgcgttgatgaaataaacacaccaaacccacctctcctatntttttgtcaacaacctcgcaacaatcaccattctnaagcgataatatccatgaggacaatactgaacatactcagtcagttatagatgaatacaatacactgaacatac

SEQ ID NO: 49360 - DNA, 437 bp, Glycine max
  unsure (1)..(437): unsure at all n locations
cttgaattcattctatgcacccttaggggtccatccttgctttgtatatcttcatcttcattcttctaccatcaatgatcacatttcaatgtttaaagcgagtntcaaccgatcgtttataccgtaatctcactttatcactgttaaaattaatttcaaccatttgtttgtgttgtaatctcactttatcattgtcaaaatcaatttcaaccgttcatttgtgttgtaatctcacttaatctataaaataaagattcaaccaatcggttgtgctgtaaccttggttaatcattgaaaataaagtttcaaccagtcatttactttgcaagtcctcttttaatgagtttgaaagtaaccaagtgaaaccaaagctaaaatcaactcataatcaagcttttatccataaaaatggcttgaatttcttcaaaggtccaatg

SEQ ID NO: 49361 - DNA, 248 bp, Glycine max
  unsure (1)..(248): unsure at all n locations
ctcatggactcctctaataacaatagcattatntcttgcacttaattgttgngagttggaagccatcttctcaatcanattcctagcttctgcaagggtcatatcaccaagagctccaccactggcagcatcaatcatactccgctccatgtngctaagtgatggaagcttacttgtggagcttctatggaggctggatctttgagcttcaatgaggtccttcaatggtgattnttcaccatggagat

SEQ ID NO: 49362 - DNA, 364 bp, Glycine max
ggatattcttggtggtgaagctccttctttcatggtttattccctagtggatggtgcctcccctctcctcttctcctttgccttctgctgcatctccatggtggaaaattaccattgaaggacctcattgaagctcaaagatccagcctccatagaagctccataagcaagcttccatcaagtggtaatcagagcacaagagcttcaagtaggtgctccttaaacctccattaattttcagctttaccttctcctccattgttgtttcttcattattctccatgtacctgctcacatgtcttgtgctaaatgttgttaacatgattctttagaatttccaccgattaaactagctataaaagct

SEQ ID NO: 49363 - DNA, 143 bp, Glycine max
  unsure (1)..(143): unsure at all n locations
gtctctttcaacaaatttactctctggttatcgactaccagaggatgtaatcgattaccagtggccataactgatctacaacagctatntagtatctgaacttcaatattgcactgtgtaatcgatacacatatatgggaatc

SEQ ID NO: 49364 - DNA, 452 bp, Glycine max
  unsure (1)..(452): unsure at all n locations
ntgattgtgaatgagttgttcacaatgctagcttntttcttctgtacatcctaataatgaatcaacaataaatggttgctgaatgaacaatagatggttaattaattaactagcactgcacaaaaaaaatgaaattttgttaagatctcattgatcagaaccaagcaacccactttcctcatcatcatttttattttcccgctctgttgttttctgagctagctccactgccctcttacattgctgctcccaatctgtttgaatcaatgtgtaaaccatcatacaaagacatgaagcctgtgcagccaccattccagaccacaaacccaccaattcatatttatatatgaatgtagcaaaaacagaaactggctatccaactagataaaatgcacatcaagttattctggcacccaaataatgcctagcagtgcctgactaaatcccacatg

SEQ ID NO: 49365 - DNA, 319 bp, Glycine max
  unsure (1)..(319): unsure at all n locations
tgatatcatacatatctgtntgggctactcacatgttattcttaggattccctactanaagcgcaagcaccctatacactcatcanagtagatgatacgaaaggatgcaaaacaatgaagccactatggcctanagacattggtctatacgagcctctaagctcaanacttgaaatatgctcgcgcgttcatacattggaatgaccgtctcagctgataactggcgaaagacgcacgtttatcgagatatctaactcctatgttgctcgactatctgacgtcaatattacaacccactcaagactctcttcccttcttg

SEQ ID NO: 49366 - DNA, 461 bp, Glycine max
tactaagcttctatccacggtcatcttggtggtgaagcttcttcttctatggcttattccttaatggatggcgcctcctctcacctactttcctttgtcttccgctgcatctccatggtggaaaatcaccattaaaggaccccattgaagctcaaagatccagcctccatataagccccacaagcaagcttacatcaggttacatgccatccagcttcgcagacctagtgttcgccggggaaagaatccacgtatggttgaaaagagggaagttcgattacgtgtcctccacgagtgcgaatgccgaaagaatcatgacaacgagggctaaaaggaatgaaggagatgcccatgccgtctcttcaacgcccgcgtgggtcatacccccgcagacacctcatggtacccatcagtatgcgcaacatcacccgagcttctcggctcatactgggaacacctct

SEQ ID NO: 49367 - DNA, 199 bp, Glycine max
gcaacattctcacaagtagcttctgcctcatccgatctctgccatcgcgataacacttgaggtacattctcgctgcctgttaacatagttcttacctgcaacaccttactatgcatgataattggaccactttctagtgtggtgaaaggcataggcaactactagatctgctggtgctcctttaaacaactttctctga

SEQ ID NO: 49368 - DNA, 397 bp, Glycine max
accttatttgttgaaaatgatgttcttttgcttgatgaagtcatgattaccggtggagcaacatcacctgttttctacaattcgaggcagagacaccgccaccctagatatgcttgtgattgactatgactcggctcttcttttccaagcaatgttgatgcttgaaagatacacagtgatattgttttataaaaaaatatgataaatcataaaaggctaaacataagataaatcactgtgttttttgggcttcttttcgttgtctggatcatgatactagcattagagactgggatagttggtatcctatgagttgttctactcacaatctgaagttctttgctttgttgtcattggtcaacataatatgatgatgatatatactctattttggaat

SEQ ID NO: 49369 - DNA, 319 bp, Glycine max
  unsure (1)..(319): unsure at all n locations
ctcaactcgccgccagctcgcgcggcgagctaggttgcttctcttctattcaacaaccgtatggaggaatcttctggatggcccaatatggcctggttgctatctgcacccccattattactaaatacacgccccttgcccttacttgatgattctttttccgtaaagctaccgaaacttacagatttcgnaacgattctagttttctttacgttatgttacggaacctttttgatcacataaacattcacttttatttacttacggaatgttgcgaaacctttctaattgtgcaacgatgcttcctttttattcccag

SEQ ID NO: 49370 - DNA, 251 bp, Glycine max
  unsure (1)..(251): unsure at all n locations
acgttggcgcaaaccgtgtacgtatcttgcaccgacactaacaacatctncaaatagaccaaaacacgattccacaagacccacgtcaccttggagttccatcgggagtgtccaaaactatataagagcctatggtacattcgacgcaagccatgcacctatcttgcgtcgagattagcattatcttcaaatggaccaatacgagcttctagttgagccacatcacctatgagtacaatcgggtgtgtcca

SEQ ID NO: 49371 - DNA, 392 bp, Glycine max
tgtttcagtccatttagagatagtgctaaccttgacgctagatcggtgcacgggttgtgccaaatgtaccatatgctcagaaattattttgcacacccgatagaactcctaggtgacgtgggtcatgtggaatgtcgtttcagtctgtttgggggcgtgctattgtcactgcaagataggtgcacagattactccaaacgtaccataggctcataaatcattgtgatcgcacccgatggtactcctacgagacaacgcccaagtgcaagcacgtgtcaatctgattggagatagtgcttatcttgacacaagaatggagcacggttcgtgataaatgtactatatgctctacaatcattttggatgccctctattgaactaatcactgacct

SEQ ID NO: 49372 - DNA, 264 bp, Glycine max
  unsure (1)..(264): unsure at all n locations
tgatgacananagcccaagagaatgagttcaagattgaatcaagaacacttcaagaatcaagaggaaattcgatttcaagattcaagaatcaagtttcaagatntaagtntcaagaatcaagaatcaagaatcaagaataatcaagttgaagattcaagaatcaagtaaagactcaatcaagataagtacaaaaacgttttcanaacattgagtagcacatgaattnttcacataacctttggccanagagnttttactctctg

SEQ ID NO: 49373 - DNA, 419 bp, Glycine max
agaactcatcaactccatcttcatttggtacaatcctatctaaagttgaatttgaagaaatcatttgtgacatgcctgtcaatctcaatatcacattgtgaagcttggcctttatataaatagtttacacttatagattcaagtaaaacatttttattctactcaataaaggcttctttttactattttaaaaggtgaaatatattagtcctatgatttggcatcaaatatgttcgtgacattgtgaaccaaaaactacattaaggaatgagcttagactatgttgttgcttgcaatttatcttgacacacgtaaagttagatgaaaattgtgaaagggtttggatgacaaattatattcgaggggggaaagttcaaaatttaaagagttttaagaaattggggagggaatgacccctg

SEQ ID NO: 49374 - DNA, 278 bp, Glycine max
  unsure (1)..(278): unsure at all n locations
gctatgtgctctcgactggtccctntcctcccttcgcaacttgagttcactattgctaccccatagagctccgcgaaatctgttccggccatactcttctttgcgagccttcttggtctctcgatcaagggcccttgcgagaattgcattctcttcccgtaacccggcacactccttccgaacgtgtgtagccgtcaacttgaacttctacttggcgagttntgcttctcctaactcgctattgagagcttggacttgctcgtgctcttccggagctt

SEQ ID NO: 49375 - DNA, 423 bp, Glycine max
agaggatgcttcaatggaggaaaagatagagggagattaatatttatgggggagcacgacattgaaggatgataaatggagagaagttgaactttgagttgtgtctcacaagaccctcattcatcaaagttactacaagtgttactcatgcttctatttatagactaggtagcttccttgagaagcttctttagaaaacttccttgagaagctttcttgagaaaactatcttgagaagctatagcttatctacacacacgctctcataactaagctcatcttcttgagaagcttgcttaagaagattccttaagaagctagagcttagctacacacacctctctaatagctaagctcacctccttgagatgagaagctagagcttagctacacaccccctataatatactagctcacgcctat

SEQ ID NO: 49376 - DNA, 212 bp, Glycine max
ctgcgcttgagcatcaacacatacttgctggtgcatgtgtcttaattcaacctcgatgaacgatcttgacaatcaacacatcctatgactcgggtcgattggccgatatatggagacctcgaatgaaatcgagctctgaaaactcatctatattactattactctgatgtcgactgagccctagtatattagacctcggactgaaacaaagc

SEQ ID NO: 49377 - DNA, 424 bp, Glycine max
  unsure (1)..(424): unsure at all n locations
aggacttcctgtgtttgngaacctctccttcctcaggtgtacccaaacccaatcacctggttcaagcacgactttctttctgcttttgtaggcttgccttgcatagctatcattattcttgtcaatttgaaccatcacttgctcatgcaacttcttgacatactcagctttagcctgtgcatncttatgcttatgcattgcantgttaagcatttgcaacaaatctagatgagtcaaaggattaaatccatacactatcttaaatggcgaacaattagtagtgctatggacagcccgattataagcaaactcatcatgaggcagacaggcttcccaagatttaagatttttctgtaaaacagtcctaagcagtgtgcctaaagtgctattgactacctcagtttgaccatcaattcgtgggtga

SEQ ID NO: 49378 - DNA, 195 bp, Glycine max
  unsure (1)..(195): unsure at all n locations
gtaatgtcccactggtaaaactaactttccaaatgtttgccttcgcangaatggccccgaggaagcttgcctcanagaggtccaggaaggacaaggcggccgaaggaactagttccgctccggagtacgacagtcaccgctttangagcgctgtacaccagcagcgcttcgaagccatcaaggggatggtcgttc

SEQ ID NO: 49379 - DNA, 466 bp, Glycine max
  unsure (1)..(466): unsure at all n locations
tcttgaagttgttttctttntgagacttcttcagaagatagttgtctatggcttgtgtcttcctctagtttatttatttcagcctccaccttcttaacccttttgagagtatctccaaactgttcctgattccagatcttcaaccttctttttagtctcttaatcttttctttcaagacatacccaccccagcctggttgctgatgcgaattccagctttggtacacaatctccttaaaggatttatctgataaccagcaatcaagtatcctaaaaggcttaagaccccaatctgttaccttggaacgaagaaggattggacagtggtctgaaaagtttcttgccaaagtagattgatagctgccaggccatctttcaatccactcatgagagaccaagaacctgtcaatcctgctcctagactccccatttggtctataccacgtgtagtttctaccaatccatg

SEQ ID NO: 49380 - DNA, 425 bp, Glycine max
  unsure (1)..(425): unsure at all n locations
tatatacagatacntattagaaggaaggaatgagccttgttangccctgtaagacttttggcaagcgtacaaattgtcattataagtttcacatttataaaagagtntgtctccacacggacttgagttacttatattattccgataaaggttatcagcttaatagttatgtactaattcaacagatgtcatttggttcatcngtatacccttagatcttataagataacatgataaatattnnttacattactgtgccacaaaatttccaagttatcctcgcctggaactagacattactaattgatcctcttatcagaaaattcacatgcatatattttactttgcatcaaagtatcttattcacacgtacgaagagaatatcgttaattagatattcagtcactaatcattctgactgtgtc

SEQ ID NO: 49381 - DNA, 416 bp, Glycine max
actcaagcttcttgacagtagggattccagcgatattttgtgactgctccaagatagtggctattgaaactgatctataagtgtattctagtgccaatgctcttgtggcgtaatggctatgtgtgtgtattcgaatcctgtatattaaagattctctggtgaaaagatgggagaatatcttggttatagcctactcagtgccatatttggaaaaagagattttttttatgtccttacgagattatagatgtcaacattctattcctgatgttgtggaatgatatatatccgtaaagcatacttttcaattgtgtggtatagcaggattgcatcaccgagtggtcctttggcactatggaattcaaatgacgtactttgcatctatccctgacctctgtggacatttctcaccttct

SEQ ID NO: 49382 - DNA, 510 bp, Glycine max
  unsure (1)..(510): unsure at all n locations
agatgcccaattacgtcgacntacgagcacgnnnannntnagcntgacccttganncgccagagagaatgacgagcgcactctttgttgtatttgagaacagcattcgcggcgtgcctagatgatgttataacgcatcgggaaccctggactttatatgatcaattttcacttatcgattctagtgtaacctgtttaatatactttatataagctattcttcactctattaaagagtgccaatctgttaatttcattaattggcatcaaatatgtttgtgacattgtgaaccggacactacattgaggaatgaacctacacctagtagttgactgtcgttatttacgccactcgctaaagtagaggacaattgcgaccgggtctggttgaccatatactactcgatgcgggtaagttcataagctaacttttcttaatattcaggagggtttaccccttggctgccatcacccacttttaccgctaaaggtctatagatactcgttggcg

SEQ ID NO: 49383 - DNA, 509 bp, Glycine max
  unsure (1)..(509): unsure at all n locations
acttgcttctagctacacctactttattttacatgggtatagagcatanatagtcaaaagaagctacagatcctgcanagtaatccttcatcactgagttcttagatgcaagtcaagagcttacagagctagaatctgtccttccatcagccactgctccataacgagtcagattgaaatattctaatagcgctgaatataactcaatgtattcagctgagccatcagaagggctattatctagtgaacgtgggtcagctgaatcagcaggaggaanttcaaatgggggcagattatcagctagaggttctgagctaaagcggtgaatcctgcaaatgtatgcaattcagactactatataacactgtatctcaagcttatgctgatattcttatttgcacaatctgaagatgcttgtactctagctctacactatatagcacttgctggatgacctttatagttagtatatctagtgctgatatctgactatctgttatctacgaagc

SEQ ID NO: 49384 - DNA, 457 bp, Glycine max
tcacaacaattacttttaaagaattctttaatttctaaaattaatctccaccaaatatgtactaaatggaaaaataagaagaaaaataaaactaagctcaactattatgtgatactaaaagtaagtaataaacttatctataaacacatattaatatgtagttaggttctttggacaaacttccttataaatacttattaaaaaaagtaaaggtaaaatgtattgtgtttctttaagtaagcttaaaattaacttattaatttttggagaatttatgaaaagaaattctataaacgttaattatataagtttttgtaaagtaaatgtataagttaattctagtttataaaaaactgaatacattcttactttcttatctattatcctactataggtatttctagaagaatttatctatataagaccttaataccacaataaatattaatcaatgata

SEQ ID NO: 49385 - DNA, 434 bp, Glycine max
  unsure (1)..(434): unsure at all n locations
gcttcaagtangtgctcctttatacctccattaatttntgctttaccttctcttccatagttntttctccatgtatctcctcaaatgtcttgtgctanatgttgtaacatgattctttagagtttcaccgataaacttgcttagaactagatttatttctatggtcaattctgtcttgtcttgaccatgaatggttagttaggtcctttgatttgcttgtattttggggaaccaccataatttcaaattaagagagaaacttaaactaaggctgtcacttatgttgctaaatctgtatataactgccatagatctagtggctattatttctgtcttgctactattgtatgatgatgaatctttaccatattgattagcaatttctgtatagtctacatgtctcaaatctaaagcttgatgaacttctgacttag

SEQ ID NO: 49386 - DNA, 457 bp, Glycine max
  unsure (1)..(457): unsure at all n locations
ngtacagtntntgaatgagttattatgccaattgacctgcatatacatattatatccagtacttatgcacgctgatgtcaatcattgtgtttgtccctagttattatagaaggtgattatatgaaaaaccattcaattattactgtccagggctatggaggtggaggccgacgaaattctcattgccctgctctcagtcaattaattatatatctagtctctgatttcagatcagaatacttggcctccccaaacattgcatacatatttttatcacaaatattacttttatgtagtaccatgtgtgcatgtaggtttgcgcatgatcccaactcttgtaatttgtatgcagtaaattacttagtacataataatatttgagtttaatttaaatatctgttacaaaataaaacgaaaagaaaaagaactggtgctttgaaatatcatgcatgcatgc

SEQ ID NO: 49387 - DNA, 296 bp, Glycine max
  unsure (1)..(296): unsure at all n locations
tatcacataactggaaagagtctggggtcagacatattattcaatttntataatggtacttccttcactaaagcggtgatccatctccacacatattctatcaatagcaacataataaatctctgcacggtaatgatgagaaatagtgatagtcctcccttctgctcttgaacgaccccgaactggtatatcgcatccatatttggtaccagaatacttctagcaacacanagatctcggacatcggcaagatattatccagccactctctcattgtgtcaaccgagctttgacac

SEQ ID NO: 49388 - DNA, 331 bp, Glycine max
tgtgttctacctcgtagaactacaaactgtagttttatttgttgcccacctattctatagtgatgacaatagaatcaatgccttcacctcatcctcaaatataatatgcactgattccgactgggcaagaatagtattaaattcattaatatgatcagatacagagagaccttctcccatctcgatgttgaacgatcggcgcatcaagtatactatgtaggctgccgacccgtgataagcgagttccattcttcttgcttcatgtcgaccggcttaacccctgataagggctgatacaacttaatgggatatacataagcctctatctaca

SEQ ID NO: 49389 - DNA, 382 bp, Glycine max
ctcattattattgcttaccgtcctccatagtgctcttatttctctcatgtatctctcacatgcttggataatgttttacatgatctttaagttcaccgttaactgcttaaagcagattgattttatggtcaattcgtgtcttgtctgaaccatgaatggtgagttagttctttgatttgcttgtatttttgggtgaacctaccataattctacaaactttaagtgaaaaaccctaaactaaaggcctgtcactatgagtttgcaaaagcatgttgcttaccttgacaaaattctatgtggctgatttattcttttcttgctactcattgtagaagatgagtctttaccatattgatagagcatcttctgaataatctactgt

SEQ ID NO: 49390 - DNA, 447 bp, Glycine max
ctaaatcgaagaacaatctcataattattcccataaaactaaaacttaaaaaaaaattagatatggcctgtgcttatgaataaattataaggtgatataaatttgttgtatatacatgaaaatatgataacaatttttccattttttctactaattcatattttaaatctattaacttcatcttaaattatattataaattggacatttttacaatatttgtctttaaatttatattgaaaagacaaattgctataaagtacttaatttaccgtttgtaattacccttaactaaactaataaaaatataaacttatcttttcaatagaactttttaaaattgtatatttatattaaatatttatgttatattatatatttattattataatctaaatatgcatgaaggaaggcaataatattatcttaattaatatctttattgcgt

SEQ ID NO: 49391 - DNA, 335 bp, Glycine max
  unsure (1)..(335): unsure at all n locations
tctaaacagatatggcatacaacttccctcatcaatggtaatttagagcaagcttatgcgccatatttcttacgaacgttcacttgcacaagacattctattaactaagaaanaatgcactcatatacaatcaaggcagcttcgttatctagaatatatacatgtacttccaaggtgtatntgttacttacatcacacacatctgcttggcttanttacatacatgcatactcaaagcattntgggggtaccananatngcacatgtgcacattctggtattctgatacctatacatacacaaacttcatgatgaatcttggactatctacacat

SEQ ID NO: 49392 - DNA, 467 bp, Glycine max
  unsure (1)..(467): unsure at all n locations
tgtaatcgattacacacatactgtaatcgattaccataatagattttcagaaaatattctcaattgtcacatcttttcatttggctcttgaatggctatcaaaggcctatatatatgtgacttgagacacgaatttgctaagagtttttcagaacaaaaaggtcttatcctcttaaaaagcaaaatcgttttatcctcttacaaattccttggccaaaacacttgtgattcaataaggaattatttgagtgctcaaattgttcaatctatctctntcaagagagatatcttcttcacttcttctttattctgaaaagggattaagagaagggattaagagaccgagggtctcttgttgtgaaagaattctaaacacaaacgaaggattgttgctgtgtgtttagaacttgtaaaaggaatttacaagatagtggaactctcaagcgggttgctcgtggactggacgt

SEQ ID NO: 49393 - DNA, 203 bp, Glycine max
  unsure (1)..(203): unsure at all n locations
gtgtgagggtgaacttctgctttattngttaccacagagtggtacctggagatatgtcgcgggggtcaggagacctttgggacgtcaggtggnggtgctattgcccaaaccaagcttgaccaatcccgacccaacccgggcatagtcggtcagtgagaacctgtgatgtacctaagcaggcgagctcctggcagtcaacagat

SEQ ID NO: 49394 - DNA, 392 bp, Glycine max
tctttgagagcacttccttgagaagctagagcttagctacacacacccctctcataactaagctcacctccttgagaagcttccttaagaagattcctaaagaagctagagcttagctacacatacctctctaatagctaagctcacctccttgagatgagaagctagagcttagctacacaccccctataatagctaagctcacccccatgacaaagaacatgaaaataataaagaaaaagtccttattacaaagacaactcaaaatgccccgaaatacaaggctaaaaccctatactactagaatggccaaaatacaaggcctagacgaaggaaaaacctattctaatatttacaaagataagcgggcgtcatacttagccctgggctcg

SEQ ID NO: 49395 - DNA, 98 bp, Glycine max
  unsure (1)..(98): unsure at all n locations
gagaatctctcccatacccaaatatgaaccaagtagtaaaagggtcacctcatanctccctcttatcatcaaccaagctaactgttgtatccttcatt

SEQ ID NO: 49396 - DNA, 467 bp, Glycine max
  unsure (1)..(467): unsure at all n locations
actaagcttaacatcagaccacttccgggtgctggaactacttcacatggacttgatggggcctatgcaagttgaaagccttggaggaaagaggtatgcctatgttgttgtggatgatttctccagatttacctgcgtcaactttatcagagagaaatcagacacctttgaagtattcaaggagttgagtctaagacttcaaagagaaaaagactgtgtcatctagagaatcacgagtgaccatggcagagagtttgaaaacagcacgtttactgaattctgcacatctgaaggcatcactcatgagttctctgctgccattacaccacaacaaaatgacatagctgaaaggaaaaacacgactntgctagaagctgctatggttatgcttcatgccatagaacttgcttataatctctgggctgaagccatgaacacagcatgctacatacacatcagagtgacac

SEQ ID NO: 49397 - DNA, 319 bp, Glycine max
tatcctagggaacgctgccattctccacagatggagcaccctagaaatattccggcgcttcacaacgcgcatgcatcttttttcttcggtaatcatcttgtcactaagtcgctgctgtctctatgtttgctcattgcaatccctcgcacatactaattttgctccaaacttccttacttacttgttcctgagaacacaactccacactctattcactcatgactattgatcctcatctacatcctgctatgccaccaaatctttcatcaaaatgtcctcacaccctaaaatatttcactgtcttctcctttacctagcg

SEQ ID NO: 49398 - DNA, 317 bp, Glycine max
  unsure (1)..(317): unsure at all n locations
ctgcagcttgagccaatcnacgacaataactttactcggatgtctganttgtgcctctantatatctagacgctcganactgaatgttgaagctctgagacaattcaaacgacaantaacttctactcggatgtctgatagagtcccgtcatatatcgagacgctcacaattgaatgtngaagctctgaggaaattcagacgactaataacttttactgagatgtctgattgagcctcgcatatatcgagacgctcgaaattgaatggtgaagctctgagctaattcaaacgacaataactccttactcggatgtct

SEQ ID NO: 49399 - DNA, 387 bp, Glycine max
gacacttaaaactcagcttaacattcaacttcgagcgtctcgattatgacgagtctcaatcttacattcgagaaaaaagttattgtcatttgaatttgctcagaggttcaacattcaatttcgagcgtctcgttatattacaggactcaatctgacattcgagtaaaaagttattgtcgtttgaattagctcagagcttccacattcaattttgagcgtctcgatatattacgggcctcaatcagactttcgagtaaaaagttattgtcgtttggattggctcacagattcatacattcaatttcgagcgtctcgctctatgacaggactctatccgacatccgcgtccaaagttatcgtcgtttgaattggatcatagcttcaaca

SEQ ID NO: 49400 - DNA, 468 bp, Glycine max
  unsure (1)..(468): unsure at all n locations
tctacttatgtggcagggcgggcttccttcactttcttgtttccaacgcgagctctgaccactgttcttccttcccgcgatgcttcttttcatgtccgcctgagtgggcttatagcctaaaccatacttcccacgattcccttgggtttttatcagactagttatgccgccattgtctttgcctaaacccatcccgggttcataaccgttccccaacataactcgggccatcattatcgccgcctcggacagacaaggttgcccaaagagggagtccacggaggaaatgctgaccacctcaaaagactggaaagcggtttctaacgattcttctgcggcttccacataaggcatggaggatgggcagcttaccaagatatcttcctcgcctgacacgatgaccaagtgcccctccactacgaatntcagcttttggtggagtgtagaaggcacaacacccactgagtg

SEQ ID NO: 49401 - DNA, 250 bp, Glycine max
tcccaacgtgatatctaactatctctattctgcctaaggatcgtttgtttatactcctatggccttgctatctctctaagtggatacatgctccggtgaacattaagcgcctttacaggtcttccttgagataatctgttacgcaaaatggggggaaggaatggattcgttggcacaacagggagggtggacatttgtttcatgcccggtaggtgtttaaggagtgacttcttcattgtaagagcaggtt

SEQ ID NO: 49402 - DNA, 203 bp, Glycine max
tatgataaccggcgagcatgtgtctgacaaccaattagatgagatccgaccacaatgcattgacgcttgtggtggctggtctcctgtgaattgggtgggacatgtagattgtggcctgaagttcactatatacaagggtgggtgatagatcactgtgctttatcatctatagcggaggctgagacaggctttggttatccatg

SEQ ID NO: 49403 - DNA, 423 bp, Glycine max
actcatctgctttgcttcttcacaaacaaatattcggaaattttcggatcatataagatatgaatgcgcaatttatgtcaggaacatacctgtggaagtggttgagcagccattacatcaagccagaaatctcttcgcatgtacatcgatgcaattcttgaagagtctatgattagctctcctctaccagaaacacgagaggaaggagcaatatatgcagtttgaaaccgaaaataaatctgaataatgtaaaatgcatcaatcaatgaccggattatggtgaggaacacttcaagaccagttgacatatcaatgcacttgtctttcttagccctgggagtaaaagaataggggatgcacatataacgaaagctaacaagctgcttagaagattatgttccatgtatttactctatgtgccct

SEQ ID NO: 49404 - DNA, 419 bp, Glycine max
  unsure (1)..(419): unsure at all n locations
tgttgacaagaaccaacattataatggaatgagtgatgtttatttcggatcttntaatatctgtcagccaaaaaaagagtattatttatagggtaccaggggtacaaagttaagtacatgatcatgaaattatacaattaaaggctcccatgcagtgaaatttgacctgcattgatatatgttggtcatgcaagagcgtgtatgcacttcttacagaggcaatcatgttgagaaaaaatgtntgattgtntctatatgttgcacagtaccaatccccaaccaagaataacattgattccaaacgtttattacaaattagcatctgaagaaaagatgttccaaattctcatttaattcatgacaaaatgagcatgatagagatccctgctaatgtacttcaaattctcttggaagaagat

SEQ ID NO: 49405 - DNA, 302 bp, Glycine max
  unsure (1)..(302): unsure at all n locations
ctgcagcttgactgagtcatcaaatttataatatgtgaccatggcntgatatttaagaagagatcaatcatctatctttcaatcttctctcaacatcattcaatatctntcaactcnttntacagaagtttctgattctctttctcttcatctttctaagaattattgttcaaaactctctcttccaagaaaagctcttngtacaacaacttgtgatattcatattgttaattctcttctccccttgccaaaagaacgaagaactaaccacctgaattggtttgcgtctctcttcttcctta

SEQ ID NO: 49406 - DNA, 418 bp, Glycine max
  unsure (1)..(418): unsure at all n locations
ctttaaccttanaagaatgcaaaggtntgaccttaaatgcttataatttcaaaatctcttataaaaagttttaagtgtttttacacattttaaaatagtatatttctctatggtaatcgattaccaaaagctgtaattgattaccaaaagcaaaatttaattttgcaaagttttcagaaagtttgaatttgaattttaaaggatgtaatcgattatcacctttgtgtaatcgattaacagtagctgtgacaccctctacccctcatctatatactaacaaaggaatgaaaattcaaatattaattaaaagtatttttttaaaacatttttaaatactagcctttcaaagggataaaaggttcgcaatcacttccttttacatcatctttaaacttgtccaaattaataataaagttat

SEQ ID NO: 49407 - DNA, 271 bp, Glycine max
ctttgtatagtttcatcttcatctcgtctactctaggtattccttttctgtgtttaagcgagtttcgaccgatcgtttaagccgtaatctcacttaatcgatgtttaaatgaatgtcaaccaaccatttgtgttgtaatctcgtttaatccctcttagaataaaatccagccgattgttcacgctataacctcagtctaaaaccagaaaagtataaatatatgagaataataatataatatactgaaataattataacataatagaagatc

SEQ ID NO: 49408 - DNA, 401 bp, Glycine max
  unsure (1)..(401): unsure at all n locations
agcttgtgaagattctatggaggctggatctgtgagctctaatgaagtccttcaatggtgattactcaccatggagatccagcggatggcaaatgagaagatgataggggaggcaccatccactacggaataagccatggacgaaggagctctcccacctagagttgtcttggatgataagctttaacaggatgctttaatggtggacaaaaaagacagaatgggggagcactaaattgtatgactaaaagagggagagaagtggaactttgaactgcatctcatatgactttcattcatcgaagatacaaccagtgttacacatgcttctatttatacactatgacgcttgcttgagaagctttcttaagaaaactttcttgagaagctntcttaacaaa

SEQ ID NO: 49409 - DNA, 230 bp, Glycine max
  unsure (1)..(230): unsure at all n locations
acatncacaatgcgcgcataaacccaccatcctctgtagctcacctgcaactgaactcacgtactcccacgtagcccatatcctcgtttctctccacgcgggtccacatcaatcctcccaagcttgcacaacatccaatcagaacaacattcaaacagcacaagctatcacagccaagcaaaacagagcagatgcagataactctgctcaacacatcaaccaagatcaca

SEQ ID NO: 49410 - DNA, 412 bp, Glycine max
  unsure (1)..(412): unsure at all n locations
tgtaggcctaggatcttctntatcaatggatttctttgcttcttggaagatgaatggcaacggaataaagaaggaagagagagaggagacgccacttcaaggagaagatgagtctagaataagctcaccaccataggaggccatggataagagcttggaggaagaaggagatgaatgaagagagaggaagagaagatcatgaaattttgtgctctaaaagagctctgaaatctcaagtttaattttcaaatgatcaaagttggaaaaatgcacacacatagcctctatttatagcctaagtgtcacacaaaattggagggaaatttgaatntctattcaaatttcacttgaatgtgaaattcaatttgtggagtccaattttggagccaaaatttcactaattatgattagt

SEQ ID NO: 49411 - DNA, 214 bp, Glycine max
actcataacatcacattctcactgtctaaccctatgttagttctacccttcgtctctaacagactatcatcagcaatttcagcatatgagcatctcatacatcatcacagaaacgctacaacagaatgggtgcgttaactcatccatactggcaattcaacatgctttcacaagagtcttacaaataacctcatgagcagaaactaacaaacta

SEQ ID NO: 49412 - DNA, 456 bp, Glycine max
  unsure (1)..(456): unsure at all n locations
ntntgtgaagaagtttcactgtttggctcaacattatttatgatattatttgtgatataattntacaaaattctgatatcaaatcaaatcaaataaattatttaagttagaaaaacagaaagtcataaaattattataacaaaaaactattttcacagtgataatatagatattaatataatgtgaagtaaattcttcatctatgtaaattaaatgaaaactttcatatttcttatatatatatatatatatatatatatatatatatatatatatattatattttgtttcgttagcatagtaagaaatttatcaatggcaaaagtgttaaaataaccatgcaggatttatccatcaagaaaaaagtncttttgtgatcacatctattctctcttcacaatggatntatcttggtgatggaactatatcatcatgtcaaaaggcagctagtgagac

SEQ ID NO: 49413 - DNA, 114 bp, Glycine max
  unsure (1)..(114): unsure at all n locations
aggatatcgtcaaccagaaggaatagattatgatgaaacattttcttcctgtggcantgctcanatcaattcggattctacttgctatagcagtatactatgattatgagatat

SEQ ID NO: 49414 - DNA, 462 bp, Glycine max
  unsure (1)..(462): unsure at all n locations
tatcaaatcataaagtgataaggaggtgataacttcatatagatcattagcatattaaacactcataatcgtggcaagttattcaaaagttgaataaatagtgcttacaataggatggccatcatgatgaacaataaacaaactacaacacatagctggtgtgctaaaaacagctaattaatgactgagcctgtagtgatgacccgattgcaccatctatgtttagaactaagttattttccttggtgagggtgtagttttcaacttcaacagcatactccatgtttttcacagaaggaaaatgcgtgcgtgcaaacttctatagcaactccactctcttatgtttgctatccctattcttcatcgattataatttacagaacaaaatcaagcttcatacatttacattntaacaggcattaaacaaccaaaataaaatagttataatntagtaaatgaaca

SEQ ID NO: 49415 - DNA, 411 bp, Glycine max
  unsure (1)..(411): unsure at all n locations
actctggcttctanatggcacccttaactttacccggattanatccaataacctgacccttatgagttatgaccatctggcccnaaaccaacatttgggttatttggttcttgacttgggaacacanattcatttgaaatgtaactttaagactaagactgattactctggttactatttgtttgtatgataaggaaagacgtataatgacaatgtgggtaatcatttatttaaaaatcgatattattattttataatttattaatgagcttataacagaattatttatatatatcatttatccataatatgattgttatctactctgaacaagaaaattaaaaaagcaatttatatgtataaaattgataaacaattttataatatgcaaaataaacaatcaatattata

SEQ ID NO: 49416 - DNA, 478 bp, Glycine max
  unsure (1)..(478): unsure at all n locations
tcaagcttaaatgaaatctaatagagggttttgtgtatttcatacgacgaactagtttcaatctgttttacacactataagttgtactgccagctgagacgctagaaagaaagaattttggatgacattacttaaatttcatttcaattgcagacacaaatcatgattgaacaaatggaagagcttcgcagaagggtgagaaatgttacttgcacacttattttggccttataattttacttttgtctatactctatatatagtcaaattaactttttaacaagtcaattactgtccaagtatgtttttgtaagacaaattgaaatcttaatatacattatggatccgtgttcgttaatttactcaattttgatanttttcaaccatcttgcaggagcgccatcttggagacatgaataagcaactgagactcaaggttttacaatgtagcacctaacaacttaagcgtagatcgatg

SEQ ID NO: 49417 - DNA, 261 bp, Glycine max
tagagtatatctctcttatcgtagagagagtgagtctcctatagtcttgagtgattcaagaacaccctggctgtatcataggactttcacaacctttgtgtgatgccctcgctggaaagagtgattctttgcttcctttcatcgtcacccttgctctttcataccacaattacagactatccacctgtgcccagagatatctcgtggccataactcccatcttacgcactctgattaagcgattcttgaacctaaattgac

SEQ ID NO: 49418 - DNA, 474 bp, Glycine max
  unsure (1)..(474): unsure at all n locations
aagcttacacagatnttagtatgacccactaacctagaattataataacttaatgccattaacctagggaattaaaaaaacttaatggctgagtgtaactgaaattgtggcaaccaaaagtcacccccaacagccaacaagtcagccaccatttggtctcccaaaaggctgacgcctaggttgccaattgggcccttattacaacttgaactaaacctaactaaaacccttttagttgattaacccaaaacatatttttggtcagacaactttacaaggattgggccattatttagacaaactaaacactctaaaattgaaacaaagtggtgtcatttagtcctcctccatttgggccatgatacaactcacaaccttggacttttctccttgaaacttgggcttgtattcaaacagtatggacagcacttgttgaagagcttccttggctttccttgctctagcccttgtcat

SEQ ID NO: 49419 - DNA, 281 bp, Glycine max
  unsure (1)..(281): unsure at all n locations
acctctgccggtttgattgtcccatgcttgctanagagagacaaaagctggtgcatatcanaactccgatatctcatgggtggaatggatgaatgcatgaacgaatgcatataacacagtatgtatctatgaatgctgtggtccggtgaattcgtccccttcttagacacaatgtctaggtgtagcaaagtgccccaacgtacgtttataagaatgcgacactgactctttcttggttngtatacagaagggatcaagacagaacccatatgcgatgccta

SEQ ID NO: 49420 - DNA, 442 bp, Glycine max
agccttgccccttgatatatctgaaggactcatgagacactatgaatgactaaatccttgggatacaggtagtgttgacatgttttcaaagcccgtactaatgcatacaactccttatcataagttgaatattataaggtaggaccacttaactatacactaaaattagcaattggatggccttcatgtatgaacacagccccaatgccaacattagaagcatcacactcaatttcaaaagatttttgaaagtttggcaacgcaagtatggcggcattaaatagcttttgcttaagaacatcgaaagcattatcttgtttctctacccattataaaccaacatctctcttgagcacttcattgacaggtgctgccaatgtgctaaaatccgactataacaacttgctaagccatgaaaactactcacctcggacacacactt

SEQ ID NO: 49421 - DNA, 270 bp, Glycine max
  unsure (1)..(270): unsure at all n locations
agctctattagctgaccatttatcataacacagttggtttattcagataatagagtctatctcntttatcttagtgagagtgattcaagaacactctcgctgtatcacatgactntcacaacctttgtgtgttgccctcgccgganagagtgnatctntccttcctttcatcttcaatcttgttctttcagaccacaattccagaanatgcacttctgcccagaattatctcgtggccataactcctcatttacgcactcaaattaagtg

SEQ ID NO: 49422 - DNA, 456 bp, Glycine max
tctagtcgtccatagacctcctctgtggtacggtctagctaacgttgcatctgtgcattcatcgcatccactaacagacgttgagcgccgtccaactgatggtactcgtcaccaccaccacctgctccagccataattcaacaggaaaaaaaaaatgtgcaataaaaattattaaggtttcaggacctcacaacactctactcacgtctcttagatggtagtacactcgtgtttaatgctctcaataagcttttgtgtaatgtattccctcttgccttttaccactcgtgtttcctcttaagttcctggatggaccaaattagacacacaaggtaatataaaataaaaggaaagacaatataatgatcacaaacagatttgatttgggataacaacttggacttgatttggataataatatattagaattggatttggataacaggtgagctttaa

SEQ ID NO: 49423 - DNA, 213 bp, Glycine max
  unsure (1)..(213): unsure at all n locations
ctccactagagtaagtaaccaacaatagtataaaataagagtggtntggcacactttnttctgtccaaaaataaggtgaattaatacaattcctttttaattattntatttatntatntagtaaataaatagtgggacatttaatagaaagtatattctaaatgtgcatttattattangcattaaatgaattcaatgatatttgaatagtac

SEQ ID NO: 49424 - DNA, 476 bp, Glycine max
  unsure (1)..(476): unsure at all n locations
ttgaaattgatatcttagttgtcaagttagtttatactttaatctcatttaccagttttctttcatgagctgtcttcatataaatcattctctttgatttatctctttcatagctcttgagtgaccaacatatatgaggactagaagtcacaatcttttctttactttatttgatgtatacaaattattaatagttaggatacttaaacattggtgataataaatatagatatagtggaaaaaaaagaaaaaaaaagatttagaagtattgaacgcaagtataatcaaccattttttttactgcaataaggttatcacacaaatttcatatattatttttctaaataccattaaaccaattnttttatgttctaagtaaaaagataattatttccatgcagctcttatttttttaatgtattttattgttattaatgtaattcattaaaaaaattaagatacctacataatacata

SEQ ID NO: 49425 - DNA, 393 bp, Glycine max
tgcggactataccttcgaccaaacacggtcgtgtttctgtctctgcccggatttaaggcgggttgcagcaccggctccgcttccctaactgtactagaggcagttgccgtggctttatcctctacagctttctggagttttaacatgacctccgagatggaagccatctgatcttttaaagccgatagatcggccttcatctgttcctgcacgccctcttcattatccatttttctggatcgagtgttataggggtgccttggtgttttctttgttatgatgaaattcctaaagaaataaacaacggtgagtatgccaccaaaacatgaatatgcaaatggatgatcggagcacttggatccacctcaaggattttagatcacatgatgagtt

SEQ ID NO: 49426 - DNA, 300 bp, Glycine max
  unsure (1)..(300): unsure at all n locations
agatttgaatatatattgcaatntattgttgctttttgtgaagggtcattatattttggtcgcatgttgacaacccttatatacacactttatgatcataaaacttgatatacactatacctgtatcaacttttgaatgatacacatgtcattatagaaactattccatacccttacagattatacactgtttggtgctatgagatattaatgcaatgataatataattgtatatcaaaaaaaattttattatgaatactttctatatcactactgatatgcgaaaagaatgactatgta

SEQ ID NO: 49427 - DNA, 372 bp, Glycine max
  unsure (1)..(372): unsure at all n locations
ggcacttatataaagatgaaaaanactcaaatgtgcaaaattatacaccaacgacataatgtaaaacatcatagttataattgttcataagtcagcacttgtacactaatatcataaatgtgtgaaataacaatataacatgtaatggccacgataaaggaaattgaaatgaagtttttaaagcctatttgttttggggagtctcttcttcgaccaattatctgtcaataactttgttgaaaatcttgacctacaagacatctaagtctggataacgaactcaaatttgtgacatggtccagtcaaatcccatctcaaattactcaaaagccatcacatcacgtcaatgtcgacttcttgttgccttaacat

SEQ ID NO: 49428 - DNA, 478 bp, Glycine max
tacggacactatgaaactaagctatgctgctatattacaatagacctcctcaacctcatcagcaaaatcaaccacagcagaacaattatgacctctccagcaacagatacaaccctggatggaggatcaccctaatcttagatggtctagcccttagcaacaacaacagcagcctgctccttccttccaaaatgctgctggcctaagcagaccatgcattcctccaccaatccaacaacagcaacaacctcaaaaacaaccaacagttgaggctcctccacaaccttccctcgaagaacttgtgaggcaaatgactatgcagaacatgcagtttcaacaagagaccagagcctccattcagagcttaaccaatcagatgggacagttggctacacaattgaatcaacaacagtcccagaattctgacaagctgccttcccaagctatccaaaatcccaaaaatgtcagtgccatttca

SEQ ID NO: 49429 - DNA, 452 bp, Glycine max
  unsure (1)..(452): unsure at all n locations
gctgcttggaatntaatcaatgaatcaatcatgtcactgaaatttggaacataaatgaacttctcccttactatcattctctttctctattttttctctctctctagctgccttgggctgatggtggggtaccgtttaaagaacgattctcagaattataccaaatctcttcccaaagattgcattctgttgaagacatggggtactttttcgagcatgggtgggaatggaatttctcttggagacgtaatctatttgataacgagatgggggtagcatcaactttcttagagactattgctgctatcagaatttgtggtaccctgaaagatacctggctgtggggagctgaacctaatggcatcttctctactaaatcagcctacaacctcattaaagcagagcagctnttggaagatcaagattcggcgtttcaccagctttgggatctt

SEQ ID NO: 49430 - DNA, 111 bp, Glycine max
aatgtgactaattggcagcttggaaagcccttgacgtgctctccatgagctcagacatgccttatatgacttcttgtatctttccaaaactaacaatacatggataaagca

SEQ ID NO: 49431 - DNA, 446 bp, Glycine max
  unsure (1)..(446): unsure at all n locations
ngaatacaatagaaattgctaacttaacagagctaagattcactcaattcactcaagtttcgtttgtccaataaaactgacaacattacaacactttgtttgttttgtcttaagttattctttgtgattcaacaacattaacacaaacatcttcaaactttatatagactttagagctttgatctgttgagagataaactatatatactttgtccaatataacttgggcatttctttgtgaaacattttaaaactccacttgactcacataaatgctttaagaagttggtttatcatgatgcaatcctaccccgcaagggcattggatagaagactccaagtagattgggccagagatccaagggaaggtcctatggttctcatgagccttanggtagatttcaagctcatgggctaagtatgagctcgcttatctttgtaaatat

SEQ ID NO: 49432 - DNA, 365 bp, Glycine max
  unsure (1)..(365): unsure at all n locations
tctctctcagcgaatagactaaagcggtgcgctagtgagatgagcgngcgctcacgacctgtcaactatcttttcaatcttctacctaccaagaggtgcctacgacctcctagcagcaatactagcagagggaaaacacactttcaaatccttatttcctgaatgaaaaattgttatacaccacacaatggaaggcctangttctattacctatacttatagaaagtcttatacactataaataccataactgaggagttgatcatttacacatgtttatcacaaagtagtctatcattactacagtgactcactgtcttgtgacataagacctgctaaaccgaaatctctgagatacctgcgtg

SEQ ID NO: 49433 - DNA, 341 bp, Glycine max
tgtcggccgcgatcgacgaaaggcgcataatacgacttttttctctgcgtgctatatggcttctcgtcgtacacacaacaaaaagtctatacggatgaccactcaggtatttccggccgtcagcgtgactcaaaagacacgatgacatatcttgtgagcgcggaagataacctaaatctccacgtgtcaacgggcttgtcggccgctattgacgaagggcgcacaagacgacgttagactctgcgtgctatctggcttttcgtcttacagacaacaaagactgtatacggataaccactcgggtatttccggccgtcagagcgactcacaagtcagtatga

SEQ ID NO: 49434 - DNA, 380 bp, Glycine max
aaaccgtccttttttttttttggtggtctgactggttaagaaaatgatctaccatttttaaagcttaaaaacactatgtatacaagaacagtctacaaacctaggaaaacttaaaaaccttgtttttttcttcttctctgctccctgactttcttgtctttcttcccatctatcttcttcctcttattaactagctatcttgaaaactggcttgctgggaaaaactatctaccttataatctgatatactatacactactattaaattctggtgaacattgatacttagtgccaatctaaaataaatcaaaaaaaaaaaactgctcaatttgtgtagattgtgatatgtaacttcatttagatattatcagtatcacaat

SEQ ID NO: 49435 - DNA, 80 bp, Glycine max
  unsure (1)..(80): unsure at all n locations
tctacactntgtacaagaatgaagctctgataccatttgttagacaagtggcctcagatatcttaagaaggggggggggg

SEQ ID NO: 49436 - DNA, 514 bp, Glycine max
  unsure (1)..(514): unsure at all n locations
tcgtcaaacanaagtnttgcgaccactaatcttaatggaacanaatgagggatcttcacaaatcanacatttggttagagactaananatngaatntataataagtttaattactaagaactcaattaacccttttatcttttattgactatnttatcnacaattggtatccttttcagctcattggatactnttattctctattcaactagnaatatttattccttttcagctcaccannacttgatntatagtattaatggtcttatcttgatatngtaccgcngattataaatattgaagagagcgccttcaagttcaacagaatccttcgtagattatgatcataaaagcctcaaatatagagtggaaattaattaaaaatcagtgcactatgtttctactctttaaccttaaatatgaatgcgtgtaaactatataattataagttatggggaagtaacattatataaaaatcatacgcttgacaaaatacacatatanaactctaaat

SEQ ID NO: 49437 - DNA, 460 bp, Glycine max
  unsure (1)..(460): unsure at all n locations
taactactcagatatgggaactgatggaatgaagattcgcttcttttccttcgctgtcttggacttatgaaaatatttctttaggaactnttccacaacttcatcccaagtccttaagctattacctccgaatgaatgcaaccacctcttggcttctctagatagtgaaaaatgaaaataagctgagcctagtatcatcttctggcacaccaacaattctcgcagtgttgcatatttcaatgtatgttgctaggttcacgtaaggatattcatttggcaatccatgaaacaaattgccttgtattagctgaaccaaagaatgtggataggtgatattttgagcctgaacctctggccgcacaatactggtgaaaaattgtggcacacatgtactcgagtagtctttaagggttactcttctggngtgctcttcanccattatgtcagctacgggcactat

SEQ ID NO: 49438 - DNA, 454 bp, Glycine max
ctcaagcttgtgatcaggcctgtgtcttataggctcgtagacgtctatatttatggtttatgacagcggctcaactgttagccctgatgttcttgatctgactctagacgaactcattcataacttttttgtggcgcctacatggtcacttcattggattgactattttacaatagtgtaatttacatattgtatgatctctataatactcactgccatgagcgaacatgatcccactcagccgcaatatggtaagatcgggtgagatcacagaccatctcgcgtaggattgctgggatcttgcaatctcaccacacctgaaatatagtccaatgtgaggtttttgacctgcaacctatttttgcacatgaatatgcagatagttctgaatctgaaattggagaaatttactcccattctcaaccattctaaagctgaaacctatgttgcatgc

SEQ ID NO: 49439 - DNA, 271 bp, Glycine max
  unsure (1)..(271): unsure at all n locations
tgagtggaacccctatactagatgaaggttgatactgccttgctatgtaacaagaactgatcangctataaggtgatcattgctatctgaagagttaaaggtcaagctgtggaaattggaacctggtgagacaagatgcatcatcagcagggatgtaaccttngatgagaagcagaatggcatgctgagcaaggagcaaaatgataacatctcaagtagtgagagtaccaattntgaggtagagcatttctgaaattcagatcatggcagt

SEQ ID NO: 49440 - DNA, 473 bp, Glycine max
tcaatcgtgacgggtgtacatccaccactcaagtatttcatgaagattaatattgtctaataaatacaatcttatatacaatatagggtatatattgaattggtgtgtatcaatcacaagtacatcttgactattgtttaagagaaaggttagaaaaaaattacatagttgaatcaacatcattaccaatgtgattagaatgataaaaaaaacctaacaaatgaaatcccagacatcacatgataattagaaaaatacaataataataaagaatagaaatattaaaaattagatatacataaattaatattatgtacagggaaaaaatgttcaaacaacaacatttttgttgatccgaaaaatatcataatttgtgcctaaatcgagaccaatctagatccaagtgtaattttaaaatcacaattcttaagaagaataaattattctgcattgtgaaacgtatttaatgatct

SEQ ID NO: 49441 - DNA, 197 bp, Glycine max
  unsure (1)..(197): unsure at all n locations
ttgtgtctgtgaagaanatccaagccgaggcgcttccgtaacgtttccgtgggtgatctcgcatagaatttcaactgttcttcgacgttctttattcgttcttcagtcgtgcttcgcgtcttcaacccggtaagttccccgatatcgaacttctcaattcattctatttacccttagtggcctcatttgtgtcacgt

SEQ ID NO: 49442 - DNA, 451 bp, Glycine max
  unsure (1)..(451): unsure at all n locations
agtcctaaatgacgtttcaagctaggatcaactcagtgttacctccattgaccacagaaggaagattttgccttccaactatcaaagcctcactctatgtccactcatgacaccacattctccctttgtaacggtaggttaattccacccttgatctctaacagtgtgccataggccatttcagcacatatacatcacaagcatcatcatatagaccctataactgagtggggaagcttaactcatccaaacatggcaagttcaagatgctttcaacaagttccttcacaaatgatcatcatgaagcagaaaactagcgaaactacccatcatatcttccaaaaccccatacccacgaaaatcaagagaggaagaagtctacccaaacctgaaatntcaaagtcccacacgtagagacgcgcttcacgactccgaaaatgcgcttctttcg

SEQ ID NO: 49443 - DNA, 354 bp, Glycine max
  unsure (1)..(354): unsure at all n locations
tgcaagcaatcaatngggcaaaacacaccaattgattatgatgatggatggctcanattctcacataggtaaactcatcactttcatattgngctttcaaaactatcatgacatgtagaggagaatcaagggattcaagtcacacaatgtcaagaacttttatnttcaaaacaattactcatttcttgaacatatcctataattcanagaanaacatgcatagtcgtacatgcacacatnattgacccaaatattaaactataattccacgaactacaacttaacatataccccactaacaataacaaaccaacaaacttcanacagaagacactcctcccatactaacaacca

SEQ ID NO: 49444 - DNA, 402 bp, Glycine max
  unsure (1)..(402): unsure at all n locations
tgcttgtggagcttctatggaggctggatctttgagcttcatgaggtccttcaatggtgatttttcaccatggagatgcagcggaagacaaacgagaagaggtgagaggaggcgccatccattaaggaataagccatggaaaaaagagcttcaccaccaagatgagccttggataagaagcttggaaggatgcttcaatggaggaaaagaaagagggagagaaagagagaggggggagctcnattttgaaggaagaaaaagggagagaagttgaactttgagttgtgtctcacaagactctcattcatcaaagttacaacaagtgttacacatgcttctatttatagactaggtagcttccttgagaagctctcttgatacaacttccttgncaancttctt

SEQ ID NO: 49445 - DNA, 366 bp, Glycine max
ctgcagctgcttatggtttatgcttatgtgaaattttttattgctgtaaacttatagtacttcattattttgatcttgtattgctgcttttgtactgttggagtgcctactgaatggacagacatcgtgcctcctgtaaattgataagagcacggccactccttaactatgactagagcacttattgatgacacaagaagctacacaaatctgattttgactttattggatactactattcttaatttgtcaaaggcttcttaagggtggactcatggaccactcattggaatattagcattcttagaatgggttgtggactaatggtctcaccttatacactgtacttttgcttatctgtcttaa

SEQ ID NO: 49446 - DNA, 453 bp, Glycine max
  unsure (1)..(453): unsure at all n locations
cttgngatgggattcaagtattacatactacatctttntgttcaatttataaagataagagagagagtcctgttgtgttgcctcatgtgaacctcatgattatgaatttaacaatatctgatctatttatgcatatttcttgttacagaatcttgtaaataaagagctttgtttttcggggctctatcccaggcttatccaaggcagaaaaacttgaatttgtttggtttgatgattgtgaaagcttgcgtgagctccacccatccatgtcatctctccccaaccttataactntgtctataactagatgtagagggattgaaagccttaatgttcattcaaaatctctccaaaggttgtatgacaatggttgttcatatctgtcaaggaattctcagtggcatcaaaggaaatgacaatcttgaacttatctaccacctncatagtgcaatt

SEQ ID NO: 49447 - DNA, 333 bp, Glycine max
  unsure (1)..(333): unsure at all n locations
attgtcttctaaagctataggcggcatgtcgaagttatcatattggcattgcccttgctacctataatatcataaatgtatgtgggttcattgtgggcgtgatgtctcacgggtttcagcttatagagtacacctcaacaagttcatccggccgtgtggttcacacttgagtaatttattatggttggttgatggatatttcctattcttgtgtntgcttgcaccattttagagattagtccgtgtactcgtgatccactggtgggtatcttcttgctcgactaatctagtatatatgtcatgtgcttcaatttgtggaaagatgatcaattt

SEQ ID NO: 49448 - DNA, 470 bp, Glycine max
cctcttcctttctcttgcttcctctctagtctttatcgaagtgttatatggtggcttagccttcatcaaaacattcctacttttacatttaaaatcttaaatcacatgatgtcatgattcacattctcttctctttatgactaacaatatcgatctaatttcatccttcttcgatgaaaaatccaacgatgttagaagtgtagaacatattgagatgtcaattatttcaaatatatatatatatatatatatatatatatatatatatatatatatatatatatatatatatatattaatttgtatgcactacaggctctgagtttttttcttccatattaagtggaacacgatctcgttatgatgtcttgtcctcttatgcacaagatggtcacatccatcttcgctctacctttaatcatataagggactctgtgtaggttaaaacgaatggtctcagagcacatcct

SEQ ID NO: 49449 - DNA, 335 bp, Glycine max
atgcatcagacaaagatgatggcaaatccatttcaggatatgttttcactttacatggtggtgcagtcagttggaaaagttccaaccaagctacggtagctgattctactactgaagcagaatatatagcggcaagcgaagccgctaaagaagttgtttggattaaaaagttcatatttgaacttggcgtggttccttcaataaaagagtcggtcccattattgtgcgacaataatggggctattgctcaagcaaaggaaccaagatcacaccagaagtccaaacatattttgcgaaggtgtcacttgattagagataatagaacgtggcgatgt

SEQ ID NO: 49450 - DNA, 260 bp, Glycine max
  unsure (1)..(260): unsure at all n locations
tccttccccttctttnccttcccctctttaccttttcttccctccttnncncccngatcaaaagaaagtagagaggggggggggggagggtgcctcatttcttccttttcttttccccaaaggagagggggagggctctttcccctcctcttctttttctcctccttgcttgtcgctgcttcgtttcttttctttcccctacacccgtacctgtttgataatcttttttttatacccctgttctttcccccctttctctc

SEQ ID NO: 49451 - DNA, 353 bp, Glycine max
gaggaactctttatgtaccgaggcctgaattgtcaggtagaactgggactagtgtgtctatggcaaaccaactgccatccgaccacccgcattcagcaggaaactgtgagactaacaggactctgcagcaccgataaaacaagacacagcaggagctggggggtggcacttgattgatatatcgagaggcttgtatcatacaaggtggatcgttccagctaaataaggggagtaaatgctctgatcatacaagtgtgatcatacacctaaatggatagacggaaggtttgaacataccagctggaacatacagctaaatggacagtgggagcctgaacatacatctggatcat

SEQ ID NO: 49452 - DNA, 440 bp, Glycine max
  unsure (1)..(440): unsure at all n locations
ctaggagaaaccataanaactaaggtagttcctaaacatttatcaattgaggaagcttcgccaagtatccccattgaaaaacctttattcaaacctttcaaagttagtgagaaggctaaacgaaaaattacggaacttagaaaacctaaatccttaattgaaggcataggtgataaccatagtgaattacttaacaagattggtagtttacttaaggtcattccagatactccccaagcctcggaaaatactttcaaaatggtaacaagaagtacctccaaattaattaatgttattaatgaagatagtgacctatactcagacaacacaactgagataggatcagtgtcagaatagaatataagtccaattaattccaaacactggaaaacaccctccaaattatattatcaacgtccgactgcccctgacctactatt

SEQ ID NO: 49453 - DNA, 280 bp, Glycine max
  unsure (1)..(280): unsure at all n locations
gctatgaccttcgaattctcagagttccgttgttcaatttcgagcgtgttgatgagttatgtccccgaatcggacatctgtgtgaaaagttatgaaccattcgatttctcgagagctntccgtgttcaatntcgagcgtctcgatatattatgaccacgaatcggacatctgtgtgtaaacgtatgaccatttcgatttctcgagagcttccgtngatcaatttcgagcgtctagatgagttatgtccncgaatcgaacattcgagtgataacttatgac

SEQ ID NO: 49454 - DNA, 420 bp, Glycine max
  unsure (1)..(420): unsure at all n locations
ttagagtttatctcttttatcttantgagagtgattctcctaaattcttgagtgattcaagaacaccctggctgtatcaaaggacattcacaacctttgcgtgttgccctcnctggaaagagtgattctttccttcctttcatcttcacccttgttctttcaaaccacaattccagaaaatccacctctgcccagaattntctcgtggccataactcccattttacgcactcaaattaagtgattcttgagcctaaattgaatttcaaaacgagtcctttcacctcgttttggaatcacctcatttggagccctttagcttcagatattaacntttctatatttctgtccagccaccacttaacctacgttttaccatcccattcatccattttatgccaagaaccaccttaataagacc

SEQ ID NO: 49455 - DNA, 258 bp, Glycine max
  unsure (1)..(258): unsure at all n locations
ttcgcacatctttctcgtgttngatatccacttcgacatgtttgaagtagaggaaaccttcaatcctataacgcaacgtggcggacaaaagtgggcagataacttgaatgacctttattgacaacgctgaaggtattctgcgcttcactatccatgtacacacattattgcaactagaggttcgtgagcatgaactactaccaatatatagatgttgtgtacgctaatgagcacatgttaanagcatactccacacag

SEQ ID NO: 49456 - DNA, 482 bp, Glycine max
  unsure (1)..(482): unsure at all n locations
ctaagcttctactcgtccatatacctcctcattggtacggtccagataacgtttcatctgtgcattcatcgcatccagtaacagacgttgagctccgtccaactgatgatactcgtcaccaccaccacctgctccagccataaatcaacaggaaaaaatgtgcaataaaaattattaaggtttcaagacctcacaacactctactcatgtgtttaactcttagatggtagtacactcgtgtttaatgctctcaataggcttttgtgtaatgtattctctcttgccttttaccactcgtgtttcctcttaagttcctggatggaccaaattagacacataaggtaatataaaataaaaggaaagacaatataatgatcacaaacagatttgatttgggataacaactcggacttgatttggataataatatattagatnggatttgatgacatatgagccttaatttgcgtaacaaatatgat

SEQ ID NO: 49457 - DNA, 293 bp, Glycine max
  unsure (1)..(293): unsure at all n locations
tatgtctgttggngtggttatagcctacccanacttccactgtttnctctggctgctatcaggctgngtctgtcgcccgtgtccttgcctanacctatnntcggctcgtaaccattccccaacatcactcgggccaccattactaccgtatcggacatgcaaaggtgctaagagaaggaatctacagatggcatgcttaccacctcataagactggaaggccgttctaatgactccntcgcggctttcacatatggcatagaggatgggcatctcaccangatgtcttcctcg

SEQ ID NO: 49458 - DNA, 464 bp, Glycine max
  unsure (1)..(464): unsure at all n locations
accggtgagaatgtgaccttactctgtgaatgaacgtctagctgtgagtaataatctttgcatgaatctctgaattttagaatgaaatgtataaacgagaacatgatgaaggccatgattgtacatacacaagccttttgaccaaaaaagcttaccttgaatgataattatatcctttgcaccctttttgagatgagtgattttgtcataaattgaaccctgaacttaaataattatctcctgataccttgcttagattctaggagagcatatagttcaaagaaaaatttactccaaattagggcgagtaaaaagtcagtgaagaatgcaaagaaaaaggtaaaacatcagcacacacaacatataagttgtatgttaaaaaaaaaaaaagaagatagataagtgtgctgatgtaacaaggtcaanaacaaatgatagtgaanagctagtgagcaagccaattg

SEQ ID NO: 49459 - DNA, 338 bp, Glycine max
  unsure (1)..(338): unsure at all n locations
tgagagtgtcctttgtaaggacttctggaaactcttcaagttgctccagatgcccagaactgctaaaagtcagatgacagcgcgagactntccgtcgatacacgcacgttagacgcgcacacacctcagcctaggatggctttcggacacctcactagacacagtctgatcagagaatgggcccgtggatctgtcctcatgcattatcaaaagctgatatcatctgcaaagagctctacaaactggaggcagaccttgacaccttgcatcagatcgggtgaagcaatgtgctcagcctgacaatacaagctgatcgatacagatgactcgacctccac

SEQ ID NO: 49460 - DNA, 395 bp, Glycine max
  unsure (1)..(395): unsure at all n locations
aagtgtngaagggggaaacttcctgctnttttgtttttcacacagaggtacctggagatatgtcgtgggggtcaggagaccttggggacgtcatgtggtgtgctattgcccaaaaccaagcttgaccaatcccgacccaacccgggcatagtcggtaagtgagaacctgtgatgtacctaaacaggcgagctactggcagtcaacagataaaaggaacaaagaccacaaagcaaggaggcttgtggtggctggccagctgtgaattatgtgtgatatatgggttgtggcctctggtaatcgattaccaacggtgggtaatcgattacaaggcttaaaaatgaagacaggaggctaagatggtctctggtaatcgattaccaccgggtgtaatcga

SEQ ID NO: 49461 - DNA, 203 bp, Glycine max
tcttgaatgcaagtcaggtctgctttatatactctcatgtctggcacaaaccatataagagtataacctttagacaaactcgataaccattggaagagctacatcttctgacttttattcaatactagtcactagtaatcgattaccataaccatgtaatcgattacacaaagcatattatgaggagatatgactcttcacaa

SEQ ID NO: 49462 - DNA, 439 bp, Glycine max
cggaagaaagtgatgaggtacaagccctaaaggcagagctcgaattagcccgagtagtcgaagagaagttcaagtccataaccatcaaagtctgaaaagagtatgatgaactaagggacgtcaatatggccaccgctgaagccttggaacgagaaaccaagaaggcccgaaaggaagaacacgtgccagcgaagttttgaggggctttatagggcagcaatagtaagctcaagctccgaagaggtgaaaggaatcatcacgggtcaaaggcatgatcttgaaggacgagctaaaggcttaccttatgtcgaaaagaaatttgtcccaacagttaagcgagactgaagggaatatgtgggccgacatcgatgagtgcaaagagaagctaaatctagcggcgactcacgagcaaaggctagaggatgagtacgccaagata

SEQ ID NO: 49463 - DNA, 453 bp, Glycine max
  unsure (1)..(453): unsure at all n locations
taggttnttgaagtgtgtcatttcaatttctcactaagtaaaatggatcattttcaaggtccaacgccttaaaatgatcacctcttaaagtaaaaaagaatcacttgataagaaagaactacgtaggtctgatttcctcttcgcaattgaggaatacgtatgagcaaagggaaacaccctcgtcgacgacaaaaagagaaaaatataataagggtataaaagatataaagacataaaaagggaacataaaaatcaaagtcatgtntgcacattcgatcaaaggttgccgtcccttgggacagacgtgtggggtgctaataccttccccgtgcgtaaatacaactcccgaacctttcacttataagttcgtagatcgcgtcttttccggtttttccgacgtnttcctcatataaacgttggtggcgactccgcgcgtattactcttgtggaaca

SEQ ID NO: 49464 - DNA, 424 bp, Glycine max
  unsure (1)..(424): unsure at all n locations
aacaaatcanacgtaacaagaccattatagtngctggttgaatacctcacccactcaagtgtatcacacaatgatggcttttctctaatgaaacactcttgccttntaccactctaattccccttgagttcttaggcaattcaagagaatatggccacaacaaagaacaattcaccaatatgtgtaagggaaggctagagagacaaggaananggtaaccaagaaaaggctaacaatggtttaggcacaatgangggaataaatccgaattaagaaatcagtacattcttctgcaccatatatacttaagagatttttttaagtctcaacatgaccatcacccaattttttttttatttgctatacaatctgcttttttttttatacaagaacaaagctactttgatggtccctaaacattgat

SEQ ID NO: 49465 - DNA, 380 bp, Glycine max
  unsure (1)..(380): unsure at all n locations
ctgaccatttccagaagtactggctctcaacctctgaaggatattaatagcggtagagtatgtgggttctaatttatgtgttgagcttattgagtcttaagcccacttctgcttttgtactgtatgtattagcaaatcaatgagaaccaatgggatgttatcgttcctccaaaaaaacaaataaaaacagaaatttgaccatttatcattaccaccaaaaactgatagtagaatcattcaaattaatttgaaaagttggcgatattgccagtctggcgaaaacaattagcagtgagcttatcaagacataagtttgagcagatagcatgtgtntgacaagagcagcaattaggtctcgtatatgtaccactatctgtgat

SEQ ID NO: 49466 - DNA, 392 bp, Glycine max
  unsure (1)..(392): unsure at all n locations
ctgagctgcagcttgaaccgccttcacctgacccggtgacacctcttttggtagtnttcccatcacgtgcaacatgactcgaaccattgtgtggcaagggctgtgttgacttgtttctgatgtgagatgtggacataaataaccctttcagagaatgccacatgaggtgctttgttgcatccatgacgtcgcatgtgagaatttttaatggttttaaggaagatatgacaagtgaggatggggattttattaccccatatgttgtgataaagatgtttctctactgtaacaaaaaaaagggtttttgacctcctcagggggaggataagaaaaccaagggttggtgcaatttttaggtcacctactatggaataaaagggaaatttttggaa

SEQ ID NO: 49467 - DNA, 432 bp, Glycine max
  unsure (1)..(432): unsure at all n locations
ctgcgagagctgctgccgttacgactatgtaaagatatgcccctcatgtggccagacaaattagaaccatccttgttttccagaaaaaacctctccctctcaatgtgttntgcaggtggtggtggaattgctacagggtgaggaacctgcccattctgttttggccgtggaggtggaatcacagcaggtggagatcgggtatcagcttctcgagatggtgggatcacaacaggtggagatcgagtatcagcttctcgagttggaggttctatcgagagtggtcgtattagaggacgattgagtctctctccaagcaaacccaagcaagggatgtcagtttcagtctcctcgtgttcatgccttgcactaagcctttcccttgcgtnatctgcaccggaattagccttacagagattaaagaattttgaaaat

SEQ ID NO: 49468 - DNA, 206 bp, Glycine max
  unsure (1)..(206): unsure at all n locations
accccttcctatnntattctaaacatttntagaatcttcttatttcttaattttttggttgcagaagtaatggagactgcaactactatgctaaatatgtgtgtgtttgactagctganatananaggaactcactagatnggcanaagtgtntcaacattngtagtggtattgctcgaggacttctatatcttcatcaagactct

SEQ ID NO: 49469 - DNA, 445 bp, Glycine max
  unsure (1)..(445): unsure at all n locations
agcgggtaaggtgactntntcttctatccncacttattaccttccattnctcaatagcttatattcatcgttatcgcagctattctgattattgttatgtactctgtctatccccttgaatttctagttgtttcccatcttctggtatttaaacctttgtggctctttatgaccgcccaacgatcataagatggacaattaaagaaaaaaaaacgaaacgattaattaagtttctagtaattaaattatggagttgtgaatttttggtttttaaattattttttttaaaaattgatccctaaagaatttgtaaattatggagttttggtttttaaaccatcttttttaaaacatagatctctaaagacatttgacgtgctaaaaataatctctactctctatcgttaatgtactttatcacgcgatgaaatgttatgaaacaaga

SEQ ID NO: 49470 - DNA, 423 bp, Glycine max
  unsure (1)..(423): unsure at all n locations
actctgttggaagatcattatttgctgttacttctactataggatcttcattgcttccttctccttttcctttagaatcttgcccatgaatgtgcattngttctaaagattctgcaatatcatctaaaatatcctttcttggagaaataacattagactcatcaaaagaaacatgaatagattcttcaatagtcatagttctcttattatatattctataagctttactatgcacggaataaccaaggaaaattccttcatctgacttagcatcaaactttcctaagttttcttttccattatttaatacaaaacatttgcaaccaaaaacatgaaggtgtgaaatgttgggttttctaccattaaacagctcatatgcgagtttctttataatgggtcttattaaagccctgttcatgatat

SEQ ID NO: 49471 - DNA, 433 bp, Glycine max
  unsure (1)..(433): unsure at all n locations
actcagcttctanacaagccaggaggaagcttcttgatgaagtttcttattgaagcttcttgaggaagctacatgatctgcctcggtaaaaacactacgcagccttcgttaaccgttggagcttctcgaaatttggtctgcagcttcaaaacacaattttccatgatctgaccgatgggatctttgcgaaaatgtctgaagtgtgcgtgacatttccgtgtccgagaccatttctcacttgagcgtttgcagcctttgctttcgtgtagcttatgaaaaaacaccatttcttcttctttgtttctttcaaaaccatttctaatgtccggagcactttctccatctcccacaaccaccattagccaccacataccatcggtgttctccattgaaaccccacaccgagagaaacccttcaactgaagtggaatct

SEQ ID NO: 49472 - DNA, 400 bp, Glycine max
  unsure (1)..(400): unsure at all n locations
gcttacacaccacgtaataaataaaatccatttatgtccatccantacacaaacacgaataaaaaccatgatcatgaaaaatgaccaaacagtatggtgtactactataaaacacgtatggggtcaagttgtggattgcatccgacccnaatttcttcaaatagcgaacctatcttcttttgagacatgtgtggtgtggtgccatctgaactagccccgacccccttctttacaaaaaggaagagaataattatatgaagaaacaaataataaagggttttctctttctcttgtccttcagattgtccccagacactttagaagaattacatgctaaaccttgaaagaaaaagccatgcgaccaattagtcaactgcctctttcaaacaatctaatctct

SEQ ID NO: 49473 - DNA, 445 bp, Glycine max
tgagttcgttgttgctgccccataaagcccctcagaacttatttcgggcccattcttcttttcgggccctcttcgtttctcgttctaacacgggtgttgcttcctctaagctccttatcctttctttccaccgcattccatgcttttcagactctttgaagcattattgcattggggtcactgaagcctcatgcgatgaaaggcgcgatactctcttctgatggtgcccctttcatagggtagcctagttgtcttatgacaagtacaggattataattaatacaacccctcgttcccatcaaggggacgtttgggaacccttcacatgaggacaaaactctggcccctccttccttccatcgagggaaccaattaacggacgcccctaccatacccgccatgagctggctccaatttgctttccctttctcggcacatatgtagt

SEQ ID NO: 49474 - DNA, 250 bp, Glycine max
  unsure (1)..(250): unsure at all n locations
ccctctctcttctctctnnccctatttcgttntctagntttagactntnntcttgagacatnntttttttcattntgcaactccagtagcaataaaatttcgttcttcaatttataagttcgttatctatggattaatggaaggctaagtccctagccgttgctttctttgaggatcaagtgcagttctcttcgaggttatatttataccntgtaaattctcgtcagtnttcctcttcactaattactct

SEQ ID NO: 49475 - DNA, 414 bp, Glycine max
  unsure (1)..(414): unsure at all n locations
tgagatgaggaagtgtagaagggtgaaacttcctgcttttattcgttgaccacagagtggtacctggagatatgtcgcgggggtcaggagaccttggggacgtcaggtggggtgttattgcccaaaaccaagcttgaccaatcccgacccaacccangcatagtcagtcagtgagaacctgtgatgtacctaagcaggcgagctcctgacagtcaacagataaaaggaacaaagaccacaaagcaaggaggcttgtgtggtggctggccagctgtgaatcttgtgtgatatatgggttatggcctctggtaatcgattaccaagggtgggtaatcaattacaaggcttaaaaatgaagacaggaggctaagatggtctctggtaatcgattaccaacgtgtgtaatcgattacc

SEQ ID NO: 49476 - DNA, 239 bp, Glycine max
  unsure (1)..(239): unsure at all n locations
ctcggatgtctgattgtgtctgtagatatacagacgctcgtatctgagaacagaaactcgtagcatacacanacgactgtaacttactactctgatgtccgattgagattgagtatatctagagctcgaccgaaacgagctgtacaattcatcacagtactgttactcgatgtctgttggtgcgttaatcagagctcgtttgaaacgaccttgtcgatcaacacatatctttactcgat

SEQ ID NO: 49477 - DNA, 401 bp, Glycine max
caattacaagcgtctagatatattacgggacttaatcgtacatcccagtaaaaagttattgttgtttgaatttgctcagagcatctgttttcaatttcgagcatctcgatatattacgggactcgatccgacatccgagataaaagttattgtcgttggaatttgcccagagcttcaattatcaatctcgagcgtctcgaaatattggagcactcaatcggacatcttagttaaaagttattgtcgttcgaatatgctacgagcttctattttaaattacaagcgtctcgatatactacgggacataatccgacatctgagtaagaagttattgccgtgcgaatttgctacgagcttctggtttcaattacgagagcctcgatttactacgggacacaatc

SEQ ID NO: 49478 - DNA, 268 bp, Glycine max
cttctcacacgcatctttccctatgcctccacttcagagtcatctaactcccccctatactacgacaataaagaaccactcgccataagcatcgttaaccataggtgtatggggcttatccggacctgactgtgaagggagtacatgagaaaaggttgcctgatttgctgcgcgctgttctcagaaaacctgacagtcaatcacttagccttgggtgtgatattgagggagatctctgcaagaagaattgtctacgagatcatatttg

SEQ ID NO: 49479 - DNA, 310 bp, Glycine max
  unsure (1)..(310): unsure at all n locations
ctaagcatatacaacctcgtggcaaattatctaatgactcctgctatctcatattctcaaaatccgcctccatgttgaccatacttgccactaccaccatcaaagaacggtatgcataattatcaaacccttaccactgaaaaccatcaaaatccacgcccattatacccctacttgccactaccaccagtgagaactatgcactatagccaatacatgtccaccaaaaattctcaaaattctcctctaatttattgtactcgccaccaccaccaccaccaatgaatnttatgctaaactatcaaatccc

SEQ ID NO: 49480 - DNA, 146 bp, Glycine max
taagctgtattattgtaatcatgaagatactagcaatattatctaagttacacagaaagttttgaacaaccagtgtgtgaccttgctcaactgctgactacgcaaccattgatatctgacttaatccctgcacaatggtgctatag

SEQ ID NO: 49481 - DNA, 480 bp, Glycine max
  unsure (1)..(480): unsure at all n locations
actaagcttacaccacattctactcttcaatcctcaacatcgacatgttgtggtctctgctcccgcaagaagtgaaggcctccaaggagaacaaggcatcgttcacacagtttgggtactttaaggttctcaaaaaaggtgttttgctgtagaactagtccgttgttgtcaaggccaagcttattatccaagatcgctaagaagaagatcaaggaggctggcagcgtcgttgttctcaatgcttgaatttgatggtgtcgcttttttgaatgatttaggttttttttattttgttccaatatgtctccttttggatgacattgttgttgttcaatctatgctatatttcatgatttaatttacgggtttattattttaatttatgcattttagaattttgcttatttatgttgaatntaatcacgtntaactatgatagcttgatgatgttaaaatctatcgaaattgttaaaattgtgc

SEQ ID NO: 49482 - DNA, 382 bp, Glycine max
atggtgaatcacaggtgattcacaggtatcttgctgattactatgatgatgacaaatgcgatgacgcaaagctctaagatctatcaaagaacaactcacgtgaatcaacaacaattcaagagtgcaagataagaatcaaagagaattcgtgaactcagtaagaaagtctagagacaagaatcatgattcaaggttcaagatctcaagaatcaagagcaagattcaagactccagattctagaataaagagaagactcaatcaagataagtattaaaaagttttttcaaacacttcgaatagaacatgaatctttgacaaaaccttttaccaaagacgtttttctctctgctaatcgattaccagactgttgtaatcgattac

SEQ ID NO: 49483 - DNA, 426 bp, Glycine max
  unsure (1)..(426): unsure at all n locations
ctctgataccacttgttttacttgtggcctcagatatcttaagaatgggggttgaatattatattcaattactccccatcaaaatctattccttttatgcagtataattccttatatgaactttaatattatcaattaaactttgatataattatacatataccaacgaattatggaaaaagccaactatattatctgttngcccacctgtcctactcatccctacaaccgtgaagtccacttcttgaattctttttagactaataccaggcatctctcttttgttaattcttacacagaaccacgttctatcctaagaatagaaaagaatatattctctagaaattatttctattgcctcatattctatgatgcatgatgccagattttaaagtatatatttgtttaaagataccttgtctaaac

SEQ ID NO: 49484 - DNA, 465 bp, Glycine max
  unsure (1)..(465): unsure at all n locations
tcaagaaaaagatggcctcagcaaattccttatttccataaaggaattctatcaatagacctccaatctttaatggagagggttaccactactggaaaacccgaatgcaaatttttatcgaggcaatagatctaaatatctgggaagccattgaaataggtccttatatacccaccacagtagaaagagtttcaatagatggtagttcatctagtgaaagcataaccatagaaaaacctanagatagatggtctgaagaggatagaaaacgagtacaatacaacctaaaagccaaaaacataataacatctgccctaggaatggatgaatatttcagagtgtcaaattgtaagagtgctaaggaaatgtgggacactcttcgattaacacatgaaggaactacagatgttaaaagatctacgataaatgcactaactcatgagtatgaagtatttagaatgaata

SEQ ID NO: 49485 - DNA, 236 bp, Glycine max
  unsure (1)..(236): unsure at all n locations
gcaagtgtcccgaaatgaacaatgtntctcatatgttntggagacacanattcatgtcggagacagtatccaacagtaatagaagagctgtgccgtcattntttctctgcccgatcttangaagtcaaccaccaacttcgatctacggagganngagaattactatagtatataaagggtgtctccaacataacggttcttctgattatatnggaccattctttggatcacaacat

SEQ ID NO: 49486 - DNA, 406 bp, Glycine max
ggccacccagctcgcccaggcgagctaggtttcttcctccataaggcaccgccttctagggaacttcctggaaggaccaagtgggcctgattgctatttgcaccccctgtttactaaatacacccctgcccttttttgctgattcttcttccgtaacgttatggaactttacgaatttcgcgatgatactcgttttctttctgtaatgtcacgaaaccttacggattacgcaatcctcccttctttggcttccggaatgttacggaactttacagattgcgcattaacatttccttttgacttccggcatgtcacgaaacttcacggattgtgcaacaatgctttcttttgacttccggcatgtcacggaacttcacgaattgcctaatgatgggtgccaagtacc

SEQ ID NO: 49487 - DNA, 406 bp, Glycine max
  unsure (1)..(406): unsure at all n locations
cggagaagaagctnnttgcggaagagacattttgatatattgagagaatgcttccgggaagaatataaatactttctattcttttaactgaagggcaaaattgacctttcattgaattgctgggtgcaccaccaatattgctgggtgcacctagcatatccctacaaacatctttataaaagattattgngaatggaaatacgatttctgtgggaaggggaatttcagaaaaaaaaatatatttaaaccccacgagggtagtgccaatagcaatccccttataagcatcgtatgtgtgatgcagagtggactggttttctcatgtttaatagtggctccttcattgagtggattggatctctttatgcctattgtctctaccctgttattaccttaccatcaacat

SEQ ID NO: 49488 - DNA, 206 bp, Glycine max
  unsure (1)..(206): unsure at all n locations
ctcgtactntaaccatagccaacanaatgaaggctcatggtgaatgtatgagtgaaacagtcattactgcatagaatttgagatcaatgatctcaaaatctgattatgtggtatgctcaattgaagaatccaacaacttagacatgatgactattgatgagttgcaaagtagtcttcttggtcatgagcagaggatgataagtcgt

SEQ ID NO: 49489 - DNA, 377 bp, Glycine max
tcagcatttatgcgagacggagaccattatgctatctatcatcgccaagtaccaagaagagctatgtctagccatgggccacgagcatacaatcgcggatgagtatgctcatgtatatgcggaaaaagaggctagacgaagggtgatcgactctttacaccaagaggcaaccatgtggatggaccggattgctcttactttgaacgggagtcaagaacttccgcgcttgttatccaaggccaaggcaatggcagacacctactccacccccgaagagattcatgggcttctcggctattgtcagcatatgatagactgaatggcccacataattagaaatcgctctgaaacttgtattggtattcagaccttgacta

SEQ ID NO: 49490 - DNA, 458 bp, Glycine max
  unsure (1)..(458): unsure at all n locations
ntaagttatttgatgaaaaagggagtaagtntgacactattccaataattaaattatgaattgtaaacgtgtatctgtaatttgatatcgtaaaattcgattctgtagttgtaggttgcttcatctaaaagctattcggtcatgtaattaacaatttttaaatggtgctattatacctataataaaagaaaaaaaaataaaaagtcttaaaaagacagtggcaggtaaaaaaatctattgacaaaataaaataacaagtttcagaattatttgatgttaaacagtgaagttgacaaaatttgtctcgttaaattatgtattgcaaactagtatctgcaatttgtatcataaactataatagtttaattgtagtttgaaattgacaacttgtaattataattttgtgtaacgctgttaattaattatatgtatatattgcgacttaattttttatctat

SEQ ID NO: 49491 - DNA, 461 bp, Glycine max
  unsure (1)..(461): unsure at all n locations
taagcaaattaaagagacacatttgagagcttgtccatgttcctagctatataagttaatttttaagactgacaatataaataatgctctcttaatagttagatcaagactcttactctaaagagaaataaacttggaaatacagatgtgcacatacagtcgtcacttattatcaccatcacgtagatatgataatggcaaatcataaatgggcaagacaagtttgttttctgaagcattaacatattttctgacttagtctttataatacgcactcgcttgtcgagggctaaagttcatgtgaatgccactaattnggaaacaagaacacactatttaactagacttataaatttcactgtgaaagagtatattaaaaagacctaaagctatatgcgtatggttgtgtaataacactcttagagaaatgaatttctatgactcttaataaagagtcatct

SEQ ID NO: 49492 - DNA, 464 bp, Glycine max
  unsure (1)..(464): unsure at all n locations
cagcanacacaatgtctggtcttgttgctgacagatttaacaaactaccaattatacttctataaacagaatcatctgctttatcaacaccatcattcattgataacttttcattcacaacatttagagtggcaacaggcttatcgggtaaaggagctggattgcttccattttccactgtttcccacagactntgagctctcaaataagttctcatcttggcagcccacatatcataatgctctcttgcaagcactggaggtggaggtaaggattcactattggaagccattggttgaaggttttttgagtgaggttttcttgctggttttctcttacacactcaaactgcttttcagattatctttctctctctcacacaaacccttagagatcattgaagctcttgataccgcgttaaagtaagaaactaaaaactgaacatgagtgaagtgggagaagag

SEQ ID NO: 49493 - DNA, 121 bp, Glycine max
  unsure (1)..(121): unsure at all n locations
ctcacgatcangaccttggatccctagtgatcttaatcttaaaggagtctcatatacccttcttcatcctcactctatgttacctctctatcttcctccccactcttgtacgtgcccatca

SEQ ID NO: 49494 - DNA, 473 bp, Glycine max
  unsure (1)..(473): unsure at all n locations
cgatgtaggagtgcttcttcgttcggtttccgatgatgttgttcttcacctcgcggatggctctgaatttcaccgcgcaatcggacgaggcgaggcggtcaaggattggatcggaggatactgacggtgtaagcatggcggcggagattgtcaacgacggcgatgacggtggcggaagctcgtgcaaggtggaggagatgttaacttacgaaacgatggaagagagaagagaaaggagccagaacagagtttttttatttttttattttctaattttgttctttgtgttatataatagtatatatttttattattttaatatattagtataatatatggtcactttcagggtgtgaggttcattttatagttttattacgaganatattaagattacattctctaatatagctcaatgatgatgctttatnggaatcaataaatattaatttattaatgttgttaaaaatact

SEQ ID NO: 49495 - DNA, 241 bp, Glycine max
  unsure (1)..(241): unsure at all n locations
gtggtgccgtgatctgtttggtgtcacccagatgcagtanagntatgcaatgcatgtcatctggtatctntttatagacagtacctacaaaacaaacaggtacagactcccactacttgactnntgtggagtgacaccaacggcgatgacattctctgctgggtatgcatatctggaggctgagcgtgttaataatatagtatgggctctggaacgatntcgagggcctattttaagacac

SEQ ID NO: 49496 - DNA, 476 bp, Glycine max
  unsure (1)..(476): unsure at all n locations
actaagcttattaagcggcttcctcgagaagcttcctcgtgggcttctttgataagctntcttgagaggcttctttgagaagttagatttttatctacccaaacctctctattaactaaattcacctctttaaaaataacaacggataaaataacacaacaaattaaatcaaatatcaattataattactaattttttattttttgttgtgttgtttgtgataatgaatgtctaattaacttttatgttgtgttattcaactcangagcgacttgagttgaagctggtctcccatggtaggaaagttgataaatttgggagttcagcgcctgagattgaaggccttattgccggcaccatattaagtccattgatcaggtgttctatggtcaccgacgatcctggacttatatccgcatttgcagagaggtggcatagggagaccatcaccttccaccttcaagtgngggagttga

SEQ ID NO: 49497 - DNA, 243 bp, Glycine max
  unsure (1)..(243): unsure at all n locations
atacgcacataactatgcanaatgcctaattattcacacttgaagcgagacatttcagggggttgaatntacagaaatctcctgcggcataggtggagctacctggtcatgatgagatgggataaccagacgctgcagaggctntagagccactgtgagttgtgcaaacgagggccgcatnattggatccctganacggngacgggggggcagaanaatgtcaaactggagaatgaagtgtag

SEQ ID NO: 49498 - DNA, 445 bp, Glycine max
ggaccagggaggagtggtcagagacgacgaagacgcagctgaagggatgtgttgccgacagcgaatgaaagtcgtcggcgtggcggtgggtggtgccgacgaaatttgatctgaaaaagaaaaaagaaagtccaggcaacgcaagagagacgaaaagagcataaaaaatacttttaataattttcatttcatttttaaaataaaaaaagtttttattttttattttttgcttccggtaaataacctattatcacaggtcattttacttcctcaccacaaaaaaaacaaaaaagatatcaagtacttgattgcttgaacggaacacgtccatggctcatgaaatgaaacaaacctaattatctataattcaaggtttgaagtttcaactttcaaacaccagctggatttagataaagatatacacgcaacgcaacacatttaaaat

SEQ ID NO: 49499 - DNA, 223 bp, Glycine max
  unsure (1)..(223): unsure at all n locations
tgctggcttatcgagcgtccgctaagcgcaacactcctgngctaagcgcgaggaagactctggcttagcgagcgtccacttcatctgtctaagcgcactgcttcagttcatccactaagcaagaaaggcaccctaagccanaaatcactaacgtgtgctaaacggtccatacgtgcgctaagtgcatgagcacgaacaaagccacctatttaagcctgaaatc

SEQ ID NO: 49500 - DNA, 421 bp, Glycine max
  unsure (1)..(421): unsure at all n locations
cgttcagtttcttcctgtcgatcaaagaaaaatatgatgtgtttgcttcaacaagtagatatcttatggtgaggctcttggagagcttgcattaactgaaggttgtcattaattacatgtagtctttggtctctacttcatcacctgcaaagccgaagagtggaccggcgtgagggtggacagtgtcgagggagacctcaagtctctagaaagttttctaatacaggatatcaatggaacttccctggtcgatgaggacattggacacgatgaagttngcaatgatgatggagacaaccacaaggtcattctggttcatggggttgataccctcgaagtccctatctgtgaaagtgataagagggagactntgcagcaatggtgcatngacaaaattaatgtcgatgtccccaatggcatg

SEQ ID NO: 49501 - DNA, 448 bp, Glycine max
agaaactaagcttgtggatatggagacccgtcatatgtgtgtacatctttatattaacatccaaacatcatgaactatccataaccaagaaaacagggcaactttctctactcaaataccccactatcattttctttgttccgattcgttaaccgttggattaactcaaaaagtttactggaggttcctagtacataaatctacatttggaccgttgggatctgctagaaaatgtcttgaacccaatatgtagtaccctttcctcaaccagcaatacacaacattttctgcacaagcacaattttctgctgtccaaaattagatagctgtttgctgcataaattgcgaagatatcgaaatccctcttaccctcatccaattatgcctaaattggatcctacaagtgctaaatcatgtattaatcacatctaaaccaaagacaagcttc

SEQ ID NO: 49502 - DNA, 445 bp, Glycine max
  unsure (1)..(445): unsure at all n locations
tgcctaataccttgatcatagcctcataggtgattatgtgttactaataataatacatgcgtgtgtgcgtatatatgtatgcatgtatgttctccagctatgaaggaaaaagaaattttaataacacacttttttattttttattaattgaaatttgttgaaaattataaaattgtgagacttgctccttattttatntttatccatatcatgtttcattgaagtggcggaaggtgctcccaaaatgattgatactattggtggttcaattaaccatcaaacaaaaatagaatcaacatctttattaggaggtatatttccatattctggttaccaaattcgttgtgttcttttccagttttccttctcttcacacatgtacgtgcatttatttttntgggtcacacaacctagtttcgttttaatattcagccttaatttatta

SEQ ID NO: 49503 - DNA, 199 bp, Glycine max
  unsure (1)..(199): unsure at all n locations
aagtaatgtcgtttgaatntgctcagagcttctgtttcaatctcgagcgtctcgatatactactggactcaatcggacatccgagtanaacgttattatggcttgaatctgctaggagctactatcttcaatttggagcatctctatatattacaggactcaatcggacatctgagtaacaagttattgtcgttagaat

SEQ ID NO: 49504 - DNA, 401 bp, Glycine max
  unsure (1)..(401): unsure at all n locations
ntgaccataatcgcagggacaataactgttactcagatgtacgaatgaatcccgcaatatattgagacactcgtaattgagaacggaagctcgtagcatattcaaatgacaataacttttaactcggatgttcgattgagtcttgtaatatatcgagacgctcgaaattgaaaacggaagctctgagcaaattctaacgagaataacttttactccgatgttcgaataagtctccgtgatatattgagaggctcgtaaatgaaaacggaacctcgtagcaaattctaaagacaattactttttacttgaatgcgatggtggcccgtaatatatcgtgacactctacattttaaatggaagcttcttgcatatgctaaccacaatgacattttactctgatg

SEQ ID NO: 49505 - DNA, 355 bp, Glycine max
  unsure (1)..(355): unsure at all n locations
taacaacttgtgagagttaaattcacagtanatacttcaaagatatcagtccaatgaaagagaggtcatgtagagaggcataacataagttacaaatataccagtaatgcatacaacaacaatttcaaattagttttcgaatcaaagatataaatacctgagtgcgacgcttcagcacaatagactttccagcaatgaccgcaagaccactttgaatttcgaaacaacaatgaccacaggatcaacaatggctaaaatcgcttctattggcaatatgaaaatagattggcacttaatctaagtgttaacaaatgaagtatgaataggctaactgacttataaatatatacttgat

SEQ ID NO: 49506 - DNA, 407 bp, Glycine max
  unsure (1)..(407): unsure at all n locations
tctggtgtggacatctgacttgctttccaatctgacattctccacagattctgccctcttctattntcagattgggaatgcctctaacagcacctttgtcaatgattttcttcatgcctcttaagtgcagatgtccaaatctttgatgccatattttgacttcatcttctttggagaatagacatgtggaggagtagctggtttcttgaggtgtccataggtaacagatgtcctttgatctgctgcccttcattagaacttcactcttctcatttgtcaccaagcattctgactttgtgaagtttacattgaatccttcatcacacaactgactgatgctgatcacggttgcagtcagtcccttcaccagcagtactttgttcagactaagaagtccatcatgaact

SEQ ID NO: 49507 - DNA, 473 bp, Glycine max
  unsure (1)..(473): unsure at all n locations
attgagctggcatatatgtactanataaattcattaaggcaacaaaatggaacggcccaccanaccacacacatgagctggtggaccaaaccctaagtaaagagtggggcctgttatagctacagatgcttgagtcattatgtgggtatgcttcctaagaaactnntgtttctntatatgaatatattaatataccttccttccaaccaatgaaatcatgtataanatcaaactcttgtntgtaacatagctacttaanaagtaaatcactattattnttctttgtgaacaacttcttgtgtgcaattttattcacagggtacacctcttagagaagtgatattaactcaacgatggcacatatagaaaaagttgtgtatcccctaatagtagctatttagtcataccttttagttatttatcactactgtattgtttcacatcactataaatatataattatcatattacat

SEQ ID NO: 49508 - DNA, 387 bp, Glycine max
tctaacgataataactttgtactcggatgttctattgagtctcgccatatatcgacacgctcgaaattgaatgttgaagctctaagcctattctaatctactataacgctttactcggatgtccgatacagtgacgtcatatatctgagaccgtcgaaatggatagctgaacctatgtgccaatctaatcgacaattactttttactcggatgtctgattgagtcccatcatatatcgagacgctcaaaactgaatgttgaccctctgagcctattcatacgacaataacttctttctcgtgaatctgattgagacctgcatatatcgagacgctcgaaatgaatggtgaacttttggcctatggaacgacaataactttgatctga

SEQ ID NO: 49509 - DNA, 467 bp, Glycine max
tgtagaacaccaaagatgtaagacaacaatttgaaagatgtggtaaatttgaaacaataagagctaatatacaatcagatacctgaaagtgataatttatgttgctatgatccctaacaatgtataattagtccctgttagattacatttatctttacatgatcttgtatatattattacacaaaaacttatgattctgattgatatgtaattacctaataatcagtaattgattgatatgtaatcaatattgattctgatttctccattataaataaagatgagatgtggtcatctaagacacaaaattacagtaaaactaaaacactgctatatggtatcaaagcttaggttattcttgacagaggaataacaaaattcgtcctccacaacctactgtcccagatggacctctctgctagtcatcctatccagcaacctatttccacatccagaggacctttctg

SEQ ID NO: 49510 - DNA, 427 bp, Glycine max
  unsure (1)..(427): unsure at all n locations
gtccaagcctagcatgccacatatcanaacattcaacatttgcacacaanagaagatatgatatatattctataatagaaagaggcataagacttaacttatgacaagtcatcacacagtgtagcctctaccaataataacaccacgtctagtaataacaactctatatgactgaaaanacaaccttattccctagttggactaacagcatagtacttatgaaattttttcctagtataaagaatatgattaactctctctanaacatgaatattctccgaagaacactgttaacttnacttgacgctctacctatcacatgtgccatactctaaatctcccatgttcacaatacgtgttcttgattcatgatctatagataatttnntttatcagcacacacatgaacattagtctcatagtctat

SEQ ID NO: 49511 - DNA, 365 bp, Glycine max
  unsure (1)..(365): unsure at all n locations
taatgagttggctagagagaattaagcgatgttattatgtgtgttttcaaggacttatgactacataggtttgttgataccaaccaataatcatgtataaaaatttcttatcaggaaagttccattgtatataaactaaaacaaatatcgaaccaatccagattccaaagtcattgtggcataatagaacaattatgatttctcccatttgtacatcatcattattgcctattggtttctattcacaaaaacaagatgatgaatcaaacgagaatatgccataaagtcactattcancncnnaataangccttgatggctgctactctccaataaagggctgcagctcctgacaatctctactta

SEQ ID NO: 49512 - DNA, 585 bp, Glycine max
  unsure (1)..(585): unsure at all n locations
aggatacactcagctgntgcccctgattattgaggactcatggcacatgaatgatcaattcctggatatatgtcgtgtngccatgtnttcaaagcacgtactaaagcatacaactncttatcataagttgaatacgtaaaggtttgattatcttacgtgcactaanataagcaagtggatggcctgtctgcgtcaacacagacccaatcccaacatntgaagcatcacactcaatntcaaacgattattgaaagcgtggcatcgcaagtatggtggcattagtgagcgtttgcttaagaacattgaaagcttcttcttggttctctntcccatttggaaccaacacttttcgttgagcacttcatttgagaggagcttgcatattgtgctaaaaacttcgcaaatcgtctataaaacttgctaaccatgagacttctcactcagcacagactaggtgaagccatcttgatagcctaccttctctatcacttgcactcttgactccacaaaccagaaccacatggtgtcaaaatcattttaagatgctcaatgtcttctaccagcagaaatttatgacattgcatg

SEQ ID NO: 49513 - DNA, 240 bp, Glycine max
  unsure (1)..(240): unsure at all n locations
tccgaagctctgagcagattcaaacgacaatcactntntactcagatgtctgactgagtaccgtaatatgtcgagacgctcaanatngaatactgaagctctgagcaaattcaaacgacaataacttgtcacttagatgtctgattcagtcccgtaatatatcgagatgctcgaaattgaagaccgaagctctaagcagattcaaacaacaataacattttactcggatgtctgattgag

SEQ ID NO: 49514 - DNA, 581 bp, Glycine max
  unsure (1)..(581): unsure at all n locations
naagacagccatagctnagccncaccngtctnnnccccnanagactcgacggaacatcacatcactcgcgtgattctgatcnctataacgangctgagcccaatctgctgtggcccaacatctaccangccgggcangcgtattaatcctcgtatctcatgccagagacgttgctgcaggtgagagtgcttcccgcgaagccctgctacataaaacatgaattacttgaatttataaagtgaacaggaacgacaacatctaacgattcctnggctaaagtgataaaaccgaccatataatagaatatatatagtgtggattgttggccaaatatacacaccactcataaactatttatcaactcttaataatgtcgatcatatgaaatgaataggaacatacctggacaaggtggacgtgggagcngcgatagcataaaacgttgcggcggccggtcatgtatgccgcccaggcttactgaaagcgttgcgctgttccagacacgtgtccagtgacattgtgctttgactaatggctgatgctatcatcctatgcctgttgacgcgactccgtgacataat

SEQ ID NO: 49515 - DNA, 57 bp, Glycine max
gatatacaagattgtggtgataatctctaagcgagaaaactgttctaaaaacttagc

SEQ ID NO: 49516 - DNA, 183 bp, Glycine max
  unsure (1)..(183): unsure at all n locations
aagtaaaaagaaanaacacatcgagtattagaactattcaaagactgattctatcccttangggagatcctctttcttagtcattcttcgttnnnttgtattagtcatctaacccatttntctattaatctctgaagtgtagaacctcttatganactgtctcttttctactcttcatctcta

SEQ ID NO: 49517 - DNA, 233 bp, Glycine max
agatatgtcgcggaggtcaggagacctctgggacgtcaggtggtgtgctattgcccaaaaccaagcttgtatcattcccgacccaacccgggcatagtcagtcagtgagaacctgtgacgtacctaagcaggcgagctcctggcagtcaaccaatataagaatatagtccacaaagcacggaggcttgtgtggcggctggccaactatgaatcttgagtggtatctggaaaat

SEQ ID NO: 49518 - DNA, 233 bp, Glycine max
  unsure (1)..(233): unsure at all n locations
tgagaaacctgaggcanatggagagggcgagaatgaangagaaacccatgctgtgactgtcgttcctacatnggaaactccccaccagctcaacaacatcattagttagccaatatcagcccttctcattatccaccacccagtcatccacaaaggccatcccanaatcaaccacanagcctgtctaccgcaccttcaatcatgaacaccacattcagcacanaccgaaacac

SEQ ID NO: 49519 - DNA, 239 bp, Glycine max
  unsure (1)..(239): unsure at all n locations
gagactatcgtgatgaattgttatgtgatataatccctatggaagcagggcacattntgatgggtatatgatgtagctccatgtggagcttgtaggccttggatcttcttcatcaatggaatcctttgcttcttgaatatcaatggaagaggaatggagaagacagaaagatgattggagatgccacttcaaggagaagatgagtcaagaagaagctcaccaccatagcaagccattga

SEQ ID NO: 49520 - DNA, 255 bp, Glycine max
aataaatgatcttaaaaacctaactgccggaaaataaataaacactggaggaacaaccattctggtggaataaacgactttgaataaaggctttaaaacccactcatgaatatcaaaaacctgaaggaaccaccttctggttgaataaacaatttgaaaatgtctttaaaaatgacgcggaaacaaaaacctggagaccacctcgattaaataatacttgaaaatgtcttaacatacttgaatatcaaatctgag

SEQ ID NO: 49521 - DNA, 242 bp, Glycine max
  unsure (1)..(242): unsure at all n locations
acaagtttcctaacgatgtctaattatgtgggccattaagtctatcatatgctgacaatagccgataagcccatgaatctcttcggnggcggagtangtgtctgccatcgacttggccttggctaacaatcggagaagttcttgactcccgttcaaggtaagagcataccgatccatccacatggttgcctctcggtgtaaagagtcgatcacccttcctctagcctctctttccgcgtata

SEQ ID NO: 49522 - DNA, 226 bp, Glycine max
  unsure (1)..(226): unsure at all n locations
actcacccctcgcaatttttgtatcgagtggttggtacctatgnatgatcgccaatcgtgttcgtgggagctgaatgacagtagtagaggatgagaagcgagattcttctgtggagccgctgagccaatgtgatgacgttgggattatcttgggagagtgttgtattntgttaatcaactcctccataattgggtccatgattcttctggtgaataaatatgtatg

SEQ ID NO: 49523 - DNA, 225 bp, Glycine max
  unsure (1)..(225): unsure at all n locations
ctaaatggctgagtgtaactgaaagttgtggcaaccaaaagtcacccccaacagccaacaagtcatccaccatttggtctcccaaaaggctgatgcctangttgccaattgngcccttattacaacttgaactaaagcccttttagttgattaacccaaaacatatttgtggtcacccaactntacaaggattgngccattatttatacaaactaaacactctaa

SEQ ID NO: 49524 - DNA, 160 bp, Glycine max
agatggaagaatcatcccaaccttagatgatcgaatacttcacatcagcagcatcaacatcgacagcctcatgctcagaatgctgctggccgaatcagactatacgattctccaccaatacagcagcaacaacatcaacatgctcataaatagcagacag

SEQ ID NO: 49525 - DNA, 254 bp, Glycine max
  unsure (1)..(254): unsure at all n locations
gtatatntaataggaagagaattccaattgaagtagcanaagccttggccaatacaattaagtttatatggctctntcaagannattactctctggtaatcgattaccagaggatgtaatcgattaccagtggccaaaactgatttacaacagctattaagatttgaattcacagattgcactgtgtaatcgactacacatatatggtaatcgattaccagcagttattaaacgttntaattcatantttaaag

SEQ ID NO: 49526 - DNA, 261 bp, Glycine max
  unsure (1)..(261): unsure at all n locations
gcatggtggaagaaaatttgcagttgtttgggtaatttcgtgatttgctatggatgtggtcaatgttgtcataattgaaagtctatgtaaactcatggagcttccatagaatcaactggctaacttgtaaaaagttacctaatatganaaataatattagaaacacttgttaatgacatatatgcataacataatactcttaacacaacaacaattcaacatttcatctttctgtcctaaactgtcaacatgacatttact

SEQ ID NO: 49527 - DNA, 229 bp, Glycine max
  unsure (1)..(229): unsure at all n locations
ttgcattatctcatattggtnttttttgttcttcattctggatcagaattgacagtggctgganaaagatngaaagcaattgtgtatcanagacaatcatgcaggtaatttcaaatgccaagtgtaactgggtatttacattagctatttgttctgggttgttatcccataaatttgtggatagaattacgcatgttatactttttgaagtgtgnttgatatgttacat

SEQ ID NO: 49528 - DNA, 184 bp, Glycine max
  unsure (1)..(184): unsure at all n locations
tgaagctctgctccctctggaaatagccactaaggttgttcctactggacctgtaccagctatgactgagccgacattagctgaaccacaacctcctatagtagatccacctgctgctccgaaacttgagacacagtctcctcctgtagtagatccactcgaaggactntacaattagttgact

SEQ ID NO: 49529 - DNA, 383 bp, Glycine max
  unsure (1)..(383): unsure at all n locations
gcacttctctctctctcgaaatagctgaggaagaatagttccgtgaagaaaatccaagccgaggcgcttccgtaacgtttccgtgagtaattacgcgaagattctcgaccgttcttcaagattcatcgttcgttcttcgttntcttcagtcttcaacgagtaagtacctcataccaagctnttcaattcattctatgtacccgtggtggtccacattntggttcatgtatntttattctcattntcatttactttntatacccccttttgacgtgcttaaggcatttttttaaggcatttctcgcttaatctaagaataaaatannattccaccgatcgtntgaattgatcatccgttaatttggtaaatgaatccgaccgtc

SEQ ID NO: 49530 - DNA, 217 bp, Glycine max
  unsure (1)..(217): unsure at all n locations
caggatcattctgcggtcatgcatttcgaggattgcttgccatgtcatttttccactgtgaaggttgttattggatntgactgagtcacggtcattacctgttgtaggattgaattaagaattttctgtcatgacttgtgaatcagcttgccaagttgaatggtgtccacttcacaacattgcttgctatntggattatctcatatactntgtctag

SEQ ID NO: 49531 - DNA, 236 bp, Glycine max
  unsure (1)..(236): unsure at all n locations
gcttagtttaagttagtctaaacctangagggctgtctaaattaagcctagtccaacaagagggaattgaggacgaagctnggattgattcagtctaactatggatcgaggtttagtaatntaggctacaacatagaacacanaagcatgattgattagagaaacatctntatatacatcagctggtttgttagaaaaactcaatacctttacctatngctatcaatcttacttgc

SEQ ID NO: 49532 - DNA, 409 bp, Glycine max
  unsure (1)..(409): unsure at all n locations
gtatttaacagaatatgccagcaaaaacattaatcaccacganactaatctaagcaatgacatcaatcatcccaaacattaactgtgtcatccaccacatcatgatttaaacttgaggtactgttgtaagtcacagaggaaaatcgcattcaagtggcacaatgttgaatgcagaaatttttacaagtaccatatcctttagtaagagaatatctaatttccaagctcacaaagcagcttcgcttcattgtttaataaccatgtatataaataaaaactttcaaaattttacttccaatacctatatgctaacaatggcatatctatactgatctaaatgaattacacacataatcactatcttattctgaattcgttaatatgaaatataactactatgaccacggaa

SEQ ID NO: 49533 - DNA, 250 bp, Glycine max
  unsure (1)..(250): unsure at all n locations
agtcataaaatacttatctncagttaattaacttgcaaactaactngagacactgccttaattagtaggtcatatatcagtattataattatatntgtactgtgtacctgtggtangaaagctttcctgatgccataattggcatcgatgtctaagcgcnctccaagaccaacaggaatggcccgcctgtatctgcaaccacctacntgtgtcattccctgattcagtaatcaattcacacattaatatc

SEQ ID NO: 49534 - DNA, 160 bp, Glycine max
tccatttttccaatcctctgctaaccacaaacttgttggctatattagctaaatagtggagagagacccttatactgatgggaaaggttaatgccattatcatactctcccgtatttaatagtacttaatttatcaaagaacaggtcgcatcacacttca

SEQ ID NO: 49535 - DNA, 182 bp, Glycine max
  unsure (1)..(182): unsure at all n locations
tactaacacttaacaagtaaccaatgantatataataaatgaccattgcttgtgtacccaacttcgtccttagatgatgaatattgaatcatagcagctcccgacaccagcgaatgctctatgcgtntccttgacttctattccaaaacaattcttctcttgtcaattttaatggtcatcac

SEQ ID NO: 49536 - DNA, 233 bp, Glycine max
cacctactgtacgttgatttcaccaatgttgttatgggaatgttgcgacaatcctttacaaccttattgatacattctgagagggtggttgtcatgtggccatatcgacgtccttctctatcataagtcatcgtccatatttcctttgaaatgcgatcaatccatgttgctatggctggactcagttgacgaaattgttctaaattatgatcaaaaatgtgcttgcaatgagt

SEQ ID NO: 49537 - DNA, 273 bp, Glycine max
  unsure (1)..(273): unsure at all n locations
ctcatgcactcctctaatgactatggcatcatttctggcactaaactgctgatgagttggaggccatcttctcgattatatntctggcttcagcaagagtcatgtctccaagggctccaccactgtcagcatctatcatacttctctccatattactgagtccttcatanaaatattggagaagaagctgctctganatctgatggtggnggcaactggcacatagcttctaaatctctcccagactcatacaagctctctcactgagttgct

SEQ ID NO: 49538 - DNA, 136 bp, Glycine max
cataatatatcgagacgctcaatattgaacgaggaaagctctcgagacattcacatggttatatctcttcacacggaggtcaaattcatgcgcacaatatatccagatgctcgatatggaacaatggaagctcctg

SEQ ID NO: 49539 - DNA, 301 bp, Glycine max
  unsure (1)..(301): unsure at all n locations
atctccttcttactacatcaagaatcactgggtngagtcttctctgtggctgtcttactggtttatgctccatcctctagattattcgatgcatacatgtggatgggctaataccaggaatgttcgccagggtccagcctatagccttcttatgcttcttgagaacaaacaacaacttctcctcttgctcatcagtaagggaggcaaatataatcactgtaaaacttcngctatcatccaagtaagcgtatcttaaaattgatggcagaggcttcaattctggtgtggtcagctggatagt

SEQ ID NO: 49540 - DNA, 233 bp, Glycine max
  unsure (1)..(233): unsure at all n locations
catgaagtgttaaattgtagtgcaatgtgtntaacatgntttagaagtcattggtattgtataattcatgagcaatgtctatgtgcaaaagtntttttaagggttggacttgaattangaaggtgaggccctaacggattctttgaagtctangcatangggtaaatacactcggttngagtgctcctttaaatctatgttgatcccatatggttgaagcattctcacaaaat

SEQ ID NO: 49541 - DNA, 120 bp, Glycine max
  unsure (1)..(120): unsure at all n locations
acacatactgctntganacaatngacaccatatatagttcctactattctctacttgtatggcatactgtatgggttctacccataagatccaaatgcaatatactntgaatcttctgat

SEQ ID NO: 49542 - DNA, 90 bp, Glycine max
  unsure (1)..(90): unsure at all n locations
caccccacacgtccgtcccaaaggacggcagcctttaatcgaatgtgcaaacatgaactttgatnttatgttccctcttatgttcttata

SEQ ID NO: 49543 - DNA, 223 bp, Glycine max
  unsure (1)..(223): unsure at all n locations
ttcctaataatcctagttgtatatcaattctgcattaattctaatcctatatgggtaacccgtaaatgaaagtaaatcacattctggacaaacaaacacgacatttatattntctagaccttgttcacctaataatattgagtcananacaaaaaaagaaaagtagtgaaataatttccccctttgcatttgcacatagaatngacacacgaacacgagaatt

SEQ ID NO: 49544 - DNA, 211 bp, Glycine max
  unsure (1)..(211): unsure at all n locations
actatccctgatttcaagcttttgcanattanggcatccttcaagcacatatttaaagccgacgtcagtgtccccagcaaaggcaactgacagcgtcctaaccaatntcccatacatcccaatgtactcaaaaacacgatcagtcagcaaaccagacatagcaagccgagtgagcttcttgcaattcataacaatagcaccaaaaccctca

SEQ ID NO: 49545 - DNA, 239 bp, Glycine max
  unsure (1)..(239): unsure at all n locations
aactctgcccaaaacacanaccaatatcacagnttttcacattcaaataccccagtaacattctcttcattcctattcgttaaccgttggatcgactcgaatnatttactggaagtctctagtacacaattctacatnnttgaccgtgggatctgctagcaaatgtccagaaccccatatgtactacccttttcacaaccaaccattacgcaagcattttctgcacttatacaaaattc

SEQ ID NO: 49546 - DNA, 195 bp, Glycine max
  unsure (1)..(195): unsure at all n locations
aatggcaagcctaaatntatgacatatatgttactacgttgcatgagttgagacgaaccaagtactatccaggaagccacggtcatctaatgcaagtccttntagttcctcaacttcgatgcttggagaccaaccatcagcttctacaagatcttcctctntcttaagctcgcttaattgttcatgctcatcttc

SEQ ID NO: 49547 - DNA, 221 bp, Glycine max
  unsure (1)..(221): unsure at all n locations
tgagatgagtagtggttggagtctccatgtattgactgatgagtcgagtaccatatagaatgtctggtcttgtggacgtcaaatatcacanactacccaccagactctngatatttgagcacccatctnntttgcttcgtcaaactttgataacttcattgtgcactccaccggtattccaattggcttgcatacgtttgctatgaaatgaagattcaatc

SEQ ID NO: 49548 - DNA, 139 bp, Glycine max
ccacttaacaccctctaccatcacatgggtgtagctaatacggtggcacgcttgactgaacattctttctgggtaggtcttcgaaaagacgtggaacatttcgttgctgtgtgcgtggattgccatcacaccggatatg

SEQ ID NO: 49549 - DNA, 280 bp, Glycine max
  unsure (1)..(280): unsure at all n locations
tctcttctctctctcctctcnnctttttttcatcttaagtttagagtgctactctcaattcgttntagtttctttttcgtcttggagaataattctagntttattcgtttctactancaatttcgttttctattgattaatggaaggctaagtctctagcgttgttntctcttgaggatcaagcacaactctctntgaggtcatattattactattaaattctgatcagttattcctcttcaccaattactntgtatntgttgctattaattcatgcatg

SEQ ID NO: 49550 - DNA, 193 bp, Glycine max
  unsure (1)..(193): unsure at all n locations
gcccaacttaaaactcaagttacataattgatctggggcttagcgcaagatagcgcacttagtgctgctatatataaaattttcccgagatgaaatggcgcttagtgcatcatccatgctaagcccactagttaaagttcaattattgcaacgatgtgnggcttagcgcagtgatgtgcgcttagctaatcta

SEQ ID NO: 49551 - DNA, 255 bp, Glycine max
  unsure (1)..(255): unsure at all n locations
acagcgganaataaagagtgtagggaagaagaagacaaacacaagaattatactggttcggccacaacccgtgcctacatccagtcctcaagcaaccaccgattcttgagatttccaataaccttgtaaaatcctntacaagcaaagatccacaacggatgtatcctcccttgttctctttgaacaaccaagtggatgtacgctccacttgaactgatccacaagagatgtaccctctcttgttctcagtatcac

SEQ ID NO: 49552 - DNA, 210 bp, Glycine max
  unsure (1)..(210): unsure at all n locations
gttccaactccgaacgcgactcgaccagccggtaattccaacacgacaaggaacggccctccgatgtcgatgtcggagttcaccccgctcccaatgacgtacgaagatcttctaccatccctcatcgccaatcatatggccgtggtaactcccggaagggtcttcgaacccnctttcccgaggtggtatgaccctaatgcaacttgcaag

SEQ ID NO: 49553 - DNA, 562 bp, Glycine max
  unsure (1)..(562): unsure at all n locations
ttattacactcagctttagncgagtcgtatgtactgccanaccttgacaaacagtggctacattttcacctgtgtagacacagaggctgncgtcnaagcaagcgacaatgctatccactctgtccaacttcatcctacctatgtgttttatatgggagacggatgaacatgatgctgctccctctgaagatggagtcactccaccgactgtgtggaatatatatgacgattaatatgactgaggccgctgcatgggccacaatnactgcctatatcgccgacaatagactatcatccgccttcgatgctgagtactcacacaatatggcctctgtactccaaatctatattcatgaaacaagcaacaaggatctagactggactggttactatgataacagtcggttgaaacaatctaatctagtgccaaagcaagctccaccttggcgaatcgctcgcatatgtcctggacgcatctattcgacaatgccctacttaaaaaactcggcctctagaagtatactgttgtgtataccaatgcctgtaccaaacagcacgaccg

SEQ ID NO: 49554 - DNA, 177 bp, Glycine max
  unsure (1)..(177): unsure at all n locations
atcatctcatacctcggttnaccttactgtcggctctaaccactatattctgtttcggggtatattcaataactgcactgacaatcanacttatgcggtcgtgtataccactcgcattccactccaagaatacaacgtattccgcatgaactctatacaagcccgaccactagactg

SEQ ID NO: 49555 - DNA, 156 bp, Glycine max
cttagttcctgaatgacaaccttcaaactgttgctcgttcccctctctgtattctgcacattatctatataatatcaaacatggttttccagcagagattttcataacctatgcagtgcaggccacagctgaatgggatatccttcactaacattg

SEQ ID NO: 49556 - DNA, 261 bp, Glycine max
  unsure (1)..(261): unsure at all n locations
atcattaattattagaggatatcaataaattatctntgtattaattaattaaataccccttcagttnttgcattgtttaaggctttngcacagtttaataaatactatttaatttatacaaaatngatntaactatccttaattatntattacttctttctgtctntaatataagacactntganaataattacacaaaccaataaatagttaattntatgaatttnttaaatggttatcaatataccaatttaccttatt

SEQ ID NO: 49557 - DNA, 566 bp, Glycine max
  unsure (1)..(566): unsure at all n locations
tgtatgacgtgatctaagctanggcctgttccattcgatanatagtgttcacaatncgtctntatcaagttttgcttaanacatgcgagtccatgttggtattcaggagagcccttcattattntcatcctcaagatacatatatttttttctaanacccttcttgttgtgtcttgatctaananaatntcgaaaggtactggtggttgtttctttcaaaagcatgttagttctaatgaaaaagttggaatcccgaacaaacttataatccaagactacaccatctaacaatcatcacaaatgtaatataaagaaccacacgaaaagttcatttttatacatcttgcagcggaatacataccaggcattaatatgataagacaggtcacagatttgagatcgcgctcgggactcacctctcattgagaaatcaacaattgcctgtctcatcgtctcgaccacttcgtccttggcactactagcattgtagactgctctctanaatggctatccagcatcacatgcttactctcgatagcacgtaggtggtctgcagcatcatgtct

SEQ ID NO: 49558 - DNA, 204 bp, Glycine max
  unsure (1)..(204): unsure at all n locations
gtcaaatcattctttatgtggtggtagtgcacgaataacacagaattttcccacaaacaaattattcaatatcaactngagaatgcataanataccaagcaaataatttggaaatggaagtngcaaatagacaaatattacagaaaagcaagaggatatcattatccaacttcataattgaagcacaattcaacgagagttgat

SEQ ID NO: 49559 - DNA, 206 bp, Glycine max
  unsure (1)..(206): unsure at all n locations
tgtgtctactattcattatcatttttctccgtcattgaggtgccacttgagctgccaggtctcttccaccttgngcgtattctntgaaagatctgtgcccctnttttcacatgttctgttgttgcatcctatccggaaccatatcataattgtactgatactgcctaatgaaggcaaccattangtccttccaagagtggacttga

SEQ ID NO: 49560 - DNA, 249 bp, Glycine max
  unsure (1)..(249): unsure at all n locations
agactggcctcacagtgatcagaaatgagaaggaggagctgattcctactcgggtgcagaacatgtggagagtctgcattgactataggaggctgaaccaggttaccaaaaaggaccactttcccctgccattcattgaccagatgcttgaacgcctggcaggtaaatcccactactgtttccttaatgagttttctggttatatgcaaattactattgctcctgaggatcanganaagaccacattca

SEQ ID NO: 49561 - DNA, 218 bp, Glycine max
  unsure (1)..(218): unsure at all n locations
gatttgatgatgtcaaagaagaatctaacaaggctacttcaaatgataagcatttgcttcaagaataattcaagaatgcttcaacaaacaaatccttgtttcaagattcactaaagaccaagccttgccttataacaaagtgctntcaagacatgcaaagctctggtaatcgattaccaggaagtgtaatcgattacccgaagacagggttgagaaat

SEQ ID NO: 49562 - DNA, 248 bp, Glycine max
  unsure (1)..(248): unsure at all n locations
agcctaaattcagtagaacaacgtacaagatgaaggagaanaggagaagtggagccgaggcactgtnatattgtgaccgtggatcacttccttcatcatttctcttgttagtcttgtgctctgcacaatgatcggtaacgttttcttaagaatggatgtaatctttgtacccttatgtatcccttctgatattatatatgtattaatctcttctacttattggtagtaatgtcattctactcttaatg

SEQ ID NO: 49563 - DNA, 165 bp, Glycine max
  unsure (1)..(165): unsure at all n locations
gctagtgggcatacatacatatntaattagaatggcaactaaaaagagcctacatgatatgttatatccttcaaaatctaagctgcgttgagacccttactngaatgacctcttcagccaccggattcaactaagacaaaactaaatgactaaatttgatgagga

SEQ ID NO: 49564 - DNA, 200 bp, Glycine max
  unsure (1)..(200): unsure at all n locations
gggacgtcaagtggtgtgctattgcccanaaccaagcttgaccaatcccgacccatcccgggcatattcggtcagtgagaacctgtgatgtacctaatcangcgagctcctggcagtcaacagatataatgaacaaagaccacanagcatggatgcttgtgtggnggctgtccagctgtgaatctagtgtgatatatgga

SEQ ID NO: 49565 - DNA, 450 bp, Glycine max
  unsure (1)..(450): unsure at all n locations
ttctagtatttttctgttctttccttggagaacttatcatacgcaaaactatttatcttactcaacccgatgtaactccttaaacattcaagttctcaagatatgataacgacatctcttctaatatatntctntntattattgatcaatattngttaaatntaaaataatctttntgttggtatttaaaataatgtaaatcataatgaagtttactaataattacatatgtntgattaattgcaactaatatataatattggtagaaaaatttggtggtgagatccttccagtatatctatctcataatctaatatactaatttgatttaaaacgtaacataatacttgttcaagacagatttatatataaataatatttaaaatattatttaaataatggaaactatatcatgaccttatatatatctgttcgaaatcacttaattgt

SEQ ID NO: 49566 - DNA, 230 bp, Glycine max
  unsure (1)..(230): unsure at all n locations
tatcttagtgagagtgattctcctanattcttgagtgattcaagaacaccctggctgtatcatatgtactttcacaacctctgtgtgtgccctcgctggaaagagtgattctttccttcctatcatctccacccttgttctttcaaaccacaattccagaagatccacctctgcccaaaattatcttgtgaccataactcccatttcacacactcaaattaagtgattct

SEQ ID NO: 49567 - DNA, 225 bp, Glycine max
  unsure (1)..(225): unsure at all n locations
actttttatattatcaattactgttcnaatttattactattagaaaataatatgttaaccttntataananacatttacactaacaataattatcttaaaagtcttataaaatgatttctaattaattaataatataaaaatatntacactaacaatgaatttttattattatcagcaaatataaatntaactcatggacaccaccaccgtaatgttcattacat

SEQ ID NO: 49568 - DNA, 184 bp, Glycine max
  unsure (1)..(184): unsure at all n locations
tgtacaactgatggagatatattacacttagctacggatgctcttcaaaatgagaatgatataaatgtntattntcatcatgaagtagatccaatcttataagaagtcccacagatgttgtacttggaatgtgatccaattccgaaagctgttgagaatggatgatgattatatgatgtaccta

SEQ ID NO: 49569 - DNA, 229 bp, Glycine max
  unsure (1)..(229): unsure at all n locations
atggcaaccatagaactgtcgagtagatatgggagcaagttagcatacgagatcagaatntgtggtgaatcctacacgctntntgctacaaaattccttttttggatggtgttctggtttgcgctacaggtggtgttcgtcattggaattgtggtagacaagctttgtggttgaattatggatggccttcgtggatgactgcgtggtgggtaatgagtggtgctgatat

SEQ ID NO: 49570 - DNA, 210 bp, Glycine max
  unsure (1)..(210): unsure at all n locations
actangtacaaatgtacaatagaaacatntaccagaagtgataggaaaaatgtattgactgaatntaaatcttatgctntcaggtgaacatgcaaccaacgtccattgctctacggcatgcatctgatctcacagtttccatcaagtcaattntaactactttntcatcctcagtatgttgggtaacactggtatntatttctggtatta

SEQ ID NO: 49571 - DNA, 284 bp, Glycine max
  unsure (1)..(284): unsure at all n locations
agctcgaagaagacctctccttatgacctganatgganactagttngactctaaagtccttgatagtgcanggctgagttgttgtgctttcactangcatcggngtgcgataatntagttgtgtatgtgtgtcttaatgcggtcctggttgagtttagtcttacaagaggaatctccggacaatgcttgatcaagattaggctaaactatcatgaggaatcggggtttagtatctcaagagacaccataagaacacatgagcattgntagatagagaatatctt

SEQ ID NO: 49572 - DNA, 217 bp, Glycine max
  unsure (1)..(217): unsure at all n locations
ttccgctgcatctccatggtgtaaaatcaccatngaatgacctcattgtatctcacagatccagcctccatataagccccacaagcaagcttccatcaacaaatgagaagctgagcaatgaagcaaaggtcctaacattctggtagattctaagttntagagttattntctaggttcttagaggtggaggagacatccacactgctttgtaatctgg

SEQ ID NO: 49573 - DNA, 236 bp, Glycine max
  unsure (1)..(236): unsure at all n locations
gcgcgcatagacccaccatccnctgtngcccacctncaactgagctcacgtactcccatatatactatatcctcgttactctcagcaccgggtgcgcatcaatcctgccaagcttccccaacattaaagtaatacaacattcaaacagcacaagctatcacagccaagcaaaatagggcaaaggcagaaaactctgcccaaaacaccaaccaaatcacaagctttctcacctaaag

SEQ ID NO: 49574 - DNA, 433 bp, Glycine max
  unsure (1)..(433): unsure at all n locations
gcttcatcgcaagccgaaatcaaacaacaacaaagaataggaaccagagcctaactacaacatcaaagtttatcgccaactcttattcctttatcatgtgcagtcaacccagatggtgatcaaccttntaagatggtagaaataacatctttttcatgtagctggatttcatgcacaaagagggaatgaatatacatttaagcattatgaaacagtctcgaagttattctcattactattgtttctaaaagaaaacaattccttatatattcacgtactataatattgttttacaaaattgaaattatagttcttttacaatatcattatttctctttatctctataatttactttacttatagaagattgcttgaagacacacctattgtacaggtntactacaatattaactaaaaatactgtatctgact

SEQ ID NO: 49575 - DNA, 244 bp, Glycine max
  unsure (1)..(244): unsure at all n locations
ctctattaactaaattaacctcctttgaaataattaccgataanataacacaacanatacaatcaaacatcatacataattattaatatatagatatatataatagggtgttacaaccctctccagaaactgctcaacagaaggaatggatcctggagggcgccaccacctgtaaactctgaagtaaaataattgtccctgatgaatgctctgaagcatggcttcaaagcgttgagaatcactc

SEQ ID NO: 49576 - DNA, 156 bp, Glycine max
aagcaatggaatgcctttgtgtgtggcgaatggttgggttgtattgataacttggatgtgatcttctgtaattggttcctacatatgaataacgctgagatgtgtcaatttccacagtcttaatgaggtctctctgatcatttgaagcccttcctc

SEQ ID NO: 49577 - DNA, 200 bp, Glycine max
  unsure (1)..(200): unsure at all n locations
aacacttattagtagattattatattgacttggacgattgagtgactttgtagacattatctctanttgtagggaaaccaaactattacacggaaaacttgtgaaaaattgagcgtcaagagagcttaactattacaagaaagacacaatgacagactgacttatcacaccttggcaaaaagagtatctcaatcttatgc

SEQ ID NO: 49578 - DNA, 467 bp, Glycine max
  unsure (1)..(467): unsure at all n locations
ctttatcctttctcttctcctatttaatnantttatatttatatttntnnnnnnnaatatcagatctacacattntatcgaccacttaaaaactntttatgttgtacttgaaattaaggtctcaggcccatagacaaaaatacatcattatttttcaatatgaaccctggagcccacacattattaacaacgcagaaactaaaataggaaatctcattgagataaaattctgactgtatgatgaaaatgtatcttacacccgtagaaacacaccttataatgtcaaaaataaggtattaatatattctttgaactaaatgtgtgttattccttaacaaaaaaatttatttaaataaaaatctatttgaaattttggtgaaagacccccctcacttccagtcaataaaaactactgtttggaaaagcttggaggtgattaaattttgaattacggctataatttaacc

SEQ ID NO: 49579 - DNA, 210 bp, Glycine max
  unsure (1)..(210): unsure at all n locations
tagtggtacttgacctgagcaaaccctttgtggtgtactgtgatgcatccaagatgggtttgggtggagtgcttatgcagtgnggacaggtagtggcctatgcttctcaacagctaaagagacatganaggaattatcccatgcacgatcctgagttagcaactgtagaatttgctcttatactntggaggcattacctntatggatcta

SEQ ID NO: 49580 - DNA, 176 bp, Glycine max
  unsure (1)..(176): unsure at all n locations
ccgcgatgcttcttttcatatccgcctgagtgggcttatagcctaaaccatacttcccacgatttcctttggcatntaccaggctagttatgccgccgttgtctttgcctaaacccattccgggttcataaccgttccccaacataactcgggccatcattactgctgcatcggac

SEQ ID NO: 49581 - DNA, 173 bp, Glycine max
ctatcaacagtattcaaaacttactcatgtctactgcagaaaatgtttctcgcaagctgtttgctcgaacaccccaaaagactggccgaaaatgtgttgcaagctcttaatgaaatggatcacataaccgtaccaacacaacatattcctctatcaacgcatcattttccaca

SEQ ID NO: 49582 - DNA, 166 bp, Glycine max
  unsure (1)..(166): unsure at all n locations
taagatttctaaagttataactcttcttatggttctctngaccanacatgaagagtctattaaagcaagactttgatntgcatctcatgtactttntcaaattcattctttagacaataaactgtcgccaattgatatctgagtctctntgaacttcttcttcttc

SEQ ID NO: 49583 - DNA, 266 bp, Glycine max
  unsure (1)..(266): unsure at all n locations
ctgcagtggtggattctaagcattcctttgtatcaacatattagggaaagggtatattgtagccgatgctctntctcggcgtcatgccttactntctatgctngaaacanaattgattggtcttgaatgnttgaaaagcatgtatganaatgatgaaacctttggagaaattttaaaaatngtgaaaattnttcagaanatggtttctttagacatgaaggctttcttttcaaagaanacaaattgtgtgtgcctaaatgttctac

SEQ ID NO: 49584 - DNA, 645 bp, Glycine max
  unsure (1)..(645): unsure at all n locations
catgactgactctcagcntanagtatgcccgagtcatcatcccctatgagatgtgtgaagtattggcgatcagaattccatttctttgattacngngttgaaccaagctcaagcttntacaanaaggttcatcaagtcaagttgaaatatggaagtaaccatcctgcanaattggggcaaaagatgaatcgagtcacatcactgcttcgtctactgccaaacatatttaagattattgatgtcctttgtacttccagtttcaccttgacaaagatgtcatggaccatgttgaatatctanatngattcaaccccatattctgcgtaaaaatcgcaatacttcgactggtcattcattcgcatgcatccattgctnttcatttggtngcattgctcattgcattctttccttgaanaatanaatanaatagaatgaacttactcaaaagaaaaaggaaacgctntacnngcgnccttaccgaactcgtgctanagctagagtaatgggtgaagctanaantgtgcaagagaagatgaatgccgatatganggcataaagaaccaatgccancatgatgaaggcatgatgacatgagaagatatgggagcaatgccgtattagtgngctaaaaccctgtcctaaggn

SEQ ID NO: 49585 - DNA, 229 bp, Glycine max
gagccaagtgggtgaatacttcacacttctataagctattggttgagccactagacattgctgaatattatgggaaggggatgcatagaaccaagggccattacatgcagcatggtagagagagaagatatgagaattttgatatgtggtggaaggataaaacggttactactggtagagaagataacaatgagaggagcaacattgctagtttgacccaagattcatg

SEQ ID NO: 49586 - DNA, 176 bp, Glycine max
  unsure (1)..(176): unsure at all n locations
ttttactcanacctgtgggtgcttagaatgcagtgtatatatgtggaanagacaacatttattatnnttacacaattcaagaaaaaacacacacacaaagtttcataattccacactttcctataataggcctaactcacaaaaacagtccccagtggagtcgccaattgtcacaa

SEQ ID NO: 49587 - DNA, 164 bp, Glycine max
  unsure (1)..(164): unsure at all n locations
aaactatgaaggagaagtgtatgtgtgaggaagaagagacgaacaagaattgcaagagggaattacatgtgtgtccaaatgaaggaagtcaagtgagtaattatctcaccaaaaggagcaatatttctatatgctgattcanaatagcttctaccacaagtcaa

SEQ ID NO: 49588 - DNA, 170 bp, Glycine max
  unsure (1)..(170): unsure at all n locations
ctctctcacaaaatgacnaattatctctgtgtctacattgttcatggaagactagatnggatgcaatgtgaagagtggttcgattatcacaaataagcttattgccataggtntctccaaattggagctgccggagaagttgtcatagccacgtaatttcacttacaact

SEQ ID NO: 49589 - DNA, 107 bp, Glycine max
atgagaggcggtaggagttccccatatgtcattgggatcggggcgaagatctgtgcctgccttggcaaaaagttccttgtcgtgtctgcgcctaagtgagcattgtt

SEQ ID NO: 49590 - DNA, 217 bp, Glycine max
  unsure (1)..(217): unsure at all n locations
tgtagtcaacatacacacatatctagaataacattgattcttcaaagttcanaaacttcaatcctagctntcanaaatgctcatatggaananaatcattanattaagttattaaactaggcggtataaactttgaaacgaaatattggagaatttgagatctttacctgcaaagaacaacaaacaaacaatttctatgccagacaaacaatgatgc

SEQ ID NO: 49591 - DNA, 226 bp, Glycine max
  unsure (1)..(226): unsure at all n locations
tgcacaatgcgcgcataaacacaccatccactgtagcccacctacaagtgagctcacttactaacacgtagcccatatactcagggctctcaacaccggggccccatcgatcctcccaaactttcgcaacgtcatagctatacaacattcatacagcaganactatcacagccaagacaacagagcagaggcagaagactctgccaaaacaccaaccaatatcaca

SEQ ID NO: 49592 - DNA, 216 bp, Glycine max
  unsure (1)..(216): unsure at all n locations
tctctntctttcactcattttattntctctccaaacattaattatttgagtgtttatcanaaaatattaattgctaatttgttagtgaagagatatgagcccaagacctctttcttttcatttcccttctccctccaccaccaaaccaatcttataacctcgtggtattaattattaaatggaacnactaagagatgtaatatatctaatcttaat

SEQ ID NO: 49593 - DNA, 284 bp, Glycine max
acaaccatttggttcaaaggtaaatgaaaactacacctcctactcactcaggagacctacaaccatctggccaaaataaagaaatcctacatctccctctcacggaggagaaatacaaccatagtcttaaaagaatgaattgcttctactccttcccaactagggagcctacatacctttggctcaaaataaagaattctcattctcctttcacttagtggcaaaaaaacattggctcaaaagaaaatctatatctccatccaccaggagcactaaaaaaattg

SEQ ID NO: 49594 - DNA, 364 bp, Glycine max
ttatgtagacttgaccatattctctaattgaaccttggatccctgtcagagacaatactaaaaggaattccatgcaaccttactactatcttgatatacaactccactagcttttccattctatacctcatattcactgggataaaatgagcagacttggtgagtcgatctactatgacccacacggcatcatgcccacgactagtcttgggttaactagatacaaaatccatagatatgctctcccattttcaatccggaatctccaatggcttcaattctcccgaaggtcgctggtgctcaaccttagcctattgacatgtcaaacatcttgctacatatttggctacatcttttttatgcc

SEQ ID NO: 49595 - DNA, 379 bp, Glycine max
actttataaaatgtaataagtgttaacaattgccattatacggaatgtaaataaaagatttaaggaacatacataactaccgaatcctaagtctttatataggaattggtgacaacatctatagtgaacaagctctatatactttaaatactattgtaattaaggaagtcttgctgatatttaagttgaaaaaacctcaaattcatgactcatgctaatgtatgaaacacaaaaacgtatgattcatgttatactacacaatctgtaaaggtagttagatggacagatactgtctaaagaccaggcatctttttttctaaaaaaataatataaatggtatagttagctcctttaatcatttagctaaatttacacttat

SEQ ID NO: 49596 - DNA, 384 bp, Glycine max
gcctcagttaacaaggtttatgtagcacatgactttttgctattttggaagtccataataagcctattttattcttgtatttttttcagagctcaaggagtgttcctatgcatatgcatcttgtatcaattaatgctgctttggcttcttttctttatacttattcatgctgtgtaatcactaatactctagacaaaaagggtattcaaatcaaaagcagccaaaaccattaaatagaatctgagttctaaaagataacttggtaatcataaaatcaaaaggataaagcaaaatggaaaaaaaatattaggaaaacttattaggaccttgatgcattccttcccggtcttttcattatcaactacgactgccttcataaattta

SEQ ID NO: 49597 - DNA, 91 bp, Glycine max
tatgacgactatgccgggcacgacgatgaggaatgagatacccatcttggccgcctgctccacctcatagatccgtcctcacatgaactac

SEQ ID NO: 49598 - DNA, 259 bp, Glycine max
  unsure (1)..(259): unsure at all n locations
atccaccacataagtgaaacttagcttttcaacatctcacaagcctctctctntttgcactcataacaccacatgctcactttctaaccctatgttagatatacccttcatctataacagctttccatcagcgattccagcatataaacatcacaaatatcatcacaaataccctaaaacataatgggtctgtctaactaaccaaaacatggcaactccaacaaactttcagataatgccttcacaataatcattacac

SEQ ID NO: 49599 - DNA, 623 bp, Glycine max
  unsure (1)..(623): unsure at all n locations
tggagactagttctagatgatccttacagatccgantnnancacananantgtngatnggaatatttgnttcttacattcacctgcannnnngaccttttaatctcccgaatactttttgccatagaagctcggctctcgtattatcaattcggctcggtttgattgtctnttctacactactggaggacaattgatatccacatctctcacatgaatataccanactctcacttctctcgttcgatatataatatattataacgtatctaaagacttgtatgtgacgtatcacatgctccatgcacaacggntgccaatatcattctatgtcactctcagctgatggaagaacatcaatatacgaataactttgacgttccatgcctcaattaatacacatactgcacacatatcatgctgtgtgaaatagcagtttcggcattcttctcattgattagtcacgccttttataatactattgattagtattgaagatatgcacactacgtacttcctcatacctcttctaagctatactaaccaacatcctactataaaaacggttttctattaaacactcaangaacaatttgctcggcttaatcaaacacgtaatcaacg

SEQ ID NO: 49600 - DNA, 172 bp, Glycine max
  unsure (1)..(172): unsure at all n locations
atgtctaatatgatgacanataagaagacaatcaatttcaatatattntgtgcgctcatganagatcgagttatgagtatattggatggcacttcttgtgtcatagtacatacgagtgggctaaagagaatacacccatgtcatatagtaccaatgcaaccaactacctatg

SEQ ID NO: 49601 - DNA, 494 bp, Glycine max
  unsure (1)..(494): unsure at all n locations
nttgtgatcttgtgcantcgagncctngaaanataacctcccccctgtgcgctgagcgacaccttatccttggctaatttttgttattcttgatgctcancgcaatggagcgatggtcacgattgaggttcatgaacttaaacgactgagatggtagagaagctgaattcctcgtggctttgtgagctctcaacgaggacttattagctcagcacatgctcctctgtactgaacatgcatacttctcgctaatacagccagagcctgtgttagcgagagggaccccgatgcggatctgcctacctcgctaagcgggcggaccctcgcgctaggccaagctggtgtgaaatacatacgggaatgtaacgtttggtaaacgaccgtatcgctaagcgacgctttgacaaccaacatttgtctcgttacaaggatgtcgctagggagacgtcctaatagctgggtagtgatcatcagccattgtaaatgccaacgag

SEQ ID NO: 49602 - DNA, 290 bp, Glycine max
tgagagcttttgtggtgagaagactggcagagaactaaccgacaagaggaagccattctgagagcatgagatgagtctgtgagaaaatgtgaggttctagaggtggaggagacatccctactacttgtgtaacttctatccttcatttatctcttctgtttgttgtaaaggaagcttcccagatttggagagcttaatcctctattgagtcttccttgtgggtacttcaactcaatacttgtatatctatttaatgatggtttatgtaggctctgtgctatcagtatggc

SEQ ID NO: 49603 - DNA, 566 bp, Glycine max
  unsure (1)..(566): unsure at all n locations
ataagactgaccttgagcgactgcngcatgccgcctctccccaatnntctataatagggggagaagtgaagtgaaaaatggttcacccctatgctcttctctctctntcgaatngctaggaaaaatngtttccgagaagaanatcccagccgaggcacttccgaaacatntccgtgagggaattcgcgaaggtttcgaccgttcttcgancgtcttacttcgttcttcatcgntcttcgatcttcaacgggtaagtacctcgaaccaagcttntcgattcattctatgtaccccgcggtggtccacactgtngttcgtgtatttttaattctcgttcatttgcttntatacccctcttgactgcctcagccattttattaagtcattctcgctaactaaaataaaaaattcaccgacgttgatgatatcgtactcgtacatgatccacgtcgcggcgacccgtgaataaaaagagactaattatataaaaaccttataaaaacgaacaacgcgttcttggattattatgatgcatacaagaacagtaacacccttcaccgctaaag

SEQ ID NO: 49604 - DNA, 376 bp, Glycine max
  unsure (1)..(376): unsure at all n locations
tgaagcttctatggaggctggatctttgatctttatgtcgtgcttcaaaggtgaatttacaccatgattatgctatggaagatacacgacactaggtgagaggaggcgccatccactacggaataaaccatggaagaaggagcttcgtcaccaataatgtgccttggataagaagcttggagaggatgcttcaatggaggaaaagaaagagagaggggggagcactaaattgatggacgaaaagggggagagaagttcaactctgaatggtgtctcataagactctcattcatctaagttacagcaagtgttacacatgcttctatttatagactaagtagcttncttgagaaactatcttgagaaaacttccttg

SEQ ID NO: 49605 - DNA, 230 bp, Glycine max
  unsure (1)..(230): unsure at all n locations
actctncttctctnctctcccttgagcanngataaatcatgggtccgatgctgctgagccaactcgccaccggtctaagcgttctcgccggagccggtcttgtgaaatctggtatggaccanaagcccatggcaggcccattcactcgctgccncacgtgcaacggaaccggtcgagtcacgtgcnnctctgtcgcgtggtccgacggcgatgtcggatgctccacatgc

SEQ ID NO: 49606 - DNA, 373 bp, Glycine max
gacctttcacccatcacatagagcttaccctcaaatgctcaagcaaaacaaccccatcttgggcggcgaaggctctctatcagtgcccacttgccggtatctggatcatacacctcagcactggagagactgtcaccattcaccccatagcctcccacagcataaaccaaaccattgacttcagcacaagcgaagtcataacgagacacattcatgtctgacaatctgctccagctgcaattgcaacagagaatggagcaagtctaaagccaacttatagacagacatataatatgagagaaattcataagtgtcacgacgtaacagattataaggccatctcttacaaaatcacaaagatgaatttatcata

SEQ ID NO: 49607 - DNA, 213 bp, Glycine max
  unsure (1)..(213): unsure at all n locations
taaacacanacatcaatgtaaatnntgagcanactcatgcacatancttcttacgagcattcactcgcacaagatattcttctaactaagaaaaatgcacccatgcacaatcaanggcaccttcgtacctagaatatntatatgtacttccaaggtgtatntgctacctacatcacatgccacttcttggctaaatntacatacatgcatact

SEQ ID NO: 49608 - DNA, 340 bp, Glycine max
ttagaagagaatgagcatgtgattggaattattattgataatgttagttattttgtcagattgattgtgaacgaatgcattgaccacatgtgattggcatacctctaaagtatggactgaatgtatgaaattgatgatgatgaaggccatgtttgattgtgatagtcacttagccaaaaagctgaccacgtgcttgaatgaattatcccttgcacccagtttgagctgaatgaattattgattgattaaaccctaagcctatacaatgttatctcctgctaccttgacttaagttttaggagagcattatccacaggaagcgtgtgtcgcaacctaccct

SEQ ID NO: 49609 - DNA, 380 bp, Glycine max
  unsure (1)..(380): unsure at all n locations
tgcggtcgccgggctcgtgacaattttcatgttngacagctaatatcgaacttctgtcatcattctgctattatcacttattcatgcgtttctactcagccgttaaaggatcacttactgccttaatatacatcactcccgcctgtccatcatcgcagactggtggtattattaatcattctgtcacatggatctctcaatacggcatgagaactcgatcggacgcgatgcacttcttgtcgctcgcgttataatttgccgttgtgtaatcgtggcaacgaatcattcctctgccgatgtatatacaatctgtagaacctttatggttgttcgtgcacatattatctcattacncttatgtgtgtgccgtgtctctctcg

SEQ ID NO: 49610 - DNA, 547 bp, Glycine max
  unsure (1)..(547): unsure at all n locations
tgatattagccttgcaaagacccttgagcacctgcagctgccgcttttattatctttgcatctcacaatgtttatttgctctactttangtgagnnngtgttggtatgatcatcgaccttcaaatgtggatnaattggacatacatgagtaatgtgggtaagaanggtagatgtcacctctctttcgatcacgtctatattctttaccataatgagtacatactgcaatcagatcaacanaatatgtttctttgcaaatggcctagaaataaaggtgttattaccactagcattggttctttcttctattntangaacacaacttcngagtagcactggtgatggtatttgtccatgttccagcctccccgtacataggcattgtgacagacactcatcctgatatgaaattttatcatatacattatctatcactggtagatatatattacttctgaaagtcacacactaactaatctctatatcaatgaagccacaatattcttatcagatataaatcttatatatgactacatgtgtcatagag

SEQ ID NO: 49611 - DNA, 361 bp, Glycine max
  unsure (1)..(361): unsure at all n locations
tcttgagaaaacttgcttgagaagcttcttttataaatctttcttgagaagctagagcttagctacacatacccgtctaatagctaagctcacctccttgagatgagaagctagaacttagctacacaccccttataatagctaagctcacccccatgacaaaatacatgaaaatacaaaaaaagtccctactacaaagactactcanaatgcctcgaaatacaaggctaaaaccctatactactagaatggccaaaatacaaggcctaaatgaagganaaaacctattctaatatttacaaagataaacgggctcatacttagcccatgggctcaaaatctaccctaaggctcatgagaa

SEQ ID NO: 49612 - DNA, 457 bp, Glycine max
  unsure (1)..(457): unsure at all n locations
nntgaccttgagcaccgacgactatttcagcaccctagtagcaactctgtatctagggttttcttcgacccaggacaatgtgggttctgtggggttcgagcgacgacaatatgggttttccggcagcgtatggggttctgtgggttccaacgatgacaatgtgggtttttcggcagtgtagggggttctgtgggttcgaccaatgacaatgtgggtgtcgacggagcagtttccggcagatttcgggagggaagagaaagagaacaacaatttcatgcaggaggatgacaaacagaagaggtagggcaaggttttcgaacgtgcgcggcttctgaaatctctattnttttntaacttataaacacaataacatcggttttttatggataaccgatgtttactaaatatacttaacattggttttgtgaanacccgatgtaacattcaatacattaca

SEQ ID NO: 49613 - DNA, 90 bp, Glycine max
aatcaatcaaatttaatgttataataattaccctgtaccataccaaagaattatatttgaaaatatgtctaaaacttgaaatattcttac

SEQ ID NO: 49614 - DNA, 434 bp, Glycine max
tcattccatgatggggaatcatttctttatagatggctgctgccatccactcttacatccgttcaaatctttacactttcgagtttgaagtatctagatgaggaaagccttctgcaattgacctctctggagactctggggattgcacgctgcccagaacttcagtgtatgccagcaaaccttacttcttcaatttccacccttcatatcatgacgagtgctagacttgaagaaagatgtaaagggaaaaaagctggagattggcccagaattgctcacattcctatgatacggattaacaagaaattgttacagtgggaacaaacataatattatggaattgtcctatattattgttcaggtatctgctctaacattccctatattctctgcaacgcaacatagttggtgtatatttggcttatgattctgtt

SEQ ID NO: 49615 - DNA, 598 bp, Glycine max
  unsure (1)..(598): unsure at all n locations
nntttggcgtgtgcgtgatattcattntcctttctaagcaantctanatcttcttgcanancattantntatgattacattctcccnnctttggatgacgacaaccacctgtacgttacgagcaacaacaaacaanaaatatctattngcatatagttaattccccttggtttacaatgatcgcttatatgagaacagtgaagaatntcatattntcattatgtaaccaaatgtctcatagacaatagatacattntcttactatnntatctgttatctntctctccccctntatcaacatagaggacagatcattgaatctgagaggagatagactgtttcatctttcgccattgtttgagaatcaagtgatccacnaggcataaacaatcatctatataatcagcagaacaagtcactacacatcatcaacacatcaaatcatcaatctaaatatttagatcaagttaattcaatacantcactaactaacacataattctataaaaattcaattcaattcaattaatttaaaccactcactaacttagactccctcactcactgcattactcactcataccattcactcactcct

SEQ ID NO: 49616 - DNA, 315 bp, Glycine max
tgcgaggaaaatggacataaaataattctttttttagtgttatcgatgtctcaatatcctgcaatggggtgaaaatcaaataccagacaagttgtgtctatactaataataataatgataacaataataatcataatcatcatagaaataccaatcataagcaccccattattaaaggagagggtatccacatatgtatggatcccagcccgatctttcttctcaccaaaagaagtaaaacatgcgcagcataacatcaatgacattacgagaacaccctcctgaaagttatcaccaacaactcaacacaaaaac

SEQ ID NO: 49617 - DNA, 205 bp, Glycine max
  unsure (1)..(205): unsure at all n locations
caagctacaaacggccacctgagctagacaattcctattgtttacatacacgttttcaaaccggtaattataactactttaagcgttcataccgctagaaggntctaaatgaattgtaccatatacaaatgcccgaccatttaacggtctaataccgcaattcggctaaaccttttatatgtaaataacttgtgtgtatatctaa

SEQ ID NO: 49618 - DNA, 466 bp, Glycine max
  unsure (1)..(466): unsure at all n locations
gaatctaagctccaacttatgaccatgaaaaggtaaataattcataccgtttgtcttaatttagtaaatagtaattggtttcagtgtatattgagaatgagctgttatcattaatatacacatcatatcacaactaaggaagctctaagccatgagttggtntgtgacgttccccatccggagtctaaagaagttatgccgacattctctgctcaacatgcgtaagattggtgaccacataagatcttgcctatggtaaatcgtttggttaattgtactagttcatttgactcgtatatatgttgtataattatgtaaataggcaaagtataagaatattcaagagttcagatcccttttaatagcaacactggtaggagatgtatcatggcgaatcatggactgagggatgtttgctaaaatgctgcacattaattttggtcacaaaatcatctaacatgattac

SEQ ID NO: 49619 - DNA, 412 bp, Glycine max
ccagcatacacagtttcacatgcttaagagataaacatactattttaagaaagggagaaaaagtttaaggaaagcactgcagactagagtatgaataatctacctcaataaattgagtacagtaacggggaaggctgcgtttgaaccacaaaagagagattacatcacccacaccataaccattttcaataatggtagacattggtacaccagcatagcatggctcctcaccttcggaaaaataatggaagaaaagtttaatttagctatcaaatgtgtctaggacacctcagttccatgttacaacttataaattcgaaggatcccaacatacctttgtcatcagagatggtggaaataatgtgagttggagcacgttcttgttcactcctaatagctgtgttaaagtcct

SEQ ID NO: 49620 - DNA, 214 bp, Glycine max
ctaattgagatcaaacacccggctgtcaagacttcacttgggtgcctgtggaaaggagcttcttcttatctcacctgttttaacccattcaaaatcacttacaaatattgggcgactcattaccccaataggattgccaagattaaaaacttactgttgaccctattgaccgactatatgctttatttgcaccctactcttactcatctctttt

SEQ ID NO: 49621 - DNA, 464 bp, Glycine max
  unsure (1)..(464): unsure at all n locations
tgtgcaaatcaaatcactcctacattntatctctagcatgcattgtatgttggtctcgtcctttgtcacaggaagccggaaggtccatatcaccttcttaattgtacacatggggcactgcgcccccaaatgcgcgagtaagaagagataattttccgggctctcgtgtccgtaaaatgcattcatatcatgcatcgcataagcatctcttcataacatcataatggacatatcctgcatttgtccgttatcatattccagcctcacattttgcatgagtcatggcatcatcatgcatatgcgttcaacaaactttttgatctgcaaaattgcataccatttgttttcatgtttgctcatccttgcgttttcctctacaaaacaaatacaaagaaggcggaagcgtgaaacttcacactacattcttagtgtcatgtgttatgagccaaccatgttgggatcat

SEQ ID NO: 49622 - DNA, 584 bp, Glycine max
  unsure (1)..(584): unsure at all n locations
nnnttgtgtgacttaagtacctgcngctgccgcttcataagtggaatagagccaaagctctgtanggctcttatacctcataattttntcttaccttctcttncatngntgnttcttcatttttctccatgtatctcctcacatgtcttggtctaaatggttntaacatgattctttagaagttccaccgattaaacttgctatagaagntagattngattntctatggntcanatntcttgctcttnngtcttgaaccatgaatgtgttgagttacggtcctttgagttttgcttggtatttttgggctgaacatatacataatatcttacaaaatattaagtgaatanaccttcaaatctaagtgacttgtcacctatgagtttgcataaagcatgttagcatgaacttgacatagattctatgttggctgatttattctgttcttgctactcattgtatgaggatgaatctttagctatattgtttagtcatcttctgtaatagcctacagtcatcaaatctagaagctggatgtgaccttctgacttaggttcttaatggctattgtattcattcgcgct

SEQ ID NO: 49623 - DNA, 424 bp, Glycine max
  unsure (1)..(424): unsure at all n locations
cggactacaccttcgaccgaacacgaccgtgtttctgtctatgccaggattcaaggcgggctatagcaccggctccgcttccctaactgtactggaggcggttgcggtggctttatcctctatggttttctggagttttaacatgacctccgagatggaagccatttgatcttttaaagacgatagatcggccttcatctgttcctgcacgccctcttcattatccattcttctggatcgagtgttataggggtgccttggtgttttcttagttatgatgaaattcctaaagaaataaacaacggtgagtatgccaccaaaacatgagtatgcaaatggatgatcggagcacttggatccaccccaagatntttagataacgtaatgagttcagaacttctcattntataaaaagaacaaagct

SEQ ID NO: 49624 - DNA, 626 bp, Glycine max
  unsure (1)..(626): unsure at all n locations
aaaanataatgagttccatatgagctacgtgcnagcatgatacgntcgnnngacgtcngngaaagggttntgtagaaagattgaganagganngtgnngttntcaattgctacacgaaaataagacttgaacactcaagtggttctactctcgcganacgacagcatntntcacacaccanaagacatatcgcagatctcaacagtcagatcgtggacatctgttcttcgaccnctnntgtctgactcanantcttcaagggatggcaccaatccttcctttgcaattctctatatggcaactcacaaacanagaaacanagagacangccataaccacagaccaanatagatgatatgaatgctanacccanttattcntatcaagaccaatttcaaggatatcaacaataaagcatgacagcacttaaagcgagctggactanagagancctagaatgctctagagttatagataactatacaaaaactcagaacctctagttggcctgtttcacatattcactgatttaaactagatgttaaaaggccattgagacaattagcaacacagccctccttcttttttctgaactgttttgcacttgggtttatattcctctcccg

SEQ ID NO: 49625 - DNA, 441 bp, Glycine max
  unsure (1)..(441): unsure at all n locations
ntaattagtcaaggtaaattaataattaattcaaccctccttcttaattattccgaggccacttgatccaacaagtggtatcaaagcacgtatcttgtagaaagtttcacaactacaagattcatggcctccttaaattttctgtttctggaaggaaattccatccataggccacccatatttaatggtgagggttaccactattggaaaatccgaatacaaatctttattgaagccatagatttaaacatttgggaagcaatagaaataggaccttacatacccaccatagtagatgtaagcactagcaccacaacacaaaaacctagagataagttgactgatgaggatagaagaagaatccaatataatcttaaagacaaaaacattatcacttctaccctatgaatagatgaatattcacacatatagtcaatcatc

SEQ ID NO: 49626 - DNA, 652 bp, Glycine max
  unsure (1)..(652): unsure at all n locations
nnnaatatgatactaagagtgtcctgcaagctgccgncttgacanactttacancncataaacttagnttttngnntctgatgatntctagcanagnntctctgaaagttatgtgaatatngagttgcacacacattngagataaagagaggtccattcaatcaagtcttttngtcttgcattngaatgtaaagggtgtatctctccttgactatgtntcatatnggttttacacacgggtactgcatgtgcaacgcgtttagtgcatgctagaatanngtgttataattcgaagctaagaagtaggttctcttaagcttagattcactaaggaccctgnngtggtgcctaagttcatttctaggtagaattgaaatgctngtanactcacattgctattgaaatctaatcatggtgaatanataactagattaactttgaatacatacgtaatatgaatatttaaatcacatagccaatatctaattcccactctctaattgcttatttntttgagcacaacattatgacttagcttctctgagttttattagtaacgctaagtatgtaattacaacgtttacgttgctattctcttntcatgtaatacacagacgacgcctgcaacgtttaacactgtaactctatatcg

SEQ ID NO: 49627 - DNA, 398 bp, Glycine max
gacctaaccatgacagaggtttctttgttgccattgcctccctcgcccaatattatgaccagactttgaggtgcttcacctttggggacttccagttaacacccacagtggaagaatttgaagagatcctgtgatgcccttctggaagaaggaaaccatatttcttctcgggattctatccctccttagctagaatttctaaaatagtcaaaatctcgacacaggaattggaccgcgggaagcaagtcgaaaatgcggtggttggggtaccaaggaaatgtttggaagcaaaggcgagagtcttggcaagtcaagacgaatgggccccgttcatggacatcctagcacttttgatcttccgagtggtcctctttccaaatgtggatggggtggtggac

SEQ ID NO: 49628 - DNA, 185 bp, Glycine max
  unsure (1)..(185): unsure at all n locations
tttatatattggacataaagtccaatgtacatctntctcataantaaaatattaatctcacttttngtgagctaccctgacctagtagtaaggaattggataatatgcgtaacatcttatattcaaatcttaatactgtctttgtaaaataaataaaaaatattggatnntggaaaataacttat

SEQ ID NO: 49629 - DNA, 439 bp, Glycine max
cctgcccttgcagagattaatgttgtatctaatcatgtctttttatcaggagatgaggttgctctttcatgtgaaaagtatactgctttgacgtgcgcagctcgagattcagaggaacaatccaagaagagagttgctagtgctatgcttgaagttgacgaaacaaatttgtcgcacatggacattttgaagagggtagaagaagctacataagaagttaaaaccaccaagaatgcccttgatgaagctctataaagggtagaagctgcgaatagagacacagtacctgttgaagaggctttaaggaattggcgatctgacggacaaaagagacgtgtttctatacacaactctaccaagttcaaaaactgtggtttgtctcatcattggagagatcctcaattacttgatgtgaatggattgcatttggtaaatgatg

SEQ ID NO: 49630 - DNA, 696 bp, Glycine max
  unsure (1)..(696): unsure at all n locations
atgaataagagtctgacagttatctgangcatgaacgnttcnangnangacagagaccaatcacgagcacatattatggnctngatatattagntagttgctngctcaagggccaaagganacttgtctcatcgttaatgcgagacagacaccaacatgttagccatcgtcagcaagtaccaagaagaactatatctagccatagcccacgagcataaagtggtggacgagtatgctctattgtatgcggaanaggangctagaggaanggtgatcaaatcatttacatcaagaagcaacaactgtggatggaccaatctgctcttaccttgaacgggagtcaagaactttcccgantgctagccaatggcaaagtgatggcagaacacctactctgccccgaggagatccacgaaacttctcagctattgtcagcatatgatagattntatgggccatataantagaaacctctangaaagttgaccggcactcngatcttgactaagtataactntctgaataaaatgagntcattccatgtntntactcccanagatcggngcgaatcaagtcactccccgcatttatctctagcatgcatttcattttacctactcctcacgttgggtgttttaagaaaaacaccatactaacgcgccccaagctatctatcgactagatcatattatacgn

SEQ ID NO: 49631 - DNA, 482 bp, Glycine max
  unsure (1)..(482): unsure at all n locations
acactataaaaccccgcttcaagaaaagatggcctcagcaaactccttatttttattgggaattctatcaatagacctccaatctttaatggagagggttaccattactggaaaacccgaatgcaaatttttattgaggcaatagacctaaatatttgggaagccatagaaatagggccttatatacccaccacagtagaaagaattacaatagatggcagttcatcaagtgaaagtataactatagaaaaacctagagatagatagtctgaagaggatagaaaacgagtacaatacaatttaaaagccaaaaacataataacatctgccctgtgaatggatgaatatttcagggtttcaaattgtaagagtgctaaggaaatgtgggacactcttcgataacacatgaaggaactacagatgttaaaagatctangataaatgcactaactcatgagtatgaaatatttagaatgaatgca

SEQ ID NO: 49632 - DNA, 377 bp, Glycine max
tgagatgaggaagtgttgaagggtgaaacttcctgcttttattgttgaccacagagtggtacctggagatatgtcgcgggggtcaggataccttggggacgtcaggtggggtgctattgcccaaaaccaagcttgaccaatcccgacccaacccgggcatagtcggtcagtgagaacctgtgatgtacctaagcaggcgagctcctggcagtcaacagataaaaggaacaaagaccacaaagcacggaggcttgtggtggctggccagctctggattttgtgtgatatgtggagtatggcctctggtaatcgattaccaacggtgggtaatcgattacgaggcttataaatgaagacaggaggctaagatggtctct

SEQ ID NO: 49633 - DNA, 549 bp, Glycine max
  unsure (1)..(549): unsure at all n locations
nnaatttcgccactgacgagacctctgagttacctgaagcatgccgcctctcacgaagtttctaagtttagctctcaattatctaccattttnattatagaagcatgtgtaacactnggtgtaactctgatgaatgagagtctngtgagacatacttcanagtccacttctcttcctctttattccttcaattcgggctccccctctctcntctctcctcttcttttctccatgaagcatcttcaagcttttatccaagtcatntgggggaagctctcttctggctatcctagggaggccctctctcaccttttcgttgctcactgcattcatgggaaatcacataaagacctatgagctaanatcccctcatgaacccacagcaacttcataatccgagcgggagctgagactcagaacattgncctcacttaacttcttgtatttagactaagctgatcccaagatacattctctggctttgatcaaggcgggccatactgngacattggccgcattagcttttgttcttaactaacagaacccaag

SEQ ID NO: 49634 - DNA, 460 bp, Glycine max
  unsure (1)..(460): unsure at all n locations
ancgctctcataggtgaaatcaggtgcagccatttcccttatagttctctcacgaggtggaggttgtgccatgttctcagaatgtgcaaaatcagaatgctcaaaattataatgctcaagatcaggatgttcaaaatcaccaataacagaatgcacagattcaccagttatggaatgctcagaatgatcaaaaggtataaaatgatgcctaactaatctatgaaatgtcctatctatctcaggatcaaaggattgtaagtcagatggattgcctctagtcatacactacattcagcatgcacacaactagttgccttgtcatgtaaataaaggtgtaggtttgaactacagctaccctcaaatgatatccaaatgacttgaaattttgtgagcaacctcataaatgatgagaagatagcacataaaatttcagacaaaaattcaaagtctaactatgaaa

SEQ ID NO: 49635 - DNA, 212 bp, Glycine max
  unsure (1)..(212): unsure at all n locations
tatatggattaagacanctggacgtagtnntagtaaacacaatggtntgagtgcatntatgctaagtcacctaaagcacgtcggatctcttatgaaaaagcctatatcntttcaacttaccttcatgttctctntctctctcttcaccctanacacttaatcgtcaccatcactcatcattatgacctttcactttaaaactctttgaatct

SEQ ID NO: 49636 - DNA, 122 bp, Glycine max
actaagctcgttacacgcggagatgtacgttatcttgcgtactcacatatatttttatgctcacatatgagggacgctgaccagctgtaatagcggagtggataccctgatgaacattcgtg

SEQ ID NO: 49637 - DNA, 596 bp, Glycine max
  unsure (1)..(596): unsure at all n locations
nnnaagattgtcggctgcatgacgctcgannantactggngtacncatcacatgtggtactaggtggcggtctgtctatggngccttacatgtntncacatncacaacgcgcgcatanacccaccatcctctgtngcccacctncaactgagctcacgtactcccacgtagcccatatnctctgttctctcaacacgcgggtccccatcaagtctctcaagcttgcacaacatccaagcagaacaacattcatacagcacaagctatcacagccaagcataacagagcataggcagaatactctgctcanacaccaaccataatcactagcttttctcgcttaagaacccagtacagttcctcagatcaattcgtaacccgtggatcgactcngaaatntactggaagctctagacataacctacatggagcgtggactctacaacatcagaactatctgtctactttcacagcacccacacactttttgacaactnaatctgtgcccatgcagaaatctgctaggtattaaaaccactcctatcattgtaatatctcagcaactgtaactgtaccagtactcaccccaccaactg

SEQ ID NO: 49638 - DNA, 185 bp, Glycine max
  unsure (1)..(185): unsure at all n locations
atgaggaagtgttgaagggtgaaacttcctgctgttattgntgaccacagagtggtacctggagatatgtcgccggggtcaggagaccttggggacctcaggtggggtgctattgcccaaaaccaagcttgaccaatcccgacccaacccgggcataatctgtcaatgagaacctgtgatgtacc

SEQ ID NO: 49639 - DNA, 441 bp, Glycine max
  unsure (1)..(441): unsure at all n locations
cgatgcctgctatctgtntcattatcttcactctttttcattataatggttctaacaagaataaaatgtatttctcctgtttactaacactaggtgttaagcttaagaacatgacaccaaaagtaaattcattaacttcaaaagattgaaagaagtgactgcagaatccaacatttaaaaataaataaataactgattgtgagataacaatttttgatcttttcaaaggtagatgctaccagcacgctataaagaggcatattgaagcccgtcatctagatttcatttcctaaattataaaattttcaattatttaaaacaaaaggaaagaaagaccaaagactgcttaagaaagaatcataaagacataaagaagttcattttcaaaaggactgtcaccttgtagacatccatcaaccctttgtcagtttcttcaatgat

SEQ ID NO: 49640 - DNA, 210 bp, Glycine max
  unsure (1)..(210): unsure at all n locations
tattgtcattggacccttatagacctttacctataatganatccattaataagatnttcttatacatacanattcaatcaagcttggaccaattagataaataagtggatgtcttcaattggttaggcaaggcanagaaccaagaattatagttttaactccaggaacacttatccaantcctgtagctcttatntcacagtaatatgta

SEQ ID NO: 49641 - DNA, 424 bp, Glycine max
ttactcaagctccctgcgtagccgctgatggtgctcagaatatcccaaattcaatttcctcttattactagctatattgaattttcttagttcctgaatgtacaacctccaaattgttgctcgtttccctctttcttttctgcaaaaaagaaaatcaatatcaaagaaaacatggatgaagtcctaaggatgccatgtacatgtgtatttttgaagatatagtatttatattccatcaaacatacattgattgtggattacatgtaatagactctttataacatggttgccccatatcacaattaaaaagcacaactaccaatctttcagagtgctctggctaatatgtcatgtctccttatgtggaggggttttgttgataatttatagtctggcttcaaaaatactcaaactgatcttgact

SEQ ID NO: 49642 - DNA, 310 bp, Glycine max
  unsure (1)..(310): unsure at all n locations
tatcctcacactgtgagtngtntntctatataaataaacttgtttatgaaatcttggagaggctntatgactaaatagtactttggaatttttatcttgngataaatcaatgtagtagcctgaaacgctgcaaaaatactgatgcagcaatgntgttagtgaactcctattgtganaggatggacaatctatgtaaaaggactagtggatgctctctccttgactnactcttatacatcgntggtcgttcttattgtcactgtcgtgaaatatttcatgtcacatatccaatcaccctctcaccctttgt

SEQ ID NO: 49643 - DNA, 409 bp, Glycine max
ctcatttggatgtcaggatgatagctcgatattgttattctaattcctggatctgtttccaacaattcataatcaacaactttaataatctcacttggattctgagtttctgatgcttctagatttactgaagaagtagctttgtctctagaaagcacaagaaaaaaatttcttcatcctataaagagaaaatgacaccactaaaattagctaattatctaactcacagctactattatctttagctgtgcattaataattcattgcaagaagttgaatcttgaggtttatctggtgaaaaaggaaaaggaccaagtccctgaaagaggaaggaaagagaaacaaaatggacagagcaaaagcaaacaaggcctttcatggaaactctacctcaacaaagtcgtggaat

SEQ ID NO: 49644 - DNA, 514 bp, Glycine max
  unsure (1)..(514): unsure at all n locations
ataatgtagttcttagctcctgcaagctacancttcaatgaccggtggngcccagtcattttattnngnttttactatacctctatatanncaagactatcacattatgtctaatgcgccttacttcattgactaaattctaagctccttgctaaaaatctcggcagtagaacataacctacgcaaaatataatatgggataagatatcctctcgaagactacatcaaaggccacaatatcagatgcactattcaagtactgaggcttcttgagcttcttctttgtatgttctcttgtttccttacacaacctaacgatatttgaatccgtacactaatagagagagttattcttttaaattcatctttgagaatggccaacgtatcccagaacaatgtcttctaactgtaggcacataagcaataacactacatcaacgtatttattattaccccagattatctatgggattctagaatgactcttccagaaaagtgtacacataaagaaccc

SEQ ID NO: 49645 - DNA, 478 bp, Glycine max
  unsure (1)..(478): unsure at all n locations
cggcaagtagatctgatgacantcgncnnannnaaaaccacctcggaacccaatggatctgagtctccactacagatttgttttttgttgccactgaagatccatcgcgtgaatggtgtatttacgacacaactctcttccccaagcatatgttgatatgcttagaggggcacattaacagatgcagacatcaactcctataccccaagatacatgctcatgttgaagacactgaactcctacttatctaatttaccactatcaaatgggagacgggaacagatatgctcaagattgatgcttcctggttcaacgcctcaagcgttgttcagaggtgatatgattagaacccagactaaaatttctatattccaagcaagggtgccacaatctaagggggaaaaataattcaaaaatcaagggggcgaataaaaagtgttgtcctaagggaatcataaacttttaatctaaaccaccg

SEQ ID NO: 49646 - DNA, 77 bp, Glycine max
acaagtttcctagcgatttctaattatgtgggtcattaagtctatcatatgctgacaatagccgagaagcccatgaa

SEQ ID NO: 49647 - DNA, 278 bp, Glycine max
  unsure (1)..(278): unsure at all n locations
tccatcatcacgataccgtgttctattggtgagggtgttgttgcaaagctcttanacttgggagctagtatcaatttaatgcctctctccatgtgctggcgactttgagagatagagataatgcccacacgcatgaccctccagttagctgaccgctccatcacaaggccatatggagtcattgaagatgctttggtgaagggttaaccccttatatttccagatgatttcattgtcatagatatataagaagatgctgacattcctctcattcttgg

SEQ ID NO: 49648 - DNA, 461 bp, Glycine max
  unsure (1)..(461): unsure at all n locations
nnnaatatgtacatctgagcacctgcangctgcaacgcttcctcttgaacanatatccctcagccaanattatccatcttgtttctntntccacaactctcngaaagggagagaatggcatctaaacaacaggtcctaatatatanatcttaattgactctaggacaaacaaggtgctctaagaggctactccacatgtttcctttgattaacaaggaattttagactcccattgctgcttgttactgttgccttagctaatgtgagacctatgagcaatctaaacaggatgtccagttgcgctctatagtaactttatatagggactaggggattagtttatcataatacgtcccctgtcaacgttttctcttcttcaacctatttctaattcatgttatatcacctccgtctgttttctcttattcatttttctatctcatcattcattcctgtgctcc

SEQ ID NO: 49649 - DNA, 420 bp, Glycine max
  unsure (1)..(420): unsure at all n locations
tctntgaganaacttccttgagaagctagagcttagctattcacacccctctcataactaagctcacctccttgagaagcttccttaagaagattccttaagaagctagagcttagctacacatacctctataatagctaagctcacctccttgagatgagaagctagagcttagctacacaccccctataatagctaagctcacccccatgacaaanaacatgaaaataacaaaaaaaagtccttattacaaagacaactcaacatgccccgaaatacaaggctaaaaccctatactactagaatggccaaaatacaaggcctagacgaaggaataacctattctaatatttacaaagataagcgggctcatacttagcccatgggctcgaaatctaccctaaggctcatgagaaccct

SEQ ID NO: 49650 - DNA, 176 bp, Glycine max
  unsure (1)..(176): unsure at all n locations
tacaatgccacaaccatgaatcatcatctatcttactcaccaagcaacttagctcatgaaaagatgcatgctcaacattcagcatatanatattacctattctcttaccaatgtggacaactgtaccagatatggcttcacttataagatgagcaattctggcaaactcaatcttg

SEQ ID NO: 49651 - DNA, 379 bp, Glycine max
gatgatgaatcaagttgattcaagtagttttgatgtttttttagatgatgacaaaaagcccaagagaatgatttcaagattgactcaccacgtttcaagaatcaagagaagtttgatttcaagattcatgagaagatgaattcaagattcaagagaagaaatcaagaagacttctcaagggaagtattgaaaagatttttcaaaaaacaaacatagcacagtttgttttttcacaacagttgttctcaagattctctaagctaccagagtttttactctctggtaatcgattactactctcctgtaatcgattaccagcggcaaagtttgatttcacaagttttcgactgaatttgcagtgttccacttaagttcaaaa

SEQ ID NO: 49652 - DNA, 390 bp, Glycine max
  unsure (1)..(390): unsure at all n locations
gagggagaatttcaaataatgaaagctgtgctcatganatatgtgctatattaatataaaaatacatataataggtgtgactttgaaagataaacttacataaagactgaatagttagaacataccaattacatgcagagaaacaattatatagacttaccaatcctttcattcgaatcgcttcttctttcttatgctaaagaaataaggaatcatattntgtaactacattgcgattgcttatgggtgtcaacattcagaactcatttattaaaagattgcataccctattgattattcttacaatagtaggcaatcacaaaaatatattattaactagaaattcttttgtgtaccagctaatattatntgaatctcatcaaaatcgca

SEQ ID NO: 49653 - DNA, 393 bp, Glycine max
ccttcataaaagtttatatggctcgaaacaagctctgtttctttgttacaagaagtttaatgagcttatgagcaactcatgattcaatacatgtgacatggaccattgttgctatgttaagaaatatactaatatctatgttatccttaccgtgtatgttgatgacatgtcgattgcaggatctagtatgacagagattaatatgttgaaccatcagttggcagaaaactttgaaatgaaggatcttgtttcaactaaacaattccttggtatgagaattcttagaaatagatcacaaggaattttgaagttgtctcacgaaaaaatatacacaagttgcttgaagagtttaccttgaagattctaagaccacgaatacacttttgggatctc

SEQ ID NO: 49654 - DNA, 169 bp, Glycine max
  unsure (1)..(169): unsure at all n locations
ccctagnggatgacgcctcttctcacctcttctcctttatcttccgctgcatctncatggtggaanatcaccattgaaggacctcattgaagcttatagattcagcctccatagaagcttctcaaccaagcttncatcaagtggtaatcagagcacaagagcttcaagt

SEQ ID NO: 49655 - DNA, 444 bp, Glycine max
  unsure (1)..(444): unsure at all n locations
ntccaacgtctcanacaaccgtatacaactcatgattgtattaattnttctatgattttcatcataaaactccactagactggacacttttcatgtgtatctagcactcctctagcatcaagtacaatataatataattataatgagaatgacactatcaacaagaaatataatacaatagcaaatgataataataataatatcattatgactaaatacaatgcacaagaagcacacatgagtaaaggtatgcacaagcataagacaaccaataatataacataatgaaaataacaacaataataataattaaattacaaacaatatgacaagatcttaataaggattatccttaaggtatgtacctagtgctcaaaactngaaatgaaacttggaatgttacacacatttaaagatnaaattntaaattttaaatttttaaaa

SEQ ID NO: 49656 - DNA, 111 bp, Glycine max
ttgatagatttaagtcacatactgttaagcgatgattcatgtcaattctgtctgtctgaccatgatggtgattagtcttgattttatgattttatgtgaactaactaaatc

SEQ ID NO: 49657 - DNA, 455 bp, Glycine max
  unsure (1)..(455): unsure at all n locations
gatggcctcagcaaattccttatttccagatggtaattctatcaatagacctccaatctttaatggagagggttaccactactggaaaacccgaatgcaaatttttattgaggcaatagatctaaatatctgggaagccatagaaatagggccttatatacccaccacagtagaaagagtttcaatagatggtagttcatcaagtgaaagcataactatagaaaaacctatagatagatggtctgaagaggatagaaaacgagtacaatacaacttaaaagccaaaaacataataacatctgccctgtgaatggatgaatatttcagggtttcaaattgtaagagtgctaacgaaatgtgggacactcttcgattaacacatgaatgaactacagatgttaaaagatctaggataaatgcactaactcatgagtatgaattatntagaatgaatg

SEQ ID NO: 49658 - DNA, 655 bp, Glycine max
  unsure (1)..(655): unsure at all n locations
aaaanacgatgtatctgatgcatgtcgntcgtgcattacatatcctgataagggtgtccatatgttctaagacttgactaacatttgctcccaagttatggtctggaagtgaagacctcatagcatctaacgagtccatatcgttngtccaccatgaagccncctgatgtccaagaagatcatatatntctaaaggttnttcctcattctctagagggagaggcanaagattggctatactacnttgctcctaggtccatttcttgttgctaagagggttgtcttgggagaaatcttacctgcatctatgaccactgccatcagaaatgaccatttacgcatcatacacctaattggcaatgacttgtttagtctgtgatagcatcaagatattgtgacgtttctgcttaccaccaatttcttgtcactccttctactatattctattagcgactatactacatgatatgatgtcgatgctctacgcattgttgaccacttgtgtcatcatactgctcttcctncgtctntatcttatctatgcctcaccttcatactcaactcactgactgttctctgttcttctgcatacattatcactnctaatgcatatactgtntagataagtacttatgttaggctggagtctatgccg

SEQ ID NO: 49659 - DNA, 405 bp, Glycine max
ctaagcttatatacaaccattttcatgtgatttacacacaaagttttgtcttctctagttagaatatattggtttgcagtcaaaatgatatctaatgttgcattctttgattgctcgaatacattgtgctttttcatcgaaggtcatgccaaccttaagtgcaccagttggtggttgtacacggtcttgttgcggaacgaaatggtggcgatcaatgtattgtggtagatggttgaggttcaattccacttgatgcctaggttgatgatattgcaataaaggtgacgttggtactataacaccctcgtcatcgatttggtcattgttgtgatgaaatagctcttgatcctcatgcttactaaaagtatcaatgatttctttgtgaaatcgtatgatgggatcttt

SEQ ID NO: 49660 - DNA, 199 bp, Glycine max
  unsure (1)..(199): unsure at all n locations
ttgtttgaagacccnagacngacttcacacctcatcatagcttttcactactactcttgtgtgcagacatattaatatntctgttctgtgcatgtatctcattatctatgactgactatantacatgggccctcaattctatgtagaagcatatgactgtcgcgttctcatgatgatcactatgagctgatgcatatga

SEQ ID NO: 49661 - DNA, 401 bp, Glycine max
tgtcttcaagataagatgacagcttattaaattgcaacctggcttgcaatcatcaatcaagaggaggccttagcaagacagctataccctgattatatccccccattagcctcagctggaggtagtggatctttggtgatcaatgatagcaatgagtatgatgttgaagggggtgaggatgagcctaactttgacgtggaagactgcaaacatgagaatcttcacacatccaatcttgggatggaaagagtgagggtaactctgccagttcaacagccctctttttcaataaagggagagactgttacaaatctggatttcattcggaagaggaaggtttctaatgacttcgacatgatggatctgaaaatgacacatgtgaacaccctcagagcccttac

SEQ ID NO: 49662 - DNA, 564 bp, Glycine max
  unsure (1)..(564): unsure at all n locations
nnaatatagcgngctgacgntgatatacaatgttacaacatagtananaggntatgtgctttancggagaattattactactntntgcacacaanacanaacctagaaattttttgcctcatcggcatanacattagcatgtangaaaatgaaagaacacaatattntgttataataatgataaatgacananacgtagacgccagttcttgggtgttacaatggtgtctcataatgctactaccttataacccgataataagtgttactttaagggcagcatangttctgaggtacggagatnaacatcaccatnagcacataagaaatacatgtagtttgacttagatcaatngtacactcacatggtttatttattnttttcattttcacaacagactactcataaactcactcatctataaacatctgcctactgtaacacaatctggagaatacatgtctcaataacatttttttaactataagctcactgagacttagtgacacatctcttactccatgcatacgaagctcttctaattaatgtgctggaaacatctn

SEQ ID NO: 49663 - DNA, 447 bp, Glycine max
  unsure (1)..(447): unsure at all n locations
tcgaatgccaganatacaagaagcaccaacatcaatggtgcaattgtgagaagggaccaagagaagagtagtgaagcctacttattacgtgtaaggggtagaattggaagatcgaactagcaaaatcagcccaaaatcctgcttgtagtggttgctccctcataggcagtcatgcatatcaaaaccgttgttagattccttttggatagaaattatacaaatctgttaaggggaattcctctatatatagctatgtaaataatcaagcaggaaaaaataatatttccttcttaccttggtattatcccctttcttttcttcattttggaggccgctgccctcgaagccagcactggatttcttactcataacaacattcaaaatatattataataataataaagagagaaaatcagaattatgtatccggttatgtgctcttgaagc

SEQ ID NO: 49664 - DNA, 481 bp, Glycine max
  unsure (1)..(481): unsure at all n locations
gatggctgatgctgacgtgtagatagggaccagcctgtggacttgtggcggcttctatggacacatgaagcttcacatcacaaggcgataaccaccatcctgtgccactcactgagtagagcccctatctcgtatctacacgtgccacaaactatatgttcacacatgcagcgaacaacattaaacatgcaaggtctacagcgagcggactagcaaagcgaaactctgcacacacaaccaacacagtttctacttngagccagaacaatctacatcaatcgtagccgggacactcaaattactggagtatagcatgacctcatggcgtggatatacaactcgactatttgatatttcaagcacacccactttttgcaagcaattgtgacattgcagaatctgtaggcgatgaatacctctttcattgccataatccagccaattgtattgtacaagagttcccacacaattaggcaccccn

SEQ ID NO: 49665 - DNA, 177 bp, Glycine max
  unsure (1)..(177): unsure at all n locations
agctgtaaacatcaatgtgcttcctatgtctccatcattgttgngcaaagctctcatgttttggttacaaaatcacattttcattctgacaagctagatgcattaaagacctgaactatctgttcatgtgagttatgtggagtaacttcgctccaggtaagggggggataatccact

SEQ ID NO: 49666 - DNA, 742 bp, Glycine max
  unsure (1)..(742): unsure at all n locations
gacgcgcatatcattntattcnncgantatttgntnngtngttanntaatnnataantnnttttntnnnttnttannntttttanntnnntnnnnntnnnnnnnaattaaagcctgtacagttagagtncctctgaagcatgccanncttatgaagaattcaacatgatncaagggggtanttanngatacantgttgacnacacaagatgangacacgagggatgaacaaaaagctcaagcgaatcaccgaacatccatctcaagggaatcaaangacatccatctcaagtgaatcagagaacatgcatctcaagagaatcaaatacatgttgagagttcatgaatcaagaagaaagcctacacacaagaatcaagagtcaagattcaagatctcaagaatcaagatctagattcaagactcatgaatcaagagtgaagaacagactcattctagataagaataaataggttgttcagaacttggattagccatgagtttcgacatacccttaccaaggtggttatactctttgagatcgataccatactggtgaatcgataccagaacgtaataagttggaaattnttcaactgagttacacgtccaatatttcaaaggtgaatcgatacattttgttatcatacaggtcttgacgttgaatcaattaatggagagacatgttcctacacgtgggatcatacctattgtatcatacagggtgttagaaatcagaatgacg

SEQ ID NO: 49667 - DNA, 421 bp, Glycine max
  unsure (1)..(421): unsure at all n locations
ttatctgcgagaacaaacangtagtagttatctttaccaacaaacgctcatcttaatgcttataatgtcatgctactccctctaatttggactaaacttatatgatccattcatgcacacacgcatgtgtagaaaacaccctattatttatatcaacatacaaggatattcagaacattctagctaccacacatatataaattgtctttggaaagaatacttacacgcatgctcaaggtattgtgcccatatgttcatatcctaaacatttgctatttacaaactacctatacatgttacaaaatattattgattctctcatattcatctatatgcatagtggaatgctaattacattatgcacacacttttgcatttgaaaaggaacttcatgccatctatctacactcgagggggaatt

SEQ ID NO: 49668 - DNA, 580 bp, Glycine max
  unsure (1)..(580): unsure at all n locations
naattggtcttagcactcagctgcgnctgtaaacgaagcagtaaaattgtnttctagtaaaacgttgntctacttattaacccttgactacttcacatngactttattggtccctcgaanactatgggttctggtggaattactatgtcctagntataatagatgactactcaatggtcacatggactctatttntgaannaccagaagtgaagcttngatgcttttcgcatacttgccacgggtgatcanaatgaanaaggtctcaacatttgttcacttataagtgatcatggaggtgaatctcataatgagtatccgacaactcttgtgaaaaaatgaactcatcattatgttctacctcagaacacctcaacaaatgggtgtgtgagaggantntagatcctngagaagtgcaagaccctctaaagaacanagtactaagacttggctgcgcttactactttgctccttgaccatctataactattaagaactttatactgtaagaaaaacaatttctactgagtttgtgcaatgttgatgaacactagcttttgcatgatctatccatacatatc

SEQ ID NO: 49669 - DNA, 383 bp, Glycine max
  unsure (1)..(383): unsure at all n locations
ntccgtgtagcatggtcgtgcttgctgttgatcttatttgtactttacagtctctcctatcaaggtagggaacttcatctttagatgcggtgtggagacaatggcttcaagcttggtgagtgttttcccaccaatcaaaacacagtaagagatatttgcattgacgattaaatacccaattgtaaagatcttggagagttggccttgaccaaaagtggtcattatgtcaacatagcctctagtctctactcgctcccctactaagccgaggagttgatcagcgtgagattggatggtgttaggcaaaactttagtttagatggtcattaggtcaacatagcctataggtacccagcttgtatgagctcttctattttcacctt

SEQ ID NO: 49670 - DNA, 600 bp, Glycine max
  unsure (1)..(600): unsure at all n locations
nnnaatattgcattaagtgcctgcangctgccgcttgcgccattataagagaagaactcgtgactattantatgaatcattatgntagtcagtntngcagattggatgtgaaggaatgcattaactgtatctcggtgagagtgtgatcctaannatttggagaagaaacgactatcatttagtacttgatttngcatgaatctctgaagtatggatnggaatgcatgaaatgaggatgatgaaggccatgnttgattgtgatatccacttaaccaaanagcttactacgtgcttgaantgattatccctcgcacccagntntgagctgaatgattgaaccttaagctatacantntatctctgctactntatctaggtgangagagcatatcacagaaaagctggtcaaacaaattgtcccaatgggggagtatatgcaaacaaattgtccaaattggggaaactggtagaataaatgcaaataagcacttcacctgtttctgttattatataaaactggagcaataagtgggtctgaatcataataactaatctaaagagcagttggtggatgatgaagaagtttctagatacgcttct

SEQ ID NO: 49671 - DNA, 393 bp, Glycine max
  unsure (1)..(393): unsure at all n locations
tttgatctttggaaagtaatggaaacaactgaaccttctttntgtaagagaatccaactgttgctcagatcagatttcacagtaagcaagttgccaaaagagcaaaggctcttaccatcttgcactcagttgtggatgatgatgtttttatgagaatttccaacttggatacagcaagggagatttgggagaaacttcaagaggagttctttggaaatgagaggaccaagaacatgtaggttctcaaccttaagagggagtttgaagccttaaagatgaatgaggctaaaaacataaaagatttcatgaccagactgatgaaggttgtgaatcatatcaagttgttagcggagaaatttctatacagtaggatagttgagaaagtcttcgttc

SEQ ID NO: 49672 - DNA, 232 bp, Glycine max
  unsure (1)..(232): unsure at all n locations
aacacaganatatatggagagggagaaacatattctatgcganagaactatanagntaaagacattgaataacttgtatantgtagaaaatgctaagatttcgattaaanatttcatcaactaatagtgatggaatttagtatgttcntttaaagccaannatacttatattcannttatatataatttctatncgctagatagtgttcccaatacctcacaacaacactat

SEQ ID NO: 49673 - DNA, 405 bp, Glycine max
  unsure (1)..(405): unsure at all n locations
gtagtattgatgtagctattgtcaaggaattcttctcaaacctctatgacctagaagacaagtcacctaagcaggtgagggtcagtggtcatctgatcaaatttgatgaagatactttgaacacttttctgaagaccccagtgattctggaagagggggaaaatctttgtgcttattcccgggttgcactcctgaggcttgatcctcangagttggctgctaagctttgcatcccacggaggggattttagctaaatgttgatggtcagcctttgaagattttaaggaagaacatgaccactttagctcagaaatggagcattctttccttttctaacttggttcctacctcccacacatctgatgtcacattagacagggcctagttaatctatggaataatta

SEQ ID NO: 49674 - DNA, 577 bp, Glycine max
  unsure (1)..(577): unsure at all n locations
atttctcatgattntttagagcgacctcangcatgcccgctntgcantactacaagatgatntccaaacagaacangacatctaactttatatatngttatctatccgatncttcgctccggattcctgcaatgggttaatgaacaatgagactgacgtatactggtgcgtgttgtttttctttgattcatgaatagtggattgtgatgacgcgatgtgctttcatcgttggcatgtccacgtttgatatagactaatttgatctattaacacggaagtcataattcatcatgtcacagttctgccgaggataagcactctagtcaaactgggtgcatgtttttttctgctcagctttatatcnttgagccaatatatttctttatataagcctttcatatacatctgattgtgctacttttggcacatgatgcgttggctatcacttgtctgcttaccttggcttaggttcttgactacttggcagacagatctctgtgcctttccaatgcctatctctggcctcagtntntaattttatctaatagaatatttatagtgcggttgtgttctgtcg

SEQ ID NO: 49675 - DNA, 339 bp, Glycine max
ccacatacaagggagtgaatccagtcaagattgtatgctctttaacattaagagccaagtgtaaaacattgcatatgaaataaaatgaagtcatctccaactatttctctagaattttaacaatcaccaatcaacttaagagaaatggtgaaaatgttgatgatctaaaaactatggagaaaattcttagatagttagatccaaagttcaaacatattgtcgcaatcatcgacgaaacaaaagatttgtaggatataaccattgagaaaattttgggctcattacaagcttataaaaaaaggaaaggatcaaggaataactactcgagacacaagttta

SEQ ID NO: 49676 - DNA, 694 bp, Glycine max
  unsure (1)..(694): unsure at all n locations
nnaatgatcgtcccttgacgngtcctctgagtcacctgcngcatgccagctagtanagctancactaacantctccccctttgtatnatntgtctattacatacttagacactctctgagcaggtacgagcangtatgcaagtgggatcagccactctcattatcagagtaatcaagcacagcggagattctgcaaggtggccagtcgtttcaggatgtcaagacatctcacatgacatcagctntcttcttctgctacccctgtctccatgctcttactgcagcatcttctatcagctactagtcttttccaggatgtcaagacatctcatgtgacatcagctttcccttggctccatgctcttactgcagcntcttctatcagcttctangagcttacatcagtcatcatcatcagcagcaggctccccctcagatcatatacataccactccnncctcaaatcatgaatcatgcatacanntcgatctacttctctanatcataagtcatgcataatactactactggcatacacaaatcatgcattttatactantactccnccttntttagacagatntngacanangtagaatggcatgacnttatggtgcannatatacagacctaatagtattaatntgtcacatggacatgctcctatagctagtangaagaaaaaagataaatn

SEQ ID NO: 49677 - DNA, 362 bp, Glycine max
tgaggaagtgtagaaaggtgagacttcctgctcttattcgttgaccacagagtggtacctggagatatgtcgcaggggtcaggagaccttgtggacgtcaggtggggtgctattgcccaaaaccaagcttgaccaatcccgacccaacccgggcatagtcagtcagtgagaacctgtgatgtacctaaacaggcgagctcctggcagtcaacagataaaaggaacaaagaccacatagcaaggaggcttgtgtggtggctggccagctgtgaatcttgtgtgacatatgggttatggcctctggtaatcgattaccaagggtgggtaatcgattacaaggcttaaaaatgaagacaggagac

SEQ ID NO: 49678 - DNA, 658 bp, Glycine max
  unsure (1)..(658): unsure at all n locations
nnnaataagtgccgttgtatganccccccnccnnnntnnnnnannnnnnccnncnngggangangctnnnntgttttgataaganagattggtgaganagtgtgataggtgagcacganattgaaggaagaaaaagggagagaagttgaactttgagttgtgtctcacaagactctcattcatcannagtacaacaagtggtacacatgcttctanttatagactanngtagcttcttgagaagcattcttaagaaaacttncttgagaagcttctttgagaanacttccttgagaagctagagcttagctacacacacncatcntaaaactaagctgacctccttgagaagctagagcttatctacacacacncatctaanaactatgctcacctncttgacanaatacatganaatacannaaaaaagtctctactacanagactactcanaatgccttgaatacaaggtaanaccctatactactagaatggtcaaatacacggccccaaagaagganaacctatttctatattacaagaaggtggatcaacctgaccatggctcaanatctacctanggtatgagacctanggcttcttatactctaccagctctgagctctatcatacgtgggggagatgctctcctcacttg

SEQ ID NO: 49679 - DNA, 431 bp, Glycine max
  unsure (1)..(431): unsure at all n locations
ccgctcgaccaatcccgacccaacccgggcatagtcggtctgtgtgaacctgtgatgtacctaagcaggcgagctcctagcagtcaacagataaaaggaacaaagaccacaaagcaaggaggcttgtggtggctggccagctgtgaattttgtgtgatatgtggattatggcctctggtaatcgattaccaagggtgggtaatcgattacaaggcttaaaaatgaagacaagaggctaagatggtctctggtaatcgattaccaaggggtgtaatcaattaccaggcttgaaaacgaagttaggaagctaagggagcctctggtaatcgattaccagcctgtgtaatcgattacacagaggaatggctcattggtaatcgattaccaggcatatataatcgattacacagtgcattattgcatatntcatg

SEQ ID NO: 49680 - DNA, 517 bp, Glycine max
  unsure (1)..(517): unsure at all n locations
ttatatgagcgtgatgacctcnactangaacattatcctcgggttggctgaatatttaacctttacaaattttttgtagcgacagctcgtcctttgtagaatctacgtgtctcatataaccggttgacgtcacacttggatatgcatactagatactttgatatcaaattttttacatgaaaaagttcacgacgagaatagagacttacaaattagcttgttattgacttatatacatactgtagagcaaagtaattaacctgaattccttagaacaaaactagaatctggagcgaaaagttattcaggcgggaaagtccctgagaatgaatggagacccttataaggatatatatagtataattatgaacattcgcatcgtgactttatttaagaatattgttataccatattctcctccaccattatttgcttattatcatgtgataaacttcatgttggtgaactatttacccaccttataactaagccttaccaaaaaacatacaaatagact

SEQ ID NO: 49681 - DNA, 234 bp, Glycine max
cgcaggagcttctgaggctgatgtttcgatggttctgtttattcttttctcaaatggagatgcaaaagatggagatgataaaaaggttgagaacccacaccacaatacgactgttaaaccagagatcaacaatgctaatcaagtatgagataaatggtgtgactgcgaaatctctcttgcatatgttccgatgagtcttgaaatacgactctggagtctggacacaagatatgc

SEQ ID NO: 49682 - DNA, 522 bp, Glycine max
  unsure (1)..(522): unsure at all n locations
aggatgctgttctgnagcatgacctcgagcatnccaccgacacgttacctgtgcttctcataataactcttttggcanntttggctcgnccatngtggccctctnggcaagctattncgtgatgtcatgatcgtgtcttctcacttgcggttctgcgtcagctaccttatttcatttcacccgttgcctattcgcgggagatacactatcacacatggccttctgtctgggtttcccacccaaggtgttgtctgcgcgagctcccttaataagctgatgcttccacatgcccttggctctgacttttgtgattgtacattgaccaaatgtgggatgtggtgagttttggtcataagattgcctcttgaaccttgggctgccgagtcttatgttaggtgctggcgccttaggatgatgatttctctgagcaagcatgaagacattgggggtcgcttagatgtccttctaggatcccttctgtcgtactctctggccgcctaactactcccacgccgacgaccc

SEQ ID NO: 49683 - DNA, 406 bp, Glycine max
  unsure (1)..(406): unsure at all n locations
tcacatattatgttcaactaatggagttaattctctttgatngaaataaatgacgntaatcaaatttgttaattaagataatcttccctatgatattttggtccggagtactattaattagtgttataaataaactacatacaaaatttctatttgaaaatatgttttataatttttttagtaaaactaaaaataacaaattgttaatttatatatttagttattaaattttttaatattttatttttaaaaataatttacatgttttataaaatttctgtttataaataaaaagtcaattcttatatgacatantttgctcccactcctatgataggggataatagtgtatgaaccattctatagatatgaaaaacccctgaataaagatggatataattgaata

SEQ ID NO: 49684 - DNA, 638 bp, Glycine max
  unsure (1)..(638): unsure at all n locations
tggacgtgtntcgtgcgtctngctgatgcatcccgananagcaantgcanttcgccaggtctttctctctctctatctgtttattactgngatattanngngngcgcncctctttacttcttctatgtctcttgatactccctctctctggagtccactaatattgtaatcatatcaataggctctggctgtgagtgatgaacatgatgatgcggatcggagcgantcttgaatctactgtgagaggtgctctcagctggccgatgttttatactctaggtctcgcttgagcccgtttatgtggacatgctccnctgaaatgaatacgacatctctctgaaatgcaaaaatctatattctaactgctcttagtcttcttngtcaccatatatatgcatgagacattattctcacatgcagagtatggatgacgcccatctcttttcagatgtgtaatccactctatacnactatgttcagcgtgcagcgctgtcaggttanaatcagctatcacaaattctccgtgcctctgttataaatcacatattattgtggtggctaatatttgtataagttattatcattttatatctgacgaggtgtcggcgtccccccattatgtatttttggccaattcg

SEQ ID NO: 49685 - DNA, 402 bp, Glycine max
acaataaacttggccttctcttaattgtctttgggcttgtcgaccacgatcaacaaagtactttcggcacctactatatgttgacttgaccaacgctgttattggaatgctgcgacaatctttcaacaccttattcacacattctgataagttggttgtcatgtgaccatatcgtcgtccagatgtatcgtaagccatgctccatttttcctttgagattcgatcaatccatcttgctatggctggactcaattgacgaaatttttctaagttctgatcaaacacatgcttgcaaggagtgtacgctgcatcaaatattgtatcatcaaaagttgtacatagacatgaaactcatattaaattaatgtataaataaaccttacccaatttcttgaacatctc

SEQ ID NO: 49686 - DNA, 388 bp, Glycine max
gtccatcgaccgatttcgagattgagtccacatgttcgagatcaagattacttcctcgtttcatgagaagaaatcacgaagattcacgaatcaagagaagttcgatttccagattcttgagaagatgaattcacgattcaagagacgacatcaagaccacttcacaagggaagtattgtaaagagtttttgcagcaaccaaacatatcacaattttgctcttctagacaagtttttctcaccaattttcttagtcaccacagtctttagttctctggtagtcgattaccagtggcaaagtttgatcttcccagcttctagctgcacttgcaacgttccaatcgatgtttacatggtgtaatcaatcacaatatatcggtgatcgatta

SEQ ID NO: 49687 - DNA, 664 bp, Glycine max
  unsure (1)..(664): unsure at all n locations
atttacgatatgacctctgagntaccctgangcatgcaagctntgacaagacagtacacactgctgtcttcttcatcaagatanactagtgatatctactctatagatacanctaagaatacccataattataacagntagcacacattctacaaatatggacctaacgtgatanacatgttttcattctactggatatagaagaactaacatttagagtagatggcttcttactacatgtgaacatctgaccgtataattagatacgttcattgtgcaatgttatcatcaatagcactggtcaagaacatgaagcttatagaatttcattggatactctatcacattatcccacacaccatacactaatggtatatttatattgatgtcctcttcttccaccacaacatgatcatcttatctcaactgttgacgtattatacctcgataaacaaacttgcaggatactagcttngtaataccttaaatatctacacagtgtgtctggctataatctatcacacataccttacatccacaccactgataatatgctggctatctgctatatatcatctgtcttcatctctgcttctagtcgactactagaagtgtatctgtactaacccacaagcacattgattgttcctagtcacattacgtt

SEQ ID NO: 49688 - DNA, 153 bp, Glycine max
tttaccttagtgattcataattataattattatcgttttgataagaaaggcaggaatataggtattattgctctacatgattacgcacgacgaccaaattcatatctaaaaatggaagttgtaattaagatatagaattggagaggatgatca

SEQ ID NO: 49689 - DNA, 187 bp, Glycine max
  unsure (1)..(187): unsure at all n locations
atgcaccacttctaatatgaactcagcgcctgagcaaagactgaatccaacgaatggccatcagatactatgacanactcacaaccgccanaacaaactatatntcgagagatgccntcanagaatatccatatgtagaaaccaactttataaaccaactagtctacatacaaacataaccctaact

SEQ ID NO: 49690 - DNA, 403 bp, Glycine max
cgccatcagattgaaagaagtgagcgcaatgctcgctcttctggtgtcctaccgtacattcctaggtaagatgatccttggagtttactttttgcctcttttctccaaagaaaatcgggattttttttccccagaatgaaagctctatctgctggtcctttatcattttttcatgttcattagggttttaattagttgcaggtttatattatcttgatgagggttgtatatcccgatctacggaaattatttgtttttcttttattccatgttagaatatattattagtagtataactgtcactgtcagatagttgtattctgttacaattcaattatattcagatttgtgtagcactcttgagctgtaaatcggttagctgatctaactaacttcagcagtc

SEQ ID NO: 49691 - DNA, 179 bp, Glycine max
  unsure (1)..(179): unsure at all n locations
aaaactgggcaatgaataagtaggacgaggaaaaccatgctgtgactgcattctatacacagtttccaccnaccgcaatgtattactaggcatgacaacctctcttaccaccaccagtattcacaaagcatcctaatcaacacaaagctgttaccacacttccataacattacacttta

SEQ ID NO: 49692 - DNA, 358 bp, Glycine max
atatgcaagagatatacaagtggtacttatgtgtttattaagatttgcttcgctgcatgttacaagttatattctataagcaagctaatgcctcatagcttcaatattgaaattatagagtattttttttgtgaacattgactgtgggttcttgcatttgaaactggatattttaattggacaaatatttgtggacaaaatgctagctaatgctctgaaagagagaaaaaaagatataaaacatttggcgtgaaaaagcatcaattttgaaattgtcttcaaataaccgtctttgaatgttgagcatacacaacatttaaagatggtgattagctaataactgtctttaacatcaaag

SEQ ID NO: 49693 - DNA, 670 bp, Glycine max
  unsure (1)..(670): unsure at all n locations
nnnaaagatgttcgtagtagctaccctcagcatgcccccttangagacacacttannactaatatagntcctattcannaancaatttgtgaagctcttttanttgtncncantgannaacctntattcanacctgtcatagtcagtgatcacgctaaacaacaaattagggaacttatacaaactaaatccataattgaaggcgtggtgacaatcatagcgaattactaaacaagaattggtagtttgcttatggtcattccagacactcgccatgcctcagaatatactttcataatgggaacaagaagtacctccatattaattaatgttattaatgaagatagtgaccacaactcaaattacacaactaagatacgatcgttgtataaaagaatattaatcacaaaactccaaacactggaatacgccctcaaattatattanntcacgtcaactgcccctgaccttctattagaagagagaagtgaagacaactttaaaagttgtagtgcacatcacatctatgactggacatagatcacgaacgaagatactatatgatcactccacatatgacatggagcacngttacccacctccatgtatgtngagaaacatataatatctagtgcagagttttgacactaaggatgcggatatatatacg

SEQ ID NO: 49694 - DNA, 325 bp, Glycine max
ttccactgtcacggaggttcacattttctaatgattgtcaagtgcgcgatcacacagcatctatgatgtgttggtttacacatgggaagagtctacaaaagaggataaatgattataattgttagctgggaatttatatgagtcatattatttgccggtttgacaatcattgattgcgttatttcatgagcacaaagatgtagtctggagatcatctagggacttctggaagtctggagttccatcggtggactaagatgaaggtctcatattgtcatgtggtcgattgctaaaaatgaatgatggtggattcataaatcaccaa

SEQ ID NO: 49695 - DNA, 313 bp, Glycine max
  unsure (1)..(313): unsure at all n locations
cgctcggtcgcgcnaccaattntcatgttgacagctatcattgatatctgcattcttcgctattattattatttatgcggagcaaccagccgttgaggcctccatactgcttataatattcgcccgcctgcactctccgatactgtgaaatcataagcntctgcgctttgacctctcttacggatatgacctaacgcagcgatcagacctgcgcttctatatatgccatgcgaacggggcaacaattgtcttgtcacgtatacaatggtaaccaccagggttgtgtatagatattctctaactctacgaatcg

SEQ ID NO: 49696 - DNA, 164 bp, Glycine max
ggcattcttaattctatcggctctgtgcccgatattatagcaactctcgaacctggtaatatcggtgaagtgaaaccttagttgggaatgtaatctagttagtatacatcatgttcatagtttatccgtgtgtaccattgattcgcggtgatatatttatatca

SEQ ID NO: 49697 - DNA, 600 bp, Glycine max
  unsure (1)..(600): unsure at all n locations
nnnaagttgctgtcattgcacgngaccctcagagncacccgcangcatgcaacgctagagtgcatanacantatatatganngtcttttatacaacatgctttcatatggngcnctanaccaacatggnctaaatacttgagctnttnganaagcatagcttatgcagaactaactcagccaaaatatgtgaatcctgctactntacanatgatggaggatatcaaagaagaacatgtcgatgatggtgctggaaagccacatcccanaatccatactcatttntccacagaatgcaccacgtactttgattgcagactgtngactatcacagttccgagagtggacagctgaatatactnactttcagtgtctggagacttcacagttaaggcctgactgctccacacatatgccttatgagcgactccatacaggagatggnaaagaaatttctgttcttcaatttaattcatatgtaacatcagtattgctgtattctgcctgcattactgatgatagacacttatggagacataatgtctgattgtgctaaataggtctgtctgtgagcatgatgttattaaataatgtgactaat

SEQ ID NO: 49698 - DNA, 397 bp, Glycine max
gcatcatcaaaacctgcatgatatacattcacattctccccatttttgattataagaaccatctattggtaatactttggcatcatcaaaacctgcatgatatacattcacattcttcccctttttgattatgacaatcatgtctaggtaaggagtaaaaagaacatctacttgtgtcgttcacccccctttctgaagatcgcatagatttcatatattaaaacatatctctaaaaatagataattccccttactgtctgatattttatctatctctcccctttgttacatcatagacatatcataagtagagagaaaataacatattcagcaatttataatgaataaatatagcaataccatttcttggccttaaagagttagtttcattcaaagc

SEQ ID NO: 49699 - DNA, 205 bp, Glycine max
  unsure (1)..(205): unsure at all n locations
tagttagaatgtgatgcttgatgatcctgtctnttagcgtgacttactgattaaaattctnttagcatgacacactcangttgtaaaacattcatgatgtnggatttttacanatattttcactanatatgcaactntgagtcctcattgcatgtgaatacatanggaaagaatatcattgcaggtcaaataaattcaatttatc

SEQ ID NO: 49700 - DNA, 302 bp, Glycine max
  unsure (1)..(302): unsure at all n locations
agagatttctagagagagaaaggtccaatttcttgattagttntgagagctcttgttgtgcgaagactggaagagaactgagcatgaacaggaagccatttttctcttctctttgttgtaaaggaagcttcccacatatggagagataaatcctctgttgattcttccttgtaggtacttgatgtaaatacctgcatatctattcaatgatgttttatgtggtcgctgtgctatcaagatgccatattagctgcgttttcgtcttgatcacgtatatgcatgctttgttaggatcattttaa

SEQ ID NO: 49701 - DNA, 162 bp, Glycine max
aagaagcatgtgacacactggaacaattttgaaacataaagtaaatacttaattgctattacatttaattaaaaaaaaatctcaccctttgagatcttacatatgtcggtagcatctattatatcttactatatatgttctcgataaggctcagagatactc

SEQ ID NO: 49702 - DNA, 384 bp, Glycine max
tttttgactgtattccacacaagattataattggattatgctaatgaacaaatgacatatataagtgttaagttaacatataacaactgttacattatatttcattcatgccttaagggtatgtagttatgtacaatactttacaactaaatcacataaaacttctgtcacatagtgtaatcataagataacagttaattattacacaatattttctatttcatgtcaacaagtaccatgaatattgtgacagggcactttcaatagtttggacagctcctttggttgctacattgggcatgtccttgacaattcccattgccatgatagctgacatggttatacatggtcacaagtactctgcaatgtacatccttggatgca

SEQ ID NO: 49703 - DNA, 172 bp, Glycine max
  unsure (1)..(172): unsure at all n locations
cactctgcaattgcagcttacaactcatnactaagtgctttngtgttccatgcttcattatcatgcatctngattnggcatccncttggtagctnntatacatgaatgcacagtgaaacagtgggggtaaaatcatgcatatataaatctttctaggcaatatatatatata

SEQ ID NO: 49704 - DNA, 452 bp, Glycine max
  unsure (1)..(452): unsure at all n locations
tcgtcttgctgatatttatcatgcagacttttctgtttattatccgaggaacaattagggatcaacttgaaacttatgtgcttcaagtgagaagaaatgcttctttttccacttgtgaagatgttcaaagtttggctatgaagatggttcaaactgagaaacatttggtatttccattggtttataaacttattgagctagctttgatattgcggtgtcgacagcatccgttgaaagagctttttcagcaatgaagattatcaagtctaaattgcgcaataagatcaacgatgtgtggttcaatgacttgatggtatgttacaccgagcgggagatattcaagtcgcttgatgatattgatattattccaacatttaccgcanagaagtctcggaaaggacactcgcctcgtacatttatttaacccgctattggaagattatgtntatctc

SEQ ID NO: 49705 - DNA, 569 bp, Glycine max
  unsure (1)..(569): unsure at all n locations
attttnacgactganctgatgcatgcangcntcagtgcgcacccacncatgactanngctcaattgtgaaacagatctttaagacacaatatctgacaggaatgtganagaaaagattggcatntcagagtaatagaatataantctattagcagtcctttagcccttccataatcttaaaacaagggtttgctttttatttttttttggtgatatcaccggaacctgattctagtggtgagtatttntcattatataatcttttaaatatagaaagtatgtgtaacaaagctctttaattgtcttgactggccaacataagaaacagtatgcagccactcattctgctttaccttattagtggctctgcaaacaaaccaaataagattgatgcttaatcagatttttctgccatgttttttgcactagaattggaaatcacatgcctctatgttaacgatgaacatatacttggttaatatgatcttccttacacttattacctaatttgtaactttattaaaactatttatctaatcntgttatctttatagtcatcataactacct

SEQ ID NO: 49706 - DNA, 405 bp, Glycine max
aaagggaaggatagagacttgggaatgatactggatagtggggagggttgctacgtgtgtgtgagggagagagagaatccgacccaggatgattatttccttaaaatatagtgtttacttattatagtgacgttcgagatattttaatgagtttaagatgaattgaattcttccctacaaaacccaaggccaccactcatgagtaataataatattatattttgatgtagcaacaaacttttcactttgaccatgtatgattcattgctcataagtatatattaaggctctagctcctgttcttaatgttcaactcaaccaacacttttaatgttgagttaatctagtgtttaattctgaatttatatagatcattgaataaattgggctgtatctaatctacag

SEQ ID NO: 49707 - DNA, 673 bp, Glycine max
  unsure (1)..(673): unsure at all n locations
atgaatgatgantcgatgcatgcagctctgatgcanactctgaganngtantganacaacgagatgatgcactctatgagaggtttttatatatggagaatatagatcataatgaagaagagaggatgataagagggaatgatggtcgtcctacacanaaccgaattgatggtattaaactcaacattcctccatttaaaggaaagaatgatccggaggcctacttggagtgggagaacgaaatatagcatgttgttcatgcaacaactatgacgaagccanaatgtgaagcttgccgcacggaggtntcaactatgctcttgtgtggtggactacgctacatacgagagagcatgaaatgacgagccattggttgatacatggacagagatgaaagagatcatgangaagctgtatgtgccggctacttactaagggacttgagttcangctccaaaacctaacccaggcaacaacggcgttgaggagtatttcanggaattggatgtctcatgaatcangcatatatctgtagagatgaggacgatcattggctcgattcttaatgtgtactaatatacacggtattgttagctgtggattncgtgatatgatgtatgcttccacacacacaatgctgcctcgtctacaggacgagtgtgtacaggattcg

SEQ ID NO: 49708 - DNA, 312 bp, Glycine max
ctcgatatattatgcgcctgaatcggacttccgtgtgttatgtttgaccatttgaatttctcaacagctttcgttgttcaaggttaagcttctcgatatattatgcaccttaatcggactgtcgtttgaaaagttatgaccatctgaatttctcgatagcttccgttgttcaatttcaggcgtctacacatagtatgcacttgaatcggacttccgtttgtaaagttatgaccattcgaatttctcatgagcattcgttgttcaatttccagcgtctccatatatatgcgccagaatcggacctccgtgtga

SEQ ID NO: 49709 - DNA, 204 bp, Glycine max
  unsure (1)..(204): unsure at all n locations
gcttcttacttggattctgacataaccctttctttttatgcaatgtattattactnggccnttgttggataaacttcttgataattacttataggagaagaaaacttaagaagttaatttatagaagctctctcatttagcttctacaaaacagaagctgatgttaactcatgttcttaatttcttctattttaagtgcttatt

SEQ ID NO: 49710 - DNA, 228 bp, Glycine max
cagcagaagagaaggtggatccttttctgatatgatcatctgacgatgcatcaatttttaaattaagagcactgccagacataacgcatgaatgttttgctcttcacacaacatcatttttaaagagcgaaatattaccctctttcttaagaagtgcctaaaataataaaaatatatatagttttaaagcgttaaaaatcatgttatatagttcctgaggtcttgaaa

SEQ ID NO: 49711 - DNA, 176 bp, Glycine max
  unsure (1)..(176): unsure at all n locations
ctgatctgcagcggcatcatcactcttgctccttgctaatattattagacaatggtgaaaacggcggctaangatgtagtctatattgtcancgttatatangactaggtgaacttactcaacgtttgctgtaacataacattttatcatataccttatagatattgctatggttg

SEQ ID NO: 49712 - DNA, 155 bp, Glycine max
  unsure (1)..(155): unsure at all n locations
gcactgagtcacttactccattaatctaaaaaaagtaatctaggtttggngactaaaaggaaggataaaggaaaaaaaacatgaaatgggccagaggggagagacccacggttggatttctttttggggacaccgagtcatttggccccctccct

SEQ ID NO: 49713 - DNA, 444 bp, Glycine max
  unsure (1)..(444): unsure at all n locations
tttcatggcaagaaccatgaaaattgattttttctgttgccagacttgttttcaagatagatgttagttataacttataactacgtcaaattgattttgcctcaaaaccttggtttgactagaagcgataaacgtagcatttgtgttgtgctgaaaattttgcactaagttttatagcaaacttgctttcaggataaaagtattcaaacataaatcacttcacttgaaaatcaattttaaccaaaatcaattttataacgccaatttcattcaaaatcaattttgcaaatgctcgcccaaacacacactccaacacaaaaatccttgtttttcaaaggcacacatctgcaagtgagagtatcatagctgtctatgcaaaggtcgtctgcattactntatagatatcatataatctcaaacaaaaaaacatgnttcaatgatgtt

SEQ ID NO: 49714 - DNA, 615 bp, Glycine max
  unsure (1)..(615): unsure at all n locations
nnnnaatatgtgtcgttggagacantctgacgcatgcaagctnngtgtgtccgaatngngantantaatcaaccttgttgttctgttgctacaggnattttatctgcccaagagtgtacanattacctgcatgcagtggatatcgtacttctatgaactcaacggtttacttatatcattgttatgattgacatgcatctctngaaagtgcatgtgattcatgcttcanagtattntttctattcttgctnggttcatgtaaacttaaatgttataagctacatatgttaatctctggatatactcacttctatatagatattatagaaaaantaanatagtccttgaataatcaatattcgcattggtctttgtctaacttaatatcattaatngttgatgctacacctgcatgtatacatgtacttgaacacccgcatgctctacatataccactctaacatgtaattcaattttaatganactctgtattcgctatatatttcgtgatttatcccaacacaccantactaanganattattattatttattaatatgatatttatatttacacgcgccactcatccttatgaactaacagtctattaaatat

SEQ ID NO: 49715 - DNA, 415 bp, Glycine max
  unsure (1)..(415): unsure at all n locations
gcgttatgcgagacaaagaccacatgttatttatttcaacaagtaccaagaagagttaaatctatccatggcccatgagcacacactggcggacgagtatgcccgagtgtacgcgaaaaaggaggctagggggagggtgatcaactcgttacattaagaggcgacaatatggatggaccgattcgctcttactttgaacgggagtcaagaacttccccgatcgctagccaaggccaaagcaatggtggacacctactccgcccccgaggagatccacagactcctcagctattgtcagcatatgatagacttaatggcccatataattaggaaccgctaggaagtttgtattgtcactcaaatcttgactagttataacgttctgaacaaaatgagnttatnccacggttttact

SEQ ID NO: 49716 - DNA, 236 bp, Glycine max
  unsure (1)..(236): unsure at all n locations
aaacaacgcctcccgtgaacgttccatatgcataacatctacccacgtcacaggacctaacacgcattgaatgaggttaaaagctttacaaaagaaatttcaacccagtgctttcatcgagacgaaatatgatgacggtctangtgctctgggccattatttttggatgcctacagaatgaaaacctctcatggctggcgtcatatcattctcatattacctaccaatatcagatg

SEQ ID NO: 49717 - DNA, 602 bp, Glycine max
  unsure (1)..(602): unsure at all n locations
gcanatttgcttngaacctttatnnntctttatgaatgatgctctccctacacataagaacangtagaaggagaataactgtacaggctcaagggtcaatcaaacaatcatacttccagctcanaatgggtgcanaggtaaatcaatcatgcacaangtaagctntttagctaagtggccatcttcaatcaaaacatggccttcatcctcttcanactcatgtatntattccatactcagagagtcatgannaaaccattacttactactagtgcgtctctcacaaataaagaacacaactttacatcggttggggcataatgcttcccttcacaatcaaccngacaaaccnaactacantnntcatcataatcctaantcccatgtctttctcttctaataactgcatgctcattcaagcatatgatctgtgcatttcagtcacttaccatcatacaaatgatcattgatntcanaacanagcatcanaccactagataatatcaatgcactattcaatacngcttatagaagctacccaacaccanaaccataactgaatttagnagtgaacataatctaantataaatgtctaagacct

SEQ ID NO: 49718 - DNA, 439 bp, Glycine max
catttctcacaatcgaaggtcgagcttcatttcttccacctgctcaaggaactgctctacatttgtaattggcctttggtgggccaaatattgcaggctctgcataataataacatctccctggaataagctttgcagcatagcgactgcagtttgggagctctgggcatctggttccgctgatgcagaaagaggagctggagtagatgatgaagggatttcatctactttggcctaggttttcctttttcttgatgccacttgtaataaaaagaactcacaattcacattagaccaacatttattcaaggtaaaaaaacaaaaataaaaactgacattaacgatgggcacttagcgggctacaactcgctcaacacgcccttagaaaataacatatcggttagctgggctctctcgctagcctatggttgcacaacaa

SEQ ID NO: 49719 - DNA, 520 bp, Glycine max
  unsure (1)..(520): unsure at all n locations
nnnnttgtgtgcactgatgagtcctcgagttactgaagatgccgcttgaatgangagtgggattgtgagacttctacttttatcanttacttcagagngggacctggagatatgtcgcgggggtcaagagaccttggngacgtcggtggcgtgctatgccaaaccaagctgaccatccgaccacccggcgtgtcagcagtgagacctgtgatgtcctaacaggcagctcctgcagcaaccgataaagaacaagaccacnagcaaggggcttggtggtgctggcagctggaatctgagtgattatagaatggctctgtatcgataccaggtgtatcattccagctaaaaccaacaggactagaggcttgtaacatacaaggcgatcatccgctaaaggctgatgtagggcttgtatatccaagacagcatgtatattcagtttgatcatccatgcttgagttatgtgactggatcagtgcttgaacatacagtggatcaacaaagaacctgagcctttttc

SEQ ID NO: 49720 - DNA, 429 bp, Glycine max
  unsure (1)..(429): unsure at all n locations
taaaaatcaaaattcctatnctacttnntctcccttgtcattatcaaaagatgcgggtccaaaaagataaatgaaatgatttggccactcactgtcaaccttcagtggatggaggttgagtgataggaggtggtgactatggtggcgaaggcataggcacaagcacatgatcaataggtatagcaacctctgatgcaggaatcatttgtgcaagaacctcaggatgaggttgcacaacagtggtcggtgttggtggaggtggttgacgtatgggtgtacactggtgttggacaaatggacgcaacctttgttgcattatcagattcatgttatatggaacaaaatcagtgaatgatgtgagcgaagactccacagtgttttcgatagcatgtaggtctaatgcgtccaacatgaatcttcttcatagtc

SEQ ID NO: 49721 - DNA, 207 bp, Glycine max
  unsure (1)..(207): unsure at all n locations
ttcttgtcacttgtttacttttgacataaataatacatgtgggctgatccacctttgagatgatttacatcattaagtatgcaatatgttctttagatattctgtatgtnatatcatactgtgttagttaacatgaaagtttactaaactgagacttagaccatgtggatacgatantactgtatgactatctaccaatctgtactt

SEQ ID NO: 49722 - DNA, 393 bp, Glycine max
tctagcacaatagacttaccttgacttaattcctttgatatactcttttgagccttgtttccctttccttgttttgaagctcactacaagccttaagtgaaaaaccatgatatcaccatatccttaaggaattttggagctttgaaattgttttgggaataagtgtgggggtttttgtttcattgaataacatgttttgttggccatgcttcatgatatattttgagccatacttgatgtacattgcatattggttaaatgttggacatgctgaatatgatgttgtttctcaaaggctaagccatacttgatgttcattgcatattggttaaatgttggacatgctgaatatgatgttgtttctcaaaggctaaaaaaaattataaaaaaatt

SEQ ID NO: 49723 - DNA, 175 bp, Glycine max
ggattgcaaatttcagttatttgttatcacccacacaccgaagaaaccaaggaacacccagatgacgcaaaacatagattatcataaaaattgcaagatgtaaactatgaaaccctaaacccgaagaaaaaaatgaaactctgtacaacttgaggggccaaaagatgcgagtatt

SEQ ID NO: 49724 - DNA, 222 bp, Glycine max
  unsure (1)..(222): unsure at all n locations
agatggngatggatgtatagtttgtgcaaacttttttattgaatcaaaaagaaaaagaaagaaagacctcgtaggtcggcatgttaccctcataggaagcattaatcattcatagagaacaaacatatcttttggaaacaagagactgacactaatagtttattttccacaataaccgatatgagaatggatggattccttgttccgaggacagaacactat

SEQ ID NO: 49725 - DNA, 599 bp, Glycine max
  unsure (1)..(599): unsure at all n locations
nnnnnaatgatgaggcgangcntgctcgctaccgtagccatcntngtgangtcaatagagccataaggttaatggttatgaatggaaaatacatctgtcttcctgatcgccatacctataacatggtgctcatatngctgattangataggaagcgttgataacgtaactaaagtntgtgggaacatggnggacanaaaagtttatccttctgtctcaacatattctgtcatgatccanntggtttgtaagaagaangganagctagaggaggcatgtaagtattttgaaatgatgatngatgaangaataccccatatgtactactggtgagatgctgangaatcagctcttgggttangggtnttaaatcacattgaatactggctgctaaatgaggaaagcacttctatgcaatcaagaatggcaatatatgatgcaataaacactataatcttgaacgcatgaatggcataaagtgctgngaaggacattgtctcgatacttcataactattgcaaatgtgagcacattatcacaaccataaaatcttttgggcatgttatgccattaggtaatattatctgagacgtgatatcg

SEQ ID NO: 49726 - DNA, 416 bp, Glycine max
atgcaaggtttggcatttcattacggtgctcgttcgtttctaagtggtttgaaagtcttctgtttcccaattgcatttggaatggcctgttcccgaaaatacttccttctcttgagcttcctgatcatcctgatcttcttcagccgcttggggtcaacaactttcttgcttttttccaatttctctttccttccctccttataagcttgaatggttttacttctctgatcatctggtaataaagccaatttggaaaatttcttgggactcactatctcaagtttctcagtaatttccttgaatgctggaacaaggccacgccttatgaagcacccttctataagccgcatcgaatttaactcggcgagactaggagcatcttttaactccagatccaagcaaaatggggagtcttt

SEQ ID NO: 49727 - DNA, 211 bp, Glycine max
  unsure (1)..(211): unsure at all n locations
aatcatttactcaatgtagtcgttctcttcacaataaagatcacactctcaccgggttgtggctaatgagtaccttcacaatcaaactgtcaaactaagtaacattntcaatcatgatcctaatccatgttctttctcttctaatcactgcacactcattcanaacatgcgaattatgcattccaattcactcaaatcacgtaatcgatca

SEQ ID NO: 49728 - DNA, 462 bp, Glycine max
  unsure (1)..(462): unsure at all n locations
acactcacatttttactcccagtatctcttctaatttattctttcttcctacacctatactgaccgctcctttcacaaccaattaacacaaatgaactccttcctccactaccagtctgtgtgtcagaccttataatgactgcaacaaatctattntcatgagcaactgatcgagcccactgcaaaacatcatctcgggtatcaaacacctacaacgtaacccaaacaattttagttttctacaacacattcattttatcaaatcactcacaataacgaacattattacctaagaagtattaaacgcatccgaacaatcaacatgtggttcgttcacaccacatttttgttcattttgatcatccatatcaacttcttctgacattatattgtcatacatccatcgaccttcgtccatcttaaaaacaaataatattttttgcatcatacacaagtctacat

SEQ ID NO: 49729 - DNA, 300 bp, Glycine max
  unsure (1)..(300): unsure at all n locations
attcttgccatcattcggttattatactcattcacggcgaccaacacggctgtatagggctcaatatacgtgcttaaaaaantaccccccgccttgccatcttcgcagactgtngtaattattaagcttcctgccgcatggaagcctcacacacgtatgatgaccagatctcatcggttaacacctcgcgcttgtgatatatttccatgtgagacgggcgaaaagtgtcatatgccatttaaatcaactgtaactaccacgttgctaatcaatcttcttactcctgagacatgcagtttn

SEQ ID NO: 49730 - DNA, 137 bp, Glycine max
  unsure (1)..(137): unsure at all n locations
atggattaattgaatcatanacctctggactactgaagaagatgcnaagattctangaagttatgtaatgggtgtccctagaggtccaatgcatcatcatacctgatcctaaatgagatcacaaactggggatttag

SEQ ID NO: 49731 - DNA, 446 bp, Glycine max
  unsure (1)..(446): unsure at all n locations
cctctactattgacttcaggtcttgttacaaacataactggcatgcataattntattaaaaatgttaaagtcttgcctgaaaatgcagcaactaggccttggagttcctaagtccaatcaaagccaacacttccgcagaaagcatgcactattgctgaataatcacagcaacactttgagattcatatataaacataaagaatcaattaatagtgaaatgggatttatttatttcagtaccaacatgagaataaagttatattatatttatggataagaaatagtgaatggcatacctgaaattcaagcaacggtgagggtttgctacttggagggttaaatacccttgtttcgtctattttgatcggaagcagagaggaatatttcgaggttaaacctgaatattgttcacatacagacccaattatgtctagagttcctgaaat

SEQ ID NO: 49732 - DNA, 450 bp, Glycine max
  unsure (1)..(450): unsure at all n locations
nnnnttaggactttagtcactgagatgcacttgtactcaccaattgctgacattcaactactctcacacacgtaggaatctgccccgatcaagctcttgataattgcatgataactaggctgtctgtgaaaacttgtcangcataatatatctcaacactccatttactaacgtcaatggaccattgatgtgcattacatctatcacggggaatctttatccatacacagagagctctgatgcgtcagattgcgtttataacatgtcagcataatttcgctatcgcaactgtcaagaaatgagacttcacgctttatccagctatgcattatatcacttatattaaagacttggactaaagattatcagaaaatactttatattgggccatcatcaagactttatgactatctaagtacttatgaaatgcaattgcgttcgatgctccct

SEQ ID NO: 49733 - DNA, 464 bp, Glycine max
  unsure (1)..(464): unsure at all n locations
cctcgctctanantacattgatgtttgtattttttggtggttgttgtatgccatttttgttttaagagtagcatcccttggtaaaactaactttccaaatgtttgccttcgcaggaaatggccccgaggaagcttgcctcaaagaggtccaggaaggataaggcggccgaagggactagttccgctcctgagtatgacagtcaccgctttaggagcgctatacaccagcagcgcttcgaggccatcaagggatggtcgtttctccgggagcgacgcgtccagctcagggacgacgagtatactgatttccaggaggaaatagggcgccggcggtggacatcactggttactcccatggccaagttcgatcaagaaatagtccttgagttttatgccaatgcttggccaacagaggagggcgtgcgtgacatgagaatcctggtaaggggtcagtggatcccgtt

SEQ ID NO: 49734 - DNA, 417 bp, Glycine max
  unsure (1)..(417): unsure at all n locations
ntnttggagtagaaacatgggaccaactcattttattttatatggaagtcgtatctagtcaaggtcttagagaccatacaagtttcctaacgatttctaattatgtgggccattaagtctatcatatgctgacaatagccgagaagcccatgaatctcttcgggggcggagtaggtgtctgccatcgccttggccttggctaacaatcggngaagttcttgactcccgttcaaggtaagagcaaaccgatccatccacatggttgcctcttggtgtaaagagtcgatcacccttcctctagcctctttttccgcgtatacttgggcatattcgtccgcaatcctatgctcgtgggccgcggctagacctaactcttcttggtacttggcgatgatagctagcatgttggtctccgtc

SEQ ID NO: 49735 - DNA, 107 bp, Glycine max
atactgcgaatgaagggagagaggagaacctgtggctgcttctattgcaattccacaccacatgtttctagcaaacaactttcttccccaccatatcacaggcatct

SEQ ID NO: 49736 - DNA, 516 bp, Glycine max
  unsure (1)..(516): unsure at all n locations
ccatatacaacacactcccaacgatttcactccactcctannctcantnatacgaggnnnttgagctgagacctcgaacnccggannaaaaaccacctcgaaccgaggctcaggaagcccagcatcgtttgctatccgcnatctctctccagaaaggcccggaacagcccaaaatgcgcacactgagcctcgccgcaaatatccaatgcaaatacaaagacccgacaggctggttcggccaaggttacacaaataaaaacctaaaaaagccgaaccaaacgaaccaccggaaagaaccggtccggaacttgcccacatcaaaatccgaaccaaaccaacccaagaacacacccgaatcaaaaccatttcatttagctattgtaggcaagaaaacacatacaaaacgacacaggactttaaagattgtgcaacactgaaacgacaaagtaacactatacgtagagctaaacacatgaagcctacgaatgccagagcaaacagtggcacaagcttacg

SEQ ID NO: 49737 - DNA, 422 bp, Glycine max
  unsure (1)..(422): unsure at all n locations
nnaagaggcctgagcactctagcacgagctcacttacagaactggtattcatttccagatttgtaacggaccacatatcttcctgtgcacagntggaaatttgatctgtgaaccatcaataattgaacattttacaacgtacatcaaatttgtgcaataccatgcttctactgatggggatatgtagcacatcaaatgtaacacctgcttggagaaagaaatgctttcctgatacaatgttgaggacctgccaacatgcttactcagaagcgtcaggtggtcagagctgatgtgactaagacctgcaggtgaacacctaaccaccaaagagagactgacgtgacaagttaaaggatgtgaacctagaatggacctaataaaactgtgaaagaacacagaaaaacttggaagaatgccaaaca

SEQ ID NO: 49738 - DNA, 450 bp, Glycine max
  unsure (1)..(450): unsure at all n locations
nggagaggatgcttcaatggaggaaaagaatgagggagatatagagagaggggggagcacgaaattgaaggaagataaagggagagaagttgtactttgagttgtgtctcacaagactctcattcatcaaagttacaacaagtgttacacattcttctatttatagactaggtagcttcctcgagaagctttcttgagaaaacttccttgagaagcttctntgagaaaacttgcttgagaagctagagcttagctacatacacccctctcataactaagctcaccttcttgagaagcttccttataaagattcctaaagaagctagagcttagctacacatacctctctaatagctaaggtcacctccttgagatgagaagctagagcttagcttcacaccccctataatagcttagctcacccccatgacagaatacatgaaaatacaa

SEQ ID NO: 49739 - DNA, 603 bp, Glycine max
  unsure (1)..(603): unsure at all n locations
taatgagcttgangccccncgagcaccgaggctgccgctgacanaagagaagcatgttttataatcttttttatgtaaatgttgntntactncanaaccncttagactagttcacatagacttattnggtccctctagaactatgacgttgngtggtaattgctatggcttatttatagtagatgaaatactcaggttcacatggaccttgnntttgaaatccancaatgaagctntntatgctcttcacaaacttgcaaagattattcaaaatggaaataaaggtatgattggtcacttcttacttactacaagtagagaaatatcatgctagtgttgctgggtgcaaggataagatgatctaaggatctacttacacttgcaaaggacatgagtcctagggcacaccaatgtggttatgtatcccaaggacctcttaattaccggctttcaatntgatttgaggagcaactaatagagagccaatggatatccactatangaactcgctgttcttgaatgcagaacangttgngacactttgatgactcatgtgacttgaggcctgatctctcatcatgagtcctactttgagatcatgct

SEQ ID NO: 49740 - DNA, 411 bp, Glycine max
tcagactaaagcaacacacaatctaggtatctctatctcttcaatttaatggattttcaaggtttgagaagtgaaattgagaatgaggtaaatttggagcaaactctcacctcacacaagtctataacatcgatttaaacttgctcaaactggatttacacctaaaattccaccgaatcaaaatttgactgctcaagacccaattttaccctagaaatggctctttgttcactttggtcatttgtttttctctcttgcacagcccaagctttctcataagtcctaaatgacatttcaaactagtattaactcactttaacctccaaataccactaaatccagatttggccttccaactctcaaaacctcacttcttttccactcataacaccatattctcactttctaacc

SEQ ID NO: 49741 - DNA, 339 bp, Glycine max
  unsure (1)..(339): unsure at all n locations
cctcttatatatatttattcggtcttttatatatacctgtttgatctctatagctctgcatatatgcttctcatcctattttgcaatctattaatatcctcgtgctcatatatatatacacatacanagctttcattataanttctgattgagaaacnnttgtgcagatgtntggtttgaagctnngatctattcaatgatctaattaatggtgtgtattctaatgtctcaataatgtagagaatcaattaaaagaatctcttggcaactgaattatattgtggagtgagcctggcattaatgattccacataactatatcttaattctcttnttttct

SEQ ID NO: 49742 - DNA, 356 bp, Glycine max
taagctataacattcatataattattttcttgaatttctagctgttggtgatatcatctatctggatacaaacaatgtcctaacattataaggaaatgtcaaaaatgtccctactttgctgaggtgtcgaaatattaagccatgtagttcccgcccaaaaacgtcaacatcacgctatgtagtttctttctatttaagcttcgggttattattgcacttttgatgacaatgcgctactatttccaatgcgcttctatgacagagaggatgtgggctcagaccataatttgcaagagatagaacacacaatgcaagagttatgaagctaaaccaagtcaccagtaaccctaactgca

SEQ ID NO: 49743 - DNA, 180 bp, Glycine max
  unsure (1)..(180): unsure at all n locations
atcctctannattattcgatgcatacatgtggatgggctaataccaggaatgttcgctagggtccagcctatatccttcttatgcttcttgagaacagataacaacttcttctcttgctcattagcaagggaggtagatatacatactggaaaactntngctatcatccaagtaagcata

SEQ ID NO: 49744 - DNA, 468 bp, Glycine max
tcccgcatccgcacctggaaggatctgattaccgccttctcttatgcaatatcagtacaactttgacatggttcccgactggactcagctgcaaaacatgattaaacgggaaagcgagtcttttaaagaatacgctcaacgttggagggacttggaggcgcaattagcccctcccatggtcgagaaggaaatggttactatgatggttgataccttgcctgtattttactataagaaattagtgggctacatgccctccaacttcgcagccttggtcttcgccggagaaaggatcgaggcgggtttgaagaggggaaagtgtgattacgactccccgataggtgccagcagtaggaggaccggaatagctggggctaagaagaaagagggagatgcccataccgtcacttcaacacctgcatggcccaagccacccgtaatctctcattggtcccaccaatatgcgca

SEQ ID NO: 49745 - DNA, 135 bp, Glycine max
tatcacacatatcgtataatgtggctaagctagattgtaaacgcataaaactatttggcacgacagagactctacgcttggaccttaagcttcgtcactggggggtggtgctagccatgtaatatgattatgtgt

SEQ ID NO: 49746 - DNA, 480 bp, Glycine max
agaatactaacgctcggcatctgagttgataaccctagacatttgtacgatattctatctacaaaagttaagcaagctattcagaagataaaacacattcattccctgtgaggtcaaaatagaaactgacatgacaagcatctaaatgtctagcattaataatttccttttctgtgggttcaatctataagtacatgtctttacactcttgggtgggcattctcccacttatcacatagaagcaaaaccattgtacaggattgcttgtggtctttgaacgagtctccagttacagtttctatatgccatgcagccatattgatcatgtggtcatagccatatacataaaggagtaaaccctaattttatatatttacttcattgaggaacactagcaacacaacttttaacacactcttattagcacattctctctatcaaatgaaacccatgtaagtctcaccagatgatgcatgcctc

SEQ ID NO: 49747 - DNA, 121 bp, Glycine max
gtcattgctatcccaacatatccgcagcgagatgtattatatcctgaatataccatcgacaattggtactggtaagattcttcttcaatatatctcctaacttaactcaatgatgagttct

SEQ ID NO: 49748 - DNA, 427 bp, Glycine max
gaatgcaagagagcatgaagatgagagcatggtgtttatgatttccctttaggacagcattcaattttgggctacaccatgttgttttccttacacctagatgtttagaaatgttgttcatcatgaacattaaggtgtagagtacgtagcaaaaatgcctttgttgatttccttattaatttaggtagcaaaaatgcctttgttgatgtccttattgatttaggtagcataaatgcctttgttagtttccttattaatttaggtagcaaaaatacctttgttaatttattcatttaggtagcaaaatacctttattgattgacgcctttgaatatgtatatatgtaatttaggtagcaaaaatacttggatatgtgtacatgtaattttcggtagcaaaatgccttacaaatgtatatatgttgtgt

SEQ ID NO: 49749 - DNA, 615 bp, Glycine max
  unsure (1)..(615): unsure at all n locations
nnnaatactgagcctttgacgngatcctntcagnncacctggangcatgcatcctnntaagantcanaatntattggtctcnctaatatgtngccaatcttatanngagatataaccttanaactacatagccaactctgtcatggatagataatcttaacaaactattatggcactatacaagtttcttagaccaaattagaaatggatatgatgggaagatctatngtcataataagaatactatttattgntattntntgtggtaagaactggacacatgacgcccnagtgtatagatcgacctaagaagggttcaaccaatacctctatggctaacacanaaagacccataaagatntgtgtacctaagaataagattatcctattgcagatgtcctgatacagaaagataatcctatcatgtacttgacagtgctgctacacacatacanagaaggtgatgttcaatgcttactcttatcatgtgacagtactttataggaataaaatgagatacagggtggtaatagatcaccctccgtcatatatgctgtgtgagctaaatatactgctatcatattgaggtttgtgctcttacagagagggataatt

SEQ ID NO: 49750 - DNA, 440 bp, Glycine max
tcatgggaaaccagtggttggaaggcaaggtttgtttgttattttaatgtgtgaaagtcacaatcatgaattggccaagtcattagttggacattcatatgctggtcgattgactaaggatgagaagacaactattgttgatatgacaaagtcaatggtgaaaccaagaaacaatctcctaacgttgaaggagcacgatgccaatagttgtacaacaatcaaacaaatatacaatacaagaagtgcatatcgttcttccataagagacaatgatactgaaatacaacatctaatgaagcttcttgaacgagatcagtatattcattggcatatattaaaggatgaagatgttgtatgtgatatcttctagtgtcatcctgatgcaatgaagttatgcaatgcatgtaatttggtgtttttgataggtagacctacaaaac

SEQ ID NO: 49751 - DNA, 601 bp, Glycine max
  unsure (1)..(601): unsure at all n locations
gatacactcncttgtntgngagattaacacatganatctcacatatagaggggataggaagaacaggtggtaactatcatctggaggggtctacagtcttatactcgacaatgaaaccagaanaacaggctcactctcagctatggtcgtacgcggagggtgtgangagacacacttcaagaacagcacagaggggaactctgtatanaggggaggttaatngccatagctcgaggtcatcagtgaacctcgagatacatgggaatgggcagcaatggcttataggagccttgcataggagactaatanatatggcattgcttgatagggtagaggagtacctatggtgggatataggagagaacatatacncgatgtacatcggagatgacatggtgctttctcaggtctctcagacananagctaagcgaatattagatgaaagacaagaagggtgngagacgttntcaatccttagagccatggaaatcacacttcgagttgctctatactgacgtgtgttcattgctgggaatacactgtngcntggatatgaagacatataacaatgnggcttatatgtgaatgcgacgctgccan

SEQ ID NO: 49752 - DNA, 458 bp, Glycine max
gcttgaaaattattccttaatattgttcaattccaagaatgtagtaatctcatgttttactacttcaatttttactcaaatgataaagggtaaataagaggaaggtcaacttattgaagaagctgaacatagccctacaaatcaagcgaaaaataaactagctctgcggaagtgtcgtgcggaattgattaccagcttacagctattgggtgattatgagtccttactgacaccacctcaacttgttcttgtggaagccaatcaagctgctgccaaagctattatgttcttatcatgaaaccctgttggtagtggatgcttcaaatatatgagcacgaatgacatgccgatgaaatgttgtgagtaaattcttatgttgtggtaatcgaaatctgtaaaggttcttttttctgtagcatttgtacttctaaatgatatgtatcctctttataaattta

SEQ ID NO: 49753 - DNA, 647 bp, Glycine max
  unsure (1)..(647): unsure at all n locations
nnnnnaatgatgatgtcgtctgagtcacctgcaggcatgcccagctttacaaacagggtcatcaagtcaggtngaaatatggaagtaaccatttctgctactngttgcanaagatgaatcgagtcacatcactgcttcgtctactgccaaacatattcaagaatattgatgtccttgctactatcagtttcaccatgacaaagatgtcatggaccatgtngaanatctatattgactcaaccncatatnctagcgtaaaattcgcaatacttcgactgtacatcattcgcatgccatccatgctttcattgggtgcattgctcatngcattctttncttgaaaataanatannaataaatgacctatccaaagaaaaggaaacgcttacggngccttaccgactcgtgctnagctanagtatgggtgaacatagaatgtcaagagagatgatgccaaaatggaggcataanagacatatggcacaatgataaggccatgatagcatgaagagnatatggagcaatgcgggtatagtgccgtatagtgctgcgctaagtgacccgngctccatctgcctaacaatgatcatcacctcaatatgtngcaagattaggagacggtactcatatggcaatacaacagcccg

SEQ ID NO: 49754 - DNA, 386 bp, Glycine max
caagccatttacaaagtgccatattatgatccattctcgtggacaagactcgcgaacaagctttcttagccttcaagaagaccattaccactccgctagcctaaacaaccccggtgaaatcgaggaattgtcgactaggagactgctatattggcaaagacaaaatgaagaaaacatgagggttgaactcaagacaagaaacgaagtctaagaaatggttaggatcatagaagaagcttgtcgcaacctgcccttcggcaagagggcgatgcgtgactcacgggtgcgtgttccaagataggaatacgcgcggagtcgtcaccaacgtatatttgaggatagtgtctgaataaccggaaaagatgtgatctacgaattctttgtga

SEQ ID NO: 49755 - DNA, 704 bp, Glycine max
  unsure (1)..(704): unsure at all n locations
nnnnnttgatgtgtcttcagagttctctgaaagatgatcgntcgccanccntngtngncaaagcanngcttctaattttatgtatggngtattgatgtacttgnctagccanaacanagtatatatattattgcttaatagcacactacactctgaacaaagaagtcagtgttaatatatgtctatctacacagatatatcggatgctttctttgccaacagggttacacaaatctataaggcaacagggcaaacttagttcaaacttcatgggctttgatgtccctcattgatgcacggcagggtagaaaacaanaatcttcaagtatttaagacttatatngtatgaagttaattgcactcaacttatcaatcanaaataatatgtgatgaatggtagagtagtattataaaaatcaaacaactatctttcataacanaatgatatgaagtattatatcgatcaatggatagaacaacggttccacacagatagtagtatgtatcgggctaaaaatgaattattttctctgacannaaaggtgagatagattcaacacctcgacgagcgtggaagtacggtnattaataacttctcagatggaagatgtgagactttcacaacactgtacgtctattgtatngtcaatataacgagcacatatatcgttttcctatcacataattatctacacttcacacgt

SEQ ID NO: 49756 - DNA, 396 bp, Glycine max
  unsure (1)..(396): unsure at all n locations
ccgctctatctgttatcagttngaggacatacattgaatatattttttagtatatcaaagtaacttttgaaatgaaagaaactcttatggtaattttcatgaaataaacagatttcaccaaaatgatattacaaaatttgttggaaatcgagatcttctgttagttaaacgggattgtacatcatatatgatttgtttggttaccgggcagataaaggggtttaaagcatatgcattaagttttctgctgatatataaatgaggctagattttggggtttgaggctagattgctttgatcattgtcgtatctaaaaagaaagacgaattcagacatttctggtgaaagacactaatgaaaggaaaagatcggtgtgctttgttggtcatgtccatg

SEQ ID NO: 49757 - DNA, 263 bp, Glycine max
ttagtattctcaccaacacgaattcttctttttggtctctccgttttttctgtgcgattctgacgcatatggggacctcctagagatacgatactctgcgagacaaggaagagcctcttgtcataaaatgtgattccctatcatgccatataagaggtttttaacagacaactttatactagtgatgaattcctgtgacactcatgttctatatcagcggtgtcatgatctatctccaacttttgttggtccaacttccatta

SEQ ID NO: 49758 - DNA, 142 bp, Glycine max
ccaaaaaccccgccggcgcagagaaacagggggacacttgtatgattaccccacgcgaagcgcaagggcggcaaaacacccaccaagcgctcaaaaggaaagagagggaccagcaacccccaatgagcacagcagaaagaaa

SEQ ID NO: 49759 - DNA, 618 bp, Glycine max
  unsure (1)..(618): unsure at all n locations
nnaagattctcttgacggacctctaagctaccgangctgcccgctgtgtatctgcncatgtattcttactngntattcttatctcattttatacaaaaagngnnngtaggtggtcatgttngaactctcttatgatcactatctacttctgtnagaaggttgtgtgatanaatgaaaggtanagtgaaagagacaaatagaagatnaaagagagagaggaacaatgctcagatggacattngccattgtactttatgatcgtctcacttagaatcattcatgttactctaaccanattntgaacacacatatangccgtaagacaagtggaagaatcccacgtggaagaatcttatctttgngatgtacttcctagctactaagaacacagtggttggaacagtagtcatctctatctgcatctctatgctacaccgtagtaaacagtggaaaatccacctcactctacttatactgtaaggtcgctacctgactaacatgttccttggcctgtcaaatgctacatatagnggcatgcaactcaaaaggtaatatgcaaactgctgtctatgaattctattaaaccttatacactgcagtagttaccaaatactaccg

SEQ ID NO: 49760 - DNA, 437 bp, Glycine max
  unsure (1)..(437): unsure at all n locations
agtctcacgattggacatgttgttgcttcttttgttagcagtgggtatacgagacatcttgcctaacaaagtcaggttagccataactcgcctatgctttntcttccatgccatatgtagcaaaagacgtgatgctgtctagtttgatgagctggaaaatgaggctgccattatactgcgccaggtggagatgtatttttcccctactttctttgacatcatgattcacttgattgtgcatctggtcagagaaatcaaatattgcggtcctgtttatttgcggtggatgtacccgcgtgagcaacaaatgaagatattaaaagggtatacaaagaatctatatcatccaatagcatttattgttgagaggtacatcgcagaacaagacgttgaatcntgttataatacattgtagagctaacctgttgccttctgag

SEQ ID NO: 49761 - DNA, 540 bp, Glycine max
  unsure (1)..(540): unsure at all n locations
nnnaagattagccttgacgngtcctctgagtcacctgaggatgccgcttaaacaatcctgctattatagaacttctccgtgattattgcancacaccattcgagtactatctcttccgaacaagtagcacacacatgtacatgatatcggattagtatgactgatacttggatgacatcctgttaacatacaaacttattgataatctcattggaaatttcctaggatcagatgatgatgacagggacctccttgctatctgatgcttcattggatcatttactgattaattctgagcctgattatacagacttttacatttttgacctctatgtacctgaaggatccacattctttgccttacattgaacctcagtctaccatcctaacaatgtatatattttggcttcaatagacagaataattctattctcttactcatcttcctaagtttctatggtgtattctgctcatatggatgtcgccacttcatgcttcagaatagattgtgcttataaatgctgcggttcatatgtaccn

SEQ ID NO: 49762 - DNA, 439 bp, Glycine max
tgaccggatgtaagatacatcttcttcaacctttgtcattcttgaatccatttcattgaagcgcatatccacttgcaattccaaattatcaaacctctcacaaacaaaggtttgaagaccatcaaacctttccaaaatcttcgaaagaagagatgaatcttctccctcatgtccttcttcaccaacatttctagcacccttctttacccaagagccatcatgctccttaatataaccaaaggatgctatgactgaagcggctataaggaatgatctcttgattggaacatatggttcagaatcaagagggatgtcgaagtgttgaatgaaaagggtaataatgtgaggataaggcaaaggggcattcaatcgcatgcgatatctaacaacgtgtgcccaatcaatttgttaacctctatgaaaggtccacatgacaatg

SEQ ID NO: 49763 - DNA, 363 bp, Glycine max
  unsure (1)..(363): unsure at all n locations
catgcaagctagcatctacaaagaaaaacngaatattttgtataagcaactgagctaatagagaacatgtcagcgagagatcatgccattctatgagagagaacccatcaacccacgaagaaaagcttgttagaactatcatgacatgacgcgttattggcacaaaacaagttgcgttctcagcaagctgagatatcaacagaaacactcggcgagccacaaactaaattgactattggtaaacctacacactcctgtatttcgcagggtacaggatgtacaatctttggctaggctcacgacataggccaacttactcccactgaagaacacactcaagaaattcattatattgggaaatca

SEQ ID NO: 49764 - DNA, 450 bp, Glycine max
  unsure (1)..(450): unsure at all n locations
accaggcagtgtaattgattaccagaagataagtttgtaaatcagcttttcaaaagggttctgaaatatgacatttgaatcttgtaatcgattactagatgtttgtaatcgattaccagtaatgacacttcaaaanacacttttaacagtcacgacccttcacaatataactgtgtaatcgattaccaatgagagaatttagaaaagctctttgaaaagacacatctctttaaaccatcttgaaaaggcatgatggacttatatatatgtgtgtctgactttgaanaacataagagagagatgttctaagagaacttaattgtcacatgctctctcaacaactattgtgcaaacacttgcaaatctattgagaattatctaggaacttcaatttgtatatcatctctaaagagagaanatctctangatcttcaattgatcnatactcta

SEQ ID NO: 49765 - DNA, 435 bp, Glycine max
  unsure (1)..(435): unsure at all n locations
tgcacgctgcaagctngtagtgagcttcataacagggaatatgttacattgctcanaagggctatcaaaggaattaatttaaggtaagtccattcggctagaagcttataaaaacaaaattgcctcactcatttccaaatatgcatgtgaattaggaagcatcaagaagaatcaagccaaggctattgtgcaagcaatcaatggggcaaaacacaccaaatgattatggtggtggatggctcaaattctcacaaaggtaaactcatcactttcaaattgagctttcaaaactatcatgacatgtagaggagaatcaaggatttcaagtcacaaaatgtcaagaacttttattttcaaaacaattacccatttcttgaaaatatcctataattcgaagaaaaacatgcaaagtcgtacattgatcgacgtcgtacc

SEQ ID NO: 49766 - DNA, 320 bp, Glycine max
cacatacacagcctgcctcacatctattagaagtttctcttaatatacaaaattatgttttatcctaagacagggttctgcttatgtgcgtgttgaaagcattaaagaatcaacggattaactcaattgaataaggtatgtgaattattataaatcttgttatattatctctatttctcatcgatcaaaaaaacaggttaagacaagactgaaaagagaaatgtctgaccaaagatttgctgaagaattcactcttcaaaccagctgttttaagttacaatgtacaactaacatcaaataattgttatttcggggaggga

SEQ ID NO: 49767 - DNA, 338 bp, Glycine max
  unsure (1)..(338): unsure at all n locations
agcttctcgatatattatgtggctgaatctgatttttttttgaaaagncatgaccattggaatntctcgagagcttaggttgttcaatctccagtgactcgatatattatgcacctgaatcggacttacgtgtgacaagctatgaccatttgaatctcacgagagcatttgctgttcaattttgagcatttcaatatattatgcgcctgaatcggacttccgtgtgacaagttatgaccatctgagttcgctaagagctttcgttgttaaatatcaagcttcttgatatattatgtgcctgaatcggacttacaagtgacacgttatgaccatttgaa

SEQ ID NO: 49768 - DNA, 154 bp, Glycine max
  unsure (1)..(154): unsure at all n locations
gacacaanatactaagctctcattatatgcgccgacaacgacgtgaatttttttttgatgcacacggtcgggaagttttccattgaatctttaccatcgtgatatccggcgtgcattagctggccgaatttatacgtagaaagtttgccattta

SEQ ID NO: 49769 - DNA, 429 bp, Glycine max
agcttctaaactttatacaagaatgaagcttttgtactcatttgttggacaagcggcctcagatatcttaagaaggggggttgaattaacatatcacaaacttttcctaattaaaaaattctattttgattttaacccgtaaccctagattccttaacagtaaactcttaagaaaatatgaaagaaaaacttactgaaaagaaagaataaataataagcaattaaaggagtttaagggaagagagattgcaaactcagatttatactgattcggtcacacccttgtgcctacgtccagtccccaagcaacctgcttgagagttccactatcttgtaaaagcctattacaagatctgaatcacacaaggacaacccttcctttgtgttcagatttctttacaacaagagaccctcggtctcttaatccct

SEQ ID NO: 49770 - DNA, 357 bp, Glycine max
  unsure (1)..(357): unsure at all n locations
ccggtgagagtgtgaccttaaacgttgagtgatctgtcttgctatgagtaataatctntgcatgaatctctgaantttagaatgaaatgtataaaagaggacatgatgaaggccatgattgtacacacacaagccttttgaccaaaaaagcgtgccttgaatgataattatatccttagcaccctctttgagctaaatgtgtttgtcataattgaaccctgaaactaaataagtatctcctgataccttgcttagattctagaagagcatattgttcaaggcgaatttactttaaatttgggggagggtagttaattataatgaacagaaaaaggttaagcatcatcacacacaact

SEQ ID NO: 49771 - DNA, 404 bp, Glycine max
agcttcgcaggttacacgacctaccccctttctgttttcaaaaccttcaaccaggagcaagtcaaacatacttctgacaaacatcaggggaaaagctccacaaagcaaaaggaagccctaccaaatgggtgacaagacctttaaccaggttgaaatcaaacctgagatgatttcttgtcatctactttttgcaagaccaccacagtcctacctctacattgccaaggtcttgcttcttgttgttagtcgtcatttagggctaacttttgtattgaaaagtttaataaaatttatatcttttccccaatttatggttctttttgtaggtttgtacatatttttatgttcagtttaattttactgagtagatattcccaatattgtgaattaatgcggctctactt

SEQ ID NO: 49772 - DNA, 391 bp, Glycine max
  unsure (1)..(391): unsure at all n locations
ggttgaatgcaatgatcaaattcatgtgatgatcatgccctgtttctctgttngaattagctagcaatgttttagtatttaaaagagtgttacttttgtgtatgatgtatttgggctcttctaattctggtatatgggaagaggtgtttatgcctgtaacaccatattcctttgtatctagattgatgatctgctggtcaatatgacaaagcatgtgctgcagccaaagtctgagatactcactgatgatgagaacatagcactgctcaccaagcataatttggatgagaagcaggctatacatgtttctaaacatgtcctgctaaacaaatgattacctcattaattgcgtgttgatactaggctctactagcataacaacaatataatg

SEQ ID NO: 49773 - DNA, 51 bp, Glycine max
  unsure (1)..(51): unsure at all n locations
cacatagatactaagctgatgntgcggtcactctgagatcccgggtctcat

SEQ ID NO: 49774 - DNA, 395 bp, Glycine max
agcttgagcatatcacgtcactcccgcattttatctatagcatgcattgtctgtaggtctcatgctttgtcacgggaagccggaaggaccatatcaccttcttaattgtacacatggggcactgcgccctcagatgcgcatgtaagaagagataattttccgggctctcgtgtccgtagaatgcattgatatcatgcatcgcataagcatctcttcataacatcataatggacatatcctgcatttgtccgttatcatattccggcctcacattctgcatgagacatggcatgatcatgcgtatgcgttcaacaaactgtttgatctgcaaaattgcataccattgggatgcatgtttgctcatcttcgtgttttgctctacaaaacaaaaacaa

SEQ ID NO: 49775 - DNA, 423 bp, Glycine max
agcttctcaaggaagctacttagtctatctatataagcatgtgtaacacttgttgtaactttaatgaatgagagtcttgtgagacacaactcaaagttcaacttctctccctttttcttccttcaatttcgtgctcccccctctctctttctctccctctttcttttcctccattgaagcatcctctccaagcttcttatccaaggctcatcttggtggtgaagctctttctttcatggcttattccctagtggatggcgcctcctctcacctcttctcctttgtcttacgctgtatctccatgatggaaaatcaccattaaaggacctcattgaagctcaaagatccagcctccatagaagccccacaagcaagcttccatcaatctcttttgataggttgtcgaagtattgaaaaatcaaa

SEQ ID NO: 49776 - DNA, 463 bp, Glycine max
  unsure (1)..(463): unsure at all n locations
nnttgatcatcatcaanacaccaaagatcttctacaatctctctctcnttgataatgacaatccctgaaatcaagacaaaccatatacaagatgattgcacattcacacagcccttactcccnctatcttttggcatgtatgcctatgcctaactntaatgagtttaattgatntctaacccaagttatgcctaactntaatgaagttaattgatttctaacccaagttctctccccctttggcaacataaaaaagaactaaacaacataatcaaaatccaaacagagccaaacattaaaccaaaataaatccatacatngtcataaccaaccaaagcaaagtccagaaatataataatagtgcaagagtatgataactagagtaacataaagccaaatacacggcgataaaacagagtactaataatacctaatttactaatagacttagtcataataataa

SEQ ID NO: 49777 - DNA, 424 bp, Glycine max
agcttcaccggatgatgccgatcgattattcttaatcgatatcatccaattgttattcagggattgaatagaataaacaatggccggtgtcggtcgttatatggccccgactgatatatctttaagccgacattgcgcaatttcatttacaaacgctggccgataatgttttttttttacggtacaggaagttttttgtttcggtgttgcctaaaaaatttacaacatatgtcggctaggtttttccgtgcgagctcaaccgagggttcgttccgaccgatactggcatgttgttcttctcatttaggaggccaagaaaacgtttgtccaccccggcaaaaacaaaaaaaaaacattattcacggaaattgataaaaaaaaatgataactgacgtaggcatggagagatgaccgatcgaggtct

SEQ ID NO: 49778 - DNA, 409 bp, Glycine max
  unsure (1)..(409): unsure at all n locations
ntctagcctttcattggtatatgttgatctccttctgttgctctaaattgtgggagtgtgctcaaatatatggngcaattttgatttgttttcttgcttgattaggttgaattatgggttggtatgagatggccctaggcctataatgcattttgaaacaataggacatgccacattgtccccgttctcttgctattgatgcctaaacgtgcgcccaccaagtgttcggtgaaatgcctcaatggcattagcgtgtgacttttgtaaggagacaacccatggggtattttggtttgtgcatatnttctatttttttggaatatgtattcattcccgaaaaaagctagagtaattgccccacatatatcctagtcctaganactgaatatttatgcaaaaagagcacaaa

SEQ ID NO: 49779 - DNA, 410 bp, Glycine max
  unsure (1)..(410): unsure at all n locations
agctntacggtgcccttacctttccttttcttttgctagagtaacgggcgaagtagaggaggtgcaagagcaaatgaaggccgacatggaggccatgtaacacaaaattgtcacaatgatggacgccatgatgagcatgaaaaagataatggaagccaatgcggttacaatcgccgctaccagcactgttgctaatgtgaacccgatgcccccatctggcctcaaccaaatgaatcatccaaccttagctatggtaggcaaagatttgggaagtatgaatggccccatgatgtgcaaattcaaaaccagcacgccttcccgccatatggcttgcctaccaacttacaccatccaatgtggcgttcactcccaatgagaatgtcaataactccactcctagtcttattgag

SEQ ID NO: 49780 - DNA, 362 bp, Glycine max
  unsure (1)..(362): unsure at all n locations
atgtaaaagagaggtctactattcttactacctcgaccttatatccctataaaaatgaaaaaaggttcttgtcgagaaggatttaacgaggcacacctaaagctatactatcaatgaatacattcttccaacccttatacttgtcattttttattataagaccctctcgaataccctttttggcccaggcttgactctactataacaacatgtgttccctctcgaataacctattngatcgacgatgaacttactttcttaagcaatagttccctcttgaataatcgcttttgccgacgatgacaatatcacactatatcttaaagtcccatcccgaatactctctcttgtcgaagtcaaca

SEQ ID NO: 49781 - DNA, 405 bp, Glycine max
  unsure (1)..(405): unsure at all n locations
agctntataagtgcgggttggtattcatgtgttagtgttcgcgatatgtgaaaatgatgttccgagtacttcggatttggtccgaccatgccctcctgatttccagctgggaatttggcgagtggaggaacgccccggcgtttacgcaacaagcataatgtaaacctttacggttntaaaagctctatagttgggcctaggctttagagttttctttttgttaaggctttgtgtcttttgtttttgaatttataatacaaggatctttcttcatctgttcctggtctctacccattctcattcatttgcatgtttacttctttttctgaaacggcagattcgatgacgagtccctcgaaggtactaatacctgggacccgtctatcaacttcgagcaagaaatga

SEQ ID NO: 49782 - DNA, 229 bp, Glycine max
ccatagcaaccgctggagagtttcgagcgtctagacatgagctgctcgcgatatggacatctgtatgaggagatatgagcgtatgaatatgaccagagtatatgctcgagaacttccggcgtatcgttatgagctgaccctgatatggagctccgtaatagaacttctgagcgtaaagatttgaccagagctatcgctgtagaacttccgatgtcactgtatgtgctgc

SEQ ID NO: 49783 - DNA, 423 bp, Glycine max
  unsure (1)..(423): unsure at all n locations
agcttgccacccagctcgcccaggcgagttatgttgttttctccagaagcaacagccttctagaggaatcttctggagggcccaagtgggcctggttgctatttgcacccccatttttactaagtacaccccctgcctttttttggtgattcttttttcgtaaagttacggaaacttacgaatttcgtaacgatacttgttttctttccgtaatgttacggaaccttgtggattacataatcatcccctttttgacttacggaatgttacggaacctcactaattgtgcaacgatgcttccatttgatttccggtgtgtcacggaaccttacggattgtgcatcaatattttcttttgctttccggcatgntcccggaatttcacaaattgcctaatgatgggtgccaagcacctcacaagga

SEQ ID NO: 49784 - DNA, 422 bp, Glycine max
  unsure (1)..(422): unsure at all n locations
ctaagctatgctgcnanttntacaatagacctcctcaacctcagctgttttatcaaccacagcagagcaattatgacctntccagcaacagatacaaccctggatggaggaatcaccctaacctcagatggtccagccctcagcaacaacaacaacagcctgctccttccttccagaatgctgctggcccaagtagaccatacattccttcaccaatccaacaacaacaacaacttcataaacaaccaacagttgaggcctctccacaaccttgcctcgaagaacttgtgaggcaaatgactatgcagaacatgcagtttagcaagagccagagccttcttcagagctaaccaatcagatgggacaattggctccccattgaataacaacagtccagaatttgacagcttgcttttagctgt

SEQ ID NO: 49785 - DNA, 434 bp, Glycine max
  unsure (1)..(434): unsure at all n locations
cctgccgcatgcaagcttgaatcggacctcagagtgaaaagtttgtccttttcaantacncgagagctngcggggggcaatgtcgagcatctcgacatgttatgcgctcgaatcggacatccgtgtgaaaagttatgaccatttgagtttctcgagagctcccgtggttcaatttcgagcatctcgttatattatgcgcccaaaactgaccttcgtgtgaaaagttatgaccatttgaatttctcgagagcatccgatgtttaatatcgagcgtctcaatatattgtacgcctgaatcgcagctcagtgtgaaaagttatgaccatttggatttttcgaaagcttccttggttcaattccgagcatctcgacatattatgtgcccgaatctgaccttcgagagaaaagttatgaccatttgaatttctcgagag

SEQ ID NO: 49786 - DNA, 210 bp, Glycine max
cctagtggatggcgcctcccctatactcttctgctttgccttccgctgcatctccatggtgaacaatcaccattgaaggacctcattgaagctcaaagatccagcctccatagaagcttcacaagcaagcttccatcacttttcacacagaggtcacaatcgtgcacataatatgtctagatgcacttaattgaaccacggcagctctca

SEQ ID NO: 49787 - DNA, 451 bp, Glycine max
taagctaattttgtaggcttcttccttgcgtcaacattgtcaaaaggtgctctcttactaacaaagaggatgggctgataggcataagtgtccctcacctgacaagtgcttcacaggcaaatgctcttccagccattggagtcaatcttgtagaaagcataatactcctcctttgtgatctcctaaggctctgacatccaaatggccttattcttctttatgtagttgtgaaaacaaagtcctctaaagggttccccctcacgaaggattgttcctttcacagcaaactaatgttcaatctacgaatgtgtaccggcagatctgaatgaatttccttaccttaagtcttcctattttcttgtcactaactaactctaaaactaatattctaattatccttaaataactcccgcttcctacggtcctaatggtacccttttagaatggactt

SEQ ID NO: 49788 - DNA, 428 bp, Glycine max
  unsure (1)..(428): unsure at all n locations
agctntataacttgtagcaatggaatcatgttttgcttacgagtaatcaaagcagtaggctgctacatacttaaggccagagaagacaaagaatattagtctccaaattttgtagaaatattttttaagctttatgcacctcttaaaaagtaagccacatgaataaattgtaacctaaaaacttgtgctacagctccagcaacatatcagaaaattatatagaaaaatgtattaacgatttttctcaaattaaaatcgttaaaattaagaaacaaaatattatccagtttgaacttatttttatataaaacaagtgtaagaacccatgacaatttggcgatgcaaacaaaacaaggataggcaatagttccctagccctctatataaacgaagttggtcaagaatttatccaaactgtttttccaaaa

SEQ ID NO: 49789 - DNA, 401 bp, Glycine max
  unsure (1)..(401): unsure at all n locations
ctagctcagcaaaggccaattatgagtgtagagctttttattgagaaggtggtcaggcctcgggctcgaccttcttttgtgggggataatgaatgttgtacagcacatgcacctcaacagcatgagccagaaccagaaaatgatcactcatctgaagccaccatctctggagtcgtngattgtaaaaaaagaagattagagacgatatccaatgaggctgctcatcatggaccaatgccaacgtcagctaatgcaccatttccaggagtggatccatcttcacctcaacacacagtaaactcttccattcctgtcttaaagatacatgagggctagaccataccagntttgcctttggacacntttctctcagctactccagtatggcatctaacagaaga

SEQ ID NO: 49790 - DNA, 389 bp, Glycine max
gtgctccttaaacctccattaaattttttgctttaccttctcttccattgttgtttcttcatttttctccatgtatctcctcacatgtcttgtgctaaatgttgttaacatgattctttagagtttccaccgattaaacttgctatagaagctagatttgattttctatggttcaaatttcttgttcttgttcttgaaccatgaattatgttgagtttacgttcctttgagttctgtcttgttattttttttggttgaaacctaaaccataaaattcttacaaaaatattaaattagaagaaaacctcaaaaatctagagtgacttgttcacctattgtagttttgtcatagaagtcatgtctagtcatgaaacttgtcacataagatt

SEQ ID NO: 49791 - DNA, 419 bp, Glycine max
tgtccctgataccctctatgtgaattgacagcctcgcctctcctactctgaagacccactaataactgcccaacctctctaccgttactacatagtatattctgcaataactgcttactgcatttacatatggagctcaatatagagagactcatttacgacaaaccatttgatcctaactaaggttggaagacattcaccggacacagacgatagaacaatggatttacatcattaacatacagcagagacttactcttcatggaagcgcagacgcgaacttcttaaacgcgaactaacaatgttgttgcagctcttgaaaccaaacatgtgcgaacacctaactcagcacatgagaaaacttttacccctggagtacccatcggaaacttctttgtatttgtcccctcaaaggagca

SEQ ID NO: 49792 - DNA, 423 bp, Glycine max
  unsure (1)..(423): unsure at all n locations
agctntaacctcatcatctctcacagactanatttttgggagccaatccaatccttgtgttcggactctcagccacttatgatagccgccgatgatcccattactgcttcccctaagctctatgtcctttcttcacgccgcatcccatgccttgcgaactccttggagtacctttgcaatgtggtcactgaaaccccgtgtaatgaaaggcgtgatgcttttgtctaatggcactcctctcatggggtagccaagctgtcttatggcgaggacggcattataattaatacaaccccttgttcccatcaagggaacatttggacatccttcgcatgaagatagaatcctgattcttccttccttctagcgagggaaccaattaacagacgcccctccatgctagccaagagttggtcccaattc

SEQ ID NO: 49793 - DNA, 431 bp, Glycine max
  unsure (1)..(431): unsure at all n locations
tgattngngagttgattntagccttagtatcactcttgttattattctattcattcaaggaaactctcagagaanaacgtccgattgatttctctgattattttattcaaagaatatttgattattgtattattatttttttcaagatattttgattattttattattattatttggcgtttgttgacttaaccgacgttacagcgtgaacgatcggttagatcttggtttaacattgattaaacgacattacaacacaaatgatcggttgaaatcgattttatcatttattacgcgagataacggtttaaacgatcgattaaagcttgttaacaacggaagataagataatcgaaagtgaacgaaatgaagatgaaagctaacaacacaataaatgaattgaattcttaanttgacacttaccgttaaga

SEQ ID NO: 49794 - DNA, 379 bp, Glycine max
aataataataataataataataataataatgacaggatgaagtgacataaagtgcttaaaaagtttacttgcatgtaaaaaatttcaaaaaaaaaaaagactcaagttaaaaggataatgcaaccagattaatatttccaaagaaaagaatattttgtaaagatatttttagacaatttaaatattcttatttggctatactaatataaatcatttccaatccatatattttttaatattatgctcttttctcattttctttttatatactctgtgttttaataacttgaattcaatataattttgtttatcaaatatttttggatctgtacattacttatatgaaatattatgagtctctttttttagttagaatttc

SEQ ID NO: 49795 - DNA, 339 bp, Glycine max
  unsure (1)..(339): unsure at all n locations
tcttccgaagaattccgtgtcttccggaagaacttctttgtatattatnngnnggnaacgcgtacgtaatgacgattttgccctcgcgtaacatcctttaaattaacgtcttcagactgtgttttactgcgctttctttctttcttcttccgtttgctctgcttcttcttccgtttgctttgtttcttcttccgtttgctgttgtgtcagtggtggtcccttcagcagtctgttggtggtccagtgaagtgaagtatttgaagatttggtggtcccgtgttccgtatttgaagctntattaagtggctgtgttcctatnttgtcggaggtacgcgttta

SEQ ID NO: 49796 - DNA, 395 bp, Glycine max
  unsure (1)..(395): unsure at all n locations
agcttattctgagggcgatggagncgctagtgtttcccgcaaaagngcgctcacaataggcctatcataactatggagcattatcttgagcaagtatcctggcctgaagctcaaattccattgtgagacccaacgaggctgctccacttgagcccacacctagtgcaaggttgaatccaagagccaagctgaccccacaatctccagaggtgaatacactgtcttctcccgagcgtgaagtggtgcccccatctccacctctaattatcatcttcgatgcatcatcacatgaagcggttgccctttctgattcaccagcaggagaaacagctgacctttctacttccccagctggaggaatctccgatctttccgacccgtcatctggagaagat

SEQ ID NO: 49797 - DNA, 160 bp, Glycine max
gaaagtgaatgttagccctttacccctcttaaaggcttcgttctataaacgttttcacaatactctctattcatatttgaatcctattcctttattaccatatatgtgaggggtagagggtgcacaccaacatttctccaccattctctcgtatctcctc

SEQ ID NO: 49798 - DNA, 240 bp, Glycine max
tctatgaatcttgcccatacacaagcatattgattactgttctccttccaggacaatagaaactacactgatcaaatactacctctgaactctcagaattcacgtgacctagccgaatgtgccacatatatacaggtatgctccgcataattacaaccttctcaccaaacagtgtttacacaggctgtagaatacatatcaaagcagtattcacaatgggaaactgctacaagccatcat

SEQ ID NO: 49799 - DNA, 445 bp, Glycine max
ggatccttaagcaccgcagctgcagcttgaccttgggaattccccaattactctatttacgcctttatcttgtagacccattgctggtaggctctccatcgtccaaattttgttagcttctaaggttgcaatttctcttgacttcgaatctctccattgtgcattttttcactgcttcagtcagaatagcttcgaggctcaactctccaagtctagattaacaatctaacagctcttttaaacttatttcaaggtcgatggaaatttttatcaaaatgagttcttatttggtcgtgttttattaaataagtctaaaagtctttaattaagaataaacaacacaagtataattacaccatcattcaaccataatctctcatatatgataagtcaagaatcatccgatcaacatttgccatgtatgataagtcagtcacatgaatca

SEQ ID NO: 49800 - DNA, 450 bp, Glycine max
  unsure (1)..(450): unsure at all n locations
taaccatttgaagtatgacgacaccagtgatccatatgatttcatggatgtctacatcatgcaagttagcctatacaccatagatgatgatgtattatgttgagttttccccaccttcttcaaaagaacaagctcttcattggttcactcatctaccccaacacagttgattcatttaaaacgttggcagctcttttcggcactcaatttgaaactagttggtctcaccacctaatctcggtggcgttggtcaatatacaacaagagaaaaaggaacctctntgaacattgatggaacaattcataaacatacctcttaacacttaaaacttggaccctacaattgctatgcactacctcataacagcccttagaccgaggcgaagttgtcaccagtttgaaccttcgactgatgtggatgaccttcgtcanagaagcagtaaatacatg

SEQ ID NO: 49801 - DNA, 420 bp, Glycine max
  unsure (1)..(420): unsure at all n locations
agcttgaaaccattggaagatttatatttttttatttctatncaaaacttatcactggtaatcgattaccaaatcattgtaatcgattacacaaagcatttttgtgaaaggatgtgactcttcacatttgaatttgaatttcaacgttcaaacacactggtactcgattaccaaatcattttaatcgattacaccattttgaaatcaattggaactttgtaaattcagttaaaagttttttgaaaacaatctttgctactagtaatcgattacaataaactggtaatcgattaccagagagtaaaaactctttggtaaaaggttttgtgaaaaaatcatgtgctactcaatgttttgaaaaactttttagtacttatcttgattgagtcttctcttgattcttgaatcttgagtcttgaa

SEQ ID NO: 49802 - DNA, 421 bp, Glycine max
  unsure (1)..(421): unsure at all n locations
gatgatgatccaagcacttcggatttggtccgaccatgccctcctgatttccagctgggaaattggcgagtggaggaatgccccggcatttactcaacaagcataatgtaaacctttactgctgtaaaagctctatagttgggcctaggctttagagttttcatcttgttaacgctntgcgtcttttgtttttggaattataaatataaggatctttcttcatctgtccctagtctctacccattctcattcatttgcatgtttacttctttttctaaaacggcagattcgatgacgagtccnccgaaggtactaatacctgngacccgtctatcaacttcgagcaagaaatgaatcaaacggaagatgaaggagatgaggatatgggacttccttcgatctagaaagaatggtcgccatg

SEQ ID NO: 49803 - DNA, 288 bp, Glycine max
  unsure (1)..(288): unsure at all n locations
acggaccttaagcaccgcagctgcaagctgctcagggnatgcgagactgttatatcatgctagctatcatcgccaagtaccaagaagagttaggtctagccacggcccacgagcataggatcgcagacgagtatgctcaaatatacgcggaaaaagaggctagaggaaggttgatcgactctttacaccaagaggcaaccatgtggatggatcggtttgctcttaccttgaacgggagtgaagaacttccccgcttgttatccaaggccaaggcgatgggggacacct

SEQ ID NO: 49804 - DNA, 506 bp, Glycine max
  unsure (1)..(506): unsure at all n locations
ggtctaattaacctganatggagagagaatgattattatactttcataatgaaaatactaagcatttattacctatacttaacagaaaatacttataaccttacaaaataaccataaattgggagagtttgatacaatttatacaagttttatacacaaaagttagtcattttcaccgactaacaattgtcggggaacttctttctatttggaaattttagttcaattctttaagtgtctatttattattttttgattatttgtgaatatttgcttttgattcatatttttttcttcttgaattggataaccgctattgctgtcagtattttgtatgcaaagatctctcacaggcaacctagttcctctggacttggaaatngaagccaccttaagaaggaacanagctgagaggagaanggaagtngtgcaagatangacagtagcttccattctagaagaagaagcnntcatctctaactctacatcatctgattcactatcat

SEQ ID NO: 49805 - DNA, 464 bp, Glycine max
  unsure (1)..(464): unsure at all n locations
ggtttggggcaatagcacnccacctgacgtccncaaggtctccattacctcgcgacatatctccaggtaccactctgtggtcaacaataaaagcaggaagtttcacccttcaacacttcctcatctcaagcttgtaggattatggggtacccatcacatgtggtactaggtggcggtcgggcgatggtgcacaacaagttttccacatccacaatgcgcgcataaacccaccatcccctgttgcccacctccaactgagctcacgtactcccacgtagcccatatcctcgtttctctcaacaccgggtccccatcaatcctcccaagctttcacaacatccaagcaaaacaacattcaaacagcacaagctatcacagccaagcaaaacagagcatatgcagaaaactctgctaacacaccaaccaatatcacagcttttctcacttaatgaccccagtacaat

SEQ ID NO: 49806 - DNA, 441 bp, Glycine max
ttaagcaccgcagctgcagcttatccgcaatcctatgtagactgagcttaactaaacaacattattgtaacagcataattaaaaccaaaacttaacccgcagatccctcatttaaagctaagtttcaatcctgcttcaatcaagttctaaggcaacagtacattttccaatgctaaagtcacctaactgtgcacacaaatgggtgatcagaacaaaagcatacaaacatttagcattgaaggaagcattgaacaaagaaaacatattcaattagatattaggtatttacatcagctgttcagtagaaatccccaactaaggtgtttagccagccattacaaagaaaccctaacaataaatgagattaaaagcagagaatgatagttccttacacaagaagggggattcctcctcctcttcttagtatctcacactcactgt

SEQ ID NO: 49807 - DNA, 339 bp, Glycine max
gtgactacactgtgatacagagacttactttctatcctatatttctgagagaacgcaatctcaatggttgttcatctctcacggatatctccttggaatatgaggagatgaatacatcgaattgatctggcaccactatatgtgcctcgtcgctatgaatgccatctctccccaagctggcatgtgtgcgattaactgattgtatattgattgatagactcaaccgttactcataatctctctcagaacttaagcgtaagtggtcgtcatctctcttggaaatctcactggcgtcagaggacctgacgaagatagacatgtattaaatgctaacagaac

SEQ ID NO: 49808 - DNA, 425 bp, Glycine max
  unsure (1)..(425): unsure at all n locations
agctntagataaatgtatcctgaaaatttttattcttatctcatgtcatttcgatttttacaactcgatatatactcatatcattgcacctatgttaggataagcctaaattcatctatgccgaatatgattgtagctgtataaaaagtgtaaatatttgtttgagtttttcgtagacaccgacataacctcaatcacattactgaaatccaagttaaaaaaaacccaaacaaaaagtgaactaaatgtctaaatgttttaaaatctaaattttgaatcttctcaaaattgctcattttgcctacgttaaaaactcaaaaaaataaaaatagtgtagtcaagatcatcatttaaaatctcaaaacatgaatcatgagttatataaaattgggttatttatgttgtgaatgtccatcccaatacta

SEQ ID NO: 49809 - DNA, 261 bp, Glycine max
  unsure (1)..(261): unsure at all n locations
atgtaatgatctntaagaagatcatccaacttcatttatttcttcctggntggatatcagatttcagttatttgttatcacccacagcttgaagaaaccaatgaacacccagatgacgcaaaacattgattatcataaaaattgcaagagggaaactataaaaccctaaacccgaagaaaaaaatgaaactttgcagaacttgtggggcaaaaagtagccagttttggagctggtcctaaatctatctaaggatacaatgg

SEQ ID NO: 49810 - DNA, 423 bp, Glycine max
agcttctgttttcaattacgagagtctcgttattctacgggacacaatcggacatcggagtaaaaagttattgtcgtttgaatttgctcggagcttctgttttcaatgtcgagcttcacgatatactacgggacacaatcggacatccgagatataagattttttttttgcatttgctcagagcctatgttttcaatttccagcatcttgatattttaccgccgacaatcattcataccaggaaaaagttgttggcgctagaatttgcaaagagcttatgttttcaatttcaagagactcaatatattacggggcacaatcggacattcgagaaaaaagttatgggcgctagtatttgctaccagcttccgttttcaaattcgagcatgttgatatattacgggacttaatcggacatccgag

SEQ ID NO: 49811 - DNA, 205 bp, Glycine max
  unsure (1)..(205): unsure at all n locations
tatagagacgctcggtattgaaacagaagctcgaagtaaattcaaacgacaataactatntactcggatgttcgattgtgtcccgtaatatatctagacgcttgtaattgaaaatggaagctngttgcatattcaaacaggaataaccttttactcggatgtccgattgagtctcgtaatatatcgagcgcccgttattgaaaac

SEQ ID NO: 49812 - DNA, 436 bp, Glycine max
  unsure (1)..(436): unsure at all n locations
gaacataagcgaccgcagctgcagctatgaatagagatggagattcttttttcacctctacngatttgggactcccccattagattattgacattatcatgaattgcaccttctacacgactttgtctatgaaacggaatggagaaaagcttgctatttttcagccttaaaggcgtcttacatcgggcgaccccccgttatcttatatgttagctctttgcatggaacagctgtcattgcttgttccatgaaagtgcaggagaaaagtcggttgcccattaagaattttcaccatgggcctagtatatctcatcttttctagtgagatgattgcttgttgatcactaccgcccaatcttcctaaataaaacttgtcaaggaagtccttgatgccttttgctgggcttatagattgaagttaatgttcacacaccca

SEQ ID NO: 49813 - DNA, 402 bp, Glycine max
  unsure (1)..(402): unsure at all n locations
tagcaatcttcaatggtgantttctcacactatagataacatgattactnttgcgctctaacttgtttaatccctaacctttatcttactttgtggatagtagttgcaaagaaaaaccatttgcaccattcatgattgatttgtgcaccatttgtgtttgatttgttgtgatcgagtgtgatgataaaccattcacaccatttatttctgatttgctatgagtgtcatngaaattttatgaattgttgtattcattttacgatagcttgagtaagggttcctccaacaagagtacaagtttgttttatttgataacattcagtctcaaagtatagtagaataattgagaaaattgaacctttagctttcttttcttcttgtattacatctgtgatctagtag

SEQ ID NO: 49814 - DNA, 284 bp, Glycine max
agcttcgtatattcataagatgagattgtttatttacctaccgaatgcactcctgcaacgtctatagaatcatatctggcgcctaactgccgggagtgagaggccatctatttgactgcattaatcacttcatcaggcagcatgtcatctagggctgcaccagtggcatcatttatcatactggttgtcatataaaagatacgcctagcaacatattggataagaagatgttatgaacactgacagtgggggcaattaggacattagtatttaaatatctgtca

SEQ ID NO: 49815 - DNA, 303 bp, Glycine max
  unsure (1)..(303): unsure at all n locations
ctaagctanggcggttctgcgtccacctcagacagaccgttaattttatcgcatcatacaatgctaagaggacctcttgagagccctggtgcacaacagaggggtagttgcgatattctcttactcttgactgagtagacgtacaacaatatggtacactccatgatagatctggcacacgtccaggcatcgtatggttgaatatagaggacacctctatgttgagtcgatcacacagagagcgttgtctcatgacctgaagttgttcatccgacgacagaacaagtcacgtatatccaacac

SEQ ID NO: 49816 - DNA, 423 bp, Glycine max
agcttgaggatatggggacccatccttgttgtactaggtggcggtcgggcgatggtgcacaacaagtttcccacatccacaaatcgcgcataaacccaccatcccctattgcccacctccaactgagctcacgtactcccacgtagcccatatcctcatttctctcaacaccgggtccccatcaatcctcccaagtttccccaacatccaagtaactcaacattcaaacaacacaaaccatcacagccaagaaaacagggcaaaggcagaaaactctgtccaaaacaccaaccaaaatcacagcttttctcacttaaagaccccagtaacaattccttcgttccaattcgttaaccgttggatcgactccaaaattttactgtaagtctctagtacataagcctatattttgaccgcttggat

SEQ ID NO: 49817 - DNA, 418 bp, Glycine max
  unsure (1)..(418): unsure at all n locations
accttctcctccaagcactttcttagtatcccaactcacctcatnntctatttgcttcaactagtctagctcctgttccgcgatcttgacccacttggctattctttccatagaaggatagaacccagaaaaaaggtatggcttccttcctcctagcaggcatcataaaatccattcgaactcttctatggtcagagccaactaaaaatctctgaaagtgaagcatctgagcgactggtcgtagtattgagcgagggatacaatggcttcaacaaacacttctaccatggccaaatcccagattttcccatacgccttgctgaaggctngacgtcgaacttgatccattcattgtcctagttctcacaagctagctatgttctatgtcttgactntgacatgatagaaccctctttta

SEQ ID NO: 49818 - DNA, 267 bp, Glycine max
  unsure (1)..(267): unsure at all n locations
ctattgttgctcccatatagcacgagagaaattaatgatcttttgggagccttatggataccttttcttcaacagagcccggccatcatatttttttcatcaaacatttagagatcctattaaattgctgccttgtttagacatcatcaccaaactgttgttagcttgagactattcanggtcctgccactctctgtttggatggggatctgaacgaacgacgagttcataaacccctcgaaatgtagatattaagaagagatccta

SEQ ID NO: 49819 - DNA, 427 bp, Glycine max
  unsure (1)..(427): unsure at all n locations
agcttgtagggttaaagtctcacgattgnctcttgctcatgcaacaattgttagccggggctatactagacatcttgccaaacaaagtcaggttcacgataactcgccagtgctttttcttccatgctatatgtagcaaagtgattgatccagtaatgtttgatgagttggaaaatgaggccgcaattatactgtgccagttggagatgtattttccccctgctttctttgacatcatgattcacttgattgtgcatctggtcagagaaatcaaatgttgtggtcctgtttatctatggtggatgtacccggttgagcaatacataaagatcttaaaagggtatacaaagaatctatatcgtccagaagcatctactgttgagaggtacattgcagaagaagccattgaattttgttcagaatactt

SEQ ID NO: 49820 - DNA, 435 bp, Glycine max
  unsure (1)..(435): unsure at all n locations
gtaactcatccaaacatggcaagttaacatgctttattcnattttcttacaaataactatcatgaagcagaaacctagcaaaactgcccatcatatctcccaaaacccaatacccacgaaaatcaagtgagaaataagtctacccaaacctgaaattttgaggtcccacacgtagagatgcgcttcacaactccgaaaatgccttcctttcgcgatttggagcagaaatgatgaccaaaggttggagctttgttggagcttcaatggaggatgagaggggagaagaaagctacgtgagagagagagggagagagcttctgaaattcttggggctgaatgaggagagagagagttgacttttggtttttaaaaaaaaaatttctctctttctattattntatataagctatgccacatgtctccatntgagtggag

SEQ ID NO: 49821 - DNA, 158 bp, Glycine max
agctactggcgtagccgctcatggttcttttaaaatcccaaaaacaaatccctcttattactagctattctgaatgctctacatcctgaatgtacaaccttcaaattgtcgctcgttcccctctttgagaatgagcgaggatcttcataggacttcat

SEQ ID NO: 49822 - DNA, 489 bp, Glycine max
  unsure (1)..(489): unsure at all n locations
acacaaaatactcagcttacaagccagcttccatcaagtggtatcagattatattagtcttctgtangngctctntaaacctccactaattgtcagctntaccttctcctccattggtgtttcttcatttttctccatgtatctcctcacatgtcttgtgctaaatgttgttaacatgattctttagaatttccacctattaatcttgctatagaagctagattngatcttctatggttcaaatttcttgtcttgttcttgaaccatgaattgtgttgagtttacgctcctttgagttatgtcttgctattttattgcggctgatatctacaccatacaattcttagataaacattaaagtagaagaaaacctcataaatctagagtgacttcgtcacctattgttagtttgtcatagaagtcatgtctagtcatgacacttgtcacataagaattcttatgttgngctgaatnttacttttcttgttt

SEQ ID NO: 49823 - DNA, 418 bp, Glycine max
  unsure (1)..(418): unsure at all n locations
agcttgtcgtgccattaccattccggccataataattncgggctcatacacatccctcaacataactcgggccaccatcaaggaggcactatatagacgcggttgcaccggaggagcatccacataagcattgttcacaatttcaagctcttgaaaagatgtttccaatgactcttccacagcttccatatagggtgtagaggatggacaactcattaatatatcttctttccttgatactatatcttcaatttctggtgcaacattgacgggtgatcgacgccatacccgaatcaaataaacattaaaaatgtagtatttaggaagtgatcctaggtcgtctcccaacgagcaatggtcaaccaacgtccataatagatagtcataaaatagtaacgaattgggggggtaatttttt

SEQ ID NO: 49824 - DNA, 427 bp, Glycine max
  unsure (1)..(427): unsure at all n locations
tgtctngtgcctttgnttatgtttcttaaaattatgattatctactntgtgtgactagcaccttggaataaactctataatagagatgtaatccctttgattttagagttgaataatatttgaggtttactcatctgtgtgtgagtagagcatattggctcctctttttggttcttggatcanaacctcattgggtgtgaaaaataatatattttatttcaaaacataaattcgaaagaaaataaaataatcaattctaagatcttgattattagaaagcaaataaaacaaataaagtgacctcaagttaatgaagacaaaaaccatagaactacaaaaataaaggacatatgtccattgtggtccttgtaagtgtgagacattgatagatcggtccatgaaagatgtaaaatttgaatttaatccc

SEQ ID NO: 49825 - DNA, 427 bp, Glycine max
  unsure (1)..(427): unsure at all n locations
agctngngaaatcaatggaatccaagaaactgnttgttcaagtcgntcaattctattcttagaaatgtgacctaagcgtttgtgctataatactcctgagtttgtatcatcaattctaagcttagtaccatgcaatcttgcattaaaggattcaccataggaggctacagtatcaagtaaatgtagattatcattaagcaagagtgaaccagatccaacaatatctgaattaaaagacaacctgaacacattgtttccaaatgaacacaaataacctaatttgtccaaataagaaacagaaaccaaatttcgtctaaatgacggtacaacaaaagtgtctttcaaatccaaataaaaaacagtacataataaaaatctaaagtgccctatagctttcacttccaccgatttaccatctccaacatag

SEQ ID NO: 49826 - DNA, 399 bp, Glycine max
  unsure (1)..(399): unsure at all n locations
tactcagctataacataaacttggganagagttctagggtcaagattgttatgtcttcaagtntaagggtacttccttcactaaagcggtgatctatctccacacatactttatcaatagcaacataataaatcttcgcacggtaatgatgaagattaatgatagtcatcccttctgctcttgaacgaccccgaaccggtattgcgtatccatatttggtaccggaatactgttagctacacaaaatccttggacaatcgcaaaataattattccagccactctctctcattgtgcccaaccgagctttgacaacatcaactaattccatggcattcacaataataagatctgttctttcgatacatttgatagctcgtttgtataccaaacaacttta

SEQ ID NO: 49827 - DNA, 428 bp, Glycine max
  unsure (1)..(428): unsure at all n locations
agcttcatccgcagatccctcatgtaagattagtcntttactaaacaacattattgtaacagcataattaaaaccaaaacttaacccgcagatccctcatttaaagctaagtttcaatcctgcttcaatcaagttctaaggcaacagtacattttccaatgctaaagtcacctaactgtgcacacaaatgggtgatcagaacanaagcatacaaacatttagcattgaaggaagcattgaacaaagaaaacatattcaattagatattaggtatttacatcagctgttcagtagaaatccccaactaaggtgtttagccagccattacaaagaaaccctaacaataaatgagattaaaagcagagaatgatagttccttacacaagaagggggattcctcctcctcttcttagtatctcacactcact

SEQ ID NO: 49828 - DNA, 181 bp, Glycine max
ctgcttcaatctgcaattttggttctgcttcaatctacaaaggcattctctactgactgatggaagactaagtctccagcgatgatatctcttgagtgtcgcaacatgcccttctgcaggcgagcgaggcgacgctcactggtgcgctatccacaggacgaaagatgcgtggagatgccac

SEQ ID NO: 49829 - DNA, 416 bp, Glycine max
  unsure (1)..(416): unsure at all n locations
aataatataacagaaacgtttttgatttatagtcanggcaccactcgccgncttctcactgagttcaagtgccccggcagtgatcgttgattcatcatgtgtcagttcccccgcttttacatcctaatgcaattcagtcatgaatagcagcaacaaactatcagaagcatgaatgtccatgcgcatgattccatataaccagaacagaagtagattagatagtccttagtgacatttcacacaaactacatattttcattgaaaaagaaaagctagaagagcagcatacttgtgaaatacattacacaggtttcactcaactacgagtgcaaattaattgacaaaaaacatcatacacataagatagatggctttacttcactaaaaacatcacataactgtgagacagacctctt

SEQ ID NO: 49830 - DNA, 335 bp, Glycine max
  unsure (1)..(335): unsure at all n locations
ataactacctccgctcacataacatttgttcaacataactgtgtactttaatcngctgcctttgtaaccagatttgaaagacttctcccattattgatgatagttcaccctccaaactcaagtttgatgactgtctgtcttccttatgtagatccatatcataccatcccagatctctaagttcggaagtgagatcattcttgtctctaccaacatgagaaagtgactgtgtttttctgtcacactctgcaggaatgcctttgttaagcacgtcagacaagtttccataaggcgaactcttcttatgagactntcttaactgaatatccaaagca

SEQ ID NO: 49831 - DNA, 428 bp, Glycine max
agctggagaggatgcttcaatggaggaaaataaatatggagagaaagagagaggggggagcacgaaattgaaggaataaaagaggtatagaagtggaactttgaagtatgtctcacaagactctcattcatcaaagttacaacaagtgttacacatgcttctatttatagactaggtagcttccttgagaagctttcttgagaaaacttccttgagaagcttctttgagaaaacttccttgagaagctagagcttagctacacacacccctctcataactaagcttacctccttgagaagcttccttaagaagattcctaaagaagctagagcttagctacacatacatctctaatagctaagctcacctccttgagatgagaagctagagcttagctacacaccccctataatagctaagctcaccc

SEQ ID NO: 49832 - DNA, 347 bp, Glycine max
aacatgcaaactagataatgaaatcaataattatttactgaaacataaatataaacctaaattatataatgtactaaatgtagaataataatacaagtgttcaaaagataggaaaatagaagtcctgtcatgggtcctgtggtgcaaaatgggcaaaatccatggctgcgacatcatcctcatcctcaaagagctccaacacacgcgtgcctactagtgatgcctatggggaagacaacttcaccacaagtgtggtcactggtgatggctgtcgagttgtctctggagtaacctctgcacgccctcctgagtagatgggcatactctggatctttagtcaccctttg

SEQ ID NO: 49833 - DNA, 429 bp, Glycine max
  unsure (1)..(429): unsure at all n locations
ctgcagctttcttaaagggaaggaatgatttcgtggtatattgatccagngtggctccacaagcggacatagaacttgacggacaccatttctgaaatgaggaacaccaatgccgctttgaagcgatcaagagttggtctttcctcatgtcataccctaatttcgaccggggacctttgcttgatgacatgcgaccattctttggtccttgtgaggtgcttggcacccatcattaggcaatttatgaaattccaggacatgccgaaaaaccaaaaaaatattgatgcacaatccgtaagtttccgtgacacaccggaaatcagatggaagcatcgttgcataattaagtgaggttccgcaacattctgcaataaaaaggggatgattatgttatccgcaaggttccgtaacattacggaaagaatacaa

SEQ ID NO: 49834 - DNA, 391 bp, Glycine max
  unsure (1)..(391): unsure at all n locations
tgtgctcctctgctgaccaccatacatattttggcccttccatgcagcaacctggagcaattgagcagcctgaagcttatgcagcaaatatatacaatagacctcctcaacctcagcagcaaaatcaaccacagcagagcaattatgacctnttcagcaacagatacaaccctggatggaggaatcaccctaacctcagatggtccagccctcagcaacaacaacagcagcctgcttcttccttccaaaatgcatttggcccaagcagaccatacattcctccaccaatccaacaacagcaacaaccccagaaacagccaacagttgatgcccctccacaaccttccctcgaaaacttgtgaggctatgactatgcgaacatgcagttcag

SEQ ID NO: 49835 - DNA, 274 bp, Glycine max
aaaccggacgacctatcagcactctgacactcaccataaaaacaagaccacatcaagaggcttgtgggggtgccactatgaattttagggatatggaactgccttggtaacaataccatggagagaataatacaggctcaaaaggagacatgaaataaaatggcctctggtatcgataccagggtgtaatcattcagactaaaaaggaacaggatgtagaggccttggaatcataccctgggtgaaacatacacaaaactggcactgaatcata

SEQ ID NO: 49836 - DNA, 392 bp, Glycine max
  unsure (1)..(392): unsure at all n locations
ctctagcttcacaacgaagngatctcaaagaaacttattcaggaagttctcttaagaaagcttctcaaggaagctacctagtctataaatagaagcatgtgtaacacttgttgtaactttgatgaatgaaagtcttatgagatacactncatagttccacttctttccctcttttattccttcaatgtcgtgctccccccttctctctttctnttcctccattaaagcatcctcttcaagcttcttatccaaggcaattcttggtggtgaagctccttctttcttggcttattccctagtggatggtgcctccactactctcatctactttgccttccgctgcatctccatggtgaacaatcaccattgaaggacctcattggagctcaaag

SEQ ID NO: 49837 - DNA, 415 bp, Glycine max
agcttgaaattgaacaacggaagctctctttattatgagtggtcataaattttcacacagatgtccgattcggggaaataatatatcgagacgcacgaaattgaacaacggaagctctcgagaaatttgaatggtcataacatttcactcggatgttcgatccggggacataatttatcgagacgctcgaaattgaacaaccgaagctctcgacaaattagaatggtcgtaacttttcacgcgaatgttcgattcggggacataactcatctagacgctcgaaattgaacaacggaagctctcgagaaatttgaatggtcataagttttcacacggatgtccgattcgggaacataatatatcaagacactcgaaattgaacaacggaagctctcgagaaaatcgaatggtcata

SEQ ID NO: 49838 - DNA, 414 bp, Glycine max
  unsure (1)..(414): unsure at all n locations
ttagagtttatctcttttatcttagtgagagtgattctcctaaattctcgagtgattcaagaacaccctggctgtatcaaaggacattcacaacctttgcgtgttgccctcgctggaaagagtgattctttccttcctttcatcttcacccttgttctttcaaaccacaattccagaaaatccacctctgcccagaattatctcgtggccataactcccattntacgcactcaaattaagtgattcttgagcctaaattgaatgtcaaaacgagtcctgtcacctcgttttggaagtcacctcattggagccctttagcttcaggtatctccatttctatatttctgtccagccaccacttaaccgtacttttaccatcccattcagtccatttatgccaagaaccaccttaat

SEQ ID NO: 49839 - DNA, 247 bp, Glycine max
ccacaaagctcaagtgaatcacagaacatccatctttagtgaatcagataacatccatctcatgtgaaacagagaacatccatctgcatgaaatcgaaaacaaggtaaaacttctagagtcatgaacaacgcctacctccccgaatcaagagtcgggattcacgatctcacgaatcacgaacatgattcacgactcatgacttccgattgaaaaaaagactctctctaagatcagattaaaaagttg

SEQ ID NO: 49840 - DNA, 426 bp, Glycine max
  unsure (1)..(426): unsure at all n locations
agctttgagtgaaaggatgtgactctttcctttaaatttgaatttcgacgttcaaggacactggtaatcgattaccaaaacattgtaatcgattacagccttttgaaaatatttggaatgttgtaaattcagtttgaaaacattttcaaacttattttgctactggtaatcgattacaacaatatggtaatcgattaccagagagtaaaaactctggtaaatgttttgtcaaaaactcatgtgctattcaaagttttgaaaaactttttaagacttatcttgattgagtcttttcttcattcttgaatcttgagtcttgaatcttgatcttgattcttgagatcttgaatcttgattcttgtttgtaggctttcttcttgagtcttgaattcttcttcattcttgaactctntgacttgttcttga

SEQ ID NO: 49841 - DNA, 386 bp, Glycine max
  unsure (1)..(386): unsure at all n locations
cagcttcttgcgtagccgctctnggtgctcagaanatctcatatacttatccctcttattactagctattntgaattctntagttcctgaatgtacaaccttcaaattgttgctcgttcccctctttctattctgcaaaaaagaaaatcaaatgctgtcaaaacatggatgaagtcctaagaaaatcaatatcaaagaaaacatggatgaaatcacaattaaaaagcacaactacctatctttcagagtcctttggttaatttgtcttgtctccttatgtggtgggattntgtttaataatcttatacttttgccttccataaaaaacttatcactaatcctcttttcattaatcccaatttgtatgttattgtataaaagatcat

SEQ ID NO: 49842 - DNA, 419 bp, Glycine max
agcttccacaatatgcaaccttttcaatacttttatcatgaagctaccctaaaccaagaaaatagagtagaggcagaaaactctgcccaaaactcattcaaattccacaattttgcctactcaaataccccacaaacattctcttcgatccaattcgttaaccgtcggatcgccttgaaattttactggaggtttctagtacataaatctacattttgactggtgggatctgctaaaaaatgcctgcaacatgaaatgttctacctttcccgtgactagtgctgcacaagcatttttctgcacatttggtcatgtttgctgcacaactggacagcttttgctgcacaatttggcagatttcgaaatccaacttgcccacatccaattttactcagattgaatcctacaattactaaatc

SEQ ID NO: 49843 - DNA, 353 bp, Glycine max
  unsure (1)..(353): unsure at all n locations
acacatagactactcaagcctntntatttcagtagatgaagatgaatccgtgttcatctcatgtactcctctaagaacaatagcatcatttcttgcactaaattgttgggagttggaagccatcttcttaatcaaatacctagcctcatcaagggtcatatcaccaatatctccaccactggcagcatcaatcatactcctctccatgttgctaagtccctcatagaaatattaaagaagaagttgctcataaatctggtggtgagggcagcatgcacacaatttcttgaatctatcccagtactcatacaagcgttctccaccaagttgcctgatgcctgaaatgtcttgtc

SEQ ID NO: 49844 - DNA, 409 bp, Glycine max
  unsure (1)..(409): unsure at all n locations
agctntcagcagggaagctaatgtgttttttattctattctacacaggattggtgctgcatactgggtacccaccaatcatacttccactgttgccacaggtttgggtaaatcttctgtatgctgttggaaccaaatcctaatttaatttcggaaactatattgttgatcaaactgctaaccattcataatcttttgctgacaaattacccattgccttccctactgtattgcggggcattatgatgactcaacactcccaatatgttaaactacactgactctgtgatgaagaaagaatctgctctatacctgcataacaaattgtttgaggggacacatgtcccatacattgtctcgacatcaaggatagctgctttacgcgttgtgtccaaagatgccttgattgc

SEQ ID NO: 49845 - DNA, 295 bp, Glycine max
  unsure (1)..(295): unsure at all n locations
cggagaggatgcttcaatggaggagaaganatatggttagttttatagaggggggagcacgaaattgaaggaagaatatgggagagaagttgtactctgagttgtgtctcacaagactctcattcatcaaagttacaacaagtgttacacattcttctatttatagactaggtagcttcctcgagaagctttcttgagataacttccttgagaagcttctttgagaaaacttccttgagaagctagagcgtagctacatacacccctctcataactaagctcaccttcttgagaa

SEQ ID NO: 49846 - DNA, 443 bp, Glycine max
ttagagcaccgcggctgcagcttataaactcttaatgagagattttatattatctgattgcatttccatgttgttattgcgtgtttctatctggacataagaaaagttattaagaccaaacaaagtaagaatccagtgctttgaaagaactcctacacctgaaattatatcacctagaaaagcaaatagaactgaaatagtgaaatctcattaagcagaaagcaacttcgacagcaccacaaaatggtcactgtagaaataattgtgaccataattcaactttacaaaggtaaaatccaattcatattaatatcattttaaactcaatgaaaatatttggcatgaaccaactgtcccaaaacctattttatattttatttttagagaaaataagacaacttatgaaagagaagacagtgagtatatacaatgggagaaggaca

SEQ ID NO: 49847 - DNA, 438 bp, Glycine max
  unsure (1)..(438): unsure at all n locations
nntaattcctataatttggtnnttttttctgtggcaattgtatgtttntattannaaattttggtaatttgatcaatttttcaaatttgcatgttttatttattttattttaatccaattaaatcacatacctaatatattcacataagatagaattaaaaaaaataattaataaaatataaaaaaaaacattagactaaattaaaaattctctaatgtgtatatttttacaaccgataatgtgtcctataattcactggtgtatgaaagttaggctttataaaaaaaatgggattttnntttgaacagctttataaaagcggtgagactaaataatttatgaaagttattcacactattttgaaatggagaaatattctaacatatgactaaaatgtatcacaatatttaaagatggtgcagctatatattattata

SEQ ID NO: 49848 - DNA, 425 bp, Glycine max
agcttgcctaattaacctgaaattgagagtaattgtattttaaacacacaaaatggaagtactaagtatttattacctatacttaacagcaaatacttataacactacaaaataaccataaactggggaattttgatacaatttacactggttttatacataaaagttaatcgtattcatcgactaacaactcccccaaatttacagttttgcttgtcctcaagcaaaaggtgaacagttcacctgtcctcaagtgaccataacatgcagtgatcttgtacaaaggtgtatgcaacaaaagttactgattgcatgataagagaatgatgcaaaaagagaacagttcacctgtctttcccaaggtatgcagttatccaaagagaagaataaaatgtaacctaaacaattagatgaagttaggcata

SEQ ID NO: 49849 - DNA, 441 bp, Glycine max
  unsure (1)..(441): unsure at all n locations
ctgcacagaagggcatatgtctatgtggtggtcggtagagaagcataaaccacagagtctggtgataggtgcagatntttgattcacggccaggttggttaccatgttaaccaaggcatctagtttaccttcaagcttcttagtctcggctgatgaagatgaattcgtggctacttcatgcactcctctaatgacaatagcatcacttctagcactaaattgctgggagtttgaagtcatcttctcaattcaattgttaggaaaggccttcataaatatgtgatcctcctggacatctagtggtttcatggtggagcagacaatatggaattctttcagatacttgtgcgggtattcacctacagcgccatgaaacttttggagcaaatggatcagtccagttntaagaacatatgggacatcctcatcatggtattggat

SEQ ID NO: 49850 - DNA, 401 bp, Glycine max
agcttgccacctagctcgcccaggcgagtttttttgttttctccagaaggcaccaacttcctggaaggcccaaatgggcctgtttgctatttgcaccccctcttactaaatacacccccttggctttttttgtcgattcttttcccataacattaaggaaacttatgaatctcgtgacgatactctgtcgtctttccttaatgttacggaaccttacagaatacgtaatcatcccttttttgcctaccggaatgtcacagaactttacggattatgcatttacacttccttttgacttacggcatgtcacggaaattcactggttgtgcaacaatgcttacttatgacttccgacatgccacgaaacttcactaatctgccaacgaggggtgccaagtacc

SEQ ID NO: 49851 - DNA, 368 bp, Glycine max
  unsure (1)..(368): unsure at all n locations
ggtggtccttcccttttgaccagctagtgaaaatggaggaagaatgagcaactctggtgagttttggatnttaaatggactcgcagaacaagcttatagcatgttccattggattgttgtgtaagcttatcttagtcactcaatcttgacccatgaatgacccttgcttagtcatggaaaatgtgtacatcactaccagatgtggtgcacatatttttctctatcgatctgaccaaatgtggtgctacccttatcttacaagggtatgccctctattggtggacctcccttgttcggatagaatgatcatggggatcctctaatagaggtattggatgatcgtaagagtgcccttatgaagagacaca

SEQ ID NO: 49852 - DNA, 438 bp, Glycine max
ttaagcaccgcagctgcaagctggattggattatttagcctgagtaatagataagtgcagaccttgcgctaagtgtcatctcttcatgcgctaagctgagcttactcacgctaagcgcaaagacccctgattgattggctgaatggttcagctaagagcacatcgctgcactaagcccaacatcttcactgtaagttgcaccttaagcaatgggcttagcgtggatgaggcgctaagcgccacttcctctttgtgaaaatttattatagctgcgctaagcgtgccatcctgcgctaagccacagattcattctgtaagttgagctttgaagctaggcttagtgggaaaggacacgctaagcgccaacatcattttgttttgaaatcattggaagtgcgcttagcgcatgtagtggcgctaaacttgaatcactcactg

SEQ ID NO: 49853 - DNA, 410 bp, Glycine max
  unsure (1)..(410): unsure at all n locations
gtttcacgattgtcatgtgctcatgcaatatttgttaaccgtggctatacgagacatcttgccaaacaaagtcaggttcacgataactcgcccgtgctntttcttccatgctatatgtagcaaagtgattgatccagtaatgtttgatgagttggaaaatgaggccgcaattatactgtgccagttggagatgtatnttccccctgctttctttgacatcatgattcacttgattgtgcatctggtcagagaaatcaaatgttgtggtcctatttatctatggtggatgtacccggttgagcgatacatgaagatcttaaaagggtatacaaagaatctatatcgtccggaagcatctattgttgagaggtacattgcagaagaaagccattgaatttgtcagaatactt

SEQ ID NO: 49854 - DNA, 416 bp, Glycine max
  unsure (1)..(416): unsure at all n locations
gcatgcaagcaagacagacaaataggagagggagatttatattttcatctgnacaagacacggacagcgcactgagttgtaaagcaattcgtctccgcgtgaatgaactctgtgcaaggttcactatgagtacacatatcccaagggatgatagcacactaatctagaagatgatgataacgcttatcacctttaacaaaaggagtttttaccatttttgcttaactctactttagtcatttctagctaaaaaatcaaaaggcaaaatatgcatatatggcagcattatggctatcaaatgattattcatgttatcaatttgatcttgtcaacattaagcctaaccaattttcatatgaagcaagcctaaagccttatatctcctcgcttctacaagaaaaaacaaacttagaacc

SEQ ID NO: 49855 - DNA, 277 bp, Glycine max
ttgactaggaacttgacacccttcaggttgagtcatacatatctcttcctctaaatcgtaattcagaagagtagtcttcacatccatgtgatgaatgactgtactatgaatgacaactacagctatcaacactcggataaaggaaatcctatgaatatgggcaaacgtatcaaagaaatctatgtctggtaacaatgtcatcattgtcaacgccacaacactgacgccatagagattcttggcgatagagaataagtatacgacgaactaaagaata

SEQ ID NO: 49856 - DNA, 322 bp, Glycine max
agcttaccctttcgcgagagagtgtattcttttctaggcacacacacggaaagatacatgttctcccacattgaactttaaaggccgacatctattgatctgaataagacacctgtctactctgaacagccacgcacgtgaactctgattatctacaccttcgcaactactacttgaataatacaacgcctccaatctaggctctatatcgtcccaccacccaagtggagagctacaacagtctgccacacaacgtctcatgacgtacccttagaccactgcataggtaactaatattatacgcaagctcagtcgaaggcga

SEQ ID NO: 49857 - DNA, 470 bp, Glycine max
  unsure (1)..(470): unsure at all n locations
tgtaaggcatatngctccttatgagtctctgttgttattagtnacataataagtnacgcgtctaaatgactcaatgataattgatacaccaaagaagcttacctctccatatggtcttttttgttcttctgccatgtttttccactcttcagatgtgatttttggaacctgaatttaaattatgaaccctttatatgtgttctctaatcatgattaatgaactctaagatcacaattcacatacaatggtggcacgcaattacctccaacaaattcttgtggctgtcagtataagctgctctcctatcattagtgaaaaacaaataagctgacatggggtgctttggtttaatggatccttctctgtcctgtgaacatgtataaaacacatctataaccacacaagagagaacaatgttccaagggaggtttatgcacttacttgtcttctttcatattttctgctattg

SEQ ID NO: 49858 - DNA, 436 bp, Glycine max
  unsure (1)..(436): unsure at all n locations
atccttaagtcacctgcggcatgcaagcttgcatccgctaaaagaaagtcttgtgtatttaatttgactgaaaatgttagtcagtttgtcagattgattgcgaaggaatgcattgaccgtattccgctgagagtgtcatccttaaagtttgagagaaacgactatcatttagtactgaatttttcatgaatctttgaagtatggactgaatgcatgaaattaaggatgatgaaggccatgtttgattgtgatagccacttacccaacaaggtgaccatgtgcttgaatggtctatcccttgcacccagtttgagctgaatgaattattgattgattgattgaaccttaagcctatacaatgttatctcctgctaccttggcttgcgntgttggagagcatcatccacaacaagcttggttcaaagcaaatttgtcc

SEQ ID NO: 49859 - DNA, 466 bp, Glycine max
  unsure (1)..(466): unsure at all n locations
cttcttatccaaggctcatcatggtggagaagctccttcttctatggcttattccttaatggatggcgcctactctcacctcttttcctttgtcttccgctgcatctccatggtggaaaatcaccattaaaggacaccattgaagctcatagatccagcctccatagaagccccacaagcaagcttccatcaagtggtaatcagagcacaagagcttcaagttggtgctccttagacctccattaattctntttgctttaccttctcttccattataggttcttcattgttctccatgtatctcctcacatgtcttgtgctaaatgttgataacatgattatttagagtntccaccgattaaacttgctataaaagctagatgtgattttcaatggttcaaaattcttgttcttgttcttgaaccatgaatngtgtcgcagttacgttcctttgagttatggcatg

SEQ ID NO: 49860 - DNA, 425 bp, Glycine max
  unsure (1)..(425): unsure at all n locations
agcttctacttcttatctcacatacaacttaggtctgtatcacgcgccgcaggtaagaatagncacacaagctttatcatttaaaattatatggtgtgctcttctatatctgtaaatctaatgattttttctgggagggggagattgccttggtgatattgcagatacaagcccatgatattcatgcctgtaatatagtatggctacgtgaaaatgatgaagtgccttgtgaccttgttttgattgtcacctctgatcctcaaggagtttgctatatagaggtaattatgtcgtgaaacatgctaaaactggtcttctctctctgcagcattgcagggaaattggaatgtcattccactattcttctctttttctctcatttggggcagacatnttattatatacattttaaggaccttatgata

SEQ ID NO: 49861 - DNA, 347 bp, Glycine max
  unsure (1)..(347): unsure at all n locations
cattccattcttacccttaatctctttctaactcaagtataaatnnttccccttacccactatatnttgtcgatcaatttaatgattcattgtcttcaagtggtaggatcaccatcaccctctatttttgaatgttgacaatatattgggttagtgttacgggaggatttcttacttgcgtctttgattggaatcgctgactctgtaattgggtcagttcgaaagtttcaaaagagggcagaggaagcgtggattctctattcttttgtttttaagggtcaaggaggaaaattctagctttgttattgagggggatgatgctgaatttacctggcagttcatgatgg

SEQ ID NO: 49862 - DNA, 424 bp, Glycine max
  unsure (1)..(424): unsure at all n locations
agctntgcggtatttgtcttcgccgtcgatagtatcgaagngggtctgaaaagagtcaaatttgatcatccttctttgatgaatgagaaaactggggcaaatgaagaggatgagaatgaggaaggaacccatgttgtggctgccattcctacatggtcaaacttcccaccagcccaacaatgtcatcgctcagccaatatcggcccttctcattacccaccacctagtcgtccacaaaggctatccccaaatcatccacaaagtttgttggcagcacatccaatgccaagtgcaaaccaaaacaccaaccaagaaatgaattttgcagcgaaaaagcctgtagaattcaccccaattccggtaacatatgttgacttgctcccatatctacttgataattcaatggtagccataaccacaacca

SEQ ID NO: 49863 - DNA, 399 bp, Glycine max
  unsure (1)..(399): unsure at all n locations
tcgtgtgtgcatntgtngaactgtgtagaatgtanatatcttttngtctatttgcattctntacactgcattctaagcacccacgggattgagtataaaaggggccctatactcgggttcatgggacattaaggagtggaggtgaatctatcatcatgctaggtctccgacttgcttgataatagtgaaacctcgtctagagctttctctctttataatgtgttgtcgatggtattccataccgccacaatattattatcttgagcgatgataccctctaaaaacagccgtgtgattattaattgttggggaatattattaaaacccctagatattgcctattagttccaactaggcaaatagcaacacgctcctgccattgttctcatcattctggaa

SEQ ID NO: 49864 - DNA, 422 bp, Glycine max
  unsure (1)..(422): unsure at all n locations
agctntgaggaggctaaaatcaatgtatgtttctgtgattgtgaaatctctaagagtttgaggtcagatggatttaatttgaaattcatcaaagcctcttggagcttactgaaggaagatgtcaaaagatttcttaggaagtttcatgttaatggtgtgttccctagaggtcgcaatgcatcattcatcaccttgatacctaagattgaggatccacaaaatctgggggattttaggtccatttcactggtaggatgtatgtataagatccttgctaaaatccttgcatgaagactaaaaggtgctttggtagtgtgattgacaaaaggcaaatcgccttcttggaagggagaaacttacttcttggagtcttggtggcaaatgaactagttgataaggcaagaagaaaggaaaagaagtgc

SEQ ID NO: 49865 - DNA, 388 bp, Glycine max
  unsure (1)..(388): unsure at all n locations
actaagcttctgactgaaccttactatgactcaggtcttgattctacataactggcatgcataattgtattaaaaatgttaaagtcttgcctganaatgcagcaactaggcctaggagttcctaagtccaatcaaagccaacacttccgcagaaagcatgcactattgctgaataatcacagcaacactttgagagtcatatataaacataaagaatcaattaatagtgaaatgggatttatttatttcagtaccaacatgagaataaagtaatattatatctatggatgagaaatagtgaatggcatacctgatattcaagcaacggtgagggtttgctacattgaggcgtaaatacccttgtttcgtctatgttgatcggaagcag

SEQ ID NO: 49866 - DNA, 362 bp, Glycine max
  unsure (1)..(362): unsure at all n locations
agcttagccttagggagttttcttgtgttcatgntgctccccctatctctaacagttacgaccattgtaccatgcgaaaggtgtaatcttgatagattatgtgtgtattctgttgatatctttatgtgtttctgttgacgaagtaggacgactcacaccttaggtttgtttatctatgaccatatggaattggatccacttattgagctggattgctaccttcgaggtatgatacacaatgtgattaaatgtgtggatcacttacttgggtacacttgttggacacgaacacctattgactcatgcttttgtgtatttccacactatattgggtgttttagatgactgctctgagttgatga

SEQ ID NO: 49867 - DNA, 391 bp, Glycine max
ctctctgagcgcagaccctcatttctactcttctccttaacagcgcccaacctccctaagacttgaaatcctcataactgtgctgtttcttagccaaattacttcaaacaaagcccaatcttcttctttgtcaattctctacaaagcccaccgagtgaaaatagctgagacaaccttcaatggaagaatcttggaacaaaacagtagggatcctcctccaccaccaccactgttagctcaccaccggcatagaaccttctgtgacccaccagcaccaatatctacgtctctttcatctacccagtcatccactttggtttccttcgatgctcaacatcagaggggttattctcaattctgcagtgtgtattctacacctaagtactacata

SEQ ID NO: 49868 - DNA, 422 bp, Glycine max
  unsure (1)..(422): unsure at all n locations
agctntaggagaaaccatatatcnatgnatttcctaaacaaaaatcaattgaggaagcttcgccgagtgtccccattgaaaaacctttattcaaacctttcaaagttagtgataaggctaaacgaaaaattagggaacttagaaaaactaaatccttaattgaaggcgtaggtgacaatcatagcgaattactaaacaagattagtagtttgcttaaggtcattccagatactccccaagcttcggaaaatacttccaaaatggtaacaagaagtacctccaaattaattaatgttattaatgaagatagtgaccaaaacttagataacacaactgagataggatcagtgtcagaaaagaatataaatccattaaactccaaacactggaaaactccctccaaattatattattaacgtcca

SEQ ID NO: 49869 - DNA, 454 bp, Glycine max
  unsure (1)..(454): unsure at all n locations
acacataaaactaagctaatcccctgaaatgagggtaggagatgtgtcctgtatttatctaaggactactntccttagcacacttatgttcaatatgttggatttgccctggagaattgccctgaattttctccttngaaaactcatttatttggaaatccttcccaagacaccattgaaccactgatggaggctctggaggaagattatatagatggaaataagataaacgaatcaaggcagtttattgaaggagtattggatcttgaaaagagaatcaatagactagatacattgacttagaaattaaatataacaaattntgtcattgttgaacaaattattagcttataaaccaaatctttaccattntgtaatatgttntacttatttctgatacgagcataataaaatgacatgaatgttcatagaatcaaactacaacatgatcttg

SEQ ID NO: 49870 - DNA, 429 bp, Glycine max
  unsure (1)..(429): unsure at all n locations
agcttanaaaagtaaattaaataaaaagattttttgattattttcaaaaaaattcactcaatttttattattccaaattaagagtgcaaaccataaaaaataaaaaaataaattaaataaactttttatacaaagagtaaaaaaggagcacataaggtatcaccaaagtgaagggagaatcctaccttggacaacatccaaataataatatttatttgcagcatatgtctgtatagaaatatatttaaatatttattaatatatttactaacatataactattaaaatttaaattaaataattaataatatattaaaattttaaaataatataaaaaaaaattatcctctgaattataaaatatgaatttgataaaccagggataactaaactataattcttactaatgtcttgtatctgagatacttt

SEQ ID NO: 49871 - DNA, 333 bp, Glycine max
  unsure (1)..(333): unsure at all n locations
ataccaaacatggatcccctgtgacatatttgaggatttggtctttaactgaacccagtggcactgtgtgatacatgtagctaacctcacctaatggaaaaaagctcttgttgttgtattcagttgagaaaattagcaatcaacattgtggggcaaaatgaggtaagtgtcaaacatacantttacaaggaccaacacattagtaattttcatttgaaatttctagattgtagtagttaaaggattaaatacactcttttcagaactaaatgcaaacatagacttacataggaaattntacctcattgacagatctgaatcccgggcagcttc

SEQ ID NO: 49872 - DNA, 426 bp, Glycine max
  unsure (1)..(426): unsure at all n locations
ctgcagcttctgtggaaagcatgttcggttcctagnttatgtgatgattacacaatacttcaagcccttttcagccttgacatggtgattcttttcttagccacaatttgtggacttggtggtaccctcactgtgtcaaataacttaagccagattggcacatctttagggtattcggcacatagtataaccacatttgtgtcccttatggccatttggatctatatgggtaagattgtacagggagtggtctcaaaaattatcatagcaaaattcaaagtccctaggcctatgatattcacattaattcttgtattaccttgtgctggttaccttctaattgctttcgatgtcccaaatggtctctatgcggcctcaattataattgggttctgctttggggctaactggccactactatttacc

SEQ ID NO: 49873 - DNA, 402 bp, Glycine max
  unsure (1)..(402): unsure at all n locations
tctcgaggaagcctcttaatgaagcttctcaaggaagaaacttgaattctgtcttggtaaaaatgcttccccaccttgttaaccgttggctcttctcaaaatttggtctgccgcttcacagaacacttgtccatgatctgaccgttgggatctttaagaagatgtctggagtgtgtgcaatgntttcgcttccgagagcattgctcacttgtgccgtttgagccttgtagtctaagtacctttggaaaaatgccatttcttcccctttctttcttccaaaaccattttcaacattccaagatctttctgcatcacccacagccaccattagccaccacaaactgtcgttgttctccattgaaaccccacaccgagaggaacccttcaaccgaggcgggatct

SEQ ID NO: 49874 - DNA, 389 bp, Glycine max
gcagctaaaggaagtgaagaagagcatgtgattatttgtctccgcaccgaaagggaaagaggttcctcatattcctgaaaaatgtaaagatccaggtacattctccataccttggagtatagggaacaataagtttgacaatgccatgctaaatataagagcttctgtcagcgtaaagcctctgactatatttaattctttatctataggagctttttagtcaactaatgtggtcattcatttatctaattgaagtgttgcctatcctgctgtgttcatacagtatgacttagttagagttggcgaagctcggacttcctgtgttctgggaacctctccttactcaagtgtacccgcacccaatcacccggttcaagcaggactttatt

SEQ ID NO: 49875 - DNA, 112 bp, Glycine max
caacagcgagagggacaaaggggaggggttgggtagcaccagcgacaccacccaaccccccccggcactaagacccgaccccgacccgaacggccccaccgggccaaccccc

SEQ ID NO: 49876 - DNA, 423 bp, Glycine max
agcttcaatggagcttacatcatgtggtaactgatcttattcatctaggtgatgttcttttgcttcctctatctttttgttcggcgaattctctttaattcctttttcttcatcttattcttcatgtatatcctccattgtctagtggtttggtgctgtttagagtagattcaaaaaaaataaaccgattaaatcttagatttacacttgttcttgcatttctatggtttaaattttgtagatctactcttgaatcatgtttttgtgttgattttaggttctatcacttttcattcataatattcttgtgctgaaccttagatctaaattttattccaaaatattgattagaaaaaaaacacaaaaatataagtgtaaatcacttaatccatgttgtcttagagtcatgtttagtcttagtaa

SEQ ID NO: 49877 - DNA, 317 bp, Glycine max
cttgcatgagacgctcctgtgagaagacatgcttgtgaagctagagcgtaactacacacacgcctctcataactgagctcacctgctagagaagctaacttaagaagattgcttaagaagctagagcttatctacacatacctgtataatagctaagctcacctccttgagatgagaagctagagcttagctacacaccccctatgatagctaagctcacccccatgacaaagaacatgaaaataacaaaaaaaagtgcttattacaaagacaactcaacatgccccgaaatcaaggctaaaaccctatactactag

SEQ ID NO: 49878 - DNA, 436 bp, Glycine max
agcttcatgataaatgttatcaaaacaagccctccatttttagcacttataacataagctctcatgtaattagctcttattaaataaatgtttaattaagttgtttaaccaaatatgcccatttcatacaggaattgtagataaaaaaagatatctagaggagacaattaacataaaactacacaagaatcacataaagtacattcatataatagggaaatttgtgctgacaacgatgcctcatagttgtaaactaaagctacatataatcagcattatcagaataagcataatttgtttaatctaagggaaagatcattatgtcttgtagaattttaaagtttgagataaagaaacactaccaaattctcaatgtagctacgaatgcttaacattgatgatggaaaacacaagacataaagcggttatatgattt

SEQ ID NO: 49879 - DNA, 430 bp, Glycine max
  unsure (1)..(430): unsure at all n locations
cctcagttaacaaggtttatgtagcacatgtctttcgtctatttggaagtccataataattgtattttattcttgtatttttttcagagctcaaggagtgttcctatgcatatgcatcttgtatcaattaatgctgctntggcttcttttctttttacttattcatgctgtgtaatcactaatactatagacaaaaagggtattcaaatcaaaagcagcacaaaccattaaatagaatctgagttctaaaagataacttggtaatcataaaatcaaaaggatgaagcagaatggaaaaaacatattangaaaacttattaggaccttgatgcattcctttctcgtcttctcattatcaactactactgcatccataaatntacccatagcaacggtcacagctaggttatacttcttttgtgtggcctac

SEQ ID NO: 49880 - DNA, 432 bp, Glycine max
  unsure (1)..(432): unsure at all n locations
cctgcggcatgcaagctngagcatggtgactaaaaggttccttgattcttctngaggatcgaacgaatacattcggcagcatgtgaaatatgatccttctgcagcgtatgctacctattactggatatctgcataataaataatgagctttagataatgagtgaccttttgagatgaaattcaaccttctcaaagctgcacatttatcttaacggtacagtacaactactatgtaaggtctcttgtagtctacctcacatgctttctcaatatatgatttggatgctgggaattgaaaaatgatttaaaaatattcttatgataattaatattttcttttaaaaggaaatggcggagagaaaggcaaaacagagtaattgcataccagaatgtcactatctatttatggcaggatccaatcttcacactatg

SEQ ID NO: 49881 - DNA, 398 bp, Glycine max
  unsure (1)..(398): unsure at all n locations
gtgagaatgaggagctagncgtagatagacaagttttgatatgcttctccattggaaaatatgttgatgagatactgcttgatgtagtccatatgaaggctagccatctcttacttggaaggccttggcagtataatagggatgttatccataatggtgtcacaataaaaatttcatttgtacataaaggataaaggtgaccctcacaactttgtctccaagtaaggtttgtaaggatcaaataaaaatgagagtgaaaagagaacaagagagaaaagcagagaanaacaaaattgatgataagacagagcatgaaatgagatanaagactgtaaaaantggagataataaaaagagtaacactgtaaataagatgaaatcaaaagagagaataatct

SEQ ID NO: 49882 - DNA, 430 bp, Glycine max
  unsure (1)..(430): unsure at all n locations
agcttgtcggtgaagagagaagagtagatgcnntttgcggaagagccacagngagaaaaagagagaatgcttccgggaagaaaagaaatgctttttatatttttaactgaagggcaaaattgacctttcattgaattgctgggtgcaccagcaatattgctgggtgcacctagcatatccccatgttaaaaatgcaaggcccaagataaaacccataatttaattcctcgtccaatatacataaacgttgcccattttaataaactttgtttacacacattttaaaattactatttaatttaattttaactaaagatcaaataataaattctaaagtattaaattaaatacttgacataatttttttcatatgtaaaagtacaactaattactataattcaattcattgttatttaatttatatatacat

SEQ ID NO: 49883 - DNA, 430 bp, Glycine max
  unsure (1)..(430): unsure at all n locations
gtccaaagaacgatttcaagattgagtcaacatgttcaagatcaagattaatttcaagtttcatgagaagaaatcaagaagattcaagaatcaagagaagtttgatttcaagattcaagagaagatgaattcaagattcaagagaagaaatcaagaagactccacaagggaagtatcgaaaagaattttttcaaaaaccaaacataacacaattttgtcttacaagaaaagtttttctcacaattctctaagttaccagacgttttagtctctggtaatcgattaccagtggcaaagtctgatctcaaaagcttctaactgaatntgcaacgttccaattgagtcttacatggtgaagcaattacatatattggtatcgataccagcgttctgacgttgaattcaatcagtgtgagagcacatctttcat

SEQ ID NO: 49884 - DNA, 434 bp, Glycine max
agcttgtcaatctttgagcaaggactgctcttttatgcataattggatgcgtcgcacatcagctcaaatagggctgtccaatcaggtgcctgaatgataggggtggtagtcaatgcacgcttgaggcaatcaaaagcctctttgtaccggtcatcaaaataaaactccacctccttttgcagcggattggatagtggaagggccactttgctaaagtccttgataaagcacctataaaaccctgcatggccaagaaaagaatgaacctcttgcacacaagaggggtaaggcaattgtgaaataatagttatctttgcagggtctacctttatgcccttactggaaattatatgccctaaaactatgtcgtgttctaccatgaagtgacatttttcaaaattcagcacaaggttagtttcaatgcatctattaag

SEQ ID NO: 49885 - DNA, 378 bp, Glycine max
  unsure (1)..(378): unsure at all n locations
gttagcatgcttatctctaaagaaaacagaggaagctntgatgatgcctaagaagatcttttctccaaggtggtagctgtagatatggaatggccaacacaaaaaaatagaaacaaactttcatctacctaagcttttcacatgcacaacaatgtctcaaggaatcagtgaatctaatcctcatctacagtgtcaaccattttttaacaactctgattggactgtgatactaagtcgtgaaagtaaactcagttaaactntctaaggtacccaaaccatgtaattgttttaccatatttttagataaactcagcagaattccccaacaaatgggtttagccttccatcacatggaagcacctttaacaatcaagaagt

SEQ ID NO: 49886 - DNA, 349 bp, Glycine max
  unsure (1)..(349): unsure at all n locations
aacgcacncttctgcaaacattcggtcataggacttgctatcatgctcaaattctggataaagcgtcgataaaatgatgcaagaccaatgaaagatctcacctcctaaactgttgtagggctcggccaagtcttgatagcatccacttttgtttgatcaacggatactccatctgtagacaccacatattcaagacacaccacactttcaaccaagaaatcacactttttcctcttcccatagagtttctgtgctcttacggtctcaaatattagattcaaatgagtgaaatgctcctctatagatatgctatacaccaatatgtcatcaagatacacaacaacacact

SEQ ID NO: 49887 - DNA, 416 bp, Glycine max
  unsure (1)..(416): unsure at all n locations
agctntgatgtaacattgggttatgtaatgattcaacgagatgatgcgctccatgagaggttggatcaaatggagaatagagaccatatgaattgctcaagagcttccattgttcaatttcgagcgtctagatatataatgcgcctcagtcggacctccgagttaaaagttatgaccatttgtaatgctcaagagctttcattgttcaatttctagcgtcacgatatattatgcacctgaatcggacctgcgagtgacaacttatgaccatttgaattgctcaagagctttcattgctcaatattgagcgttacgatatattatgctccagaatcggacctgcgagtgacaacttatgaccatttgaattgcccatgagcttccattgttcaatttcgagcgtctatatatataat

SEQ ID NO: 49888 - DNA, 272 bp, Glycine max
  unsure (1)..(272): unsure at all n locations
tgcacanaanacancgagacgcgcgaaattgaacancggaagctctcgagcaaaccaaatggtcataacttctaactcggaggtccgattgaggtgcataatatatcgagacgctcgaaaacgaacaatggaagctctcgagcaattcatatgagtataacttctcactcggaggtccgaatcaggcgcataatttatcgtgacgctcgtaattgaacaatggtagctcatgagcaattcaaatggtcataactttacactcggaggtccga

SEQ ID NO: 49889 - DNA, 447 bp, Glycine max
  unsure (1)..(447): unsure at all n locations
acccagagcgacctgcggcatgcaagcttaaacagngatcaaactcgctctttgtatctgttattgtgaacatatcagtacgattgtgcatagtgttgatcttatgaaccttaattcttctttctaaccgaataaagagatatctagcatttatttgcttggttctatcatggtgaacctgatccttatcctagcatatagcacttatgttgtcacaatagatgttagcatattcttgattaattccgagatcatttattagacctcttagccaaatccattcctttgcagcttcagtaagagccatgtattcagcctcagtagttgagagggcaacaaaatgttgaactgtttccttccaactcaccaagcaggcaccaagagtgtaagcataccctgttagggaccttctctctacaagatcagcagcaaaatcatcatcagaat

SEQ ID NO: 49890 - DNA, 489 bp, Glycine max
  unsure (1)..(489): unsure at all n locations
actaagcttataacctacccccatagagataaaacatcacaggaagtgttgatgtgatccacagaaatgctaggctgagatgaggtggaaggtgacgttgacaccaacacngccaaggagggaactagtggagatgaagaatgaggcaccatggaagcacttgtagtcgccacaccagtgctcaacaagggcacgacaacaataaacaaaggagcatcaacagtgctagccaaagtggccagtgcactaacttcagcccaaggagaagtagaaatctccagagcacacatatcatgagaaggtggaggagcatgagtggcaataacagcagcaacaagaacaaaagcctggatgatcgatgaaaatggaggcggatcttgcaaacttaaagggcaacccgaaccaagcgtcaacctaacagctttcctcatagctcgaaggctagaaggggccctcgacttcttatggcctgacacctcatcatcgtca

SEQ ID NO: 49891 - DNA, 428 bp, Glycine max
  unsure (1)..(428): unsure at all n locations
agcnttgcggatntggtcttcgccggctgaatgancttgcgggtctgaaaaaaggaaaatttaatcatcctacttggacgaatgagaaaactggggcaaatgaagagggtgaaaatgaaggagaaacccatgctgcgactgtcattcctacatgaccaaacttcccaccaacccaacaatgtcattattcagccaataacaaaccttctccttacccaccacccagttatccataaaggcaatccctaaattaaccacaaagcctgtctaccacacaaccaatgctaaacaccacctttagcacgaaccaaaacaccaaccaaaaaggaattttgcagcaaaaagcctgtaggattcaccccaaattccgatgtcatttgctaaacttgctctcatatctatccgataattcaatggtagccataacc

SEQ ID NO: 49892 - DNA, 387 bp, Glycine max
  unsure (1)..(387): unsure at all n locations
ctctatgccaagagatcactctctntagctntcttagagaatactntagcaaaaaactatatgtttttcataagagcgggtctatcatccatggcacatctntagctgtctattaaatgcacaaaccaaaacgagacttttcatcatcctttgttctcactcatcgcttttcgagaaaattttcagaaagtcacccatcccataattgttccaagttaataacacttaattgtggagtccttaactgaccgactatggaaaagtacatgcatctntgtggtataagtagtacaattaattcctttaagctacactcaattctacaaccacatacttgcacaaccttatgatcccttccatnncagttgtgttcacaaagatgttact

SEQ ID NO: 49893 - DNA, 413 bp, Glycine max
agcttgaatcagacatccgtgtgaaaagttattttctttgaatttctcaagagcttccgctgttcaatttcgagcttctcgatatgtgattcgcctgaatcggacctcagtgtgaaaagttatgaccatttttatttcccgagagcttccgttgttcaattttaagcgtctcgatatgtgattcgcttgaatcggacatccgtttgaaaagttaagaccatttgaatttctcaagaacttccgttgttcaatttcgagcttctggacatattatgtgcccgaatcggataaccgtgtgaaaagttatgaccattcgaatttgcgagagtttccgatgtttaatttctagcgtcatcattttatattagccttgaatccgacgtcctgtgaaaagatatgaccatttgaatttc

SEQ ID NO: 49894 - DNA, 399 bp, Glycine max
gcctcgcgacatatatgcgcacgactcggacatgcgcgtgagaagctatgactatttttatatctcgagagcttccgacgctgaatttcgagcgtgtcgctatattatacgcctggatcggacctccgcgtgagaagctatgaccatatgaatctcgcgagagcttccgtcgtgcaattccgagcgtctctatatgttatgcgcccgaatcggacatccgagtgaaaagttatgaccatttgaatttctcgagagcttccgctgtcagattcgagcgtctcgacatataatgcgcccgaatcggacatccgtgtgaaaagctatgaccaattgaatggctcgagagcttccgacggtagatctcgagcggctcaatatattatgcgcctcgatcggaca

SEQ ID NO: 49895 - DNA, 458 bp, Glycine max
cgatccttgagtcacctgcggcatgcaagcttgactttggtttagacatgattgattattatttgggacttgtagaaattgatttgggcaagattggatgaggggaagtgtggttttcgaaatatgctctttgtgcagattttgctgtaaaattgtgcagcagaattttgcacaagtgcagaaaaatctatgtatttgctggttgtggaaagagtaatgtaaaatgagttctggatgttttctagtagatcccaacggtcacaatgtaggcgtatgcactatagacttccagtaaaattttggagtcgatccaacggttaacgaattggatcgaaggaattgttactggggtctttgagtgagaaaagctgtaattttggttggtgtgttgagcagagttttctgcctttgccctgtgttgcttggctgtgatagcttgtgctggttgaatggttgtt

SEQ ID NO: 49896 - DNA, 382 bp, Glycine max
  unsure (1)..(382): unsure at all n locations
ttgatactaagctagagctactaatagaaaggtttagtacaggcctaccatcattatagttcctgagaagctatgtgatgaatgcctaataggcaagcaagctagaaattcttttgtttcaagcatacttacaaaaactgttaaaccacttgaagttgtgtatactgatgnttgtggtccttttgaggaggagtctcttggtggaaacaaattntttgtaaccttcattgatgatctcactataaaggtgtgggtttatcctattaagaagaagagtgatgtgtttgacactcttcaaatttggaaaactctggtcgaaaaacagtgtgagtccaaattgaaagttgctagatcagatggtgaaggagaatacatgtcaaat

SEQ ID NO: 49897 - DNA, 416 bp, Glycine max
  unsure (1)..(416): unsure at all n locations
agcttggatgatatggtcttcagcgaganatgnattttagtgggtctaagaagacgcaaatgtgatcatcatgcttggataaatgccaaaaaaactgtggcgaatgaaaatggtgagaatgagctagaagcccatgctgtgactgccattcctatacaaacaagttgtgcaccagcccatcattgtcataactcatccaataacgaaccttatgcttacccaccgaccagatatccacaaaggtcacccctaaatcaaccacacagtctgacgaacaccacctttagcacaaaccaaaaacaccagccacgaggtgaatgttgcagcgagaaagactggagaattgaccccaatattagtgtgctatgctgacttgctcccatatctactcgataattcaatggtaggcataaccc

SEQ ID NO: 49898 - DNA, 393 bp, Glycine max
  unsure (1)..(393): unsure at all n locations
ctaagctggcggtgncagccaccatctctcatagcagagtcctttgttgtgtctaccatcacgattatcgtctccctcttcgcgcatgatctcgactcgcatcctatccagaaccatattagaatagtactgatactgcctaacgaatgcgaccattaagtccttccaagtatggactcaggaaggttccaagttagcgtaccaagttacaactaccccagtgagactattgtggaagaaaagcatcaacagttgctcatctatgcatatgcccttatattccgacaacacatctttggatggtgcttgaggcaagtaggccccttgaacttgtcaaagtccagcaccatgaacatgtgacgngtgatgatatcgggtactatgaacaactct

SEQ ID NO: 49899 - DNA, 420 bp, Glycine max
agcttcaacatcagaccacttccagttttttggtactacttcacatggactggaaggggcctatgcaagttgaaagccttggaagaaagaggtctgcctatgatgttgtggatgatttctccacatttacctgggtctactttatcacagaaaaatcacacacccttgaagtattcaaggagtggagtctcaaacttcaaagagaaaaagactgtgccctcaagagaatcatgagtgaccatggcagatagtctgaaaacagcaagttcactgaatactgcccatctgaaggcatcattcatgagttctctgcagccattacaccacaacaaaatggcatagttgaaaggaaaaacaggattttgcaagaggctgctagggtcatgcttcatgccaaagaacttccctataatctctggg

SEQ ID NO: 49900 - DNA, 478 bp, Glycine max
  unsure (1)..(478): unsure at all n locations
aaaactcagcttgcttctcagattacctcaccccaccacgttagatttctctattattatnagnagntggatctctagtcgtgtatttggctttatcatttcgacattcgaacacttattatttcttttaatatttgcttactatgactgaacatgttgtttatggttagtgatatatgactaagaggtttgcatttcattttggatctattcaaattatgctttatgaatgtttcagaatcatctatgtctgtttataaattatgttttgcgtttgtttaaattattcatgttttatgtactttggccattatgatgttgccaaagggggagagaaaaatgagtttttataaatcaagatattatactttcaaagcgttaaattaagcatacattcanacagaaagggggagatagagattagtgaatggagaacacaacttgtatgtatcctcttgatctcaggaatgtcatcatc

SEQ ID NO: 49901 - DNA, 420 bp, Glycine max
  unsure (1)..(420): unsure at all n locations
agcttcatacaattaatatagaacctanattctattgtcacatcctgntagagcggtgggttttcgtgtcctctagcatgaggttcttcatagtcatccacctattcatctgctcccccgaacacaagttcaagatcatcacaggatccaaacacaacaacacacagggagtgagttatcacattcctagctaatagagaaacaagacaattaaatatacatattatataaatgagataccacttgcttaaacatagctcacgtaacttcaccacttcgtcattcaaaattcacttttcaattatcaatcacattacacaagaatcccacacttcgatcaagatataataacacatcaattaataagcatatgcaatagttatgctaagacttaatcctatatgcaatgtggtaccatgt

SEQ ID NO: 49902 - DNA, 93 bp, Glycine max
  unsure (1)..(93): unsure at all n locations
gctcctccttatgttcaacatggcctctcacgattccatnnttttacttcttgtatgaaaggnnnngacagagaaagctgangaaaggaaaca

SEQ ID NO: 49903 - DNA, 380 bp, Glycine max
ctgcagcttttttgtcggagggccaaatacttcatgacaccggcaggatcgtcgtgcagctcaaccgaagttgtatttccgccacctctctttttgcggccagaaaacattacccacctcggtaaaaaaaaacatgatcaccggcattgacaaagatattgcggcctactcggtcagacagatgaccgacgatgtataaaaagaacatgaccggattacgccgatcgaacgttcctaatagatatcctccaatattattcaggttgaatggaaaaaacaattccgactcggtagtaatagccggatgatattttcagccaaattgccaatttttacaaacgctgccgattttttcctccggaaaggagcctcgtggtggt

SEQ ID NO: 49904 - DNA, 335 bp, Glycine max
  unsure (1)..(335): unsure at all n locations
cttggtattcaatntcgagcatctcgatatattacgagtctttatttacatccgaggaaaaagctatgggggattgaattatctcagagcttcatcattcaatgtccagcgtctcgatatattacgggactcaatcagacatcctactaataagttattgtcgtatgactttgctcaaagctttagtattcaaattcaagcgttcttatatatgacagggactaatcatacatacgagctaaaagttatccgcgttagaataagcgctgaccataaacattaaacttcaagcgtctcgatctattacaagactcgatcagacattcttattaaaa

SEQ ID NO: 49905 - DNA, 425 bp, Glycine max
  unsure (1)..(425): unsure at all n locations
gctgattgtgagtggactttagcctagntttcctgnggnnatnagncaatgcattcaaggaaacttccaaagaaaaacgttcgattgattttttttattattattttattcaaagatattttgattattttattattatttcttcaagatattgtgattattttattattacttacgcatttgttgtggtttaacccgtggttacagagcgaacgatcggttagattttgatttaacagtgattaaacaagattacaacgcacatgatcggttgaaattcatgttatcatttattaggcgagatagcggcgtaaacgatcgattaaagttcgttaaaaacggaagataagaaaactggaagtgaaagaaatgaagatgatagccaacaaagcatgatatgaattgaaagtctcagattcgaaaac

SEQ ID NO: 49906 - DNA, 413 bp, Glycine max
  unsure (1)..(413): unsure at all n locations
agcttgccacccagctcgccctgcgatcnatgttgctncctccngaagcaaccgccttctggatgaattttctagaacgcccacctgggtctggttgctattcgcacccccatttttactaaatactacccttgctcttttttggtgattctttttccgcaacgttatgaaactttactaatcttcttaacgatgattgttttctttccgtaatgtagcaaaaccttacggattacgtaatcattccctttttaccttccggagcgttacagaactttacggattgcgcactaacactttcttttaatttctggcatgtcacagaacttcacgaattgtgctacaatactttcttttgactttcggcatgtcacagaacttcacgaactgtctaacgatgggtgccaagtacc

SEQ ID NO: 49907 - DNA, 383 bp, Glycine max
tcttagtttcagatgatgcagatgggttgggatctacttctttctctcctctaatgactatggcatcatttctggcgctaaactgctgggagttggaggccatcttctcaattaaatttctggcttcagcaggagtcatgtcttcaagggctccaccactggcagcatctatcatacttctctccatattactgagtccttcataaaaatgttggagaagaagctgttctgaaatctgatggtgagggcaactggcacatagtttcttaaatcgctcccagtactcatacaggctctctccactgagttgtctaatacctgagatatctctcctgatggctgtggtccttgaagcaaggaaaaaatattctaagaatactctc

SEQ ID NO: 49908 - DNA, 428 bp, Glycine max
agcttccacaacatccaagcagaacttctttcaaacagcacaagctatcacagccaagcaaaacagagcaaaggcagaaaactctgctcaaacaccaaccaaaatcacagctttttctcgcttaaagaccccagtaacaattccttcgatccaattcgttaaccggtggatcgactcgaaaattttactggaagtctctagtacataagcctacattgtgaccgttgggatctactagcaaacatccagaactcattctgtactactctttccacagccaaccacacacaagcattttctgcaccaagctaaaatcctgctgcacctatttgacagcaaaattctgcataagtgcagatttcgaaaatcacacttcccctcatccaatcttgctcaaatcaattcctacaagtcccaaatcatgtatc

SEQ ID NO: 49909 - DNA, 391 bp, Glycine max
  unsure (1)..(391): unsure at all n locations
ngagatgaggaagtgttgaagggtgaaacttcctgtttttattgttgaccacagagtggtacctggagatatgtcgcgggggtcaggagaccttgtggacgtcatgtggggtgctattgcccaaaaccaagcttgaccaatcccgacccaacccgggcatagtcggtcagtgagaacctgtgatgtacctaagcaggcgagctcctggcagtcaacagataaaaggaacaaagaccacaaagcaaggaggcttgtggtggctggccagctctggattttgtgtgatatgtggagtatggcctctggtaatcgattaccaagggtgggtaatcgattacaaggcttaaaaatgaagacaggaggctaagatggtctctggtaatcgattacc

SEQ ID NO: 49910 - DNA, 424 bp, Glycine max
agcttgtatatgagagcatgcactgcgctctcttattttattgtttcgttcattagttacgctatgtcattttgatgtggtgtatgtctcacggttctatggcgagctattccttcatttgcacataactcattaaattgcctattgcaaaattccatcccattatctgtcttgagatgcttaacctttttctctgtctgcttcttcactattgatgtccattgcttaaacttaaggaatacatcactcttttgtttcaagaaaaaaaattaaacttttcatgagtagtcataaatgaaagttaacatttaccttgctccaccatgggaaggaacacttgacggaccctataggtctgaattaatataatcaatagtcccttgccttttgtgaacttcattgctaaattttactctgcattttt

SEQ ID NO: 49911 - DNA, 400 bp, Glycine max
  unsure (1)..(400): unsure at all n locations
ccgatacacagataacattctggaccggaggatcctttcttgttggaatgttaagatntatcataccgaatntgacgagtataaggcagagctggagaggcataacttacacaaacgtctcaccaatctccaagatggaagcatagatgtagctatggtgaacgagttttatgctaacagcctcggtttcgaggatgaggattgatgctgacagcctgaacaccttcttagagaccctagtaggtttggaggagggtgagacactgcctacctattacagatttacgaggatgaggattgatcctcaagagtttgttgcttgtctctgcatcctcgaaaggggttttggtctgaatgcagagggccacccttggaagcttcttatgaaagatctcaccac

SEQ ID NO: 49912 - DNA, 372 bp, Glycine max
agctttcaagacattcagaatgtcataacgttttactctgagggccgacccaggcgcataagatatggacacgctagaaattgaacaccgaacgcgcttgagcaatccaaatagtcataacattgcactcggaagtccgattaacgcgcataatatatagagacgctatgaattgaacatcggattctctcgagaaattcacacggtcataacctctaactcggaggtccgatacaagagcataatatatcgacacgttcgaaattgaacaacggaggctctcgagaaatacaaatggccataacctataactcggaggtccgattcacgctcatgacatattgagacgctcgaaattgaacaatgaaagct

SEQ ID NO: 49913 - DNA, 229 bp, Glycine max
  unsure (1)..(229): unsure at all n locations
gagcaagagcggacgaggggaagtgtgatctcgaaatctgcctcacgcaaataggactgccaaatangtgcttcatgattttagcatggtgcagaaactgcttgtgtgcggttggtagcggaaagaacattcagaacgagacctggatgctggctacaaaaattcccaccgttataatgtacgcttatgcactatagactcacattcaaacgtttgaatctatccaacg

SEQ ID NO: 49914 - DNA, 349 bp, Glycine max
aaccaacccctgatgacacgcgaacaacaccgcagagagttcttatctatgattgctacaaccaatgctaaagttatcgaccgctagggacttaagctctaatagcatttaaaactgcacgcagaatgcatcaaaccacccctcttcatctgtgggaaaaacaatcctatttatctgatttcgatggaattgcaactatgataagctaaacataagttcgctccatcttagctttgccttcagatggccgacatcgtatattgctgtacagtgcgagcattgcgcatcatcctttactagtaagcgatgtctgatcattcaatggggtaacaaacaccactggctaatg

SEQ ID NO: 49915 - DNA, 446 bp, Glycine max
ttaagtcacctgcagctgcagcttaatatacaattaccaaattactgtttgtgtgccttcgaactggatctccaaaaacaaaggtgaatttgaaaggaaatacacaataaatttagtattgtttggcattgctactacaaaatcaaaagacacatagaacaaattgcatcaaccaacaaataaataggataccataccaataaatgtattgagtgataattgcttgtttccattaatgcaaaacatataacagaatagatagaggatatctcaccttttgcatattgaggcaaccagattagccgtagagtctctaagttcccagtggttgtctgccaacctactgcccaaccttttagcaacaaggcaggtcacaacagatggcatcaactggtgtagctgaagcatgcaaaaacagaaagaaaaagaggtaaagagatggtttc

SEQ ID NO: 49916 - DNA, 413 bp, Glycine max
agcttgaagatcaagaagagttatttaagtatcatgaatcaagagaagacttaatcaagatcagtatgaaaaggtcttttcacaaactgagtagcacatggttttatctcaaaacatgtttaccaaagagtttttactctctggtaatcgattaccaaattgttgtgatccattaccaataccaaaaatgatttgaaaaactcttcagatgaatttgcaacgatccaattgatagcacaaagttgttgtcgatcataatggttttggtaaacgattaccagggcctttgaacgttgaaattcaaattcttaagtgaagagtcacatcctttcacataaaagctttgtgtaatccattacactgattaggaatcgatgacagtgattgtttctgaataatcaaaagatgttact

SEQ ID NO: 49917 - DNA, 422 bp, Glycine max
agcaattcgttcgtgagacgtactgtatctttctctgagcaaccgaatcgaagaacgatgatgcccatgttggaccagtttcagccatgttagacaagtggcctcagatatcttaagaagggggggttgaattaagatatttcaaactactttcccaattaaaaatttatttcactttcttttcaagttatagattcccttaacaatgaacctattaaatattaattcaaataaaacaatttgaatatgaatgtaaagcaatagtaaacaaaggagatcaagggaagagaaagtgcaaactcagatttatactggttcggccacacccttgtgcctacgtccagtccccaagcaacccgcttgagagttccactatcttgtaaattccttttacaagttctaaacacacaaggacaatcctt

SEQ ID NO: 49918 - DNA, 397 bp, Glycine max
  unsure (1)..(397): unsure at all n locations
atgtgatatattcaaatttgttgttctcatcttcgtcggttagagatntcgtacttctgatgagatggtgaaggacagtacaatgatgagaggaataattntgtagcgtctttatttatataaaanaaaaaactcttattttatttccctcttttagagagtttgcacaataagtaatattactaattacggtttacaaaaattccacaattagaccacccaattgcggcaacaacggtctcctttataattattttttagagaaaattatagcttttaacaattgcctaagaaattttgtaaaaatattcttaatatctttttcaaatatggaacaaattatatcattatatataacacntaatcagatgatgcagctaagttaattacacaattt

SEQ ID NO: 49919 - DNA, 421 bp, Glycine max
  unsure (1)..(421): unsure at all n locations
agcttcctcggggccatttcctactttattatcattnggaaagttagttttaccaagaaatgctactcttaaaacaaaaatggcatacaacatacgaacatcaatgtagatttagagtaaacttatgcacatacttctttacgaacattcacttgcacaagacattcttataactaagaaaaatgcacccatgtacaatcaaggcacatccgttacctagattttttatatgtacttccaaggtgtatttgctacctacatcacatgcacttccttggctaaatttacatacatgcatactcaaagcatttggggtaccaaaaattgcacatgtgcacatttcggtatttctaatatttatgcatatacaaactntgtgatgaatcttggctatctacacaataaggtgatacatttcatg

SEQ ID NO: 49920 - DNA, 437 bp, Glycine max
tgaagcagccgtctcttcatcacataccacctctttttatttctctagatcgatgattaacgggggcgattcacaccttggacaacttgtcatgtacagatttcttacattacaaagattacctaacgcctctggtatatttcgaaggttaatgcagtttgagatgtccatttgtcttatattccaaagtctttcaatgagatttggtatataatgccaatcattacaagaacttatccttccaagtttcaatattctcaagttttcatattgttaagcgctgaataagctttctgatgtaatgttctgtgctcttatggaggtatctctcatcccctttgcatttttaaatctttcatagcaatttcaatttctaattggaaacatttaattacacgttcatttccaaccttctgtttaatagtgccggtgattta

SEQ ID NO: 49921 - DNA, 437 bp, Glycine max
  unsure (1)..(437): unsure at all n locations
cctgcggcagcaagcctgctggaattgaatcctccttattgtttaaganacagatatgaaaancacaaacaacataattctacatatttcaataaatattttttttagaaaaactcttaattaatgttgaaaaactagttagtatttatcttatccttattcctattaggagatgtgaaaagacctgccaaatagaatggattgaaccgaaatgagattatatgagttttcatagatactacatggtgaacttgatgatgggcacttcgttgactccatcgttgactgtgttaccctcccaccaccattcatgttctttacatcctctaagttatctacccaattattatataaaatatttttttataagcgaaaattatattatatgaaatgaaccagtgcaccgaatatgagctacacgagtatcattacaacta

SEQ ID NO: 49922 - DNA, 341 bp, Glycine max
ttctattgagcacgacgaaagaaaacatgggcgagggccaacgctgaccaacacacggagaatctaagtctaaccggcgacccacgaagcaacggccatcaacaagagtaagcaaaggactcggccctacaaccaacaaaggagaaaccatacaaagagcgaccgaatcatcaacccaaagaagccacgacgcggaaggaaagggtcgctcacaccctgaatgggaggagagaagccccaacactgcgagccaaagccaaagagtagcaaacgtgtacacggcccccaacgaagaacaagggctcctcgacagtcgcaacacatgaacaattcgacggccc

SEQ ID NO: 49923 - DNA, 421 bp, Glycine max
  unsure (1)..(421): unsure at all n locations
agacacctgcagctgcaagctgaacaccaaaaagacttcttccttctttccaannaaaaagcctactccggtggatttcctcctataaatcactaagaaggcattctttttgtcaatgtgattaagaggacactgctggactgatcagcaaccatgacgaggaaggactgaactgatgcaatcttaatgactacagaaaatactatcgcgtggccatgaccatacatatgngcgtagcacttggctgctaaatgagcaacggtcaatatagccattatggaccaccttcaactataaactcccattgacaaatagctaccatctactatagacactcgacccaatgcgtttttacaatgtggggaacgcgcctactctatcattgattgcggctaatttggatgaaaaactgcttcacttg

SEQ ID NO: 49924 - DNA, 379 bp, Glycine max
gcaaatacatatctcttggttgtcttcgtctacatatctttttatactcattcctagataaagcgcatgttagagtataacgagctcttgcgttcaacaccattatagaaaggtctatgtctgtaccttctgctttagatgtacgaatgggtatatctgtaattgtgacgatcagctacagtctgtactgagtggagttggagtatgtttggttgcatgttggacacccctacatgtggatcaaatatggtcaaacgtgaaataagggagaccatgacaattggtttattgtgttgacgggattcatgtattgaaatcaattttggagaagctccttggtagtgctctacgacttgaagatcaattctcatatttcatg

SEQ ID NO: 49925 - DNA, 413 bp, Glycine max
agctttgtgatgctgggtagcctcttatttttatagacatgcagagcttcgccaatatgctgtggtgggagcacataagttgatctaatagccattaatatgcacctgaaaagatctatgttaagatcggacacatcctcagtccaccaatcctttgggactgaatgatgcttgtttctggtataaccgggcctagtgtaggtgtaggaccatttgacctacacataatcaattaatctgaatgcaccagaaaattttcttgagaatggttatccatcaccaaacgaaattttagtagcctcaaaagaaatcaaactcatatctgttaaaagcaataaaaaaaactccaaatctctaagcacttgggaattcacatttaccccatttcctttattatagcatcactcaagtgc

SEQ ID NO: 49926 - DNA, 478 bp, Glycine max
  unsure (1)..(478): unsure at all n locations
gttcgattcattctatgtacccatggtggaccatattgtgtttcttgtattnnnaatcacgggtcattggcttgttataccccctcttgacgtgcttaaggtcatttatttaagacatctctcgcgtaaactaaaaataaaataaatgtccatcgatcgtttgaattgcatgatcctgtgactttggttgaaataaattccgaccggttcgtcgtgccagaaccacttttgaaataaataatgagggtaaaaattatctaatatttaacaacacatctgttagtgaaataaagcggaacatatatggacgctttcctctttgggatggttattctctatcgattgacgataactaacgtgaaactgatgtataatcaactcctctagccagctcggcacagaattggattggatgtatcgtttaatatctacgtttgaatggatcctttcagggcaatgccttaagtgactactttag

SEQ ID NO: 49927 - DNA, 425 bp, Glycine max
agcttcctcaaccacctcattatattcatttgccatgaagaatatgtctgtctttaatgaaagctgtttgtctttcatcaattaaggcaggtataacctgtctcaacctgcttgctagaagcttagctatcactttgtacatgcagcctatcaaggatattggtctataatcatttagggactgaggatggttaactttggggataagagccaagaaagaggcattgctgcctctagggaaacaaccgttgacatggaactcatccacaaatcttctgaactctggttttagcacactccagaattccttaataaaattgaaattaaaaccgtccggcccagggcacttatcttcaccacaactccacactgcttccttaagctcctggtctgagaaagggaaaataaaaccctccctctgactt

SEQ ID NO: 49928 - DNA, 374 bp, Glycine max
  unsure (1)..(374): unsure at all n locations
gggttggtccatgctcgcgcggttggctccaatctggatcgcttagcgtgcataagtggattatggcttagcacgcttctctcgcttagcggatgagctgaagcggtgcgcttgatgacctggagtggtgcgctcagcgaacctgacagctcatcttcttctggattcttcctcgagcttagccactgagtggcgtgcttagcgaatgctcactaagccaacaacagattggcttatcgagaaggtgaaaacaacacttttgccaattttcctaattaacctgagattgagagaaatcgattattaaacacagaagacaaaactatacattatctattagctatatttaacatanagtacttattattttatta

SEQ ID NO: 49929 - DNA, 115 bp, Glycine max
tatatcgagacgctctataatgaatgttgaagctctcagcaaattcaaacgaccataactttatacttggatgtttgattgagttccgtaatagatcgagacgctcgaaattgaa

SEQ ID NO: 49930 - DNA, 429 bp, Glycine max
  unsure (1)..(429): unsure at all n locations
tctgtgactaccacaagttatgcagatctctcatgtgtttctctcttgttttcaagagatcagagcgtgaggtagatatgtaaatgactctacaagttcttgatcattgactacttatggcataagttatgcatgaagaatattatgccccatgaagagtaattttatgtgtacataaagatcataaccaacatcaatctgttaccttcaaagaaccagctggaattactgcttctcttcatgagcattggctcctccagttntggatctcaatggatcagcangaacaaaaatatcatatgcaccttctgtttctcctgccttcttcatatcatcatcaatgccattgtaatccaataccttcaaaatggaaggaactcgcataccatccttaccatatattggtcccatntccatatcagatttatg

SEQ ID NO: 49931 - DNA, 390 bp, Glycine max
  unsure (1)..(390): unsure at all n locations
tcttctttctccttattgagtttcattgagtgtgagtgatagcgtgtacgtgtgtgctgcacttccattgtttagatgagtatttgtcttccataattcattatgggaagtgggtttcttaaataagatttatatattctgagttataatttctggtggtaatattataaaaatattaggttagttagtattaataggtattgtaaacttaggttaattacgattaatatatattataaggttaggttagtcactatgctgtttttaatttttatgtattaatagatacttgaaggtangttagttagttcggttcgttgatatatccttagatatatatatgtgatataatattattagctntagaaatattaggcacatgttatatac

SEQ ID NO: 49932 - DNA, 633 bp, Glycine max
  unsure (1)..(633): unsure at all n locations
ctctcccttttctcaagtcagataatatgatacgtatgtaacactagcactctcttcgcagggagtaganangnntttgatngcctgtatatacgctacactatacatactcaagctggactntgcgagttgattataggctcagtatgacgtgtattattagtcgattatgatttggacagagacattccacacagaaacgtcccattgattctttgtgggtcatttgtactacacagagaatgattggattattatattatgtattatacctctttcttggcttcctaacgtggttacgacatcgaccgaacggtctggatctcatttgatcagaaacttaacggatagtacacagtcagatgatctgtgtgaatatatattattttggtattggacaagataatgtacttgagacatgactaaagcacgtcttaagggggtacagactgtaaatgaaatgataataaaagtacccgaacatatggtgaccaccacaggtacatataatgaattggaagttccattttgaacttattgtttgtgaccgtcaacgatcgagaaaatcaataacggttaaaatcctatcaatcactcacgatacgtactgaagcgcttcggcttgatttaacg

SEQ ID NO: 49933 - DNA, 274 bp, Glycine max
tggatatcaatcaaattacatcaacagcccaagatcctggcttttagaccagaagttccttcatctctcttcactaactatatgaagcttctatttattgcatgaccatgagcatcagaattttccacctccacatgtttcttcaacgttctgtctaacaatgagctgagaatgtttctacaaaaaaatcatagtgactcacgtgctacaagcgcgacgtgaacttaacagtggcaatgtttcatgaaacataatgtctcataagcaacatatg

SEQ ID NO: 49934 - DNA, 452 bp, Glycine max
  unsure (1)..(452): unsure at all n locations
ctgcagcttggaaaatgcttcatggaggaaatgaatgttggatagaaagagagaggggggagcacgaaattgaaggaataaaagaggtatagaagtggaactttgaagtatgtctcacaagactctcattcatcaaagttacaacaagtgttacacatgcttctatttatagactaggtagcttccttgagaagctntcttgagaaaacttccttgagaagcttctttgagaaaacttccttgagaagctagagcttagctacacacacccctctcataactaagctcacctccttgagaagcttccttaagaagattcctaaagaagctagagcttagctacacatacctctctaatagctaagctcacctccttgagatgagaagctagagcttagctacacactccctataatagctaagctcaccctcatgacaaaaaacatgaaaat

SEQ ID NO: 49935 - DNA, 613 bp, Glycine max
  unsure (1)..(613): unsure at all n locations
taacgtacaatacatggcacacgatttcatcgttatactaatttctctactatacacancaaatatgcgtgtnnnannntttgatagcctgttgttaccttagactatataagactctagcgtctcaccgaggttgctgacgacagcgtccttcgctatgaattttaagcatgtgtaacacttgtggtaacattggagaatgagagtcttgtgatacacaactctcaagttaacttctcttcctctattactgcttcaatttttgtgcttcccccttctctttatctcgctttttcttttgctgcattgaagcatactgtcccagctttttatctaagcacaattttattggtgaaactgcttattgcaacggttattctaatggttggctactcatctgagctgtttttcagtgtctttcgctggcactctatggtggaaaagctctcttgaaggaccttatatgaactcaaagaactagcctacattgagtgttacaagcaagctttctcattacaaacttatgtcgcactgtactgttgaacccatttctttgttatggatggaacttctcatttgagtgaatcattttgaatttacaaatctgattgag

SEQ ID NO: 49936 - DNA, 439 bp, Glycine max
acgttcagtttctactggttatcgattaccatatatgtgtaatcgattacactgtgcaaattttgaattcaaattttaatacctgttgtaaatcagttctggccactggtaatcgattacatcctctggtaatcgattaccagagagtaaatctcttgaaaaagacttttttaacttaaatttcttggccaaaccttttgctacttcaattggaattcccttcctatttaatgtaatcttcctaagactcaagagactgtcttgatcatccatctagaatatctttgatttctttgtcttgaataaaactttgagaaacatgtaatcctttggcatcgtcaaaacatcagcttgatcctttgtctacaatctccccctttttgatgatgacaatcctcgaatcaagacaagctatatacaagatgatagcacgttcaca

SEQ ID NO: 49937 - DNA, 325 bp, Glycine max
catgttatgggtaccccataatcctacaagcttgagatgaggaagtgttgaagggtgaaacttcctgcttttattgttgaccacagagtggtacctggagatatgtcgcgggggtcaggagaccctggggacgtcaagtggagtgctattgcccaaaaccaagcttgaccaatcccgacccaacccgggcatagtcggtcagtgagaacatgtgacgtacctaagcaggcgagctcctggcagtcaacagataaaaggaaaacaagaccacagagcacggaggcttgtggtggctggccagctgtgaattttgtgtaatatgtgg

SEQ ID NO: 49938 - DNA, 386 bp, Glycine max
  unsure (1)..(386): unsure at all n locations
gcgcgtactgtggtgtccatgaggtgtttgctggggtttgacccacgcgggtgttgaagagacggcatgggcatctcctttctttccttttgcccctgttgccccgattcttttggcattcacgtttgcggaggaaacgtaatcaaactttcctcttttcaatccaacctcgattctttccccggcaaacaccagatccgcaaagctggacggcatgtaacccactagcttctcatagtagaacactggcagagtgtctaccatcatggtgatcatctctctctcaaccatgggaggagctacttgtgccgccaaatccctccatcgctgcgcatattctntaaagggttcaccctctttcttgaacatattctgcagttgagtac

SEQ ID NO: 49939 - DNA, 401 bp, Glycine max
  unsure (1)..(401): unsure at all n locations
cacaagtaagcttccatcatcctcacacatctccttcatcaatttgttgntcaaactggtggcattatcggtgattatctttctgggcaacccatatctgcaaattatttccttcttgatgaattttaccaccacattcctagtcacattagcatatgaggtagcttccacccattttgtgaagcaatcaatggcgactatgatgaaacgatgcccattcaaaccttgggttcgatagccccaatcacgtctatgccccacatcaagaacgaccatggtgctgacaagacattcaatggcgcaggtggngcattaacattatctacaaaggtttggcgcttggtggcatttctgacgtgaacacaacaatcactctncatggtgatctagtaatacccgac

SEQ ID NO: 49940 - DNA, 374 bp, Glycine max
  unsure (1)..(374): unsure at all n locations
gctgtgcgtcactatccactattgaagcataatacattgcagttggatgttgttgtgctcaaagtctttagatgaagcaacaacatgaagactttggggtaattgttgatcatattccactacaatgtgataacactagtgctataaatctgtctaagaatccaattatgcattcaagaaccaagcatataaaaattaggcatcatttttctaagagatcatgtatctaatggtgattgttgcattgaatntgtggatagtgataggttcttctctattagaaatgagctangaatcctagattagtttaacattgaatgatgttgtgctatggtgtgttcatcttgatatgtgctctntgaatctgtcaattc

SEQ ID NO: 49941 - DNA, 544 bp, Glycine max
  unsure (1)..(544): unsure at all n locations
ntgaagcttttgtcccttgcatcggaactatcgatctcagcntctattcaaagcttatcttggcggtgaatcttcctctttcattgcttattacctaatggatgacacctactggtacctcttctcctttggctttcgcttgatctacaatggggataatcaccaataaaggaccttattgtagctcaaagaattcagctccataaaagccccacaagccagctttcatcaatgtgtatgaaatntaaaataccaatgctacaggttcttgaataagtaaattccgtaataatgtttctggaatactatgtgtctttgacacactaaaatccaatatatttgggtattgattcctttagttatttttcngaaattaacaaacccaagatatttcgagtaaactcgtccttaacagtggtggaataagccacgcccagccacacttataaagtgctgagactatactatgatgaatctttgaggcctgaccttggctataacctatcaaaggaatatattgtggcttcggttgacctgttaaaag

SEQ ID NO: 49942 - DNA, 395 bp, Glycine max
  unsure (1)..(395): unsure at all n locations
gctagggagagatatacaaatattgtggtgctcatgaaactactaccggagaggaatgtggtagtttattacaccgagtttgacgagttcaaggaggaactcgagagaagacatttggatgagaagttaactgattntgctgacagtagcatagacactgcaattgtgaaggaattttacgccaacctctatgaccctgaggataaatcaccaaagcaggtgagggtgagaggtcacttagtgaaatttgatgaagatacgctaaatacattcttgaagacccctgtagtgctggaagagggggagaattngtgtacttattctaggttttcacttctgaggcctgatcctctggagttggctgtaagctctgtatcccaggaggggatttgagc

SEQ ID NO: 49943 - DNA, 617 bp, Glycine max
  unsure (1)..(617): unsure at all n locations
agctatctacgtaatcagatcattaatgttgttaacttanattcgattacttacatatgtaggngngnnnngttttgaacctgtaganaccgttggtatacttgcacaaccccgcacngcagcatagcccttactatcaactatcacacatttgtttggtatggtttaatatttcatcctagatatgaggagagtgattcgaggcgaatctacctgcattgaatgttgaacacatattgttatgcggatatattgtacttgtggatgaagagacacttgcggacagaatattaataagctctagtctaaaagcaaccttttccactatgaatatatataagtgataattggacggaataatcaatgtcatgaacactccctctgcaatatctctcgagatgataggaacaaggaagacattagcatgaatgcaggcttcttgcggtctatctgtaataatgacgttagcgcttatgtgcttgtgcgagtctggtattcttattaataagatagaatattgatgctatatccatgctgtattttagagttaagacgtgttggattattgcgaaccgcggtgacctcactttagtcataacatcattgccatggacgct

SEQ ID NO: 49944 - DNA, 302 bp, Glycine max
catatttctttggcctaacaggaactccaatatttttaccagctttaatgttatgattggtttggccacaccttccacatgtaaactcagccaatttcctctgtagcttatgtcctgtgacattgtcctcatctacagatctccttctatttttctatggcctttctctttggacccttctatgtggaggaacaaggtgtgtatactgtgtctgggcccaatattgtggtccttggactggttcaataaaatgttggtatgtcttattataaacttctattgacagccactcatgacacatg

SEQ ID NO: 49945 - DNA, 336 bp, Glycine max
  unsure (1)..(336): unsure at all n locations
gcattatcgcttagcgagatcatcgcattctccagataacacagaaaacacaactcgntatctcgcactcttcaagcctctaaaagtcatattatacatgcaatgcgtgtgccatactcaattcagtatacaagcctacgtagccctcatcttaaactaagtctgaacaaacatcataaccttacaaatctaaagttacagctaaaatcttctaccctcaagttaagaccagatatagagatagaggatcaatgaacatacttggacaatgtatgatagatgcttcaaagtctaaaatgcaccaagagagtacaaatgcaacatgtgcataatttt

SEQ ID NO: 49946 - DNA, 274 bp, Glycine max
cggatcgcgcatgtagtataaaaccgccagaaccgtatatcaaactctcagggaacatgtgttactaggtaaagctacttcagcgaatatatgtctagtatgaaaagagatgtgtggactatgcacaagtatgacaactaactattaaaaggaaaatcacgtgagttatgatgcgtaaagacaagtatacaacacattggtctctctaataggtgcctgatggtaaaatgatattctctacttaacaatgctcatgtgttctatggtggctcct

SEQ ID NO: 49947 - DNA, 366 bp, Glycine max
tgttcctctaactccccctgcaacattgcaatcataccattctcaccgctcaaagtgaacactctctacagctgctctactccgaataactctgctggttgccatgtatacaactggagagagaagctttgtgaaatcaataccctgtgtctgctggaagcctttcccacctgtccatccatgtctctctcttctacagccagacttgtactgtagactatacacccaccgattctgttacgctttctttccttctgcgatgttagttaacgaccacgatttgttctcctgaatggatgtcgtctcatatttcatcgctagctaccacttcataaagtcattcccctgtgtagactcactgaaaca

SEQ ID NO: 49948 - DNA, 408 bp, Glycine max
  unsure (1)..(408): unsure at all n locations
gcttatccttgngctatcaatgtgtgttttattgggntatgcctttgacaaaatgggatagaaattatatcatccttcaactcatcgtttttaggtttctattgatgtcacctttcatgaagatgagtcatacttcattcatcctcagcttcaaagggataggattccagaagcctactccttctctgaatccttctttccttctaatggcattcctctatctttgcttcatgagcctgtaccaatgtgcatgtcaatcgaggctaccctttctaatgtgcatgtgatctagcacctcttcttggtgtaccacatgttaaatagataaagtgaacctacctaatgccccgacaccataggtggtgtatcaaaatgagagtggacctatattgcgatgattactatgat

SEQ ID NO: 49949 - DNA, 408 bp, Glycine max
  unsure (1)..(408): unsure at all n locations
tgagttagacatacccattctgtttatgttttttgtgatgatgnttgtgatgtttatatgctgaaattgctaatggaaatctgttagagacgaaaggtagaactaacccaacgttagaaagtgagaatgtgatgttatgagtggaaaaagagtgagactttgagagttggaaggctaagtccgaattctgtggtaaatggaggttagagtgagtcaatactagcttgaaatgtcatttagaacatgtgagaaaggttaggctgagctagagagaaaaataaatgaccaaagtgaaccaagagccatttctatggcaaaattgggtgttgaagagntcaaattttgatttggtggaatttaggtgtaattccaagttgggcaagtttagattgacgttatggactggtg

SEQ ID NO: 49950 - DNA, 461 bp, Glycine max
  unsure (1)..(461): unsure at all n locations
ataagcgcgggtctgggagacaattgtcaagtggtcgcgatatgcgaagatgatgttccgagtacatttggattggtacgaccatgccctcctgatttccagctgggaaattggcgagtggaggaacgccccggcatttacgcaatgagcataatgtaaacctttacggtttttaaaagctctatagttgggcctaggctntagagtttttccttttggtaaggctttgtgtcttttgtttttgaatttctaatacgaggacctttcttcatctgttcctgcgtctctacccattctcattcattngcatgttcacttctttttttgaaacggcagatccgatgacgagtcccccgaaggtactaatacctgggacccgcttatcgacttcgagcaagaaatgaatcaaacggaagatgaaggaaatgangatgtgggacttcctcagaatagaaagaatg

SEQ ID NO: 49951 - DNA, 470 bp, Glycine max
  unsure (1)..(470): unsure at all n locations
attgggccctttgataccttcgatatccgacncagctnnttgatcacacgncgatcaacacccacaanggatctacatattttattatatggcacacaacccaatgctagaaggtatcttcacttgtttgggactcgcagctctacccaacatttttgataatgtcattgttgaaagtcatcagaaatcaccccttctttcatctttgtgcatactaatctattttctgattcgatggaattgaacttgattgctaacttattntgcttatctttctttgcttcaatctcttcatctatattgtttcagtgctggttgtgatcatctttctgttgagattctgacgatttagtgtctcagcctacttttatgtaaactcctacactcagtagtgacactggacgtgatctttcatctgagagtatgctagtgaggatatgcatgacttttgttgatctacatacaaaacc

SEQ ID NO: 49952 - DNA, 241 bp, Glycine max
  unsure (1)..(241): unsure at all n locations
catcgattgtgtgaattaataaaacgcggtggcataatcgtaaataacatgagtttgtcaacatcattttttcaacaaccgatgttaatgcacatagtttaatattggctttttgaaaatccgatgttgagaaatgataagttaacattgattntttcaaaaaaccgatattaatgttaacatcatttagttaacatccgttttttacaaaaccgatgttggtaaaatgataagttaacat

SEQ ID NO: 49953 - DNA, 331 bp, Glycine max
gtcttcctctatagccccatgcaagaatgcaattataacattccactgctcacagggaagattctctacagctgctgtactcacaataactctgatggctgtcatctgtacaactggagagaagatcttcgagaaaacaccttctcgtttctgctgagacactgtcaccacaaggctctccttgtgtcttcttctaccgtcagattctgactttagcctatagacccacctattgtcggacgctttctttccttctggagagttaaataaagaccacgttttattcttctgaagggatgtcctctcatctttcatcgctagctcccactta

SEQ ID NO: 49954 - DNA, 290 bp, Glycine max
gttcatgtgtttatttgtttattgtctaagtcgtagggtttagggtttaagccttatggtttagggtttagtgtcgaagctgtatggtttaggttttagggcttatggtttattgtttaaggtttaaaccttacggtttagaatttggggtttaatctctaagccttatggtttgggttttacggtttatgagttaagccttatggtttatggcttacggctttgggttatggttgaataaaattactcccacttctatgcatttatgaaataaaactacattataattt

SEQ ID NO: 49955 - DNA, 624 bp, Glycine max
  unsure (1)..(624): unsure at all n locations
ntacttcgcacagcacataagaataaggctatagttgtatcttaatatactcactccaagatgggganncngngtttgagacctttgatacgttgaatacagaccaacgnaaaanaagcacgaaagacatggccaacagattgtaaattggacattttaatgtgagcacttgcagtggatcattatactctatatgataacgggcgctcctagaaatgagaaattcattgctccatgtatggatatattgaaacatttaagctttatgttgagaacaacatgggcacaggattctagttagatccatataatgacttgttaatgtacctgacagatagaaggtcaacaataaggtcttacgagatgtggatgctgagggctacatagaacattactgaactgtagacattcacagaagcactctcatgaattcgtacgtcgagcaacaaaccaaataccaaaccaatggagcacataatatgttgcctatgcatacgatacgatgaagatggtgactaaccggtactattaactattgcgcacagtagaatcacttacgttaagtcactacaggtctgactacgttgcacggatgaatgttggcatgaccgcactgttgatgag

SEQ ID NO: 49956 - DNA, 276 bp, Glycine max
  unsure (1)..(276): unsure at all n locations
gtgtaagtactctntatgtcagaggtggagtttgtttactggtacaataatatgcatacattcatgaggggattatgatgagaggctctttgatcttaggctctgagttttattcactacttgttcttggtgtgaagttggctcttggagctcttacttcacaccaagagacatatatgcagagattaatgactattcctttaggtctgagtgcgtgcgtttattatccaatggatgacgttatgaaaggacatcaacgtgatctatatattccat

SEQ ID NO: 49957 - DNA, 519 bp, Glycine max
  unsure (1)..(519): unsure at all n locations
ntttgaaccccttttgatacccgtggatatantctncncatccanaganaccccactcgccacntgggaagcattacaagattctagcgatctantttcgactatagcaaaacaccgcttacttacaagattttgataacagctctctgtaaccacatagctatgctcagtatgtgttttgacaaaatcgttcattactgtccttgagaaatcttcttgagttctcctctaggcatctgaattcatctttacctgcatcttgtagtcagcacttcttgatacttgaaacttcatgattctttctcatgaaacttgatcatattttgacttgcacttgttgactcaacttgaaacataatcggccctatgcgtcattgtgtctcgtcgaactgctgaaacacctgtgcatagcttgatcttgtcttaagccgctctcagaaccaccgggattacgttcgtactgtaagctccgtcctaaagataaggaaaggctatttgtactcactgagcgattcccct

SEQ ID NO: 49958 - DNA, 235 bp, Glycine max
tacctggaaggatcttattatttctttcttaagcaggatcagtacgactctaacatggctcccgactgaactcacctgctgaacatatgtaatcacgaacacgagtcttttaaagaatacgctcaggcggggagggacctatcagcgcaagtagcccctcccatgagtgagagagaaatggttactatgatgtgtcataccctaatttcttcggggattattacttgatgacatg

SEQ ID NO: 49959 - DNA, 272 bp, Glycine max
  unsure (1)..(272): unsure at all n locations
cataaaggatagacatatccttcatggaattctctgcacacgaatttcatgtggggggggggagcatgatgaaaagaagatcccttgggtcaaatgggatgaaatatgtcttcacaacaacgaagggaatcaagaatctttctaagnttaatgcagctctcatgggaagatggatttgggatttatactataaacagaattagttctggctcaaggttctaaattccaagtatggaggatggccagccttgcataatggcagaattcattgt

SEQ ID NO: 49960 - DNA, 460 bp, Glycine max
  unsure (1)..(460): unsure at all n locations
gcttctacaagaagagatggccattatgatctaggatggactactcatctaaagaaaagaaggaaaaaattagaaggagctgaattggagcacgttgaagattgttgaacaacatgcctgggcttagcgcatgctgtcaggcctaatgcgagtggtctagcttagcactcaccttcagcatgaatttacgagagctagatgtaaataggccttattagaggcttagttatcctcttaagcctagttctataaatactcagaaactcttaattgtagaaacctttgacataattgaaattaagcttgtgcttagagaaagcttagcctcttctatggtttttgactganaaccaaattgattcttatcaaggaagctattcctttgtggcaaatcctttntcggcttatcaattctccgtgggtcgtggtgtcgntctatntcatcttttcatcttttcta

SEQ ID NO: 49961 - DNA, 507 bp, Glycine max
  unsure (1)..(507): unsure at all n locations
ataactctcaatagtcttgatcaccgatcttagtgtattatattttgttgacatactctcattctacaaaaataccttaataaatatagggtttagggcaccatgcattgtgcttattaatcaaggagacacttaccaatgactttccttcctagaaaagtcttttaccaagtttcttagcttcatccacacaagctttcaaaataggaacaggtgatatcctgtcaacaatattaaactcaagaatatacttgacatccagaatatgtttgtccttatctantaagtgttgaacaatatctgcaaaccacaacaagccttatgttaccaagaaaactactttaagagagtgacactacaataagcatcanttggctataatatatatatatatatatatatatatatatatatatatatatatatgtcaactacaaatgcatcgagcanacatccctgatataataagtgatcatttcataaagaattcactgcagctacatgctg

SEQ ID NO: 49962 - DNA, 369 bp, Glycine max
taacccagctggccttgaattagaaaattgttcctgtcgcaagggtttgtggtttgtgctcctctgctgaccaccatacagacctttgcccttccatgcagcaacctggagtaattgagcagcctggagcttatgctgcaaacatttacaatagacctcctcaacctcagcagcaaaatcaaccacaacagaacaattatgacctctccagcaacagatacaaccctggatggaggaatcaccctaatctcagttggtctagccctcaacaacaacaacagcagcctgctccttccttccaaaatgctgctggcccaagcagaccatacattcctccaccaatccaacaacagcaatagccccagaaac

SEQ ID NO: 49963 - DNA, 319 bp, Glycine max
cccaccatcttctcctttagaacacttgtaatgtgtctactatcattggtatcatctccctctccatcatttggggcgctacttgagctggcagatccctccatctttgggtgtatactttgaaagattcatgctccatcttgcacatgtgttgcgactagattctattcagagccatatcagaattgtactgacactgtctaatgaaggcaaccattatgtcctctcgagaattgactcatgaacgttccagatagaataccaactgacggattcctcagaaagactctcctggaagaagtacatcaacaacttttca

SEQ ID NO: 49964 - DNA, 365 bp, Glycine max
  unsure (1)..(365): unsure at all n locations
ggacattactcttaaaacaaaaatggcatataacctccttccacaaatacaaacatcaatgtaaatttagagcaagcttatgcgcatatttccttacaatcgttctcttgcacaagacaaaaaaaaatgcacccatatacaatcaaggcagcttcgttacctagattatttacacgtacttccaaggtgtatntgttacttacatcacacacatctccttggctaaattcacatacatgcatactccaagcattntggggtaccaaaaattgcacctgtgcacatcttggtatttctaatacctatacatacacaaacttcatgatgaatcttgactatctacacaataaggtgctacatctcat

SEQ ID NO: 49965 - DNA, 228 bp, Glycine max
gagccttggctccctttccttgtgtggaagctcactacaagccttaagtgaaaaaccatgatattaccatctccttaatgaaatttggagctttggaattgtttcgggaataagtcgtgtgggttattgtttcattggacaactagatgcgttgactatgcttcataaatgaatgtgggccatacttgatgtacattgtatgttggttaaatgttggacatgctgaat

SEQ ID NO: 49966 - DNA, 473 bp, Glycine max
  unsure (1)..(473): unsure at all n locations
gcttctaatcattggtcaacatcacttatttatccanattaatgnacattaaacaaacaatttccttttcatatataaaggaaatgccaattttcatgtgtctctgatgtggggtaaacatatatggatagagaggaggaactatagtgcagaacaatatactcttttacggatgattatgtgcatagttatgttcattatagtaacaattaataaattaaccaaaccttatccaataattatggaagaaatggatatatattgaattgatgtncaaatggttcatcaggaagtgagaatganagttaacagactactactgtgttaaccgttttctaactgaaataatggattgccttaacagttttctaactaaattaatgtaatanactggtatggtaactaatgattacaatttacaagctttaatataactngcgctaaatcctaaatatcaatntcataaataacgg

SEQ ID NO: 49967 - DNA, 554 bp, Glycine max
  unsure (1)..(554): unsure at all n locations
nttgaacccctgtgatangcgtggattaggcgaactatcgaatactaagcctctacattcaatgtcgagcatttcgagatattaccggacttattctgacatacgagnaacaagtgtttgtagctagaatttgctcanggcttccgtctaccatttcgagcgtctctatatgttacgggactcaacctgacatcactatccaaaggaattgttgtttgaatctgctcatagcattctaattccatttcgagcgtctcctatattccaggacttcttcagacttacgactaaatagttattgctctttgaacttgctcagagcttcggtattgcacttctagcgtctcgctgtatatcgggactcgatcagaccttcgactacaaagttatcgtcgctagaatttgcttagacctgctgcattcacatgttagcatgatcgatatntctcaggcgctcaagaagacatccgagatataagtgttcgtcgcttgaaagtgctctggctctgacatccatttgagtggccatagtatccgactcctaagaattcccg

SEQ ID NO: 49968 - DNA, 348 bp, Glycine max
  unsure (1)..(348): unsure at all n locations
agcttgagataaacaaacgacttatatcttgtactcggatgtcnganagagtcccgaaatatatcgagacgctcgaaattgaataccgaagcgcttagcanattcaaacgacaaaaactttttactcggatgtctgattgagtcccgtaatatatcgaaaagctcgaatgtgaatgtagaagctctgagcaaattcaaacaacaataactttttactctgatgtctgattgagtcccgtaatatatcgagacgctcgaaatggaataccgaagctcggagcaaattcaaacaataataactttttactcggatgtccgatagagtcccgtatatatcgtaacgcttga

SEQ ID NO: 49969 - DNA, 565 bp, Glycine max
  unsure (1)..(565): unsure at all n locations
atttggacccatgttaagaaccgttgatancncctcncatcnacgtgacactatagacatcgtaagcttgtattctcgtacacacgattagtagttcatgttatatattgtgtagagaccagaatttcggtacacactatctgcaaagatcatctgtgacgacatgctaggtgaaacatatttattttgaaattcatgacaatttgacaccatgcgtattctgactattatataccgcctatatcaattctgtgacaatgttaaaataacctagagctaatgtaagtacattgaacacatgcgcaagaagttgatgcacagagtaagatgatgcatcattgcacctggatctctccaagcattggggcctttaacaactaacactagagtctcccattatacgcatcaataatgaaataagcatgcaacacgatcttgttattgcaaggagcccaaacaattcgctcctccaagctatatcatttgtcattgtatccgaggcgctctaactatgcacttaactttctcgatctgggcaactggattatttaatgccgacaattat

SEQ ID NO: 49970 - DNA, 297 bp, Glycine max
tacacctcgaactacatagatgtggcatgtatcagctgtttatattactcttcaactctgaattcaatgaacacaatctcacactacaagtctgtgtatatgaaaacctacaacaacatctgtactattcattggatataaattattcatttgtggttaaacaactagtcacattaatatcttttaattatttacctgctcatgcacttatatgtattgtaggaagacgcctagtataaagcattatagacaatactaacagctagccatcttgtggaagatgattctagtattata

SEQ ID NO: 49971 - DNA, 323 bp, Glycine max
tcgcattcacatgactggatcgatagcattgaggaccctgctttgcgtctgagtgttgcgttggtggcgaaagagttgcgcagcatcagagctaggatcattctgcaagaaaaaaccatctctgcaccgatctatgcgggtacaggaataatccaagagcagagtgcctcacaaccaataaatctgaacgaaatcgacctctacgctctctatgccgcaattgatccagctgtgcttgccccattgtgattttcaatcggtaatagatgcgacgttgtcgatggcaatggtccgacgatacatgagcctgtgttccgggatgc

SEQ ID NO: 49972 - DNA, 401 bp, Glycine max
  unsure (1)..(401): unsure at all n locations
atgtcttcacattcttccatagtatataacttatacttatgtgtgaggagactcaacttgttcctctntacctacgaagaccctttgtatgttatggctagtgtgtcccacatttgctttgaacttctgaagctatggacctttgtgtattcttcttttgacatagcacatagcaatgcattgtttgctttgaagttgagaaggaatctttgtttagctcatccatcgaagtgacaaaaatactacaagaaggggggttgaattatgttttcacaaagttttaagtcattntgttgagataaaacaagtttatgatacccagaaagagacagttcataatgaaaaattgctttaagttcataacaaaaatgcaagtaattctaaaaaaaagaagttttaca

SEQ ID NO: 49973 - DNA, 423 bp, Glycine max
  unsure (1)..(423): unsure at all n locations
ccatgtgaccaccaagtggagatttgtggtattcttccaataaaagaggaatgaaaagattgccctgattaatccaaattcacccctgaaaaagcaataggttgtctcttatttcaaaatatgggttnttcgaaggttcattgcggacctgaagcatgagagttntgaattcctctgatcccgataattcctttttcagctcatcaaagaatttcgggtgaggcatggagaagatttggaagtattctgctgtttgctctggttcttgaagacgcgagaaagcatccaccaccacgttattatgtcctgccttatactggattgagtaattgtagcctagaagctnggccaggtatacgtgtngttctggggtttgtactggctgagtcatcaattcacgaagactcttatggtcagtgagta

SEQ ID NO: 49974 - DNA, 417 bp, Glycine max
  unsure (1)..(417): unsure at all n locations
actatacccacactcaagctctattgaccgccactcatgacacatgtcctcaggcttctctcctttgtgagttnattgtgcaatggcatgtcggcatggcatccctacatcaaagttgtaaaatcagcacacatgtatgttaagaatgaaaaanaaactataaagaacacaacctgttagttgccatactccacaagtgcatgtccattaacctaaattgacctcaaccttattcccncacatgtggacctcatatctcaagcccatgttatcaccacaccaaatgggagtccattgattagcaaaatggaattctntntctagtcttttatactgcactggacataatggtccaggttttccagaaagtttaaccttgcgggcagccatggttctcatgatataacttctaatttc

SEQ ID NO: 49975 - DNA, 462 bp, Glycine max
  unsure (1)..(462): unsure at all n locations
tgcagcttgtacaaatatcgtcaactcgagtgctctttatttgtgagcatgtctgctagttggtctttggagctgacaaaatcagtggtgatttctgctgaaagtaccttctctcgcacaaagtgacaatcaatctctgtgttttgtccgctcatgaaagaccgggtttgaagcaatgtggatagcagcttcattgtcacatattagtccagcatcctgaacatctccaaattntatttgttggagaagttgcctaagccatgtgatctcacatgccgctgctgccatggcatgatacttctgtgtggtttggtgaggttgctgtatggttcgtttgtgtgatctacagctagttgggttgcagtattgcaacatgcagcaggggaagctataatctggtctggtgtggtgcagcttaanaaaaagtgcatgtgngtggtattatacattgtgctgcaactt

SEQ ID NO: 49976 - DNA, 581 bp, Glycine max
  unsure (1)..(581): unsure at all n locations
atctccctcgactcacgacactgctaagctgangattatggacccaactatggaagaagngatttgagcctgtgaaacgtgatacgctacaagcgcgcgatatgnattanaaccctctcgatatattaccggactcttcctgatatccgcgtatatagatgttggcacatgaacattctcagagctctcaatcgaacatttgagcgtctcgatatattacgggactcagacagacattcgagtgtaaagccaatgccgtctgaattctataccagctcccgtgtataatcccgaccagccctcctgtagatggatatatctctgtgcgacagccgagaaatatttataggcgctagcggcagcgcagagctatcgtgctactgatagccgttggtcatatcccggactcatgctgacgaccgtgataaagtttcggcctgtactttggtcaaactcgacccaatgatagaacgcctactgtataccctagtcaagcggcacccagtgagagtgatggcctagaattccaccactgccctaccatcgagcgcaagtccctatagatccctcgcctccagttc

SEQ ID NO: 49977 - DNA, 184 bp, Glycine max
tcggacatcctttgataatggtattgaccgtagaatgtgctacaagctctctgtttctaattggagcatctagatatatgtcgggacacaaccctacatcctggtatgaagacatagtcacttcatgttgcccacagctcctatcctaaatgtctagcgtctcgatatattaccggactctatt

SEQ ID NO: 49978 - DNA, 394 bp, Glycine max
  unsure (1)..(394): unsure at all n locations
tgcatggaaaggtttaggtctgtatggtggtcagcagaggagcacaaaccacaaacccttgcgacaggtacagatttctgattcaaggccagctgggttaccaagttgaccaacgcattcagtttgccttcaagcttcttagtttcagatgatgcagatgggtttgtagctacctcatgcactcctctaatgactatggcatcatttctggcgctaaactgctgggagttggaggccatcttctcaattaaatttctggcttcagcaggagtcatgtcttcaagggctccaccactggcagcatctatcatacttctctccatattactgagtncttcattaaaatattggagaataagctggtctgaaatctgatggtggaggcaactgcaca

SEQ ID NO: 49979 - DNA, 424 bp, Glycine max
  unsure (1)..(424): unsure at all n locations
agcttgatctttaattaatcttgaagcaattcttgtttgttgaagcaaccttatattaatcttgaagcaatgcttaacctttgaatgtatgttgaagtaatcttgatcgcaaccttgtttgattattctttgccatcatcaaaatcatgtattcatacattcacattctcccccttgttgatgacgacaatcattatcaagtgaattcttttcagcatcatcaaaacctacatgattcacattctccccctctgtgatgatgacaattattatcaagtgaattcttttcagcatcatcaaaacctacatgattcacattctcnccctgtgtgatgatgacattcattatcaagtaaattctttgtgacaacatncaaacctgcatgagtcacattctccctctntttgatgatgacaaccatct

SEQ ID NO: 49980 - DNA, 616 bp, Glycine max
  unsure (1)..(616): unsure at all n locations
ttttctacagtacgatccntaantgtcgtctgtgtatgaacatctaaatcaattatcatctatggggnnnantttgaaccctgttgtgaccttcgatacgtatgcataacgtgcatgatgaatcacgatagctcacagaagattggatgtgttcacaagtgatgactcttctctcagaggccaagaacacttcttgttcactgagatgatgatctctcgaatcgaagaatgagttccagatgttcaggactgactcaagaacacttccacgttggaggagaagatgtcgttccatgaatcatgaatcacggttccagactcaagttccttgattctagacctggactcaagactctagattctggaatcgagagaagactttatccagaccagtttgagaaagttgtgcctaaactgagtagcacatggattcttcttcaaatcttttaccaaagaggtttactctctggaagtgattaccacctgcccactggcttctagagtgtcaactgaattacaacgtcacttgcttcctaagctgcatcgatacaatgtgttcaatctgatacactgcgttgaacgtggaattcaattcaatgtgaaatgtccactcttn

SEQ ID NO: 49981 - DNA, 470 bp, Glycine max
  unsure (1)..(470): unsure at all n locations
gcttcctcggtgccatttcctgcgaaagctaaaatttggaaagttagttntaccagtgggacactactcttaaaacaaaaatggcgtacaacctcctcccataaatacaaacatcaatgtaaatttagagcaagcttatgcgcatatttccttacgaacgttcacttgcacaagacatcctatcaactaaaaaatgcacccatgtacaatcaaggtagcttcattacctagattatgtacttccaaggtgtatttgttatttacatcacacacgcctncttggctgaatttacatacatgcatactcaaagcattttggggaccataaactgcacatgcgctcatttggattctaataccatacatatacaacttacgatgaatttgatacctacacaataggtgctaccttcatgtnnttttaagttttgctactaagcacatgcaatcaacatatttctttgtgataa

SEQ ID NO: 49982 - DNA, 145 bp, Glycine max
gtgcttgtgcgcttatcgtaattatgagccgattcacgcttattagttgatttggacttaacgcgtgcttttctcactctgccgatggactggagcagtgtgctacggtggatgacccttcgcttatcgcagatgcacaacttat

SEQ ID NO: 49983 - DNA, 364 bp, Glycine max
  unsure (1)..(364): unsure at all n locations
gacaaacagctgtatgctatggtaagagctctgccaacatggcaacactatttatggccaacggaattcataattcatttcgaacaccaaagtttgaagtttctaaaatctcaaggtaagcttcaaaagagacatgccaagtggctggaattcatagagatgtttccttatgtgatcaacgacaagaatggtaaagaaaacataatggttgatgctttggctagaaggaatgctntgcttacttctttgcanactaaattgcttggatgtgagtatagaaatgacttgtatgctaatgaatctgactntgacaaaggatgggattcttgtctacacatgtttgtgggaatattatgacacaatg

SEQ ID NO: 49984 - DNA, 519 bp, Glycine max
  unsure (1)..(519): unsure at all n locations
tttganccctgttganaccttacgatcacctgacactatcgaanactgtaccctacaaagtcanccacggtgcgagaggccagtatatctgctctcttataagcttaaangctcacgtttggactgcacatcttcacatgaacatggatgtaacatctcgcaagtccgatgcgaatgcatattttactcttacctacactgtctatgtgattccatgggtcgcgctagtgtgcacatcaacccattttgcccgtagactcttgtcctgacaagcagaccacctatatcaggcgcttgttagcaccacaccatatgtgatttgctagcctagcaaaaggccacgtctcctaccgtatatcttgcctggacataagcccaatttcacgcaatgcttctcatggcaatgctgtgtcacaaacactataggcttgtctctaatatggcggattatctgaaagttgattgaggctccagctttgtcaattctgcactcgggttggcttaccgctatgcctgtct

SEQ ID NO: 49985 - DNA, 427 bp, Glycine max
  unsure (1)..(427): unsure at all n locations
gcttgccacccagctcgcccaggctagcttttctcacccaggcgagcaacgttgcttcctctagaagcaacagccttctggaggaatcttctggagggcccacttgggcctggttgctatttgcaccccccctttntaataaatgcacccccttctatttttttggtaattctttttccgtaacgttacgaaactttacgaatttcgtaacgatacttattttccgtccgcaaggttacgaatccttacggattatgtatttactcttntttagctttcgaagaagttacggaaactcacggattgcgcaaaaacacctcttttcgatttccgccacattacggaatttcacggatcgcgcaagcctacttcctttngatttctgagacgtcttgggacttcatttattgcatgtcatcaagtaata

SEQ ID NO: 49986 - DNA, 284 bp, Glycine max
ccagaggaccacaaaccactcacccttgccacaggttcctattactgattctacgccgtctgggataccaagctgaccaacgcatctcacatggacttcatgcttcctagtttcacatgacgcagatgcggttagtgctacctaatgcactcctctaatgactatggcatcattcttggcgctaaactgttgcgagtaggcggccatcgtctcaagtaaaattctggcttcagcacgagtcatgtatccaaggtctcctccattggagacatctatcatacttc

SEQ ID NO: 49987 - DNA, 429 bp, Glycine max
  unsure (1)..(429): unsure at all n locations
agctaggagactaaagggggccctcatcttcttgcattgatcggaccctgccaacctattcattatgcttcctcttggtcagaacaggaggaggcatgtcgggcataaccttgacaacttcatcttcatcagcttcagaagctcaaggagggttgactctggctttaggttgacctccttccctagcagaaagctcaacaatgatgagggaggagcaggcacatcatctttagtaggtccaacctacttcatgaagggccgccatttgaaacctcccattatacctacaaagatagatgaaaacataacgaaggttataaaagacaaagttatactaaacgaatgataaaaagggaaagggcaaatgctttaccatccanaatagtacgaggatcgcatgttgacagtaaagataggatggcttacaca

SEQ ID NO: 49988 - DNA, 402 bp, Glycine max
ctgctcaattgctccaggatgctgcatggaaaggcttaggtctgtttggtggacagcagaagagcacagaccacaaacccttgcgacaggtacagatttctgattcaaggccaactgggttaccaagttgaccaacgcattcaggttgtcttcacgcttcttagttttagatgatgcaaatgggggatgagctaccatctgcgctcctctaatgactatggaatcacttatggcgctaaacatgctgggagctatgatgccaccttctcaagtaaacctcggacttactggactcatgtcttcaagggctccaccactggcggcgatgatcatacttctgtccatattactgagaacttgataagaatatcggagagtattctgttctgacatcagatggtg

SEQ ID NO: 49989 - DNA, 463 bp, Glycine max
  unsure (1)..(463): unsure at all n locations
agcttgtggaggtcattctctacgccattttcatcgctgccgcatgtaaaatgacggtcaaggctcttaagacagcaatgtaaagatgtagggtatgataatagcaaggcaaattgaaatagaatatgtatattggtatttcattgatcctttgcatgatatatataatacatgtacaagaatgttctataccaattctaaggcatgacagacgtgatccataatcagtggcatctgatttattctatgcattataaggtaaataaatatagaatcaaggtaacataggaaagtaaatatatacacagcatattngcaatcatgtagaagatatttcctaatactccccctcaagttggtgagtgaatatcgtgaagtcccaacttgttgcgcaatgtcacaaattgatcttttcccacagcttttgtaaacacatctgctaactagaaatttgttggacata

SEQ ID NO: 49990 - DNA, 127 bp, Glycine max
ttcattcgagagtatactctctcatcatactcatgagatttctagtgcctgctctgatacccacagagattctgattctgaggacagacgtcggaccggatgtctcgtcatcatgcttcacaacatg

SEQ ID NO: 49991 - DNA, 624 bp, Glycine max
  unsure (1)..(624): unsure at all n locations
gcactcactnctccncncgcgtntcggttcgagattcanantaaaaggntaatagaatggnngngtgnnnngcnnnnncaggggnntttgattcgatgcactgcagcanccgggatactctaaaacgacccgcggcatgcaagctaggccaaatagagctaagattattcttcttgatgaagcacctttcttggtggattagcaagtgctttcttttatatgtaacgaagctatttatagggcttggtggcttaatataagattgagtcatgcttaaataatgacccaaccaaacattatccgttataagacattatgtatatgtgtatcagtagtcaagaacttagggatagtttaattaagcagagattattattggttcaggatttcttggtatatgtcaatccaaatattttatcggtagactgagttttcttataaaaatatagactacgagtgactctgtctatcttccatcaacgttagaattcagatgctcaatcctatgacgacctctatttcattcttactctctcaaaaacagagtttcctcgttgacattattagattctactaggtccttcgctgtacacagactgagtcatatcatcttgttaggaattn

SEQ ID NO: 49992 - DNA, 626 bp, Glycine max
  unsure (1)..(626): unsure at all n locations
tatcccatttcgacataagtgaaagatgatcacagtattataagaactatgaaaaaatacgagagngnangngtnattgaaaccctgttgananccttagaatacactagacactatcngagactataccacactcagtcatggacaggcgtagagagagtatatctgatctacatgacttaagagcctcactctagggctccacatgtgcgcaggagacacggatgaaagattggcgaagtcctaggcgcaaagataattggtctatatctacattgactatatcgacccgcgggacgcgctaatgtgcacaacaactcactatccctataatactcttgttaagactacaaacacaccaagaatcggtgcgtgtcaggcactcacaattcttgattagctagcctgggacaaagcccactcctacatactgaatatacctgacttggatcaaacccgaattgtaatgccaatatatgaaagacggaaatgcgatgtcatcattcactatgtcggattatcctccaaatttggccgagaataattcgctaacgcaaagatggagtgatcgtgacttagtgagaatagagtctaaacgggttgtgctaaccgattatgcacgggcn

SEQ ID NO: 49993 - DNA, 331 bp, Glycine max
cttaattgttcttgatatcatcaaaatcttcatgattgacattctccccctttttgatgatgaccaccacctgtaggctacgagcaacaacaaagaaaagatctatttgcatatagtttactcccccttggttctacaatgatcgcttatatgagacaattgaagatttcatatttttcatatataaaaagttgtctcatacaacaatagataatctttcttactatttcatctgtaatctgtctctgcccctttgcaacatccaaaacaaattatgaatagaaaggagaaagatgttaccacttgtcgaatgtgtgagaatcagtgatac

SEQ ID NO: 49994 - DNA, 545 bp, Glycine max
  unsure (1)..(545): unsure at all n locations
nttgaccccttgtaganaccnttcgtaaccctccacatacngacctatacaatctcaagctgcagactctggcgcactcttacacgcttgtctacgctgacgcccgaccacagtgcacaacacactctcacacacacacatatctgctgaaccacccattctctgttgaccacctccaactgagctcacgttctcccacgcagtctatattcatgattatttcaacaccgtggtcccataaatactgttgagcttatactactatctatgaaaatcatcattcttaacagctcaaagcttacacatccgttcttagcaaatcaaagggagagttatctgattcatatgttagacagaaccacagcagttctctttatagacaataaaataatgactcatatgcgaaatatatactgagagtcgactactatatatactgcattcaattcagttttacattacgaatgtctcgaggctactatctatcccctcagatactgtctgctatactcctctcaaaacctcactctaccgttttccacatg

SEQ ID NO: 49995 - DNA, 402 bp, Glycine max
agcttcaagaacacaatatggtactcatgatactaaatcagcatgaagaagatgacgagacatagaaaggaatgacacttaaagttgtatcttcagttccagaagaaagtgatatataagactctgaatgaagtagaagagatgatgatttcagtttcttcgtaaagagattacataaattccttagaaacaatgaaaatcatagaagatctaacttctaaccaaagaaaagaggagaggattcatcttttgttccaaagtgttatgaatgttaccaaccacgacatctgatagttgattacccgagtttcaagaaaagaatggaaagatctaagaggaacactctcaatgataagagagcgagataagcttacatcacttgggaatataacaatatggatt

SEQ ID NO: 49996 - DNA, 469 bp, Glycine max
  unsure (1)..(469): unsure at all n locations
ccttgaaaatacaagtcttagttgtgatattagtcttgtttgtatgatctgaattaagcgctgtcatatgaggaaaagtgtaaatgcttgttgtacttgaaaatcaaaatcagattatatatagatggatggatggatatatataatcactcttactttgactgtacaatactattataaataacagaaatgttcaatacttaacactgtcggcttagtatgcaatataaacagtctttatagatttaaattgataataataaatcctacattttatgtcctctccttatgtatcaagcttgtggttgataatatgcatacctcacgtaaaagaaattgaactcctccaatcagatcaagttgattcacgagaaactntggtgtgctatgtatgagctcaacaacttcatcangaacctcatacaacatgttagctaacatggaaatgagcttacaatgaactaattct

SEQ ID NO: 49997 - DNA, 428 bp, Glycine max
  unsure (1)..(428): unsure at all n locations
cttagagtcgcctgcggctgcagcttaattatgggaattttatgtcaattctattttctaaatntatttgcacgttggttntatatatcaaactaaaacgtattatattaaaaaaaacttaagcttttaattntttttattaaatgatcattttcctagnttaaatttctctctctatatattaattttaaatattnttaaacttacctaatcgattgaactntgaagcctctttatactatatttttactctttttcaccattatttttagccctcctccagtttcaccccttgccttccgatggaaacagactgtgaaatacattatgatgcacttggtgtatcattatatacccaatcatccatccatcaaaagtcaagaatacttccttccacatcaaatatttagaaaatgatatcaacattc

SEQ ID NO: 49998 - DNA, 488 bp, Glycine max
  unsure (1)..(488): unsure at all n locations
atgcgaaccaagaagaatgaaatgaacagaagacgttgttgggattatcgnctacgggccttaaacagagaaacgaatcaaggacctaaaaagggattattaaagaggttaaaanaacggaaattgttaaacaagaataacataataacagtattttacttgagtcataacataatntcttttatatttattatttgataatcgatacacattataagtatttagttntactatttatattgtttactagatataaaacttagacggaatatacgcgttaaccgtaaaaatcataaaaatgtctttcgatagataattatattntcatgctagaatttattgacaaatacgaattttttttatcatgaatcactaaaattatattttgattgtaagttttttttatcaaatatataaatttcaacttaagataattgttatatgttgacaaaatagtattataattcgatatatatctatataaagat

SEQ ID NO: 49999 - DNA, 368 bp, Glycine max
  unsure (1)..(368): unsure at all n locations
aacacacaaagtgaaaatactaagtatttattacctatacttaacagaaaatacttataacattacaaaataaccataaattgggagagtttgatacaatttatacaagttttatacacaaaagttagtcgttttcaccgactaacaactcccccaaaattatagttntgcttgtcctcaagcaaaaagagaactactcacttgtcctcaagtgacaatgacatgcagtgactatgtacaaaggtgtatgctacaaagtgactaatggcatgataagagaatggagtaaaataccctcatcacttgtctttcataaggtatgcagntatccaaagagaagaataaaatgtaacctgaacagatagatg

SEQ ID NO: 50000 - DNA, 486 bp, Glycine max
  unsure (1)..(486): unsure at all n locations
gctttgagccacaatcccaacttatcatattccttttacctaagtgagaatatcaatccttgccctcggaagataacacaaaaagaatgataatccctcttctaagaaagggagaatgcaaataaggaatgataattcccaattaaaagagggagaatatgataatataaagaagaaagattattcccgatcaaagatcggaagaaaacagaagatatatacataaaggtctttggaccagacaatatctgaacaatacagaattgtcaccaagaaaatattgccaaccaataacctgtgcgtcagtggctcgtttgccttacgctaaacataaacagaaaagaaaaaggccaaatacactcaaagcctaatttcccaccaagaaataccctcattccaagaaaaagtcctactgatccatgatcacgcatgtaatctttgattngataggagatgatgttgaaaatcaagtcatggcatatctat

SEQ ID NO: 50001 - DNA, 518 bp, Glycine max
  unsure (1)..(518): unsure at all n locations
ttgaacctgtgaaaccttgtaacccaccatcggactagctccattatctgaaatcgctctttattcgctttgtntaggctcnctactagtgagaatgtatgataagtttaattgagtatccagagctgaggccccacacaagttgagtacttaacatcactaaggatcagagccaactgtcggtgattgatatggacatcatatacgctaccaacaaacattctgtgtatcaaaggcgccaaatctcattaactgaatgatcaaatgacatctcattttgagtacattcacattgacctatgggatatggtagcatatggtaatcacattgcatatgacgatgagttttacgatattcttagaagcccattgatggaggagtaacaactcatattttgctcactccatgcttgaactgtttgttatgtcttatatatcaaaacacactaattctttctccatattgcgaaaattgtgttactctcgtgttcctctatgacacatcgttctaagactct

SEQ ID NO: 50002 - DNA, 428 bp, Glycine max
  unsure (1)..(428): unsure at all n locations
agctttgaagacatagaaaaccaaccgaagtgctcattcaaattccttttgaaaaagatctctataaattcttgtaaaggttagaatatctcgcaaaacactttgaatatattgagacaaaagactacctgcagttctctccctaatctccttcaattcccatgcccgctctctctctctcattctcttcctccattgaagcttcctttctaagcttcttatccaaggcactctcttggtggagaaacttcaccttccatggcttattttctagtgcatctcacctcttctcctttattttccgctgcactttcatggctgaaaatcaccattgaaggaccttattgaagctcanagatctagcctncatagaagcttctcgaaagcaatgagatcatctgcttcgaatgttgaaaacctgaacacat

SEQ ID NO: 50003 - DNA, 630 bp, Glycine max
  unsure (1)..(630): unsure at all n locations
tcatcgtctatctcactaaatatacgtatgtcttactcgtatataacacagcnctaaagacataggcggcntttganaccttggaagacgcgtactatacatactcagccccgacgcaattcaaaccacaatcacttttgactcggaattctgattgagttctgtgatatattgagacgctcgaattttgagaccgaagctcgctgcataaacggacgactattacttttctctctgaagtcgcattgaagtctcgaatatatctagacgcttgaaatntaaaaccgaagctcgttcacaattgaacgacaataacaatttcctcggaagtcctattgacgcccgctatatatcaggacgcgtcaaattttcaatcctagctctgtgctaattataataacaattacattgttctcggaagaccgattgagtccctgtatatatcgagacactcaagaaataagaacctagctctcatatgatgttaacgacattaacgtctctctcggagagcctgaatgagccccgtatatatcgtaacgctcgatatcgataaccgaagctcgatcttatattagctacataaatttcactctgatgtatgattgagactcgtatataacttgggcc

SEQ ID NO: 50004 - DNA, 526 bp, Glycine max
  unsure (1)..(526): unsure at all n locations
atganccccttgatttcccgcgattcttaagccacctgggctgcagcttggtttaaatatcagagtctcgatctattacgggactcaatcagacctccgagtgataagntactgccggtagaattaactgcgagcttcncgtttataatttcgagcggcgggagttattacgggactcactccgacttccgagtgaaatgttattgtccttccaatttgctacgagcttccgctttaaatgccgagcgtctcgatatgtacgggactcactccgacttacgagagagatgttattgccgtagctttcgctgcgatctttgggtataattcggagcggctggcatattacaggacttcatcggacttccgagcgagttgtgattgtagctcttatntagcacnagcctcgattttagaatacaaatcgccgcatatattatctggatgaaacctccttgcacgcaatatatagtacccttatctttgatctgccaccggatatattctccagacggttaccattccc

SEQ ID NO: 50005 - DNA, 520 bp, Glycine max
  unsure (1)..(520): unsure at all n locations
cactctcctacgctcaaggcagcggttntaaacacgtacataaccccagctaagggangaatgggcctgatnactgccttacggaccagccgactgngaccgtagagaggagacggaaattgtttcgatttaatacccgcctgatacagaaaacatacatggctaaacagcataatataaggctactaaactgaattgtgatgatataacttcttaccgaatggactgacaatagatggtacttcagttcattgttgaatagtcatatcctatggaagagactttgacagcaattgagttgaatgcattcatatttccaggattgaacagtatcgctcaatcgaaaatgacttcggtggaacatatgtcatgcgaagatgttgcatatacattcttagttgagtacagaaagatgatattggaggaggttagtaggaaaatttgttaaagaggaatgcgcaatgtgaccacaaagtaacattgccaatataaatgctgagaatgaacaccttcctctgcg

SEQ ID NO: 50006 - DNA, 612 bp, Glycine max
  unsure (1)..(612): unsure at all n locations
caccgccagcccctcccggcgtcgantcgatatacaaataactcaaagcacatcnccnnnccccgaacaatggggnntttgaatcatgccntgcagngccgcgaacattanactgaccgcagcangcaactagagagaggaagngngattgttgtatcttcctgccaccatcggggaccacagagcggcgcctggacatacgtcgcgggggacacgagacactgtggacgtcaggtggggtgctgtcgcccaaaaccaagcttgaccaatcccgacccaacccgggcatagtcggtcaaagagaacctgagatgcacctaagcaagcgagctcctggccgccaacagataaaaggaacacacacctcaaagcacggaggcttgtggcggctggcccgctgtgaactgagattgacatgagagccatggcctctggcaacccattaccaagggtgggccatccatcacaacgcttaatagtgaggacacggggctaacaagcgctctggcaatcgacgaccagcggacgtaatcgatgcccaggctatgaaacgacagcacgaagctaaagcagcccctgtgaatcatcacacgctgcgcaccgttaccagcc

SEQ ID NO: 50007 - DNA, 415 bp, Glycine max
  unsure (1)..(415): unsure at all n locations
agctntaacctcatcgtccctcactgtctttatgattgggagccaatccaatccttgtgttcggactctcagccacttatgatagccgccgatgatcccattactgcttcccctaagctctctgtcctttcttcacgccgcatcccatgccttgcgaactccttggagtaccctcgcgttgtggtcactaaaaccctgtgcgatgaaaggcgtgatgctttcgtctaatggcgctcctctcatggggtagccaagctgtcttatggcgagaacgggattataattaatacaaccccttgttcccatcaagggaacatttggacatccttcgcatgaagatagaatcctgattcttccttccttctagcgagggaaccaattaacagacgcccncccatgctagccaagagttggt

SEQ ID NO: 50008 - DNA, 317 bp, Glycine max
  unsure (1)..(317): unsure at all n locations
tgacgaacctacatnctcatnataaattatgctcaatcgattacgaggaggagccgccacaccactttcaactaaaacatcatgaagcttgtgggctaatagagggatctccatggcaacgtcaatcatgtgtagagaacctattctgcatagcatatccaacatgcacttagatgttgatatcagtaaccataacctattctgcacattggaaagtagatctggtccacaaccctatatttctaacacagtgaaatagtacgaagtaatcactagtcacaacagatacaaggagagacacagaccatagttaacac

SEQ ID NO: 50009 - DNA, 463 bp, Glycine max
  unsure (1)..(463): unsure at all n locations
agctngaagcgagagttaaatgagatctcttnttggccaatatggaactccttcctaagaatgctagagtcatgaaacctcttcactttctccttgtaaatcttggagttctcataagcctctaagcggatatcctcaagttcttgaaatcgaagcttcctttccatacttgcttcatcaaattccatgttacaactcttcaccgcccaataagcatggtgctcaatctccaccagaaggtggcatgccttaatgaaaaccaccttatagggagacatccctaaaggtgtttggtaagcggttctgtgagcccatagagcnatttcaagtagcttgctccaatccttcctattgagctacattactttctacaacacttgctngatctctctatttaaaaccttcacttgcccaatagttgggggatgataagttgtagcaactctatgcataaccatattct

SEQ ID NO: 50010 - DNA, 622 bp, Glycine max
  unsure (1)..(622): unsure at all n locations
cgcgctcccgtnactacatgagagtagtgaatttngtcatagaattcgtcaaacagacgaaagnacacntttgaaccctgttgaaaccgtagtaacacgcgcaaatcgaaactcaagctgcataacaacactgagcattacgctctactcaaccctctgctattatgtacagactggagggaatgtagttaactcagaatgaagtatgaatggacgacccttcatgaataaccttactcttcacttgagataaggagaatctaacgaggtacagataacgtttttaagattatgngaacgacaataccttctgcgtatgatatgagacccaatgagagtacatcaattggacatatgaaagcgcataaggagaccgtcatgggtgacatgttattatagtgaaaccaatgactgaccgtgaaaagtgtactataacgtatcgcatattctattaaactccttatagaatgcgtagctactttattgttggtgtgcgaccatagctgctctgcttttcgaagtgaatagcgcaacaataaagacttgtgatcctaccaaagcacgcaggatttttatgctcgtanaattaacttacttcccaaacacttctctctgacgggcg

SEQ ID NO: 50011 - DNA, 343 bp, Glycine max
tagctgagatgaagaagtagtgaatagtgattacttctgctcttatcggggaccacagagcggtacctggagatatgtcgcggtggtcaagagaccttggggacgtcaggtggggtgctattgcccaaaaccaagcttgaccaatcccgacccaacccgagcatagtcggtcagtgagaacctgtgatgtacctaagcacgcgagctcctggcagtcaacagataacaggaaaacaagacccacaagcaaggaggctcgtggtggctggccaactgtgaattttgtgtaatatgtggattggtggctttggtaatcgattaccacaggtgagtgatccattac

SEQ ID NO: 50012 - DNA, 477 bp, Glycine max
  unsure (1)..(477): unsure at all n locations
nttgagctgtgtaccctgatnctctgacacccaacttaggttctgagcgggcaaatggatatattatatacactataccttgttgctgcttgaagatgtgaaacttgacactcaatgaagtccgctcctgttcgtggcactaagagagatagtcttcactgttagttattactgctcatggttccgtgcttcattatttgtgacttttgaaggaccctcagaagctagaggggctgccataacaacttttaccggtatattgctataattcaacctattctatgacttttgcctatccacaagatgtggcgacctttccattcttaattatgcttcacatgttcatgggttagcgtaccagcgtctcagccatgttatatatgaaagacttacagtgatgtgacatatcatgatgacactgatatttgtttctcaaaggattgagaatacatctagattgcacgttgaagttttttt

SEQ ID NO: 50013 - DNA, 472 bp, Glycine max
  unsure (1)..(472): unsure at all n locations
agctngaagaatgcaatggctagtgttatttgtgttgactgaagaccaagaattgtgtatatatatagtttgtaagattctgtggaaacccaattcccagagaaagtgactgtcaatggatggagggcatacgcatgagatatcacatggtgttgtcttcggtccaactatgaaagataagttgtgaagacttgcgtaaccccaccttatcatacattaattggccagcataaagcctccacatgtaaccaaatgagacgtgcctcagtgaaacgtaacgtctattcaagcattatttggtattccatatntttagtaacatgctctgagcatgttctggaaagtaatttctggctgatgaattataaggcaccggatagcgagaggcatatatcantttaattattctgatcaccacatctatttatttacgcgagaagtctccaggcagccatatccctcgtctcctgtt

SEQ ID NO: 50014 - DNA, 301 bp, Glycine max
ttgcatttgtaacacaaatgcaacaaactttactttggtgaggttgtctgttaactgttatctacaagactaatcttcacatagtaacactgaactacaatgttgtctatcacatcatatttgttagggatggtattaagaattaaatatatgaaccttatgaaccgctacatatggatgtaaatctatgatctcaacctcttaccagatgaatgagatggatttacgatctcgttggcctatggatctaggatctcgacctcacatcatatataggacttctttatgaatttttacttaa

SEQ ID NO: 50015 - DNA, 253 bp, Glycine max
agtcgtgaagtgcgtggctactactgggacttcttaatttcaagtttgggtggacttctttctctcttaaaattccgtgggtatggggcttagggagatatgatgggtggctatgctagctttctgctgcgtgatgattatttgtgaaggcatttgctgaaaacctgttgaaattgccatgtttggatgagttaaacatacccattctgtgttagggtttctgagatgatcgttgtgatgctcatatgctgaa

SEQ ID NO: 50016 - DNA, 110 bp, Glycine max
ctgtaaacattctcagacttttttagctcacatcagttgatggataaaatactctctgatggcccacactcagcataagactaatttataattgacaactttcttatgaa

SEQ ID NO: 50017 - DNA, 475 bp, Glycine max
  unsure (1)..(475): unsure at all n locations
agcaagcttcacaacatccaagcaaaacaacattcacacagcacaagctatcacagccaagcaaaacagagcaaaggcagaaaactctgccaaaacaccaaccaaaaatcacagcttttaccactcaaagaccccagtaacaattccttctttccaattcgttaaccgttggatcgactccaaatttttactggaagtctctaatacataagcctacattttgaccgttgggatctactancaaacatcccgaactcattctgcactgctctttccacaaccagcaaatgcctagtatttttctgcacttgtgcaaaatcctgctgcacaatttcacagcataaatctgcacataatgcagatttcgaaaaccacacttccnctcattcaatcttggccgaatcaaattctacaagtcccatatcatgtatcaatcatgtctaaaccaaagtcaagcttcataccacagcaacac

SEQ ID NO: 50018 - DNA, 415 bp, Glycine max
ctatccaatactcaagcttgacaagaaagcagaacccggaatatctgtgggttatagtcttacttcataggcctactaaatctacctaccacagagaaacatagtaatcgtcagcaaggatgtcaaatatttggagtcagatagttgggactggaaaaatgataagaggtctgagtttcatgaggagaatgatgatgttgatgaacaacccatcatatgaaccagatcactttcagacatctatcataggtgtaatgttgttgtaatggagcctgagggatatgaagaagctacagctgatcagaaatggagaaatgcaatgaaagaggagcttataatgattgataaaaataaaacatgggagctggtggacagacctaaccacaagatagcgattggtgtcaagtgggtttat

SEQ ID NO: 50019 - DNA, 434 bp, Glycine max
agcttagcgcgaagaaagcccacagtgaagtctatatgtgcacttagcatgaaagtccgtgctaagcgtgaagtcggtgtgaaaagtaagctacctagagcttatataagaataaggaagtagaaaggataaacacaccgagtctcaaagctatccaaagcctgagcctatccctaaggggaaaccctccttctatagtcattcctccttctctgtctattattcatccagccccttcttccatccacattatcccttgaagtgtaaagcctctcatggccatgaaaggctaaacctccattgttgggagcttggcatgccaacacccttgtaatgtaactgttctattatctattgaatgcaattctattttatttcttttttctactttcatcttattgatagcagacatctgtgcatactttaggatatca

SEQ ID NO: 50020 - DNA, 416 bp, Glycine max
  unsure (1)..(416): unsure at all n locations
aactagagtcaaaacttttgccatggtgatagcaaataatcctaggcaatacatgcaaaatagaaaaatattctacataaatatatcacatatacctacataaatatataccatcatcatgtttcattcaaacaataaataaaaactagcaattttcggtaggtgtctaacctctgaaacaaaaatattttaagagctgctacttgttgtgtctcaatatagtttagatnggattataacccgagctcctgaaacaaccatgtaaatcaaactcatcaatcaatgactaaaaactgtaaatcaaacagcaataactgaaattatactgagttgtgatgaaaaaaacaatgacagttatattgcagaaatacacttgacacgtaggtatttttgttgatattcaaatgaaacatttg

SEQ ID NO: 50021 - DNA, 290 bp, Glycine max
atgcaagctgcacacatgcaagcaaacacattctaactgcacttgctctcacagccaagcataacagagccaaagcggataactctgcgcaacacaccaaccataatcgcagcttgtctcacgtatagaccacagtaacaaccccttcgatccaaatcgataaccgttggatcgacgccagaagtctactggaagtctatagggataagcctgcatatcgaccgaagggatatactagcatacatgcacaaccctatccgaactatacttggcacagcctaccacacaca

SEQ ID NO: 50022 - DNA, 650 bp, Glycine max
  unsure (1)..(650): unsure at all n locations
tatacgcgtactgtgagttatactatgtatcgtgattagctaaactccatangaggtacannatattgtgtgnnggacntttgatacctattaatactgtaatatacagactcaagctatgacttnacgcatccttagcatatataggtatagaggatctatccacttgaaagtgacgacaacagactcagtacaatgcattctattgatacgacataaattggaacaaccatgaattagtatatatagctacgccttatccaatccgaataatggaaaataaggaatcagctggctgataaatgaacatgtggtcacatgcttgagtcatgtatttttgaaaccacatccgaatgaagaatggttagcgttgacgtgtgttaaatagagactaggctcaacccaacctaatcacaattgtgtagtgccaaagtcacgacattagattacatattccgggaaaaatggaaaaagaggaaacacactaatatgcggagagtatggaaaacgataatgtgtcccacatttatgagaggcactgtgttagaaatgtaatggtcaagtaaaatattatacacacactgcttgggtatataatagtttttctcgcgcacaaacaaatctggacgtccactgaaataatagatgcg

SEQ ID NO: 50023 - DNA, 366 bp, Glycine max
ctcgcccaggcgagctctgttgcttcctggagaacttcctagaaagcccaaatgggccttgttgctatttgcacccccctatttactaaatacaccctttgcctttttttatgattctttttccggaacgttacagaaacttacgaattacgtaacgatacttgttttcttttcgtaatgttatgaaaccttaccgatcacgtaattatcccttttttttggcttccaggatggtacagaactttacagattgcgcactaacactttcttttaacttccggcatgtcacggaatttcacagattgtgctacaatgctttcttttgacttctggcatgtctcgaaacttcatgaattgcctaaagat

SEQ ID NO: 50024 - DNA, 390 bp, Glycine max
  unsure (1)..(390): unsure at all n locations
tacaatgggctgttcaaggagtctaatatatgttttctcttctccatcaatatcttacccgctgcaacatggttgctaccattatcagtgataactngaaccacattctgttctccaacttcctccacaataacatccagcaactcataaagcgaagttgaatgccaaactcggcttggtacaaatagcgagcaatatgttggtgcaccttcagaacttcattcttttcgcgtgactcttttatgttaatttgcctcaatatcttatcttcagactggtctcatctgctgaattcttgcataacctgtccattgtgcctgttttatgggcattccatctcattgcagcagaaacagcacgagtgtcacagtccataatctcatcttcact

SEQ ID NO: 50025 - DNA, 406 bp, Glycine max
acagcacgtataggtagtgtgatttcttcagcgacgtggaatccacattgctgtctatgcctgttccaaatagactgacaatgcttggtgtcaaaatgccttcataattggcttgtgaagctgaagcttggcttattgtataagagactgataatgcttagtgctaaaatttctttataattggcctatgaatgaagctgaagttcgagcttattgtataagaataatcattcttttgtcagcttttaaaaaagatagagaacgattatgttctcataattaatcttttccaagcatgcatggaagagaatagtgagtgatactagaatgaatagcctacagctcgtacatagaaagtattcaaggagggatattactgcgtacttgagtgctcatttcactgcta

SEQ ID NO: 50026 - DNA, 528 bp, Glycine max
  unsure (1)..(528): unsure at all n locations
actccgcaagtgtaaattggtactctcatatactaaacatatacaaacnncncagcatgggncnggttttgatcctatgatacctacattacggacctacgaaactcagccatttccaagctatatggggaattcttcactcaggctaccctaaggaggcgctcatcaactctcctctgatccatgatctcatgggaaatacacttaatgacccaagatctcaaaatcagctcataaaccccaaaacagcttccatgtatgcagcctcaaggaatcgcccataagccacttgtcggaacccactgatgccatacctaacgctgctcatgcgtccacaactcgagttggcctaagatcatgatagctagaggcgaccataaggatactctcttctcccacttacagaacacatcaatgtgttgctaccaatgaaaaggacctcacttacagttggagcatgtactgatagagtagtgggcacatagcattctcaactcacattttgagacccaatggattgcaaccaag

SEQ ID NO: 50027 - DNA, 373 bp, Glycine max
  unsure (1)..(373): unsure at all n locations
attcttgactccatctcatccaagagcatgtccacttgtcataccgaagtgtcaaacctttcaccaacaaaggtgtgaagaccatcgaacctatccaaaatcttggaaagaatagatgaatcttatccatcatgtgcttcttcaccaacatgttgagcatccttnttcacccaagagccatcatgctctttatgataaccaaatgatgcaatgattgaaatgcctattagaaaggatctctagattggaacatatggttcagagtcaagagggatgtcaaagtgctgaaggaagagggtgactaaatgtggatatggcaatggagcatncaatcgcaatgccttatgcatgcgatatctaacaagatgtgccc

SEQ ID NO: 50028 - DNA, 334 bp, Glycine max
  unsure (1)..(334): unsure at all n locations
acaacattcacacagcacaagctatcacaaccaagcaaaacagagcataggcagaaaactctgccaaaacaccaaccaaaaatcacagcgttttccactcatagaccccagtaacaattccttcgatccaattcgttaaccgttggatcgactccaaaattttactggaagtctctagtacataagcctacattttgaccgttgggatctactagcaaacatccagaactcattctgcactgctctttccacaaccagcataagcctagtatttttctgcacttgtgcanaatcctgctgcacaatttcacagcanaaatctgcactaaatgca

SEQ ID NO: 50029 - DNA, 430 bp, Glycine max
  unsure (1)..(430): unsure at all n locations
agctntacttaggagttatctntgccatagttactctgattacacccaaatctccatgtttataaaaggaaccactaatgaatatagaagaatgataaatgctttagcaggaggatactatgtcaatggaaccacgaccaaagtaaagaaaattatagaagatgtagcagttagtgaacgagaccatgattgcaaccgcacctcgccaaagggcattcacaaagaagacattgaagatgaatccttcaaacaacaaacacaaatgaaatctatgatggaggctatgatggagaatgtaaccaaaagcatagtaaaaaaatntaatcattgatattgccaaaaaaatcgattctctcatgtgaagagtgtggagggtaaccaccatacctttactatatgaagaaagtagccaaggaagccaaattcatga

SEQ ID NO: 50030 - DNA, 578 bp, Glycine max
  unsure (1)..(578): unsure at all n locations
cttcactctgtcatcgtccaactgcacngattatattcgaaaagttattgctaaaaatgtcacgcnccanctttgatccctattgtaacttagctatacgtgcactatctaagctcaaggcatacgtcgnattatgaagctagaggatcttcctcgttgatatgccgacaacagactctcttgtaatcaacctattgaagctacccaaattggaacaacacatgatgtatatagagatgctcgccatgacaatgacgctaatggccaaatggaatctgtcgatcacattgtcgcgtgacactctttggaacgagatatgcttagccaaagcgattgacaatggaatacatgatagtgtacatgaatcaggtcatcccacactaaaacagttgtatacttcgtatggagacttcctgttacctttcactagatatggaataaaagtacacactttttgccacagtagtgagggagaattgtgcaacctatgaatgactgtcgacaatgcctggtcaaacatataacaccacttttagaatatagtcttgcgagaaaaagcgtctcgctaatgaaatgtn

SEQ ID NO: 50031 - DNA, 351 bp, Glycine max
  unsure (1)..(351): unsure at all n locations
agcttgtagaatggctagacataatacatgtctgtggttggttaggctcaaagataatagggatgccccacattatttccatgacacaaatgcaataatgatgatttggaaattctacgcataactggtcatgcatgcacctatgcgaacactcaagtgtcaaaattttatggtcatgtgatgctagggctcgggattcatttnctctatttttaatcaacccaatgtttccaaaatatgttcttttatccatttgtgcatacatccgagtccattgtgggcgtgcgggaaaattttcacagcattcaccctttaagtgtatactcattntattataaactagttatgatc

SEQ ID NO: 50032 - DNA, 518 bp, Glycine max
  unsure (1)..(518): unsure at all n locations
ttgaaccctgtgtaaccctgtcttctgtgcactatctatactcagcgcgacaatgggtagacatgantcaaggctctgcccggtttggatcaatgataaacaggctgcctcccatgttttccatgacaccaacgcaaaatagatgatctgggaactatatgcataactggtcatgcttgcgcctatgcgaacgctcaaatggaatatttgtatgggcatgagctgctatggttcaagactcattgtctctatattcaatcaccccaatgttggcaaagttgatcttttatcaagtagtgattcctccaacctcattcaggcgtgctgtgaattttacagcattcaaccttatagtgggacacgttgtttttcaaaaaccgtatgatcagtaatntttttcaagaaatgtggacacatctcttacgactcgtgcagatttaactgaccactaatttatttttccccgtttgctacatgctttcccggcctttattttgtgctccttgactaccggtccg

SEQ ID NO: 50033 - DNA, 330 bp, Glycine max
  unsure (1)..(330): unsure at all n locations
gcttcaacatcagaccacttncattgtgcttgaactacttcacatggacttgatggggcctatgcaagttgatagcctaggaggaaagatgtatgcctatgttgctgtggatgatttctccagatttacctgggtcaactttatcagagaaaaatcagacacctttgaagtattcaaggagttgagtctaagacttcaaagagaaaaagactgtgtcatcaatagaatcaggagtgaccatggcagagagtttgaaaacagcaggtttactgaattctgcacatctgaaggcatcactcatgagttctctgcagccattacaccacaaca

SEQ ID NO: 50034 - DNA, 334 bp, Glycine max
atgatgacctaggtgatgacaagagagctctaagatcagtctcagaacttctcttgtgaatgtagaacacttcatgagttcacagattcgacgtccgaagagttcttgactctacaagaatagttagagtcgtgaatcaagattcagtgttcaagatctcaccaatcaagatcactattcatgactcaagattcacgagtctagagaaggcttaatctggataagtatgagaagtgtctcttaagaactgagttgcacatgattattctcagaccatgttgaccacagagtttgtactctgtggtaatcaattaccagattgtgtaatcgatta

SEQ ID NO: 50035 - DNA, 427 bp, Glycine max
  unsure (1)..(427): unsure at all n locations
agcttgttgacacgcagagatntttgtcatcttctgtgcacacaagaattgtcatactgacatttgagtcacgctgacgggcggaaatacccgagtggttatccgtataaactctcttttgctgtctgtaagacgaanagcctgatagcacgcagagactaacgtcgtcttctgcatccttcgtcaatcgcggccgacaagcctattgacacgcggagattaacgtcatcttccgcgcacacaagatctgtcatactgacattngagtcacgctgacgggcggaaatacccgagtggttatccgtataaactttcttttgctgtctgtaagacgaatagcctgatagcacgcagagactaacgtcgtcttctacatccttctgcaatcgtggccgacaagcccgctgacacgcggagattacatcat

SEQ ID NO: 50036 - DNA, 582 bp, Glycine max
  unsure (1)..(582): unsure at all n locations
cccgcccccccttcacttactggtgnttatcgcgccctcctncncnnncncgctcagcncnatgatcttttgaccgtctcaaccangancnnnaagcgaccgcagcatgcagcctacgaactagaatgttcatatatatcccaaccttataattgaccttctaagtagtcttccttatcaacgagagctgtccattgtctttaagcatcaaatcaatacaatgggctgcacaatgagaacaatatatgtgttatcttttgacctataaaacttacccgctaaaacatatttactcctattatcagctacaacttgaacaacattctctactccaacttcctccacagtagcatcaagcaacacaaaaagcatttcatctgtcttcacagaatcagagccatcaacagacattaaacacattgtcccatgctgagagtcaaccaaaaaattaatgatgcatcgttgtctccgatcaatccatgcttacaacataatactccaaccatactcgacccattgcccttgtagattacatcaatatgtagagaatgcacttgctcttaggagcgactctgattctcn

SEQ ID NO: 50037 - DNA, 303 bp, Glycine max
tgcagctttagtgaattttgagcaatcttttttgaagcaccactagtaggaatcacattcaatatttgggggcaatgtagttggattaccactctgccctacttgattaccctggtcgtattatataaactcatttataaagaaaatgatgattgttgccttgatagcaaactgaggtgtcgtgcccaagaggcatatttagcattcactggaaccttatttactcgatggaccttctcagtgtgagtaacagagacaagtatatagagagacgaacttatatttgtggatcttaaattatga

SEQ ID NO: 50038 - DNA, 389 bp, Glycine max
  unsure (1)..(389): unsure at all n locations
gcgcatatgtcatgaggcattttatcgaacacttggtgggcacatgtttaagcatgaaaatcaagggaatggtgacaatgtggcatgccccattacctcagaatgcaccatatgcctagggccatcccctacaacccctcaattcataaaaaacaagcaacaatccaaggataaatccctcacgtttttgagcaaatacatgcaatttagagcaccaaaatacatcaatggaaagctagagagcccaagaatgaggtacttacttgttggagatgaataatagagcanaacggaatcaaaaacgtgaaatatggctacctaagggctgcaaaatccatgagtcccgtgagctcttgngtttttgaatgaagngggagaagttttggtgc

SEQ ID NO: 50039 - DNA, 401 bp, Glycine max
  unsure (1)..(401): unsure at all n locations
cagaanataatttccaagagtcacatctgttgccatcaaaggtctatttatatgtgacatagaacacgaatttgcgaagagtttttgagaacaaaaaggtcttatcctctcaaaaaaagaaaaattatcttatcctcttaaaaattccttggccaatacacttgcaattcaataagggaattatttgagtgctccattgttcaatctatctctttcaagagagatttcttcttctcttcatcttatttctaaaaagggattaagagaccgagggtctcttgttgtaaagcaatctgtacacaaaggaagggttggtccttgtgtggtcagaactngatgcaatactaccccgcaagggcattggatagaagactccaagaagattgagccagagatgcaag

SEQ ID NO: 50040 - DNA, 432 bp, Glycine max
  unsure (1)..(432): unsure at all n locations
actcagctaatattgtaggcttcttccttgtgtcaacttgtcaaattgtgccctcttactaacaaagaggataggcttatatgcataagtgtccctcacctgagaagtgcttcacaggcaaatgctcttccagtcattggagtcaatcttgtagaaagcataatactcctcctttgtgatctcctaaggctctgtcatccaaatggccttatccttctttttgtaagtgggaaaacaaagtcctctataggtttccccctcacgaaggatttttcctttcacagcaaactaatgttcaatntacgaatggtaaccggcagatctgaatgaatttccttaccttaagtcttcctaattttttgtcactaactaactctaaaactaatattctaattatccctaattaactcccccttcctacggtcctaatgg

SEQ ID NO: 50041 - DNA, 615 bp, Glycine max
  unsure (1)..(615): unsure at all n locations
tcttcctctacgcctcaatgtaatgcgtatgttgttcttctgatattcacatttatgtagagacgantttgangcatgtattacttagctacacttctctacgtgcccctagctcctcaacatcactactacgtttcgactcatgtgatcttgtcttgatgtcgcatgcagagcttctgggacactcatggaccacctagtggcccagattatactggtctgaagagaataactacactaacggattcttggcttgtacttgaagaccaccatgtctgttagccgagatagtagacatgacaatgcttaagggttatatgcttagaatctatgttctcattgtatatggttagactatattcgtctaaacaagaacatgagatttgatgattgaaccttttatcaaggactacattcacatgagtgagccgtctccctgctttggctacacattctatgctgctacaccattggccatatgatattacattgccccgtcttccagaaaaaggattgcatatgaaggatgaagaacgattatgttttctgtattaacgaatctatcggctgcgaggacataaggctacctctttcattgttgtacctttgacgccg

SEQ ID NO: 50042 - DNA, 326 bp, Glycine max
atgatgcagctgagtttgtatctatctcatgcactcctctaatgactatagcatcattcctggcgctaaactgctgggagctggaagccatcttctcaattaaatttctggcttcagcaggagtcatgtctccaagggctccaccactggcagcatctatcatacttctctccatattactgagtccttcataaatatattggagaagcagctgctctgaaatctgatggtgagggcaactggcacatagtttttaaatctctcctaagactcatacaagcatcttccactgagttggctatacctgagattccttcctgatggct

SEQ ID NO: 50043 - DNA, 317 bp, Glycine max
atttgagaaccagtgaggatcatcaagtgcagagcttggatatgactagtcttatgtacgacgtgtgtactatgtcactcaccgtggttggcatgtactggagacatagtagcatgctcttgcatacatatcacttggcacaggttggatgtaacggagacgtagagcatactcttgcatacattctactcagtgtgggtggcatgtataggagacttagtgctttggaggagggctcaacaagggtagtccttgggttttaagagccttggaactacgactatggatgctcttctctcgataagagaaatatgaaa

SEQ ID NO: 50044 - DNA, 432 bp, Glycine max
  unsure (1)..(432): unsure at all n locations
ttgattcaaccgagcattaaataacatgatcaatgtgcagatgcaaatataactaaaagtatagggttatattttacctcgaggagaacatcctgtgactcatccaagacaatttcatctaaattattaccaactactattttcacatcaccatcattctgtttccaagttaccatacacgttaagcatgaaaaactaaattaatatgacataattgacggtgggaaaattaaataacatacactttcaggaactggatctgacttgtaaaaaggtgttagctcgtcttcaacgaaatcttgcccaaatgcctgtggaaaaatgaagattagaacattactcaaaatattgctntcacacctctattaagtgatagataaaccatccatgcacattctctatcattaacatgttagcaatagtaacagaacc

SEQ ID NO: 50045 - DNA, 339 bp, Glycine max
gctatgcaaaatcatcaaaggatagcagctgctgactcagattctggaacaaatgttgctgggaatctatcaaacaaactaaaatagcagaaaaaaaaggattcggccctgctatcagatgatgttgagatgatgagatcctcatcaccggagtcaagttcccccaaaaaatgcatgcattgtgaggtgacaaaaaccccacaatggagagagggacctgtgggtcccaaaacactgtgcaatgcttgtggtgttcgataccggtctggccgcctctttctgaataccgaccggcagctagcccgacttttgtagcatcactgcactcatactgtcaca

SEQ ID NO: 50046 - DNA, 552 bp, Glycine max
attgaaccatgtgattccctgccttacggacctatctatactcggctgctcattcctgtggagcattggatattgagcggctctataaacaacgaggataggcttataagcgtaagtggaactcacctaagaagtgcgtcacacacaaataccgtttcaatcattgacaggactcattcagacatcataatacatacttctttgtgatctgctaaagctctggcattcaaatgcgcttattctcctctctgtagatgagaagacacagtcctataaacggattcacctcacgaaggagttttcacttgccaacagactaatgatcaaattacgagacggtaccggcatatctgaacgcaatcccacaccttaagacatcctatttgtttgtcgtaactaactctacaactaacattctaattaagcttaatgaactactccttgctacggtcctaacggtaaccttaataagaattggacgtttcagtatctacggagttactctctgcatgtattactgagtgaattacctctgaagacaccggacattcg

SEQ ID NO: 50047 - DNA, 408 bp, Glycine max
  unsure (1)..(408): unsure at all n locations
tcggatgtctgattgagtcccgaaatatatcgagacgctcgaaattgaataccgaagcgctaagcaaattcaaacgacaataactttntactcggatgtctgattgagtcccgtaatatatcgaaaagctcgaatgtgaatgtagaagctctgagcaaattcaaacaacaataactttttactcggatgtctgattgagtcccgtaatatatcgagacgctcgaaatggaataccgaagctctgagcaaattcaaacaataataactttttactcggatgtccgatggagtcccgtaatatatcggaacgctcgaaattgaatgctgaagctctgagcaaattcaaacgacaataactctctactcggatgtctgattgagtcccgtaataaatcgagaagctcgaaa

SEQ ID NO: 50048 - DNA, 545 bp, Glycine max
  unsure (1)..(545): unsure at all n locations
atganacctgtgataccgtcgcatacgtgcactatcaatctcagctgctcttccttgccttaaatgtgggagaagcgcacttttaacggatangccctgatgctctgcttatcttttccaatatccgataaaagcatgcatgcgagaagaacatccaagcctaggcgcctttctaacagataccataagaatactgcgaagggatctgacacggctctgacattcttaatgccttattcatcgttctgtagtcgtgaaaacgaaagtctctcaaagcaagctcctcactaaagactatgtactcgacaggggactcatgtggaatctacgaatggtaaccgtcagatctgaacgaattatcctaccttaagacgtgctatagtcatgtcactaactaactctaaaacttatactttaattatacataattaactcccgctcgctacagtcctaatgagcacctatttagaattggacttattcgtatctattggttatgtcccggtcgattctaaagtgaactacctttgagaagtccgcatttt

SEQ ID NO: 50049 - DNA, 385 bp, Glycine max
  unsure (1)..(385): unsure at all n locations
gcttgttgagtgttntcccaccaatcaattctaagtaagagatatttgcattgacgattaaatacccaattgtaaagatcttggagagttggccttgaccaaaagtggtcattaggtcaacatagcctctagtctctactcgctcccctactaagccgaggagttgatcagcgtgagatcggatggtgttaggcaaaactttagtttagatggtcattaggtcaacatagcctataggtacccagcttgtatgagctcttctattntcaccttaagggcccaacaatctgtggtgttgtgaccgatactgcaatggtatctgtagtatttggttgcatctaaccttggcctgggaggacacgatggacgtagcttgatgggtacc

SEQ ID NO: 50050 - DNA, 217 bp, Glycine max
ttcaaaaccaaattgcaccattttgtgttacaaaagaattttctcatattttctatagttaccagagggattactctctggtgatcgaataccagtcggcagtaatcgagtaccagtgaccagattggttgttaaaatgtttgcacctgatttgtaacgttccacaattatttgcaaatagtataatcgattacactatattagtaatcgactacca

SEQ ID NO: 50051 - DNA, 356 bp, Glycine max
  unsure (1)..(356): unsure at all n locations
gcttnnctttagagcgtcacgtttataatctgatctcgatggnggngcgatcctttgatggtactcagcgggaagtaatggaggaaatcgacattcccattcagataggcccccacacttgcaatgtggtgtttcaagtaatggatataaatcccgcctatagctgcctcttgggaagaccgtggattcatgccctgggagtggtcccttcaacgcttcaccagaaattgaagttcgcagtgggtggacttttagtgatagtgtcgggtgaagaggatatgttagtgagctgcccctcctccgcatcgtacgtaaaagcggcggaagaatcattggaaacggctttccaatccttt

SEQ ID NO: 50052 - DNA, 408 bp, Glycine max
  unsure (1)..(408): unsure at all n locations
ataacaccaagaatgactatctactcccactaaacttgtggtatacacaatcatcaactgcatttgcctcaaaaccatatgatgtaatgacttgatggaacttgtaataccattgacgggaagcttgtttcaaaccatagatggatttatttagtttacaaaccatagactttgagtcacctgatacaaagttntctggttgcatcatataaattagttcttcaatgtcaccatttagaaatgtagtcttaacattcatttgatgtagctctaaatcataatgagctaccagtgccattattggtctaaaagaatcctttgaagatactagagaanaggtttctttatactcaatgccttcctttaggtaaaatctttatggactagatgagccttatatctctcgac

SEQ ID NO: 50053 - DNA, 269 bp, Glycine max
tcaatgtttctatttagaaataagacatcataaattaatgtgtggaatcataagtagtcttaaatatattcgattcttatattagaatttcaattctatatatatatgcataatatatacattggagtaatccttttaatagatattttttagacaaagttaaaaggttggaataccaatgctatcatgattagaatagatacgaggaaattatttctagtgttatagtgtggaataaacattccatattgaatagatagacacaatta

SEQ ID NO: 50054 - DNA, 456 bp, Glycine max
  unsure (1)..(456): unsure at all n locations
agcttcttaatctactaatagtatgttaactataatggaaagggccaataatactttagttttaatgaaataattgatgcatataactaatgcataaaagaagacagcngagaaagcctgctcgttatactatttaagatatgactacccaacaactataataatatcttgagtatctacgatacatgtgtaatcttcaaaaagaaagagctcttatgatatagcaattgtgtcagaaactactctatatagctctcaagaaaaagacaacttttcttctggaattttctttttcttcctaaaatggtatctatcataaaaattctaaacatcttttcaataagcacagcacttaataaagagcacaaccaaatatacacttataaagacaatacatagacgtgttatcatgcattagtacataccaatcgatgaagctaaagactatgcatataa

SEQ ID NO: 50055 - DNA, 452 bp, Glycine max
gtggagaatatcttgaagatgtattggcatttatttacccttctccctcgagtggcattcgtattggttggtaattgaatgatgcatcgtaatccgtatcatatctcttgcgtatggggcatcatcatgagtacggtgagagaaaaaatctctaagttataacagtttcttcacaatgccaaactctgttttaatcaattacattcttatcataaatcggttcataagtagtctaagcttgcagagtatatctcgagtatttaaataagtacggccttttgaatcaatacacaggtttgtttgaacactgctaattcttaggaggccttattaaccgataacctttttctaaatgagttaaaaggacaaaaccactttccgatacctggagtttaatcaacctttgtttgtggttcccctgtggaagaactgatctcttaagaaccgaccct

SEQ ID NO: 50056 - DNA, 380 bp, Glycine max
  unsure (1)..(380): unsure at all n locations
acataaatgcatnttatctacagacacaagagcctgaaagaccatctcttctaactcataatgcattgggcatcatggttcatttacagtcattaccatggtgccccatgcatgcatttaagaaggtgacgtggaccttccgacttcccctgacaaaatgatgagacaaaatgcgatgtacaagtgacgacacaatatgagtatgcatgcatgagagcacgtggttgatagcacaaagagaaacatattggacgaacgagctaggtaacgcaatcaattaatgctgaaatgacataacgacatggcaagcacaggaaagatgcatgcaatcatgacatcataaagatatgcatggcaatatcaaggaaacacacatagtg

SEQ ID NO: 50057 - DNA, 409 bp, Glycine max
  unsure (1)..(409): unsure at all n locations
tccttcttatcatgagataagagttccacttcttaccaaggaattagagaatacagaaattntgttgaaagaccataaggagcaatggggaagaattggatgttcaattatgtctgatgcatggacagacagaaaacagagatgtatcattaacttcttgatgaattagccgttttgattattccttttctatacaacaatagatgcatccaattttgtgaaatctggagaaaatatatttgagttgttggactctattgtggaagagaatgaagaagaaaagggtgtccaagttataacatacaatggaagcaactatgttttggcaggtaattactcaacaaaagatgcacatttatattggactccttgtgcagccactgcatagatttgatgttggaagacattg

SEQ ID NO: 50058 - DNA, 266 bp, Glycine max
gtggtgattttccaccatggatatgcatcggaagacacacgcaaatatgtgatagcgggcgccatacattaaggagtatgccatggaagaccgagcttcaccaccaagatgagcctgggattataagctcggacaggatgcttcaatggctgaccccaattaggtataaagggacagaggagggagcacgacatcgaaggaatataagaggtatatacgtggcacttagaagtatgtctcacatgactctcgttcatccaatgtac

SEQ ID NO: 50059 - DNA, 446 bp, Glycine max
  unsure (1)..(446): unsure at all n locations
cagcttacgccttaatcaattataaaaaatttttataatcatgtttcacaattgaaataatcagggttacttaagtgattattttataatttttaatagataaatgactaaattataagttaaaaataaagttaaagaaccaaatgagtaatttaatcaaataattgtgatgtttgaaaacactcacaagacttatatattntaattttgataattcattaagatataatggataatattaattcttctcacttttgcattaaaacattctcactaaatatttcatcttctctctttcacataaaaagcaaaaactcgctagatagagagagaggacttaaatttgngtttgataaaatctactgtgaagcttattaaaatatctataagaatcataaatcattctaacaagcttaacaaaatacatactcattattactataatc

SEQ ID NO: 50060 - DNA, 228 bp, Glycine max
cctaaattgcaggaatcaatgacggagagaagtggcactttgaagtatgtctcacgatactctcactcatgagagttacgacgaagaattgcacatgcttgtatttatagaccaagtagctttcttgacaagcattcttgagaaaactttcttgagaaactgctttgagagaacttccttgagaagcctgagcttaactacacacacccctttataacgaagctcacc

SEQ ID NO: 50061 - DNA, 444 bp, Glycine max
  unsure (1)..(444): unsure at all n locations
acattcagatactgcttgtaatcgattaccatatatgtgtaatcaattacacagtgcaaattttgaattcaaattttaatagctgctgtaaatcagttntggccactggtaatcgattacatcctctggtaatcgattaccagagagtaaatttctttgaaaaagactttttaagttaaaattcttggccaaaccttttgctacttcaattggaattcccttcctaattaatataccctttctaagactagagacttgtcttgatcatccatcttgaatatctttaatttctttgtcttgaataaagctttgagacgcatgtgaacctttggcatcatcaaaacattcaacttgatcctttgtctacacaaccaaggttcttcaaccttcattnttctgaggatacgacttgaatgtgacatgtgcttatcatggaggagtttc

SEQ ID NO: 50062 - DNA, 546 bp, Glycine max
  unsure (1)..(546): unsure at all n locations
aattgaaacccactgattancggtcgactncnctagctcaagctcggactntagtatactcaagcttgcgtcacaagatngaacttctatctactctgtactttctatacgcttgtgacacggtcatgtcatcgactattctaattatgcaagatcatgtaatgatgcaaatcatgaggaattcaacttagntgggctctagctgcacctggaatgaatgatgcatgaacctctcaacgtcttactaattatcaaagagagatgtatgttcgattaacacatacgcgattgccgctcgctacttgatccagtccttaccagcaaccatgctggtaagccatatactcgtagcattatagtctgtgttatatgctgctgatgctacttagcatcatgcctaattggattactcgatcactgcacttctttttcacgctgtgtgcttcggcaactcatcttatcttgcattcactgcagatactctatacactacttcagtcttgggcggtgtagaactattacgttgttcttatagtaacaacatcc

SEQ ID NO: 50063 - DNA, 428 bp, Glycine max
  unsure (1)..(428): unsure at all n locations
aagaacgcttccttgagaagctagagggaggctactcacacccctccaatagctaagctcaccccattccaaaatacatgaatatacaatgggatgcttccttgagaagcaaggaaggtagcttccttgggaagtaagaaagatagctttcttgagaagctacaggaagggctactcacacccctccaatagctaagctcatctcatgccaaaatacaagataatacaaaaaagtccttactacaaagactactcataatgtcttgaaatacaaggctaanaccctatacccttaacttgtacccttaatttgtagggtaccctacaaacctaanatttccaaaatacaaggccaaaaagaaggaaaacctattctatatattacaaatataagtgggctcatacttagcccatgggccataaatcta

SEQ ID NO: 50064 - DNA, 112 bp, Glycine max
ataaattacgcctcgccctgtcatctatctgaatgatggagcgatttataaactttctggcatactgatacgtcttctacgtgattgagaaccctgatctccagcacatccg

SEQ ID NO: 50065 - DNA, 377 bp, Glycine max
  unsure (1)..(377): unsure at all n locations
cctatcaaccactaccatcagcattcatatatgtactaaaataccaaatcccaataacctctaaaaatagcacacagatttttatttcctgttgtcaaaactagtgttgatttggatgtaaaagctaaataccttggtcatgtagtcaaagtagttaaataaccccacattatagtgcagtacctgacccctatatgctataatggtacagcanagcagctactacaccaaatcaaatagtttctatataacatgctcaaaactaaagtactcanatcacaactggagaaacaatgttgggcttggttggaaaaggatgaaagagaggctganggacaggaaaatgcatanggtacagagaccaacatagcatgaac

SEQ ID NO: 50066 - DNA, 450 bp, Glycine max
  unsure (1)..(450): unsure at all n locations
agctnggtggtactcttatagtttgttcctaccttaaaattcctactagagaaggaatttttcttggattcatattgaacaccagaggctatgctgatcttctattcattggtgcagcagcaaagcaagtaattgtgagtatatttcttgacttggttgaattagacaatatttggataaacttctatccataagtacttatagaaaaagaaaaataagaaggtaaattgaattaatagtattagcgaaaatcaacttatgcacttaatttttattggagctatntacgattaacttgtccagaagttacggtgcataagttgatattagcttatggagaagcttgatgcattttaccttgttactttttgctatgagtattgaaagagaagttaatccaaacaagtctttaatcaaaatgcgaatctcanatctgtatactaactgaat

SEQ ID NO: 50067 - DNA, 539 bp, Glycine max
  unsure (1)..(539): unsure at all n locations
ttgacctctgaaccctgcaaaccgtgccacaaactgagccttgatgctgtagcatgtagagcagattgattcatgattgatctcttatgggaggggataccacatgagcgagagttgttacaagaatgacatacttctgtgactgctttatcatcgctggacattgatcaaaacctgctgcctgtatgaaaggagattgaaaaacgcttcatggacatattngagaacatggtctcggtgcccaattatagaagcacatgcgtgagaaattttagaagtgctactgaccgcccactgctttgttctctctacctcttatggaggttgattatagagaattctaagcactctagagctatggtacacatagctccctcatatccatactgacctcactgagatgagaatctagaacttaggtgcacccctcctctcacaacataagtcctctccttggagctaacacgggtcttcttaacgactccttactacgttactagcgagattgcctgcacacgggtacaaccctatcttatgcg

SEQ ID NO: 50068 - DNA, 375 bp, Glycine max
acggagttttccgactatgttcttgtgtggtggaacaagctacaaaaggagagagcaagaaatgaagaggcaatggttgatacatggacggagatgaaaaagatcatgaggaagcggtatgtgccggctagttactcaagggacttgaaattcaagctccaaaaactaacccaaggcaacaagggggttgaggagtatttcaaggaaatggatgtgctcatgattcaagcaaatattgaagaagatgaggaggtaactatggctcgatttcttaatggtttgactgatgatatccgtgatattgttgagctgcacgagtttgttgaaatggatgaattgcttcacaaagcaatccaagtggagcaacaattaaaa

SEQ ID NO: 50069 - DNA, 136 bp, Glycine max
  unsure (1)..(136): unsure at all n locations
gatcttacgggtcttatgtattattaactcctaatcgacggtatactacgtggatgnnnnncatacattccaatactatgggcctgatacgacaaatatgatgccactaaggtgcacacttctagtcgtaggtacg

SEQ ID NO: 50070 - DNA, 149 bp, Glycine max
actatgccctgagctgtaccaataactatgatttcagctctgtctcaagagtaggataaagaagcgtgattgccctcctctgtggacttaagcccgcgtgttccgtgaaatcttctaatgttctcaccctctaccctagaaggattcct

SEQ ID NO: 50071 - DNA, 397 bp, Glycine max
  unsure (1)..(397): unsure at all n locations
gcttctgttctgaatctcgagcttctcatatactactggaaacaancggacatccgagtaaaaatgttttgttgtctgaattntctaagaggttatgatttcaatcttgagcgtctcgatatattacgagactcaatcaagcatccgagcaaaaagttattgtcgctaaatgtttcttacagcttctatttccgattatgagcgtctcgatatattacgagattcattcggacatccgagtaaaaagttattgtcgcttgattttgctcaaagcttctgttatgaatatcgagtgtctcgatatactacgggacacaatcggacatccgagtaaaaagttattgacatgtgaattgctcatatcattcggtgtcaattacgagcgtctagatatatt

SEQ ID NO: 50072 - DNA, 230 bp, Glycine max
aaatctctcatagatacaacatataaatggtagatcttgtgcctgtctgagggcatttatgatgaggatatattaatttcttgctttatctagtcatttgtcctgaatttcctgttatgcatctctcttctctgctactaaaatctgcaaggagacccgattgagctgcccttattcgcctttctctctgctcgattaacgagatgactaacgaattggatctacttttg

SEQ ID NO: 50073 - DNA, 342 bp, Glycine max
  unsure (1)..(342): unsure at all n locations
agcttgttcgcacatcgttcgcgtgtatgatatccactcgacaagggttgaagtataagagaccttcaatcctataacgcaacgtggcggacaaaaatgggcagntaacttgaatggccattattgtcaatgcggaaggtattctgcgcttcactatccatgtccacacattattgtagcttgtggttacgtgagcatgaactactaccaatatatagatgttgtttacaccaatgagcacatcttaaaagcatactccgcacagaggtggcctcttgagaatgaaacagcaattcctccttctgatgaggcatggacactaattcctgacccaactaccat

SEQ ID NO: 50074 - DNA, 458 bp, Glycine max
  unsure (1)..(458): unsure at all n locations
naggagggacaacctgacttgctttccaatctgacatattccacagattcagacctcatctacatcagatagagaatgacgtaacagcaccggaggcatgaatatgccaggcactcgaaagagcacaggtccaagtcgtagaagccatagaaagacgtcaacttcgtaggaggatagacatgtggaggaggcactgagttctaggcggtgcgaaagaacagtcgtactgcgatctgcagcccacactataacttcactcttctcaatgggccacagcatcagactctgtgaagtaacaatgaaggctcaaacgcaactgactgaagtgagcaagctgcagtcagacctccacagcaggcgttcgtacacacggaaaacgaatggacangttcccttccgtggtcttcctaacagcaatgcaaagcgcaagcagtgcaccaggtaaagcaccacaaacc

SEQ ID NO: 50075 - DNA, 580 bp, Glycine max
  unsure (1)..(580): unsure at all n locations
tcgcgcgctactagtcacaacgttgtaagcgtatntncgcattatgcgtatacatcgaaatntattaaaagcgaangacagnntttgaacccatnttgaaaccgttgataccctcagcanaaccccgcaatgtanaaaggaacgctcaagtgagctcgcaccgatatgacatgcatgatgtactatgtctctatcaccacgtaaatagcttatgctggataacacaataatggtacagatagccattgcgtgctaccaaagagatcgttgaccattcccattccgacataatcacgaggtcccacaatgttctacactatacaatcaaccaagtcaaataaacatcaatatcagtcccggttgcttagacgcctatactaacaaaccttaatacttcgcttgagccaaacaagacgaggagtgaacattacaaataggcaccaaaacggaaatgtcacaagcacaggataatactgcggtctggccacccaagaatatgctttccgaaatgcataaaggtcatgccgcatcggaatagggtagagccaagaacatgaaggagcgataagcaggaaagatg

SEQ ID NO: 50076 - DNA, 587 bp, Glycine max
  unsure (1)..(587): unsure at all n locations
gcctcttccacactacacataacgtggcgtgtggttacggagctacacaannccagnagcgagagggggttgtttgtnatgataccttgtaagaccagggacctctaagatgaccgcagcatgcagcntcactaggaggaaagctattattctttagaaaagacaatgagcnaccatttataaagagaagcaagcttattgaaaagctgtaaatacttggcatatatccatttgaacatggtcggataaaaaaggacatcgattataaaaataagttaggcgtacccaacaagctttctgttgctatgagaacgtcgttatcgtagtgaaaaattacaacgtaaccacaattaatataagagaaggcaagcgtattgaaaagctaataaatacttggagaaaatccatctgcaacatgttgcgataaaaaaggtacaacgatgaatacaataatgaagagcgacccaacaagcgttctcttgcttgaaaagtattatatcgaatgaaaataacatgtaatcacattcaaaaaagagaagtacgctctttgaagagctctacatacttggagaaaatcatccgcaccg

SEQ ID NO: 50077 - DNA, 526 bp, Glycine max
  unsure (1)..(526): unsure at all n locations
attgancccctgttgannaccngtcgcantaccntactncaagctactatagaagcgttcgtccataagtctctctacagtgggatcttctttcaatgatctggttaacataaatgtggcatatatctgttgtgaataacaagatccagcctctgttatgttccaagaaaagcttacttacacacctgatctagactcttctaacttatctaaaacttgagagctataatgtgatgcctcaggagtgcgagttggagcctgcatagtcactatgtgggtgcgctattgctgcatgtaaacgaaggctacatacagccaccctcaactaccccatctatgatcagagctatatgccttacacgagccttctacttgacaacatacctagcttcatgtatgtgcattatagggtcatccatagctactacttagagggaaaacagagtacagtggctgcaaatggttagaccacagcatttcatatcttccaactcaaagatagacgcgggactgagcctcttaggag

SEQ ID NO: 50078 - DNA, 469 bp, Glycine max
ctgcagcttgtacatagaagggaatcaatggattacggtgagattgatgagggatcaataagtggtgtagaggaagaggaacaatcaccagagccacacaagtcgaaggaatcgccctacaaaatgttggtgcagcggcaaggcctccgtagagaatactatcattgatatgttctctattaaaaaagagggtaaaccccagcaactccttcgaaatcttatactttggttttgttgttggggaaaattaaaaatttcccaaaacggatgggtcacatgccaatttaaattactttttttagtggtggcttaataggttgtttataaaaaataatcttactttagtgtgtcacatgtaattttaaattacttaaaattagataaaagtacttatataagcaattagtccttatgagttgcttaatacttgtattaaatattggaaagagaatatgatatcctggagaga

SEQ ID NO: 50079 - DNA, 630 bp, Glycine max
  unsure (1)..(630): unsure at all n locations
ctctcgaacacgcaaacacgatagaataacttattccactaacgctttataatccataaccnactttgacctgtagaacctgcatacacctcaacttgacacagcntngagacgagagatctatggtgagctacgttagatactctctgatctgactactcacaagggagaaaagcaaantggttgaacctacttcttgtctcccacatcacaatacactcacacataagataggtggaagaggtcttaatgatagaatcaaagcaaacctaatagcacaccacttggtcattatacaaagctatctgttattcaagccctataaattactgaagcaatgtctaaaatgatcatacaccctatgccatcggtgttggaagcataatgtatggaataggttgcaacaaacctgtcttaactcatgctgcacgtattataagtagattcatgggagaacctggccgctcacactaagaaactgtgaaacggacactaaaggatctaaatggatgcctgacaagctgtataacggaccagacgacagcacaccaagcancantcacaggctatgtaaatgcacatttgatgatatggtacacaaggacatcctaacacgatatgtgtttctcg

SEQ ID NO: 50080 - DNA, 567 bp, Glycine max
  unsure (1)..(567): unsure at all n locations
ctcccccgcacttaatatcgaacggantggtgaacgtaaactcacaacaaggacnnttgaacctttagaccctgaacactccaacccgaaaggaagggaagctcaagatnggagnagatggaagcattatctctatctatatgtgagcacgatactagcttactgtcgacccgaataaatgcatctgcatacggaggcgtgtcaacaatgtgatctaaacaaattacacatctgacttaacaacaggaaatctcgacttactcgataatacaactcacgtactcaaatatatctcgatatcatgacatgcctgatttagacgccttcataccagacatagcatacttacctatgcattgtgagcgagatcaattcgatgcatgggaacacatacataaactttaaccaaggtcatcatacctacctcaaacgctcggctcgcacagtgagctcggcactcccaaggaatatatctataccctactacagcataatcatgccctggcacacctaaatttgtgaatgcaaagaaccattgttagatggcattatacggatgcggtatcg

SEQ ID NO: 50081 - DNA, 238 bp, Glycine max
ccaacggtgaaagagtgagaaatttaatttcgaacaacatatccaaatgtcatgataatccaacggttatcaaaccgggatcgtaattctactgagaccatttcgggtttctgcgggaaaggaaaatgttacaatgcgaaaggtatctctctcagctcacacatgataacaaaattcccaacggtgagaatgctcggaatcgcgccgcgaacatagtgctcaattttcacgacgatcc

SEQ ID NO: 50082 - DNA, 639 bp, Glycine max
  unsure (1)..(639): unsure at all n locations
tctatgctccagtctggttgtcatggntttagttactcctacatctaccagctagggggnnnnatganccctgtataaccngtgatatcctctgcaanactcgcaccatagaaaacccacgctgtgaaagcacgtggacatttcatagccatctgttctcgtgtaacgacgcttcgacttctggcgacgcacctcgctccacatacgaaggatgagatgctttaacttcaaccagcacaatgagtactgatgaacttctgaagcctcaagagttaacaccagacctccgtcacattgacaagcgttataagcaggagacccttttagctctgctagtttcgcaagagattctgaagggaaaataacaaatcgcatgtcgtcattgacaccatctgacgataaatggcttgtaagaaacatggaacataaacgctattttggaacagaccgacacgtatagagcgtgattacatcgcggattgaagactatttcttttcacgcggagtgtgagtttgacctctattatatatttattactactgtgaaggataatacgatgtttctattcctggcngtcccacatattagcatctcaagtatgtaagattgctggagatcggtgatacttaccgagaacg

SEQ ID NO: 50083 - DNA, 622 bp, Glycine max
  unsure (1)..(622): unsure at all n locations
tctcacccgcttccacgncgctcgcgngtgtcatnttgnctatattantntatacttacacgagcgccgcgtgntanacagggggnnatttgaacccttgttgtatcgcnttcgtcggnccagagatnctctaaatcgacctgcgtgcatgcaagcttaaactatatggactatgtctttcttgtgaaaaggcttcganttcacccagtcatcgcacaattgatgatgatgatgataacttacacgagattcttgaggggatgtgttcgtgatcctatctaatgatgagtgtggtaacaacaatgattcatcattaagaggtaaaaaacacctcctattgtagtcttgtatttgagatactctaaaattgaactaagctaaaataaacatgtagtgttaacttaacatatcatattntcatattaaattctccattaagtaatgccacaagatatctttgttacatttacaacaacaagttgatatgagatctatttataacaagttgcagaatttcaagataacatttacgcacatttatatttgatatgagacctactgacaagataaacaaactaattaagaatattcgccatgaaatttcccctgatttacgatatcg

SEQ ID NO: 50084 - DNA, 303 bp, Glycine max
ctcatcttctccttgaagggcatctcctctgtctcttccttctccattccgctgccattcatcttccaagaagcgaaggagtccattgatgaagaagatcctaggcctacaagctccaatggagcttacatcaactccttcaagagctttatttttcctctccacaacaccattttgttgaagtgctcttgcggcgggaaaactatggtgaattccattatcttcacaaaaatgttcaaaatactcattctgaaattcaagtgcacgatcacttataattgacacgagtattacacttttctc

SEQ ID NO: 50085 - DNA, 413 bp, Glycine max
atcactcctacattttatctctagcatgcattttctttctttacccactcctcacgtttggttttttagggaaaaacaccataactaaacgcgccgcaagggatccctatcgcaccagatccaaatctagaacgatgggtgatcaagaggagacacaggaacagatgaaagccgacatgtctgctctgaaagaacaaatggccttcatgatggaggccatgttatgtatgaagcagctcatggagaagaacgcggccactgccgccgctgtcagttcggctgccgaagcaaacccgactctcttggcaactacgcaccatcctccctcaaacatattaagacggggaagggacacgcttgggcacgatggcagccctcacttgggatacaaccgagcggcttgcccttatgga

SEQ ID NO: 50086 - DNA, 522 bp, Glycine max
  unsure (1)..(522): unsure at all n locations
ttaggccccttttgagaccctggcaatacctgcactatcgagtactcaagcttctagccgaatggacttaccgcgaantaattcctttgatttgccttatgagccataggtccctttccttggttgaagctcactacacgccttcaatgaacaaccaatgattcaccatatgcttaaggaattttggagccttggaatcatttcgcgaataagtgtgggggcgtttctgtctcataggataactcgttttgttggctatgcatcgtgatatattaagcccctccctgttgcacgttgtttttagcttaatgttggcattgcttacgaaacctgctctcctcatcttggagtattataaaagattcatgggagaaccagancgcacacttgaagctttgagtggcactatagatttaaatgatcctgaatgctggtcttgtgctgatacctccacgagcatcatccttgcttgttattccatttgtagaatgttaccaaagactcttacctgtattgttaccc

SEQ ID NO: 50087 - DNA, 393 bp, Glycine max
tcttttaaggccgataggtcggccttcatttgttcttgcactccctcttcgttatccatcttatttatggatcgggtgttgtaggggtgcctttgcgcttttttagttatggtgagttccctaaagaaacaaatagtggtgagtatgccaccaaaacatgaatatgctaatgaatgatcagagcacttggatccacctcaatgccttttttagataacgtgatgaagtttagaacttctctttttataaaaaggaacaaaagcttttatctagccaagatcatacaaaagtgtcacaacagaacctaacggtttctaattatatgggccattaaatctatcatgtgttgacagtaattgattagcccgtgaatttcctctggggctgaacaca

SEQ ID NO: 50088 - DNA, 396 bp, Glycine max
  unsure (1)..(396): unsure at all n locations
cttcttctctcttgctttctcacttctactctattctctcccctttatttatttcaactttttcttcattttctttttctttntctacctctatttctttttcttgggcggttatttctttctcctcgaccattattggtttttcactctcctgacttgtcacatctattacctcctctttctttttctcagtaccatcccttcaacaatgtgtttctccaaagccaccttatcctcattctcaactaccaaacgcttcttttttcttgtcatcacaacattacattcctcgttgggattctttcctgtgttttccncatagctattggatgactnttcagctaattgtttggctagctggcccacctaggatctcaaggtcttcaatgatgactc

SEQ ID NO: 50089 - DNA, 589 bp, Glycine max
  unsure (1)..(589): unsure at all n locations
ctcctcgccctgtctaccgtgtttggatcgtgctagctcatcattcttctacagtagganngtgtttgaccctgtgaggccgtggataccgtgcacaccatactcaagcttagagaaccataaactaagtgtttctaacttttttatgttgaacttcccaatatccctattgaaaaaccgttattcaaaccttccaaagctagtgagaatgctcaacgaaaatctatggaacttataaaaactagatccttaattgaaggcgtatgtgataaccatagtgaatcacttaacaagattggtactgtacattaatgacaatccagatactcctctagcctcggtaaatacgtccataatggtaacacgaagtacctccaaattaattaaggttattaatgaagatagtgaccacaactcagataacacaactgagatatgatcagtgtctgtacagaatattaatccattagttcaactcctggtaaaaccatctaggatatatctacgtcaactgcctgtactatattagagaaaatgtgagacactttcagagctgattggatcacagctatactgcacgtcaatgacg

SEQ ID NO: 50090 - DNA, 161 bp, Glycine max
gagaatgagtctcagatgttcagaacttgctcaataacacgaccacgttcgagctgatgatgacatcccttgaggagtggatcactgtatagaagctgaattccttcagtggtacctggacgctcgactctggattctggactcgcgagaagactttatcc

SEQ ID NO: 50091 - DNA, 399 bp, Glycine max
  unsure (1)..(399): unsure at all n locations
ncaagcttgacttctttcatcaccattctcttatgttngntgacttacactcctatcattggtgtcaccaccatcagaaaattgcgcccacacacttcgacactttccttctgcactaaattcctcctcgcatcctgccacagtctttatcagttctgattgcagcaagggacaattttccttaagatactcaaaaccatcagattgcatcacagctgctagccagaatatagtaagaaatgatatgagagtcaactgctatacatctgaggtcttggcttgatcatttaatgatgtctatgctatcactgaaaatgaaagttctagaagacaaacagaactgtgtacaggatgagatgcccatatgtgattgcaaaatgtatggagaacaaattgata

SEQ ID NO: 50092 - DNA, 161 bp, Glycine max
gctacctatgctataatatctaacatgtgttacacttgtggtgactttgatgaatgagagacttgtgagacacatctaaaagttcaacttgtcttcctattctactccatcaattattgtgctccccccttctctttgctctcgctctatcttttactcca

SEQ ID NO: 50093 - DNA, 616 bp, Glycine max
  unsure (1)..(616): unsure at all n locations
accacacaccggtaccactgcanntganggactgtgtanctactagagtctatgacgtancnctcanccataagtgacagannnnngttgaacccttgatatccccttcctgacaaggacctcagatggagcgagtgcatgtagactgaagtaggatattatgctggatatagcaacgcgcactcaaattatgcctctaatgaggtcggaaccgtgaagcgtaatttctcagatatagaaagatgaaaacatactcacacgaagcctctatttatagcgtaagagtcacacacaataggaaagaaattcgaatcacaatctaaaatccacttgaatttgaatttgcggagccaaatttggaagccaaaattcactaattatgattagtgagattcagctatggttcagcccactaatccaagatcaagtgcaagattcttcactaagtgtgcttagatgtcatgagatatgtaaagcatgaaagatatgcacaaagcgtgactataggatgtgacaatagaatgtaacaagcatatgctcacctccgccttagatgagccaaagttaagaggagtgagctctcctaatcaactaaattctcttcaacaacacatag

SEQ ID NO: 50094 - DNA, 260 bp, Glycine max
gatgaactattcacttttctgtcacattccatgaaacactcacggatgagttacatacataataggcagtataatcttacgaatgagcactcacactaacatatatgtgtcatatcaactcccttagcatcttccactcttcactatacattatctgagacaactagctcattcttctagtctctacctacacaaagaccttaatttcctattcatacctctcgttagggatgtactatatatatatataatatatatat

SEQ ID NO: 50095 - DNA, 617 bp, Glycine max
  unsure (1)..(617): unsure at all n locations
tcttcgttcctccttacgtctcctcaccgctnctntatcacatccttanancctcctcnacaggcgagacnncttatgtcttccttcgactacccgacatatatatgatgcagcgcgtacgtgtgtgacccaccatcctcgcataatacgacacctgattatcgtgtnctctatctattgatacgcaggggcctctccctcatacgggcgcctaccagagctgccaaaaccctccacctctgggcgtattctttgaaagattcatgctccctcttacacataatttgcaggtacattcaatcacgagccatatcataattggacttatgctgcctaataaaggcaaccattaagtcctttcatgaacgaacncgggaagactccagattggtgacccagtggtggctaccccactacgactctcctagaagaaatgcataaacaacttttcatcttttgatatgctctcattgtcttgcagacatcttcaagtgagtcttggggcaaagagtccccttgtacttatagaaggctggcaccctaaacttctgaggaatgaccatgtcgagcactaagctcaacnctggcatgtaacaaaggcataantctcacctccn

SEQ ID NO: 50096 - DNA, 609 bp, Glycine max
  unsure (1)..(609): unsure at all n locations
naatatagcactgcngcatgcagctctgtctttgtataaaatgagaagtttgaactcatcacgttatctaatatactttgtggtggatccaagtgctccgatcattcatntgcatgttcatgtnttggtggcatactcaccgctgtttatttcttangaatntcatcataacttagaanacaccaaggcacccctataacactcgatccagaanaatggataatgaagagggcgtgcangaacagatgaaggccgatctatctgctntaaaagatcanataggcttcatcttgganggtcatgtaanactctagaanactatagaggatgaagccacgaccaccggcttcagtacaggtantggaagccggacccgntgttgcactccttctatattacnggtcgagataaaacacngcagtgttggtcgaatgtttacccgcaagctatcttatggttgctctgactcactcccggccacccngagattagccaacccttactttagggcgctccacctatacactatcggcagacatgagaagaaacctctcgtccttctcactaaatcgtcccagacttccacaacatatccctatcgatatcccg

SEQ ID NO: 50097 - DNA, 621 bp, Glycine max
  unsure (1)..(621): unsure at all n locations
catcttccacccaccncgnacctgntccctnncccccnctcnnttntntatnantnnnnnannncggccccgtggcgnaatgtgacatcgttgtacgtccactatagaatattcaagctgcagagtcagaatttgcccccacagcttctggaggcctagaactataactctgacactacaattgtgggagtgacccctctgcaaactcgcgacggacgaggaacttgcccactcgctgtcntgatgcagattctgacgcccacattgactgccatctccggagatccaggcggtgctctcattatcgaaagcatcaagaccatgactgttgctgcctcaactatgggccgcttgagactgacggtagaacactctgcaacatgtccagagaggtgtgaccatactgtggaacacttcttgacagtctatcctaacatcagaccgcccaccgagtcctgcactgggggtcgataccaccacctctgctgtaattatggtcacaagaacctcgcggcacgaacacccctgtctctatcacagcagcccgccatactctgaggacagaactccctgtcgtctcaaccaaactacccttcgacggaaggacatatctcatctccg

SEQ ID NO: 50098 - DNA, 218 bp, Glycine max
  unsure (1)..(218): unsure at all n locations
actgcttgtctgatatatcaattgcttgaccacaacaacgctggaggcggcaagggacaatggtctttcaaataaacctattgtatatgaacaaacattatatcatgcgctgaccgtgccatacgaaccagcgaagtcattgcataattngtatactaactatattcaatgtacctgaacaaaatgatatccaaacatgtgaccgacacatacgatgc

SEQ ID NO: 50099 - DNA, 256 bp, Glycine max
  unsure (1)..(256): unsure at all n locations
ttgagtttggtggagtatttaatgctcgcattaaatgcatgctcgttcttcatgcaaagtccatgctaataggctagcatggtctgtaccccagtaaggaagtgataagtgctatgcatactgtcattttattttgagatcacatagcaattatccaacttgtggtcttttttatcgcttcttttgngttaaaacaatagcaacataacttcttctgagttttatcctggagatgctaatagtaacgatttatagt

SEQ ID NO: 50100 - DNA, 412 bp, Glycine max
tcctccagaagcttcattaagaggcttctatcacactccagacatcttctcacagaggccaacggtcagatcatggaaaagtggtttgtgaagttgcagaccaaatttcgagaagatccaacggttaatgaaggctgggcagcatttttaccgaggcagcttcatgtagctttctctagaagcttcattaagaggcttcctctagaagcttcctcgtggcttctttgagaagctttctcaagaggcttctttgagaagctacatccttatctatccacccctctattaactaaattaaattccttaaaaataattacagatgaaaataacgcaacaaataatcaaacatcaaacataattactaataatatatatatatatatatatatatatatatatatatatatatatc

SEQ ID NO: 50101 - DNA, 160 bp, Glycine max
  unsure (1)..(160): unsure at all n locations
atcagagagagaacagacacctttgaagtattcaaagagtngagtctaagacttcaaagagaacaagactgtgtcatcaagagaattatgagtgaccatggcagagagtttgaaaaccagcaagttacttgaatctgcacatctgaaggcatcactcatg

SEQ ID NO: 50102 - DNA, 441 bp, Glycine max
  unsure (1)..(441): unsure at all n locations
ttcctttagacccaaagttataacatgtagccctctcaaacccttgcctcccactcatcatatcgagactccgaaagcctatctggtttggcattttcaatgtactctaaacaaaattccatatctttttctgcaatgtatctttcaacaatggatgcttcangataatgtaaattctttgtatactctattaagatcttcttgtaaagcttaaccgggtacatccaccatatataaatgagatcacacaattcaatttccttcaccagatgaacaattaaggaaaccatgtattagagataggggagcaacatgaagactaagctntgaagcttgaagaagttctctntntacatgcctaactctntgggtgacatttgtattgatggttgcatcttagtctctatatnttcatatgtacatcatgcatcatcatcatgt

SEQ ID NO: 50103 - DNA, 636 bp, Glycine max
  unsure (1)..(636): unsure at all n locations
agtgtgaagtganctgtcgcctgcagctatnctatgggctgnctgcngacttcactccccgtgcatctccgatagattagccaagcccctactttcgaagggcaagctccaccttatgaagactatcccacgcacgacgatggggaaggagatacccatctttggccnctgctccaccttcaagagtccatcccgcatgaactaccncagccgaacatagtccgccatgatccgggctcacccacacctgtaaaagaaatctgttccttctctgaagataatggaaagaatgatgcgcttgangagaggttgatagcantcgatggcctcttgtaatacactttcttcgatctggcagagttgtgtcttattgcccacatcatcatcctttctaagttcaaagtaccggactttgataagtcaaagggacgacatgtgcatangggatctcctgatgtattgcgaangatggggccgattcacngacgaatagtaggtggtcatttcttcanacagcttggtcgggcagctgagcatggttactatcttgagcttccagatcgacatggatggcttgcactgctcattangagaccagacatacagcatggtcccgacgaacaactcatggataag

SEQ ID NO: 50104 - DNA, 473 bp, Glycine max
  unsure (1)..(473): unsure at all n locations
tgtaacccaccatcttcgcatagtagaacaccgattacgtgtccactatcattgttatcatctccctctccatcattgggggcactacttgagctgccagatccctccacctttgggcgtattctttgaaagattcatgctccctcttacacatattttgcaggtacattcaatcaggagccatatcagaattggactaatgctgcctaataaaggcaaccattatgtctttccaggaacgaacccgggaagactccagattggtgtaccaggtggtggctaccccagtaagactttcctagaagaaatgcataaancaattttcatcttttgcatatgctctcattttcttgcagtacatcttcaagtgattcttggggcaagtagtccccttgtacttatagaagtctggcaccttaaacttcggaggaatgaccatgtcgagcactaagcacaaccttgccatgtcaaca

SEQ ID NO: 50105 - DNA, 718 bp, Glycine max
  unsure (1)..(718): unsure at all n locations
nggatatactaananttcttttattttnnatattnnttttntnnatatgtttcgttgttttnanttnnnnnnnnnnaattatattagctatcgagtgacgcgtccaagtctcactatnaaaccatacataattcatcttctctcttcaaatcttattcttcatgaatggagcanatggtggcatctactctaacgcctcaaatgaatgagtgtcatactcaactcgtttaaaagtatctatgaaacgcttgtactatntttacttatctttctntgacagagcatgctgataacgatgatgctcaactggtgaatggtttactatagctataccattattagcggtttgttcattagaattcttcttctcttcttcactgaccactttttcactggtcaccactgcatcattattctaatggtcttcttcagctgcttctttattcgttttctcatcagtattgctcaaaccaaccatacgcctccaccttcgtggaattaaaatacantgtctctttgtgttgatctgcgttgcngctgagaaagactctactacatgatcacatagttgtcttgcaattctccaacttgacctctatattgtaatagatgttcatgttctctacttgcgaggatacctgataantgtgtaaagatctctctcctacctctattggcagctcgtgtgttgggccctattgaaacccctaagtttaat

SEQ ID NO: 50106 - DNA, 431 bp, Glycine max
tggatctcctttagtagggaatctatccttcctaagatgtgagccaacctaatccccctaattaagaactagctcatttcttcctctattgctcttagttgaatacgcctttgtttggttctctatttaggtcttaaccctctcatgcaacttttttacaaactctgacctagattcgtcttctttatgtataaaagaagtgtcaagtgggagggaatgaggtctaagggtgttaggggattgaacccatatacaacctcaaaaggggattgcttagtggttctatgaaccccccctgttgtatgcaaattctacatgaggaagatactcatcccaagacttatcggtgcctctcagaagatcccataatagggtggataaggacctattcactacctctgtttgcccatcagtttatggataacaagtgg

SEQ ID NO: 50107 - DNA, 228 bp, Glycine max
  unsure (1)..(228): unsure at all n locations
ctatgcgtctgtgctcatggctggtgacggcccttgttgagctacatgcactacccgagtntgggtccgagttgtagctcgacgagttcttcagtatgctttgggcctctatcagaagtgtcgttgcacgaatctacattgaatatgttgtctaggctttcttggtagactgtcatggctcaaactggagaccctttctccacactcatgatttgagtcgtaccatct

SEQ ID NO: 50108 - DNA, 477 bp, Glycine max
  unsure (1)..(477): unsure at all n locations
tacggacactatgaaactcagcgttgctacccaaggaaccatcaggaaattacttgtgaatgagagccatgagggtgggctcatgggccactttgggatagacaagacccttgtcttactcaaagaaaagttntattggccccatatgaagaaagatgtccataagcattgcactaggtgtgtggcttgtttacaagccaagtctagggtgatgcctcatgggctatacacacccttacccattccatctgcaccttgggtagacattagtatggactttgtccttgggctccctagaagccaaagaggtgtagactctatctttgtagtggtggataggtttagcaagatggcacactntataccatgccacaaggtggatgatgcttcccatatctcanaactctnttttagtggaagtgtgagactccatggtttgcctacgaccattgtgtcagatagagatgctaagttcct

SEQ ID NO: 50109 - DNA, 389 bp, Glycine max
accggtgagagcgtgatctacagcgtttattaatctctagacgtgagtaataagcggggcatgaatatatgaattttacaatgaaatgtataaataaggacgtgatgaaggccatgattgtgcatatacaagcgctttgaccaaaaagcttaccttgaatgattattgtatcctttgaaacctttattaacagaatgattttgtcaaaaatttgaacccttaaataattatctccagataccttgcttagattctaggagagcatatatttcaaggcaaatttaccccaattatggaggagtgaagataatatggatgtaaagaaaagggtcaagcatcatcacacacaacacataagttgtatgttaagaaaattgtgctgctatata

SEQ ID NO: 50110 - DNA, 701 bp, Glycine max
  unsure (1)..(701): unsure at all n locations
ngtaactgtgcgtagtgtataattgatatntatnngtattntanantaatannataannnnnnnnnnnnaattgcgtggagtgcctgngcatgcagctgtcntnttctttccttctatatantataanatctctctctcttcataaactgtatataactcactatcagatgatgataggtcatcacgtacaatgacctggctgacaattgaacttgtgtcgcactcctatatgaacgaatatagctgcacatgaatctgaataccgtcgatggcattagttggatcacaacaccacacatctacattacctatactggctcttctatgtatctgtcgtctcgacaagcaaatcacgacatatctacgatcatctcgcagcattatttatctctcacttttattctggttgctgctcgaacatctaccgcacaacatgtatgattgttaggaatgttctggcgcccatttgcactcgtatctactttgacctgagcaccatactatatggctgctacgaacgaccaagcctcctatgatagttgccacaaccccttgtaactatctcctaccgcctcgtccttcttgttacntcggctattctcttctcaattaaaatactgtaagaatagnatccctgtcctcgtttttctctcgacgcgtcacagctacggcgcatgatctagatcgcctgtgaaagtcc

SEQ ID NO: 50111 - DNA, 414 bp, Glycine max
gctagaacaccgcctcatatgctgagaacaccacttattatggaccatcatgttggatcagcaccagttgttacagcctcgccctgtgaaaggcaaaattcttactttggagggtcccctgacgcttctggttttcgcttgggttctctaggaagtggaggttttcatggttcctggcaaatgcatccactggatataccttctcacaacatgttatctcatgttgtggggaatgtgtccgaactgacaaccaatgctgggcataactctcctaaacaactatctcatagtttcccatagagacatgctatgtcttctatgactaaacttgatgctctcaaagaacgctttataaaccttctaactcctaaaatgaatctagcaccaacaatgcttataaaaaactgtatgaac

SEQ ID NO: 50112 - DNA, 435 bp, Glycine max
  unsure (1)..(435): unsure at all n locations
ggcagtgaataatagcaacaaattcagagttattagtgattatgaacaactgaacaaaatttaacagtgataatagaacctcaaagagaattgcgcttgatcctcaagagaaagcaacgctggggacttagccttccattaatcaatagataacaaacttataaattgaagaacgaaatttttttgctactggaattgcaaaacgaaaaaatgtttcaaagaaaaacctaagactaaaacaaatgaatataggggagagagtaaagagagcctaactagaaccttggtgctgttatatagtatttcagccccaaagcttacaaatctgttttaaattcaagcncataaaaaaattaaatngaaatctacataagataagatcagatacgatctagattaaataatatatagatgagatcaaatctaaataatatc

SEQ ID NO: 50113 - DNA, 589 bp, Glycine max
  unsure (1)..(589): unsure at all n locations
gccgacctaccaacaccaaatcggccggccggtntacgancaaacgntnncnnnnncagcagacgggggttgatgctgataccttgcaanacggcacatagaaacncagcccagggaacaaancanncngagcgcccgataccctatttaaatgcancanaacagccgagaaggggttgtaactttaagaaaacagaacttatgaactcttggtgaaaagggtgaaaccaaacacattttcaacatcttctttttgcgaaaaccgaaaacaagaagtgaaaccaaccaagctctctaaatctataagttcgaaaatgaaaactactcttagaaaataaaaactggaaatgagaatagaaaacattttctcaaaccagacacgctcaaaatgtgctggaaacaacaaaatgcgaattctaatacagctttctactttgaccaggatctatgagctcctacataagcatgtcacgttctaatgctgatattctatgcataactccaacactgcctattgtaagcaaccttctacattcctttcggcacaacagcttccacattcgaaaaaacatcctggaatataatctgg

SEQ ID NO: 50114 - DNA, 237 bp, Glycine max
  unsure (1)..(237): unsure at all n locations
cacactcaggaactctggcacaagagacttggtcattgccatcttgaaagaatgctaaacatgannaaaagganatatgcaaaagaaaatttgaagaagtttcaaatggaggaatacaaatctgttagcacaccaatgaatcataatgacangtttagcaaggaagaatggtgtgataacattgatgaaggatattatangagcttgattggatgtctaatgtatctcactacaaca

SEQ ID NO: 50115 - DNA, 626 bp, Glycine max
  unsure (1)..(626): unsure at all n locations
tctcactgattttttgatttgtatnttanttaatanngataaatatatggttttnnnnnnnnaaggataatcgactgngctgcagctctaacaacacttataaataaacaagagtttctttttacctaatctttataactctnctataaataatcttgtggttntgattaataaactaatatctctctcttcacgaatctatacattgtataccaaagctacacaataaattaaagggtgtagaacttactaatgaacaatacacatctaacacagcagatctatatatatatatatatatatatatatatgtatatcgggatgtctggccgcacacnactaattacacattttatactccgctatataaggacaccttcccctggacataagaaatacatggcagctctattctttctataattgctatacagaggtactttatctgtaggtcacctaattcaaaacattttataaatccttaaataatagaactgtcgcccacctcacacactatgtggtgcttacaccctttgatgaaaaattggtttattttttcgaatacccgggaacaaatattacggagcttctactggggttcggcctctttgcaacaatgagaaaat

SEQ ID NO: 50116 - DNA, 427 bp, Glycine max
  unsure (1)..(427): unsure at all n locations
catacaatactcaagctgggacttnctatgttctgggaacctctgcgtacttaggtgtattttaacccaatcacctggttcaagcatgactatctttctgcttgagttggcttgccttgcatatctcacagttttcttttcaattcgagccttcacttgctcatgcagcttcttcacatactcagctgtatcctgtgcgtccttatgcttaagcatatcaatgttatgcataggccacaaatcgagacgaggcaaatgatataatccgtacactactttaaatggtgaacaattagttgtgctatggacaggcctattataagcaaactcaacatgaggcaaacatcgttnccaagatgtaagaattttctttaaaacagtcctaaacagtggacctaaaatcctatgactaccacaggttgaccat

SEQ ID NO: 50117 - DNA, 240 bp, Glycine max
  unsure (1)..(240): unsure at all n locations
aatggagaggggtaccactactggaaaacccgaatgaaaaattttatcgaggcaatagatctaaatatctgggaagccatagaaatagggccttatatacccaccacagtagaaagagtttcaatagatggtagttcatcangtganagcataaccatagaanaacatagagatagatggtctgaagaggatagaaaacgagtacaatacaacttaatagccaaaaacataataacatct

SEQ ID NO: 50118 - DNA, 406 bp, Glycine max
  unsure (1)..(406): unsure at all n locations
ctcagcttaatctttcagtggggaagtggtgcagattctctgatgtgtcatggtgagtgtgaatgaaaatgatgaagaaatgccagtggagtccgagacacaaattgctttcactgtggttccagggtttaggattggtaaaactgtgatacagtgccaagtctacctctcacagcgccaagtaaaaaatttcacatccacaaagcaaaggtagtagtaactagtaagtggtgcttttgatcagagactgaccccaccatgcaacaggttttgtgttgaagtggaagacaatgttttgagttgaaacttttggggagggacatggcttgtggtgcagtgcatggctgtgccttgtggggactcaccttctgccatggttcaacggngcattntttttcttgtccat

SEQ ID NO: 50119 - DNA, 107 bp, Glycine max
  unsure (1)..(107): unsure at all n locations
gctagctcctttcttcctctattgcccttagttgaatacacnnctttgttggttctctatttggctcttaaccttttcatgcaacttctntaccaactctgacctag

SEQ ID NO: 50120 - DNA, 490 bp, Glycine max
  unsure (1)..(490): unsure at all n locations
ggcttgtggggcttctatggaggctggatctttgaacttcattgatgtcctttaatgatgattttccaccatggagatgcatcggaagacaaaggagaagaggtgagaggaggcaccatccactaaggaataagccatggaagaaggagcttcactgatcgaggccgtacccgaatcaaataaacatgaaaatgcagtaactaggaagtgatcctaggtcgtttcccaacgagcagtgacaaaccaaatgttcataatatacttgcagtaacagtaacgattggggggagtttgtttgttttgtgattaaagagcagaacaagtaaactgaaatacgaaactactaatgttaaaaacgggttgtttcctctgagtcagaagccattctcttatcctgngttatggagaattcgtccctaacagtcaaccacttaatccaaccttatttcaatntactaagcgaaaatcaacttanggttntcaatacgtg

SEQ ID NO: 50121 - DNA, 257 bp, Glycine max
actaagctgctcctctgctgttcacacttggaatcataaagttttattgatcaagtgggagcgtgaagggcgcgttcttgatctggcgagaggcatgaaacaaacgttacgtagaaactgcaaagcctgcgcactcaataattttaaactagcttcgaattcacacacatatatattttggagaccagagccaaatgagcagggaatcctctattatataactcctcgactatttataacaaaaatagggaggtggt

SEQ ID NO: 50122 - DNA, 445 bp, Glycine max
  unsure (1)..(445): unsure at all n locations
ntgagaatatggttgcagccattggtcaatatgggccatatttgcccattcatagctatcatgacattagagttccactcctgaagaaggaagttgaatatactgaaaatttgatgaaaggctatagggagcaatgggtcaagtatgtttgtactattatgtccgatgcatggactgatcggaaacaaagatgcatcattaattttttgattaactctcaagctggtaccatgtttntgaagtctgttgatggctctgattttgtaaagacaggtgaaaatctttttgagttgcttgatgccattgtggaggaagttggagaagcgaatgttgttcaagttgtaaccaataatgagagcaactatgttttagcggngaaagttgtggaggagaaaatgaaacatatttattggactccttgtgcagctcattgtattgatttgat

SEQ ID NO: 50123 - DNA, 228 bp, Glycine max
  unsure (1)..(228): unsure at all n locations
tgatgcatgtntacgtgtgcagtcctacgatgcgacaaccaagaatcatctantttacttgccanacaactaagctcatgagatgatgcatgtttaatgtttagcatatagatattaccttgtccttntactaatatggacaacctcaccagacatggcttcactaatatggcaataattcttatttgaatcgatattgaagcctgtgtcacataatgactaatgctc

SEQ ID NO: 50124 - DNA, 455 bp, Glycine max
  unsure (1)..(455): unsure at all n locations
gctttaatttcatacaaggaagcatgacttacgcctaggaagctaagttntggttntgaatgtaaaaaggcatgaatattaaggacatgtttgagaggttgttattagaatttaaatttggctgccccatgaggaataccttgcacctaggtagcatggaaaatacctttcaacggtatgtatatatgtgaatatatatagcatgaaaatgccttgcataatatgaatatatatagcatgaagtgccttacaaagtgttggatgggtagcgtaaaagttttttttcaaaatatgtgtatttgtgagtaggtaacaaaagaagccttccaaaaaaaatgtgtgtatatatataggatgtagcatgaaaaggtttgtcaaaaaaatatgtacatggataggtgtcgtaaaatgcctcacacaaaatttttttatgtgtgcaaatacgtatgtgtcat

SEQ ID NO: 50125 - DNA, 331 bp, Glycine max
aacatgcaaatactggcccattggccaaataattaacgactgcctgctcatatgtgaccattaagtgcatcactattctgaaccaaaaggtgaatcacatggtccatatcactcatcagatataactccaggttatcaagaaaaacttcacattcaataattgcaactccatggccaaaaggaaataccgctacatatgtctgagcattgcattctatgagtcccgtatactaactatcccgactgcagacccttacatgcagctccagatgcagcgttcaggacaacaaacacatctttgaagcctgaagacgcccacgatccatataga

SEQ ID NO: 50126 - DNA, 243 bp, Glycine max
  unsure (1)..(243): unsure at all n locations
agtgttcaagatacttgaaatgcanaacaaagcctcgcttttatagactcttcatgtctggtcaagacaaccattagaagagttatgactnttagataaacttaataaccaatttgataaagtcaaaaaccatctgaagagttacatnctttgattntattcagaaacaatcactggtaagtcgataccaaattagtgtaatcgattacacanagctnttatgtgagaggatgtgactcttca

SEQ ID NO: 50127 - DNA, 395 bp, Glycine max
  unsure (1)..(395): unsure at all n locations
cgaggcacttacccgttgaagatcgaagaacgatgtattaacgaatgaagaacgtcgaagaacggttcaaacctttgcgagattcctcacggaaaacgttacggaaacgtttcggaagcgcctcggcttagattttcttcacggaaacaattttttcaagcaaattccaaagagagagaagtgcctaaggggctgggatcccttccttcttcatttcctcccctatttatagcaaaataggggaggtggttgccgcccagctcgcccaggcgagctcagctcgcccaggcgagcagggttgcttcctccagaagcaaccgccttctggaggaatcttctggagggcccaaatgggcctgggtgctatttgcacccncacttttactaagtacacc

SEQ ID NO: 50128 - DNA, 674 bp, Glycine max
  unsure (1)..(674): unsure at all n locations
aaatgagtggattttntatatgtgtgtatgaantatttagttttagtattattttattnnnnnnnnnnaaaatctgcatgtggtgtactgagcngcnncnnnnnnnnctantcatcaatggttaatcttatctttctcttttttacgaccaacgtacagataaaagacaactactgatacgattatcattcgacagcaatccgtggatggatactgtgataaatgcatttcctgtgactatgctcatcttgtgtatgctcacaacacacataccatcttgcactaaggtgtctataccacaaatcacaagatctattctcaattgcgtattatcacagacagcatctgaaatgaaaacatgtcataatacctttacaatatctttctattgcctcttctcgtccgaaacatacaacttgtacaggagtgtaatcgtaaccttgatttcttccacctaactgttgcttcgataataaagatgctctgaacgtggaacatataatgtacacaacaaatacttagtcgttggcagtgccgtggatattatataaatacttcggatagtgaacttcttggcttcttatttggaactaacataaccttatggaccggcgccgtcaacatattggctcctctgtgtggtctatttctcctagcctcatctgtgttggctt

SEQ ID NO: 50129 - DNA, 223 bp, Glycine max
gagcttgactacatgaatcttgaggctgacctgactatacctatcaagctttatttggtcggctgaccttttaaagtctggcttggcctgatagcctctataaaagccgtcttcataatacatatataatactttatggagtatgaatggaatacgaaagcttaacataaaggatagctaatcataataatgatgaatattaaaacgcacatgactcatacct

SEQ ID NO: 50130 - DNA, 474 bp, Glycine max
  unsure (1)..(474): unsure at all n locations
ngaatagannattttgggctgaggcagccagttcaacattctatctcatgaatcactcaccatccaatgccataggcttcaaaacccctattaaggtatggcctaacaaaccaactaaatactcaatgttgaaggtgtttggatctttggcatactatcacgtaagtgaaggtaagctagagtatagagccaagaagggattctttataagctttgttgatgaagtcaaaggattctaagtctggtctccatttgaaataaaagtcattctaagtagagatttcatctttaatgaattctctatgatgcattctaaatctgatgaagatttgggaaagcctgaggatgtcactaagcaagtggagttcgagatctcaataatcaggaacattagngatcagaagcaatttaaagcacctgatgagactgatcagaatcttcaaattcaccattaacatcatagtgaacaccaat

SEQ ID NO: 50131 - DNA, 195 bp, Glycine max
  unsure (1)..(195): unsure at all n locations
tatgcttcattgtgataataagggtgccattctgactcccattgataatctgcagaagaatagtccctttcanactgagttccctgctgttgcatggaatagcagtcgcctttagagctagcttggtacgtcatgaagtctgccaatacactttcaagatcagggagctctcctttctcataatagttgtacatg

SEQ ID NO: 50132 - DNA, 397 bp, Glycine max
  unsure (1)..(397): unsure at all n locations
actaagctncaaggatgcttaatggggaaaagangagagatggtagtacttatttgaangaataaaagagggagagaagtgtgactctgaagtgtgtctcataagactttcatttatcaaagttacaacaagtgttacatatgcttatatttatagactaagtagcttcctcgagaagctcttttgagataacttccttgagaagcttctttgataaaaattccttgagaagcttgagcttagctacacacacttttctaataactaagctcaccgtcttgagaagattcctcaagaagctagagctcagctacacacacctctttaatagctaagtcacttccttgagatgagaagctagagctgagctacacaccctctatagtagctaagatca

SEQ ID NO: 50133 - DNA, 240 bp, Glycine max
  unsure (1)..(240): unsure at all n locations
atatcgagactctcannaatgacaacagaagctctgagcatnatcaaacgacaataactttntactcggatgttcgaatatgtccctgaatatatcgagacgctcgtaattgaaaaacgaagctcttagatatatcatacaacaataactcttaactctcatgtccgattgtttcccgtagtatatcaagatgctcanaattcagaacagaaggtctcagcagaatcaaacgataataac

SEQ ID NO: 50134 - DNA, 466 bp, Glycine max
caattatctaatcattccaattcatacaatttgttcattcaaatcattctcaaacactcatttcatacaaaaaaaaccactgcatatcattttcaatcagttcactattcaaacacgctttttgtacaagcaaacaactcaaagtgctgaaatttaaataactgaaatttaaagaactgaaacataaaactgaaattaaaataactgaaaataaatcataaaataactgagaaataaactaaaatgttcaaaatgcacaaatttaaatgtcctgctcctgtggttactcctttgtatgctcattaagatctaacacctgagcagttggtgaatcctgagggataggctgctctagctcatatgcttgtgcagatggtatagcatcatcaggtatgggtactggggatggctccgggatctggtctgtggaagtctcctcctcgtgagccatatgttcacctggatc

SEQ ID NO: 50135 - DNA, 474 bp, Glycine max
tggaatctcagctcccacaacagaatgcattattagccaatgaagatacatagcaagaatggtgatttaaggacacaattctcttgtccaagcatatttagatatgcttagaggggcaaattaagagatacaacaatcaatcctataccccaagaaacagtttcatgtgaaagacattgaactccatctcagcaatttaccaaaaacaaatgggaaaagggaaaagataagctaaagattgaagctttctgtttttaacgctcaaagtgttgttcagaggtgaaatgattaagaacccaagacaaaaaatttctaagagtacaaggtaaagggtgcagacaaatttgaaggggtgaagaataaaatctcaaaaagatccaagtggggtagaaaaaataaaagtgtttggtacctgaaggagaatagtcaaaagctcagaaattcaagaagccaccaactaccatgacaatcaca

SEQ ID NO: 50136 - DNA, 420 bp, Glycine max
aataattaattcaaccctccttcttaattattccgaggccacttgatccaacaagtggtatcaaagcatgtatcttgtagaaagtttcacaactacaagattcatggcctccttaaattttctgtttctggaaggaaattccatccataggccacccatatttaatggtgagggttaccactattggaaaatccgaatacaaatctttattgaagccatagatttaaacatttgggaagcaatagaaataggaccttacatacccaccatagtagatgtaagcactagcaccacaacacaaaaacctagagataagttgactgatgaggatagaagaagaatccaatataatcttatagacaaaaacattatcacttctaccctatgaatagatgaatattcacacatatagtcaatcat

SEQ ID NO: 50137 - DNA, 302 bp, Glycine max
  unsure (1)..(302): unsure at all n locations
tctcnncctatttcctataaatagggggagaagtgaatgtttaaatgttcagccctcctggtaattcgagatcacttgaaatctgtgaaaaaaattgtttccatgaagaaaatccaagccgaggcgcttccgtaacgtttccgtgggtgatttcgcgaagattttcaaccgttcttcgacgttctttgttcgttcttcgtcgntctttggtcttcaaccggtaagttcccgaaatcgaacttttaaattcatttatgtacccttagtggtccttatttgttttcacgtgcttttatattcat

SEQ ID NO: 50138 - DNA, 483 bp, Glycine max
  unsure (1)..(483): unsure at all n locations
gtcactcccgcatttatctctagcatgtattgtatgttggtctcgtcctttgtcacgggaagccggaaggtccatatcaccttcttaattgtacacatggggcactgcgcccccaaatgcacaagtaagaagagataattttccgggctctcgtgtccgtaaaatgcattcatatcatgcaccacataagcatctcttcataacatcataatggacatatcctgcatttgtccgttatcatattccagcctcacattttgcatgagtcatggcatcatcatgcatatgcgttcaacaaactttntgatctgcaaaattgcataccatttgttttcatgtttgctcatccttgcgttntcctctacaaaacaaaaacaaaaaagggggaagcgtgaaacttcacactacattcttagtttcatgtgttaggcaccacgagccaaccatgttgggatcataaacccgtntcacttaaaaacaaaa

SEQ ID NO: 50139 - DNA, 409 bp, Glycine max
  unsure (1)..(409): unsure at all n locations
tttgttactcaatttcgagcgtctcgttatatatgttctttattcggacatgcgtgtgaaatgttatgatcatttgaatntctcgagggcttctattgttcaatttcacgcgtctcgatatattatacgcctgaatcgcacatccgtgtgaaaagttatgaccttttcgatttctcgagagcttccgttgttcaatttcgagcgtctagatatattatgcgccagaatcggacatccgtgtgaaaagttatgaccatgtggatttatcaagagcttctgttgttaaatttcgagcgtgtccatatattatgcgcttgaatcggacatccgagtgaaaagttatgaccatttggatttctcaagagcattcgttgatcaatttcgagcatctctatatattatgcacctg

SEQ ID NO: 50140 - DNA, 676 bp, Glycine max
  unsure (1)..(676): unsure at all n locations
taaatctagtttttgaattntgantgtgatattcttatatattataatatgagtattannacnnnnnnnnnnnnaattttgcgtaagtgactgacgctgcaactnntatgaaccaaggttacaaacttccatatcataataatactcataatttagcactcatatatggcnccaaacttcacaattgatgaaaatattaatnactgcaacatggcttgagcgaaactacaacggaagagaanacctctgtttaatatataaattatccacttccaaaaacattgacttctttactaacatctgcacattgtggaaattctttccatggatataaccacagataggtcacattcttagccgattcatgcaacaccaagtgtttatatttaatccatactacgtgggtaaagatattatgaaggggagaatgacggcaattaatgnatcctttgtccattctattcatacaagccctatctagagaacccatctcaccaattcatcagtacttattaatatactgcctactactgcctacataaattgctatctatgctatcatcccatataatgatcattttgaaattgacaattctccacaccccaccctttaccttttgtttgataaacccatatagattattgggctacaatgctattatgaagtcctcaccct

SEQ ID NO: 50141 - DNA, 509 bp, Glycine max
acgtgacactataaatctcagcttctcaggaggtgagcttagttattagaggggtgtgtgttgctattctctagcttctcaaggaagttttctcaaagaagcttctcaaggaagttctctcaagaaagcttctcatggaagctacctagtctataaatagaaacatgtgtaacacttgttgtaactttgatgaatgaaagtcttatgagacacactttaaagttccacttctctccctcttttattccttcaatttcgtgctcccccttctctctttctttttctccattaaagcatcctctttaagcttcttatccaaggcacattcttggtggtgaagctccttcttccatggcttattcccttgtggatggtgcctcccctttcctcttctcatttgccttccattgcatctccatggtggaaaatcaccattgaagctcatagatccagcctccatagaagcttcacaagctaacttccatcagacactatatgaaaaccatatc

SEQ ID NO: 50142 - DNA, 148 bp, Glycine max
  unsure (1)..(148): unsure at all n locations
ctccctgtcaataatccttatttattgatttgtttttaacnnggagtatcacntagcttttgtggatggttaaactatatattctactctttattattattatttggaataaattataaaaactatatgcatttacttctatatcatt

SEQ ID NO: 50143 - DNA, 431 bp, Glycine max
  unsure (1)..(431): unsure at all n locations
tccatcaagtggtatcagagcacaagagcttcaagtttgtgtttcttaaacctccattaatttgcagctctaccttctcctccattgttgtttcttcatttttcaccatgtatctcctcacatgtcttgtgctgaatgttgttaacataattttttagaatttccaccgattaaacttgctatagaagttagatttgattttctatggttcaaattccttgttcttgttcttgaaccatgaattgtgttgactntaggttcctttgagttttgtattgccatttttttttctgaaacctaaaccataaaattcttacaaaaacattaaggtagaagaaaacctcaaaaatatagagtgacatgttcatctattgtagttttatcatagaagtcatgtctagtcatgaaacttgtcacataagaattcttat

SEQ ID NO: 50144 - DNA, 562 bp, Glycine max
  unsure (1)..(562): unsure at all n locations
ttttacattgttaagtatttgtantatcgatttattttattttttnnnnaatatattcctggcgactgagctccctatgaacagtctgtatgattcaccatttcatttcttctaacagaaggctacaaagtgggcatacaatcattatgcagagtccatttgcttcttataatgatgataactgtggaccaaactataaattattgtgaacccgcaccccatatttataataagattaggggggaaccacactgagaacatatatatcacgcgatagggcagaatgaattcacacataagctgtacaggcgtataactatatctatttcgatcctcctgaacatgaaccgacatggggagcgaacagtacaaacttcttttaaaatccatcccttcttatttatcaatgcatacagatgtctattctccatactaagatttccttgatccttatgtaaatcatgaaagattattgctgaccacacacaagaactgagtactctcttgatgtcttctaaatataagagaactggcctttcgcattcaaatttatattaatgtt

SEQ ID NO: 50145 - DNA, 293 bp, Glycine max
  unsure (1)..(293): unsure at all n locations
aagaaaatcttgctatatcttaactcaacagctatggtgaagagacagacaacttctgaaagacaagccactcctaacagtctcaaagatgcaaggaaaacaacaggcacccgacttataagagatgcaagcattactacccaacgaaagaataaagaactgtgcaaagaattattctctcactcacatatacagncataactatacactgcgaatgcagcagccgttcgatgaaacataacgctcacttcacatggcagtcctatgctataaacgactccagaactgaacat

SEQ ID NO: 50146 - DNA, 509 bp, Glycine max
  unsure (1)..(509): unsure at all n locations
gggaatatgagcttaaatatgcagatgcaggtgaccaagtgcctaaagaagtggtacttgatgttgtcaaggatgcatctgaagcaaagcaacaccaggttataatagctgagagagttgaaaccactttggagaccagntgtgatatcttctataccacttttgctaanagagaagctgagcttgaaccagctatgatgtatgagcagactagtgacgaagacaatagtcttgaagaactatggtgcaattgtattgagcatctctcatgaggagacgagacatagcagaatagatttgttgcactcccatcagacaagatcttcagacacagaatgggatgatgctatttgagtatgacaagatagtcacaccgttgactatcattgactctgactaatatggtgagtgtcagctacctgaacatgaattcttttggttgaactctatctttggcaatttttatgatgtatggtaaagacaaacacaacactatggtttcttacttt

SEQ ID NO: 50147 - DNA, 429 bp, Glycine max
tcaagaatcaagatcaatattcaagattcaaggttcaagattctcaagagaagacttaatcaagataagtatgaaaaggatttttcaaaaactgagtagcaaatggattttttacaaaacatgtttaccaaagagtttttactctctggtaatcgattaccagtagcaaaatgtttttgaaaaagttttcaaattgaatttgcaacattccaattaatttcaaaaagctgtaatcgattacaatgttttggtaatcaattaccagtgcatttgaatgttgaaattcaaatttaaatgtgaagagtcacatcgtttcacataaaagccttgtgtaatcgattacactaatttggtaatcaattaccagtgactatttctgaataaatcaaaagatgtaactcttcaaatagtttttttactttttcaaat

SEQ ID NO: 50148 - DNA, 229 bp, Glycine max
  unsure (1)..(229): unsure at all n locations
gacaacaacctcagcaccaggtttgacaatatctgtcaatgagatcatgagactccttccgtccaaggtggtgagatccaacgttntaccagtaagggcctcaagaagggttatctcttnggtgatcaccaaatcattaccatcccttctataaagagcatgcggcttctcatctatcacanaaatgagatctgctgggatgacaccaggctcacggttacctttctct

SEQ ID NO: 50149 - DNA, 288 bp, Glycine max
  unsure (1)..(288): unsure at all n locations
agctatctacctattatctccaatgtcttgcaagatcaatatatatatacatgaagttctaattcaagatgttntctttgttgcatgggcataatgcaatcactctatgtctagcaatgattntattaagatgtccctacctctgagttctaactataaatatcctctctcaagcgactaatccctaanactgatgcatataaaaccttcaatgtatttctaccaaggattaccctctntcaagcgccaaacccctaaagatgatgcaaggatgaagcatataataca

SEQ ID NO: 50150 - DNA, 239 bp, Glycine max
  unsure (1)..(239): unsure at all n locations
cccactatnacccacaaccacccaccacaccgancaatgttaagaaaatgacatcggcagaaacgcgcgcgcgaagagaaaggggcctatgctgtacccgcgatgacaagttttcccctaaccatcgttgtcctaataagcgacaattagatccacagagggaagaagaggatgaacctgccttacaaccacaaccaccagacgaggctgagacagcaggagaccctagctcgcaagat

SEQ ID NO: 50151 - DNA, 438 bp, Glycine max
tagcctggaatgttccatcttgctactccttatatctctatctccctcaaaattactattactattactattagagatttttttccgacactcaacataatttcttctacacccaacataatttttaaaattccaaccttacctctatttacttcttcttcttcttcttcttcttcttctttgatccttggttatttgtttcttcatacaccattcatttccattttcttttgcttgagctactcatttcatgttgtggttggtttggtcgaggtgcattatcgcggaggtttgttcgtagtttttagttgtcgtcgtggtgggtgttgcggtgcaacgacgaaagatgttagtttttttcatctgcaactgtgatatgtgctaatccgtaaaaaacatacagatgtgcagtttgtatgaatcatatagattgacaat

SEQ ID NO: 50152 - DNA, 375 bp, Glycine max
tcactcggttgttcgtattcaggagtatcacatattgagacgctcgaaattgaacaacggaagctctcgagaaattgaaatggtcataacttttcactcggatgtccgattcaggcgcatcacatatcgagacgctcgaaattgaacaacgggagctctcgagaaattcaaatggtcataacttttcacacggaggtcaaattcaggcgcatcacatatcgagacgctcgaaattgaacaacggaagctctgaagaaattaaaatgctgataacttttcactccgatgtccaattcaggcgcatcacatatcgtgacgctcgaaattgaacaacggaagctctccaaaaattcaaatggtcataacttttcacac

SEQ ID NO: 50153 - DNA, 704 bp, Glycine max
  unsure (1)..(704): unsure at all n locations
gttttatatgggtaattagtttcnantattgtantnnntattgtgatngtggattatgttnctgnntcanannntntnnnnaaagagaggctgagatgatgctcttggcnncnctnnnnnnncncactatcttttactatgtaatatcttgctatntctctaatcaactctcccttatccacaaatnatacatgaacccaccatcctcagttacccaccttcaactgagctcacgtactcctacgtagcccttatcctcgttcctctcagcatcagggtcccatcaacccctccaagcttgcacaatatgcaagcaactcaattccaactatcatgaactaccctanaccaagaaaatagggcagaggcagaaaactctgcccacaacacattcacatattacagccttccttactcanatacnacttgtaccggttccttcngtccgaantctgtaacccttnggatcgactcgaanaatttactgggaggttctagtacataagtctacatcttgaccggtgtgattctgtagaatatgtccacaacccaatatgtactacctttccataacacgcatgacaacattttctgccattagaaatctgctgcaaattgacagctttgctgtcaattgtaatatcaaccatctaccacatccaattttcaaatgatctacagccaatcagttatacattaacaag

SEQ ID NO: 50154 - DNA, 505 bp, Glycine max
  unsure (1)..(505): unsure at all n locations
ttcctctgttcttcgttctgcacaaagctcacatagtctattcatgctctcttctcattcgctgcaattcaggcttaaaaagggatttctattcgtgaaggcgcgcttagcgcaagtaagtgaattttagcttagcgccattcttacgctaagcgcagaagagacaatcttctcgatgcgcgagctaatgatgcactgagcacgtgatgacatggaagattctcttcaaaattcttctcactcgctaagcggctgatgtctcgtttagtgattgagtctcgctaagcgcacaatccangcttagcgagacagcaacttttgcaccttcaaaattntctcctttntacctaacattgaagtgaaatttacattacattcatatggaaagcttctacttagtaaatataagaactaaacaacatatatttacaatcctaccatagagaaccatatattgggagaaatatatacatttgtgacaactgttatatacaacaagtagtcg

SEQ ID NO: 50155 - DNA, 490 bp, Glycine max
  unsure (1)..(490): unsure at all n locations
tcacatttattatataggacaagatggagaggttgcttatttgacaattgacatggatagaacaaacaaacaaaaaaaggaagaagaagaaaaaggactacaatacatcaataaattagacactacaagactaaaccacacagtatacaatcaaggagaaaattgaaagatagcacttacgtttgcgcctccacatgccatttcagctccttgttctcctcgtagattcgcttcatcttctcttcctttgcctccatatgcttctccttctcctccagaaccatctccgcctgctcgatccatgacgataactcctcctcctccagtacctccttctccttttttagcgtctctttcagcaagggcagggaccagagccgcttgggctccacctcgagttcaacctctgataactgctaaataatnggtatttgatagtagaaaactagtcaaatatcggcctgaattaattattaacagtatttgtgat

SEQ ID NO: 50156 - DNA, 491 bp, Glycine max
  unsure (1)..(491): unsure at all n locations
cgatagaacagctataattggcattgaaccacaaatttgttcaagaagctatntttgtcattgctgtgatccagagataaaatatacaaaaggcaaacctctcttcaacgtattcaaaagaccctgacctctcccagtctgcctagtaaatcccatgaaatttctcatcttgttagaacgttatttgtttaacagagtaaagcgtttcttgtcctttaatgaaggttgatccaagtatatctgtctacaaattgtgcattctgtaattgatgacattattacagttaaaacttaaaagtgttatggaagaactcaatttgattctgtatgtcaaaagtcaaaactccagtggacctctaatatggttatctgatcttaaatgaagagacctaaaagttntagaattctacagtcttggtagtttatgcagatcnagctgcactcactcgctaattgttgcttggctaatatgtcataacaagtgctcatat

SEQ ID NO: 50157 - DNA, 421 bp, Glycine max
  unsure (1)..(421): unsure at all n locations
tcagaacttctgtagggtttcagggctttccatcagtctcttattaatctgccatatactcagccggtattaggcctcatgagctttctcatattcagcagcttattggatttagcttgggtgacttccctttcagatacttaggtgttccccttttatcatctagattaaatgtatgtcattatgctcccttgctttccaagattactgtcctgattcagggatggagcaaaaagtctttatcttatggaggtaagttagagttgatcagagcggttattcaaggaattgtgaatttctggatggggatttttcctttgccgcaatctgttctggactggatcaacgcttcgtgccgtaattntctgtggggcaaagcggatattggcaaacacaagcccttggttgcttggtcagtagt

SEQ ID NO: 50158 - DNA, 457 bp, Glycine max
  unsure (1)..(457): unsure at all n locations
ngcataaagaaatgtcagaggatgaaattgcatgtggctgtattagagcacattgaagagaaaggtgtcatgagaagaaaagaggggttgtttccctaattagtaactaactgcaaccaccaagtcacaaggtggtaaccttgctgttcgacaatggctcgcccactatccatcagactaatgcaactgttttaacaaattatttggctacatatttcaaaacatataacctaagtttagcttaattaaaaatgaaccttaagaaagtgtttgaccccattgtactgcaaaagaatgagtattctcattgaaatcttgtccaaatgaaggtgcactgaaacaagtacgaaatgaatggagtttagaagaatatcataccttntgccttaatgaatagctagcagctctaataccagcaaattcatcaactaacggcttgaagatcaacctanaaaca

SEQ ID NO: 50159 - DNA, 274 bp, Glycine max
  unsure (1)..(274): unsure at all n locations
tctcatatacaatatacggtatatattgaattggtgtgtatcaatcacaagaacatcttgactattgtttaagagataggtcataaaaatattatgtagttaaatcaacatcattaccaatgtgattagaatgataaataaaccttacaaatgaaatccaagacatcacatgatatatagaacaatactataacaatacagaatanaaatattaagaattagatatacataaattaatagtacgtatagaaaacagaatgtccaacaacaacat

SEQ ID NO: 50160 - DNA, 357 bp, Glycine max
  unsure (1)..(357): unsure at all n locations
ctcattgactccagattgctgcaaagaaggactattatctgtctggtgatatgcngaacaacatagaccacatactcttgcaacacgagtagacttctaattcatggcatgctaagttactaagttgaccaacgcataaagttcttcttcaagccttttattttcagtagatgaagatgaatcagcggccacctcaaggactcctctaagaacaatatgatcatcttttacactgaattgttgggagttagaagccatcttctcaatcaaaatcctagccttcagaagagtcatatcaccaagggctccaccactggcagcatcaatcatactcctctccatgcggctgagtcccta

SEQ ID NO: 50161 - DNA, 463 bp, Glycine max
  unsure (1)..(463): unsure at all n locations
ttcatgcaggtggaccttcttctagttattatgacttaccacaatcgtctttccctcttccattcccacctagagcaattccaaacaaaaaaatggaagaagcggaaaaggagatcttggagaccttcaggaaagtagaggtgaacatacctctgctagatgccatcaagcagattccaagatatgccatgtttctaaaggagctgtgcacccacaaaaggaagctcanaggcaataaaagaattagcatgggtagaaatgtgtcagcattgataggtaaatctgttcctcacattcctgagaaatgtaaggacccangtactttctgtataccttgcattattgggaacaataaatttgagaatgccatgctagatctangagcatcagttagtgtcatgcctctgtctattttcaatttnttatctcatagaccctngtaatctacagatgtggtgattca

SEQ ID NO: 50162 - DNA, 658 bp, Glycine max
  unsure (1)..(658): unsure at all n locations
gacatcgcgtaatatgtgtaaatgagtntanttgtactattatattatttaaaaattnnnnnnnnnnnnaagcctctgaggtgggatgcggcgtgacncncanaacacacttaaaaaggatatgacagattatcatctttttttttcttaccacgnnaacggagcattcttaaggaccaacgccttatattaatcaccttctcaagaataagaatcgcttggttcactcttacaaaagaactacgtaggtctaatctcctcttcgatggagggtacgtacgagcaaaatcctcatctttatcgacctcataaaatagaaagaaatataagggaagataacacactctcacaattctaaataatacgctgttgtccttngagacaaacgcaagaagtgctaataccttcctcaaacataaatacaacttctgacctctgaattntcatgtngaccagtctcttcgatngtcctgacgttccacaactaacggtggtacgactcccccatctttctcctatgaaacgcaccgtgacctcccttgtccctcaaatggatgtgcacactatatcttaattgctacatactgtattatgatcgaatatacatgtgtgcattattcgcatcatgtcgttataagataaacttatgtgctacccg

SEQ ID NO: 50163 - DNA, 490 bp, Glycine max
  unsure (1)..(490): unsure at all n locations
tgtgctcgttntatttaaatccccaggatcatgagcaactatgttcgtcctactataaaaagtgatcaaataacaagcatagattcaaaaggtactaggttgcctcctagtagcgcttctttaacgtctttagctggacgccttatgacttgtcggtcactgacctagtactttgcttacctttggctttggacttggttgcctattggtcggccatgtgtcgtaggcaacgctctaacctttttatggatgagctgaggtgaactttagaggtggtggcggtgtgtctattgcctgctaccggccataccaatgctgctgaggtgcttcgccctgcgcccgcctgggggcgcagtacttcttgatgaaagctcgattggtaggcggtctgatgactttgctggtggcgaaagacacttcctataactgacagagacccatatntagagctggcaactccaagaccgctgtggacttcttcgggtccact

SEQ ID NO: 50164 - DNA, 501 bp, Glycine max
  unsure (1)..(501): unsure at all n locations
tatttattctccatgtcaacctaaagtacataaatgtctctaatatgcaccaaacataaaaaaatggtacatcaattcaacctctaattttaactctatattgtttattaatttatggaaattcatctttccctttttaatgtccctaaacaattggccaaggagttatcagaatccaaggttatcttttctgaccaccacaaccatcctccacgcacaccttccacgaggccatggtgccaccacaagcagaatttgcgaggcaagccagataggatgagaggaaaaggtgtaatgatagtggaaatttgacacaatataattgcatttccgtggttgaggtcaaggggtgaaaggatgagtaatgacggtaacaacataaaattgccattntatctttntntcttcttctcttggtttaattaaaactattcatttattcttattggatcttcctaaataatgattcggattacttggcgtattggttcatatatctta

SEQ ID NO: 50165 - DNA, 549 bp, Glycine max
  unsure (1)..(549): unsure at all n locations
tttattctcgatttgttttatataaatnttttggtatttatatttanggtttnnnnnnaatcagcggagttgagggcngnncnnnnnnacnncnccnctctcatcatctttttatttttntgcctcccatctcaacgggatgccttaacacacttgtcatgatttcttatgctcttaaggcaaagtcaatcttgatgcctatttgcttcatttcttggagaagactgttagagtgctggttttgagggcctaagtaaaatgtccttgtcgctgcctcataaactnactctctcattgcacaactttgacttgtagttcatgaatctcataccactgaagagctgatatgttgagtaacccttcccccagacttgctagactagaagcctcatgacagctttccattcatgactttcttaagcatttcaatgccatactgtgagacgccatgttacatgatattgactcagctgtgctgacacccacttagacattctctattatcctaggatatgacacactgcactgtgtgaccacaatctctttttg

SEQ ID NO: 50166 - DNA, 433 bp, Glycine max
cttgatgcaacagttggagaggttaatggaagaaggatatgttgcgctccatgagaggttggatcaaatggagaatagagatcataatgaagaagaaaggaggagaagagggaatgatgatgttcctagacaaaaccgaattgatggtattaaactcaacattcctctctttaaaggaaagaatgatccagaggcctacttggaatgggagatgaaaatagagcatgttttctcatgcaaaaactatgaggaggaccaaaaggtcacgcttgccgccacggagttttccgactatgctcttgtgtggtggaacaagctacaaaaggagagaacaagatatgaagagtcaatggttgatacatgggcggagatgaaaaggatcatgaggaagcggtatgtgccggctagttactcaagggacttgtaatcaagc

SEQ ID NO: 50167 - DNA, 475 bp, Glycine max
  unsure (1)..(475): unsure at all n locations
gaagctcctgttntagctntacccgattntactctttcatttgaagttgaatgtgatgctagtggagttggcattggggctgttttgatacaaaacaaaaggcctatagcttatttctcggagaaattgggaggagccagattgaactattgcacctatgacaaagagttctatgccattgtgagagctcttgatcattggaatcattatttgcgttctaatcactttatattgcattcagatcatgagtcattgaagtatatcaatgggcagcagaagttgagtccaacgcatgctaaatgggttgaatntcttcaatcttttaatttctcttcaaaatacaaggatggtaagagtaatgtggtggctgatgcactctcaaggaggtatgctttaatctcaattcttgaaactcgttacttggtttgagacttgaaagatatataaagaaatgtggatttggtgaaatactcta

SEQ ID NO: 50168 - DNA, 415 bp, Glycine max
tgatgaggtacaagccctaaaggcttatcttgatagagcccgagtagtcgaagagaagttcaagttcatagccatcaaagtctgaaaagagtatgatgaactaagggacgtcaatatggccaccgctgatgccttggaatgagaaaccaagaatgcccaaaaggaagaacacgtgccagcaaagttttgaggggctttatagggcagcaatagtgagctcaagctccgaagaggtgaaaggaatcatcacgggtcaaaggcatgatcttgaaggacgagctaaaggcttaccttatgtcgaaaagaaatatgtcctaacagttaagcgagactgaagggaatatgtgggccgtcatcgatgagtgcaaagagaagctaaatctagcggcgactcacgagcaaaggctataggatg

SEQ ID NO: 50169 - DNA, 712 bp, Glycine max
  unsure (1)..(712): unsure at all n locations
nagactttgtcgtttngtgcgagtatgtnagtgtgtngnncntanttnaganggaagtatntttgtnnnnnnnnnnnnnnnnttgtatgctgtgagtcagctgcggcatgcaacctngnnnnggtaaatctcacaattgtcatgtgctcatgncataatttttatctgctgctatacgagacatcntgcacaaaanagtcagggtagccattactcgcctgtgctttttcttccatgctatatgtatcaaagccattgatcctgtcacgattgatgatgctgaaaatgatgccatcattatactgcgccagatggagatgtatttctccactgccttcgtttgacatctgagtcacatagattgtgcatcctggccatactaaatcataatgttgtgtgtcttggttatctacaggtggatgtactccaattgagcgatacattgaagattctatatgtgttcacactagaatctatatcgtgcataaacactccattgttgcgagtgacattgcagtacaagtccttctattttgtcagaatcacacagtaagtaaacatgttgtccttctgagtctcgcttaaagcatagtggtggcatggttcataagactgattcgacactcagtgatatgattgtacacctcctagatgtttgacacataaggaattgtacctcttctatcctgacgctcttaatatactatcaacc

SEQ ID NO: 50170 - DNA, 413 bp, Glycine max
  unsure (1)..(413): unsure at all n locations
cttgcggatntggtcttcgccgatgaaaggatngaagtgtgtcttataagaggcaaatttaatcatcctacttggacgaatgagaaaactggggcaaatgaagagggtgagaatgaaggagaaacccatgctgcgtctgttgttcctacatggaaacttcccaccaacccaacaaacatcattactcagccaatatcaacccttctccgtacccaccacacagttatccacaaaggccatccctaaatcaaccacaaagcctgtctatcgcacttccaatgatgaacaccagctntagcacaaaccaaaacaccaaccaagaaatgaattntgcagcgaanaagcctatagaattcaccccgattntggtgtcctatgctgacttgctcccatatctacttgataattcaatg

SEQ ID NO: 50171 - DNA, 574 bp, Glycine max
  unsure (1)..(574): unsure at all n locations
tgccccctttgatgactgccttgcgctctcgcgacgctatanaagagcgacgctagcctatcactgctcgctgcagtgtcgacgcatccgtggcgtactctcttatagatncatcatgacattctgtgggagaagccttctgtggtgtgcnatattctgaaccgctcgcttagtctattgagcgacgcccnatattntgactatcctgcgcccaaatgccttgaccatggtgaatctctctagagcttacgttgctgaaacttacgagtttcgatataatactcgccttatttccgacctggtgcggaaccttgtggacaacataattatccgctagcttgacttgctgaatgtcacgcggcctcactatttgtgcaccgatactatctcttgatgtgcagagtgtcaagcatccttactgattgagcgctcccattgtcttttgataggcggtcgatatggaatcgccagaatgcctcatgatgggtgcaggcacctcatttgacttatccaagctgccgcgctcatctaaagcgcctgataaatatggctgacactgctctcttctaggttn

SEQ ID NO: 50172 - DNA, 463 bp, Glycine max
  unsure (1)..(463): unsure at all n locations
atcacacacaatggatctcatcttaatttgtaggtnatagaactcgacttaatattatcttaaaatgttagtttaaatctaactcaatcttaaaagttaattaataggatgagaatttatgtcaatatgatctaagaaacaaaaaattattatgataaatgtgatatacaaacaaactaaatccctttaaaaaccaattaaaaggattggatttcaaaaccaatctgcttcctccctatataactagttgggttttaattgagatgattttaaatttcttgatgcacaaaactggttataattctgtccacaaaatccactaataaatcttttgttacaaaactgtcaacacattataacacctttccaggaaaaacaatatcaaacacatggtttctaacatctactatgaagaccacaaacaaaaacatactaaataatgcactattatgttgacgttata

SEQ ID NO: 50173 - DNA, 364 bp, Glycine max
  unsure (1)..(364): unsure at all n locations
gacgaagctgttntgagtccaagcgcattaattttatatattctggacacgagaagtgcagaggggcccgaagaacatctacatgaaagccaatctagaggagagaagatcagacgcaacctccatgagaaaatagcgagacgacatgaaatctgcgaaagacaagatctggcagaataaaaccggcggctttatgcaagtccgggcccaactccgaattcaagcccaagtgcttatcatacgcccgaaagcaaattaaaaacacaaaattagtccagggagcccaaatgataaaactgcggaatcaccaactaaaacggtgacgaacagggggaagagacaagagaaagtgacgacacatcga

SEQ ID NO: 50174 - DNA, 227 bp, Glycine max
  unsure (1)..(227): unsure at all n locations
catttatcatgccttctattgaattacatcagatccatcgatctgattgcttattacanaatgcacactctatatatgcttccatagagacagcaacttgcctcacggaacagaatcctcctacccaaaatggaagaatgtatattccaatntccaaacacagaacggagtcctccaataatcaaaattcagcactaaatatgaactcagccatctaaaatcacatg

SEQ ID NO: 50175 - DNA, 229 bp, Glycine max
  unsure (1)..(229): unsure at all n locations
cgctcacaatttanaatcgaaggtcgcagcanattctaacgacaataacatntcactcggaactccgattgagtcccgtaatatatcgagacgctcgattattaaaaccgaagctcgcatcatatgctaacgacaataacattacactcggcggtacgattgagtcccgttatatatctagacgctcaaaattaaaactgaagcttgctgcacatcttacgacaatatc

SEQ ID NO: 50176 - DNA, 388 bp, Glycine max
  unsure (1)..(388): unsure at all n locations
ctctgatctgagtattgatgaaattattcattgtaatcgatcacaggtatgggtgatctactacatgcccaataagccttctggtaatcgattacacgatgtgtgaatcgattacaggctgcctgttcatgtgtaatcgattacactggactgtaatcgattaccagagcctatcctaagctcagttctaagagaatatctatatttatgctcaaatacactcctatatgactaatactcactactaatacactaaattcaatgattcaatctctatgtacacaagaaattataaatnctatcataaaaacacgaattcaaaccagatcgaacaaaacaatctacagtctagagataaaaagtttatcaaccaatcgatctaccaatc

SEQ ID NO: 50177 - DNA, 597 bp, Glycine max
  unsure (1)..(597): unsure at all n locations
tttactgagcactgcggcatgcangctngangcaagagttanacaagagcactntntggccaatatggaattccttcctaagaatcctagagtcatgaaacctcttcactttctccttgtagatcgtggagttctcatacgcttctaagtagatctcttcaagttcttgcaactgaagcttcctttccacacccacttcatcaaatgtcatgttacaacccttcaccgcccaataagcacggtgctcaatctccaccggaaggtggcatgccttaccacacaccaccctatatggagacatcctcataggtgttcggtaagcggtcctatgggcccatanagaatcctcaagtagatggctccaatctttcctgttgngtgcacctacctctgcacactttctgatctcttaataaaacctcattgccattagtgtgtatgataagtgagcactctatgccacctcgtcttcagagcatgatgccatgactatatataagggtccttgcactaataactctagccataactacaaaatttagactacaaatcacacacttaaatatagtctgtgcctactcaccattgaacaaaaat

SEQ ID NO: 50178 - DNA, 446 bp, Glycine max
  unsure (1)..(446): unsure at all n locations
ctaagctccaccattttgtagggtttcagggctttccatcagctctgtttaatctgccatatactcatccgatattaggcctcatgagctttctcatatttagcagcttattggatttagcttgagtggcttcccttttagatacttgggtgttccccttttatcatctagattaaatgtatgccattatactcccttgctttccaagattactggcctgattcagtgatggagcangaagtctttatcttatgcaggtaagctagagttgatcagagtagttattcaaggaattgtgaatttctggatggggatttttcctttgcctcaatctgttctggatcggatcaacacttcatgtcgtaattntctgtggggcaaagcagatattggcaaaaacaagcccttggttgcttggtcagtagtttattctccgacaaaagaat

SEQ ID NO: 50179 - DNA, 145 bp, Glycine max
  unsure (1)..(145): unsure at all n locations
aacggtcgagaatcttcgcgtaattactcacggaaacgttacggaagcacctcggcttggattttcttcacggaaataattttcctcagcaaattcgaaagagagagaagtgccaaaggggctgaacctttntcttcttcacttc

SEQ ID NO: 50180 - DNA, 492 bp, Glycine max
  unsure (1)..(492): unsure at all n locations
ctatggagagctaaattctcagttggttcttcctatgttgtacttgatgtaaatatttatatatctatctaatgatgttttatgtgttcattgtgctatcagtacttaattctagtgtgtctttgccttgaccatgcaactgcatgcttagttagggtcactcaacattgggaaattatttgatccttagaacctgataagacacagctagcctatcatattttcacgagacatcggggtacggtaacctagtttttgttatgttatgtcttaatgcagttctggttaagtttagttcaacaagagacatctgagaacgacgctngattaggattaggctaaacatgcacgagacataggggtttagtagtctaggagacaacatagaacacatgaatatgttcggtagagaacatccttaataacatcagtcacccagtaggaagaccaacatgtngtctatctgtcttcacacaccactactcacgtgat

SEQ ID NO: 50181 - DNA, 276 bp, Glycine max
  unsure (1)..(276): unsure at all n locations
ctgcactatcaaccggcacctacaccttccttgacatgtnttgctactctttcttgtcttaacatgttgtattgaataccatgggtgagtatgtggaactcgtgttcactgcaaggatctttgtttggttgtcttgcaaggatatgagttgtggaacttgtgttcgctgcaagggattggtttgtggaagtcgtcggcactgctatgtctgtttggngtgctcacattgcactctgtttgggtgctcagtcgtgctcgcagggtctcattttgagt

SEQ ID NO: 50182 - DNA, 484 bp, Glycine max
cacatgcatgtgattcttccttatcttctctctggcatataattgtaggcattgaaaagtgttgaagaaactattataagacttgaaaacttgcttcaacagttgcatgtatcacaggtacgaatgacattcttttgttggaattatgcatgttacagtcttgttttatgtgattaatgactacttttgtgcatatagttaatgtctatcatgagtgaaccttagattctcgtttgagattgcatacaatgattcttgtagaaaagtttgtacttaatgttgaatatctaaatttcataatgtatttagtgtaatagacaaaaaggaagcattgagtgtgggtattacgtcatgcactggatgtcaactataatcttacgacatttcaagaataattgtgaaatgacaatctttaattcaccacagttcattggtatgagcgctattatattattaacttatgttgtactatatcattcaatat

SEQ ID NO: 50183 - DNA, 106 bp, Glycine max
ctttgaatacgcacggtgactttatggtgagtcactaatggacgttggtctgaacggaactctgtgactcgaatatggaagaaagtgctcgtgctatctgtcttga

SEQ ID NO: 50184 - DNA, 492 bp, Glycine max
  unsure (1)..(492): unsure at all n locations
tggacagcatcaaccttggccattctaaaatcttcctttttcttatcagtgccctctntaatgtatgcagctggttcagtaatatttgagtccatgccattgatgtttaccccaacatggtttccttcagtgtctgagtcatctttgtaaccattcattgtgtcaaactcaactgcaaagatgtggtttgactcattcccatcattggtggagttaacaaggccaagataatggccagcctcagccccaggaaactgtgttgagggtgctatggtgaaggcaaggccaaagccaccagaaccagaacttgtggacacaattgagaaaacaaaattggtgctgaaggaataagcatatggttggtttgtgttgttaagcatttggaagggtgtggcatagaatgcatggcctacaatattggttgatctgttggtgagtttaagtaaacggctggttttgatgatggaagatccttcaagaatgagttcactg

SEQ ID NO: 50185 - DNA, 253 bp, Glycine max
  unsure (1)..(253): unsure at all n locations
ctaccgngtctacaacttgcaaactaagaaactcgtcatcagtcgagatgttgacagtgatgaatatgcttcatggaatggggatgaagaaaaagtggagaagaacgttcttatacccgctcaactacctcaagaagaagatgaggaagaagacccaggtgaaccacctctacctctatcacaacaacaagatcaagaactatcatcaccagagtctactccaagacgagtaagatctgtggtggacatatat

SEQ ID NO: 50186 - DNA, 444 bp, Glycine max
aaaacgtttagaaactgctggtaatctattactcatatatgtgtaatcgattacacagtgcaaactttgaattcaaattttaatagctgttgtaaatcagttttggccactggtaatcgattacatcctctggtaatcgattaccagagagtaaatttgttgaaaaagaatttttaacttaaaattcttggccaaaccttttgctacttcaattggaattcccttcctatttaatataccctttctaagactctagagattgtcttgatcatccatcttgaatatctttaatttctttgtcttgaataaagctttgagacgcatgtgaaactatggcatcatcaaaacattcagcttgatcctttgtccacaatctccccctttttgatgatgacaatccctgaaatcaagacaagctatatacaagatgatagcacgttcaca

SEQ ID NO: 50187 - DNA, 658 bp, Glycine max
  unsure (1)..(658): unsure at all n locations
actcgacatgttaaangtgngtttntatanntntgttnntaattttgaatngnatggtgtantgngtntnnnnnnnnnnnnnaattgagctgtgagcgagctgcaggcatgcagctngtggagccaatgcaagcataacgcagggacgaagntgctctgttcctctttcctacacaacctcagnctncaccatactttngatcaattgcaacanataatatatatatacaagaatattagttagtattgaaatttttaaattcaaaaaatatcatttttatgtgtatccaacatgacatatatcattagtggtaagaaagaaaaaaaaagattggattattctccgtacaataatatgaatattattcatggagcactggcatggatgntgcatatgaagtttgaaataattaatggaatggaaggtgatgaatgatatcgccncgctccactttgggtcatattctccaaccattgaatgatagtgatattgtcggttgacgtatatatataaatattttcatttaaacactaataacatcacttgtattatctatcttttctgcagatataatttatcatatgagaataacatgggggagaaacaatacagntgctcttgttatatcgtaatcaggtgatcagtgcgacatattct

SEQ ID NO: 50188 - DNA, 541 bp, Glycine max
  unsure (1)..(541): unsure at all n locations
ggatgttttaggttacattcgatgacnatccgctcataganaaacaagccttccagggngtcatattgtgtgctgctgtttatatatttttatatgcaaagttccttagtaatcccccaacttaaggacttatcataactcaaaacccttatcctctcttagaatcctaaaacaaggtcaaggatattaaaattagactcagggatttattcaaacaaatcattattttggtgtacattgctaatgcactccaagtgaaaaaggagcatgtctatattaacaaacccacacacacacacacacatatatatatatatatatatatatatatatatatatatatatatatatatatatatataacacagagatattttgttagttcatgtttaacaatgacaaatatntcccactaattatcaattgatgagatagtggcccaaaaacagaagagcgactacaaagcacgttatatgttctttattctattgaaagagcacacacaagaggnggtgcccttttatttctcaatagtgtatcn

SEQ ID NO: 50189 - DNA, 257 bp, Glycine max
  unsure (1)..(257): unsure at all n locations
ctgcagcttacatgttgaggactcgttatgaatatctatttatctatggatttctcaagnttaaatgatctttggatanactttntaaatcttttctcaagttttgtaagctttgatagaacagataagttagacagaagttcatgataagtctttctaagagacttacggtcatcaaacatctttctaatctgattcagactcctcagaaagtgatctgccatcaggcatatgttggcttcttcatcatcttcatt

SEQ ID NO: 50190 - DNA, 462 bp, Glycine max
  unsure (1)..(462): unsure at all n locations
tgtcttcacaaataatcatcacacagtttatctcctagcaagattacccatcatatctccccaaaaccccatacccacgaaatttaagagagaaagaagtccacccaaatctgaattttcgaagtcccactcgtagccacgcacttcacgactccgaaaatgccctcctttcgcgatttggagcagaaatgagcaccaaaggttggagctttgttgggcaacaatggtggatgggagaaaagaagaagaaggctgcgtgagagagagagagctgtctgaaattttgtggggctgagtgaagagagagagagaaaagctttctggtcttaaataaaaggttttcctctntttctattattttattcaagctctgccacatgtccctatttgattggagcagaaagggcccactntctctttntgactgtgacccatactcagtcacaaaagtgagaaaaatct

SEQ ID NO: 50191 - DNA, 224 bp, Glycine max
  unsure (1)..(224): unsure at all n locations
tccgtggagaagcttggatagaacagattataaggaggacacanagttaaaccttagaaccagaggtatgtgtttagctcctatttatgtactcctctagtttacagagaaagcagcggaccagattacaggacaccaacatatagaggatgnttgtataggtgaaaataaaatgtgtcatgtctaagatactatatatatcatatggttatggatgtatatat

SEQ ID NO: 50192 - DNA, 520 bp, Glycine max
  unsure (1)..(520): unsure at all n locations
ntgtgatgctgatgacggccttgaactcagcttcataactgtatagagcacctggcggnngttttttttttnttccccaccncggaaacacgggcgagcatgatacacttcaacaaccaccacctctggaaatgcattttttccaaccagtcattggtgattgattaccattaccgcgcgatcgattacacatcaacagatgtgacgcttcatattcagatcagaacatctgtctatttagaggctctcttaagcgactacaattctcgtgtcatccattacatatcactaaaacgacttaaaactgtttacaaacaatgatcgtactctcgaaatccgagactttaaccgtttaatacactggcaatcgattaccagacagtaagactcgctggtactgattttcaaaaacttcttctctcctgaacgcttcgtacgagtatctagtctgctcctcaccgagcatctctgcgtctatattactgagcgtgaatccgactctcatcattcttgatcttcg

SEQ ID NO: 50193 - DNA, 209 bp, Glycine max
  unsure (1)..(209): unsure at all n locations
gagaatgtcatggatcactgtatataccanaaggtcagtgggagtaagatttgtttccttgcattatacgcagatgatattctgcttgcgactaatgataagggtatgctgtatgaggtganacatattctctcaaagaactttgatatgaaggatatgggagagacatcttatgtcataagcatacacatccatagagaaagatctcg

SEQ ID NO: 50194 - DNA, 493 bp, Glycine max
  unsure (1)..(493): unsure at all n locations
nngaaccaaatcggtgagagtgtgatcttacactgtgagttatacgactagctgtgagtaataatctttgcatgaatctctgaattntagaatgaaatgtataaatgaggacatgatgaaggccatgattgtgcatatacaagccttttgaccaaaaagcttaccttgaatgataaattgtatcctttgcactctttatgagctaaatgatattgtcaaaaatttgaaccctgaacttaaatcattatctccagataccttgcttagattctaggagagcatatggttcaaggcaaatttatcccaaatttgggggagtgaagttaatagggatgtaaagaaaagggtaaagcatcagcacacacaacaaataagttgtatgtcaaanaaaaaattgtgctgttataataaggtcagaagcaaagtaatatgaaaagatagtgagaaagctacttgtatggaaaagatcacttggataagtctaggatttatg

SEQ ID NO: 50195 - DNA, 165 bp, Glycine max
atttctaacttatggataagcaaaatagatatgatgttagggctagtttggactaacttcttaatagatacttatagaagaagaatatacgagggtataatgaatgataccttctaccatacgttaaaagcaacttatgtgcctcatcttttggtagaagttgat

SEQ ID NO: 50196 - DNA, 461 bp, Glycine max
  unsure (1)..(461): unsure at all n locations
ntctaaagttntctggttntccaaaccttgaatacaaaagtgattcatctntttcattctcttatccctttgccaaaaagaattcgccaaggactaaccgcctgaattctttttgtgtctcttttctcccttttccaaaagaacaaaggactaatcgcctgaattcttttgtgtctcccttctcccttgtcaaagaattcaaaatgacacagtttgagaattcttttgattcttcccattccctaaaacaaaagatttcaaaggactaaccgcctgagaattcttttgtttccccattcacaaagtttcaaaggactaaccgcctgagaactttgtcttaacacattggagggtacatcctttgtggtacaagtagagggtacatctactngngttgttgtgactgataacaagagagggtacatctcttgtggatcagttctagtggagggtacatccac

SEQ ID NO: 50197 - DNA, 659 bp, Glycine max
  unsure (1)..(659): unsure at all n locations
actgatttactgaatcttttgatattttatatcttttgatnttattagtnnttttgtnnnnnnnnnnnaagtttgaggtggtggnggccncnnnnnnnnnnngannnnnnancaacttcaatcttgatccaactttcattggctctgnaancggtacgaatacattgttatcgatcaccacctctagaaatcacttatatcgatgcaaatacattcgataattgtctcaattccattctgctactagtaatcgagtacaataatctggtaatcgancaccagagagtacatactctttggtaaacatgttatgagacaaatccatgtgctactcagtttatgaaaaaaccttgtcatacttatctcgagtatgtctactcttgaatcttgaatcttgagacttgaatctggacttgatcttggaagcttgacctagaatttgatattgaagtcacaatcttcttggaccttaagtggtttgattcatcttgatatctagtcatcttgtcatcttaacatnttgactcattgttgatatattgaatanctttggctgttgcagcaccttgtatatcaaacattttgatcatctgatcatatgaagttgtttgcacgaactttaaaatgataattagagatactgctatgacacagacgcg

SEQ ID NO: 50198 - DNA, 71 bp, Glycine max
ataatgtgtgacaatgtggatgtcgagggagcggttttcggaagaattcatgcgggaggaaaaagacaaga

SEQ ID NO: 50199 - DNA, 224 bp, Glycine max
atcatgaggttaaacctgggcatgggagaaccttgcatactgatacatgcccacctcactcgcatctcatgaatcagattctgcacatcataattggtgagaacttctgtgagccacgcgacaagaccgtataccactcgtagagacaaatggaccttgtggactgacaaacgtgattaatgatgcaaacactcacccgtggtgccgccactgcgctgattagg

SEQ ID NO: 50200 - DNA, 483 bp, Glycine max
  unsure (1)..(483): unsure at all n locations
tttagtaatgatccactaacctagaattatattatcttaatgccactatcctagggaattaaaagaacttaatggctgagtgtaactgaaattgtggcaaccaaaagtcacccccaacagccatcaagccagccaccatttggtctcccaaaaggctgatgcctatgttgccaattgggcccttattacaacttgaactaaaccaaactaaagcccttttattttattaacccaaaacatatttttgctcagccaactttacaaggattgggccattatttagacaaactaaacactctaaaattgagacaaagtggtgccatttagtcctcctctatttgggccatgatacaactcacaaccttggactnttctccttgaaacttgngcttgtgttcaaatagtatgggcagcacttgttgaagagcttncttggctttcttgctctagcccttgcataagtcctccaagtacttacgtgga

SEQ ID NO: 50201 - DNA, 222 bp, Glycine max
  unsure (1)..(222): unsure at all n locations
tagctgatgctgtgtaagagatgctttttataaacatcaatcgaacggcttttatgtcaattaagctgatgttataggctaatggactttgctactgtttaattgattgtgtattacataacgtgatctgggaaaacggatagaaagtctctataaccacccacagatttaacctacatgttggacnggaataaaaaatattgttctagcactcctggctgg

SEQ ID NO: 50202 - DNA, 462 bp, Glycine max
  unsure (1)..(462): unsure at all n locations
cttattggccttgcttgttattacagggttcttatataattcctaatatggaataatcctaggaatattacaataaccattttattgataagaattgctcagcaggatcacaattccaagcaaggcgatctgggaaagatttgcagaagcttctgttttggcagttttcctcaaacgaagtcgtgaaggtaagtgggcctcttcacctttcttttgggctttacttcgttatgcaccccctcttttgtgattcccacctctgagtttgttgtttgttcttcctcttctgctggtgtggtcttgttcgtatcatcccttgggccttggaaaatcaccttgtcctcaaggtgatactcttcctgtaacttggtccagttttcccatgaggtctcatctggngaaagaccttgccattgaactaacacttcccaaggagcctncggtgatgtctttcgtttgtct

SEQ ID NO: 50203 - DNA, 496 bp, Glycine max
  unsure (1)..(496): unsure at all n locations
ntgtgatgtgacgaccatgatactaagcttggcaattaaatgacatacacttatcacgggtgttcgtgtgttttcctcatatatccagacgctccgaattgaaaaccgaaactcctataaaatatatacgacaataactctntactcggaggcccgacagagtgtggtcatctatccagggatgcttctcatagcgaacagcaactcttttacatacatacgacataactctttactacgacgtccgattgagttccctctatatttcgacgctcattaatttgatcccaagctctgtgacaatatcattgacactaactttctgtctcgtgtgcatctagcgccgtttatatttgacgcctcctacgattaaagggcgtcttccgattatanacacaatcatttactcgcggtgctccgacatctgctatataatcnctctcgtgtcgctacattctccgggctctattaaacactttttcatgtggtcaatgtc

SEQ ID NO: 50204 - DNA, 499 bp, Glycine max
  unsure (1)..(499): unsure at all n locations
tcacttaaattatgtaaanttaatagaatcttttgaatgatatannttnnnnnnnaatcactgacggagtgcctntatnnntnaaannttctctttttaccaatttcttttttccaatattccgacctgtgatcaataacctgttaatcctatacgtcacactttgcatcacaccaatctcattataacaattaaaacgacctactgtattaatgatacatgatctaaatatgaataactaaatgtcaaatgaacattcaatgctgctctggctgccatgcaccacactgacactaggatctgaggtaagtgttcactanatctgacacaggatgaatatcagttgtgctgaagagttgaattgtctggctctctctctaccatggacaccgataataaatgctagagaggacatctcccttgtgtgtgtactctcggtagctctagtgcgacgccaccctcgaagaatgtggctctgcagcactgtgtaactatcaag

SEQ ID NO: 50205 - DNA, 471 bp, Glycine max
  unsure (1)..(471): unsure at all n locations
gactgatacctaataaccctaatatttcagtagcctatttcgctttttattcaagtgaatcatagatttggaaagtaataagaaaatggaatggacagaaagaagatactcacacaatatgaagagaaagttggccagttgtacaagttgattgtgggaaaatctttggctactaattatttctaaaacctgttttaattttcccccaattgccaaacacattagaatgtgtcacttaagatagagatatgacttgttaagacttaatatctagggataacttttactttttagatggtataaataatgaatagttgcttctatcattctacttttttctatttatcctnnttgcacgtttcttttggtcaacttaatttctaagttcctgaactatttggagatntttaaataagaccctatactctgaatggttgtaattagatccctannacttttaaataattttaa

SEQ ID NO: 50206 - DNA, 428 bp, Glycine max
  unsure (1)..(428): unsure at all n locations
ntatacaagctatcaacananataaaaactataactgaaattttatgcagaaatataaacataaatctaaattattaaatgtactaaagataagaaaatattaaaactgttcaaaaagcaaggaaataataatcctgttagtgatcctggtcctgtggtggtggtgggtcctgatccatggcctcctcattcaaatccagtgcatgagtgcctgctggagatgcctactgagtaccttctgcggtcactggatcagccactagatcatcctcaaaaataaatggctctggtggagtgagagtggcttcagaagagtcatcctcctggtttggctgaggttcctgngctacagaggcctcacccnctcccaaaggagaaggctggactcctggccaggtcaccctctgtgaaaattcttccatactcat

SEQ ID NO: 50207 - DNA, 462 bp, Glycine max
tcccgcgttcgtacttggaaggatctgattactgctctcctaatgcaatatcagtacaatcttggtatggctctcgatcgcactcagctgcagaacatggctaagaaggaaagtgagacctttaaagagtacgttgagcggtggagagacctggcagcacaagtggcccctttcatggtcgaaagggagatgattaccatgatggtagacaccttgccagtgttttactatgagaagttggcacgctacatgccttccagcttcgcggacttggtattcgccggggaaagaatcgaagtagggttgaagagagggaagttcgattacgtctcctccacaagtaccaatgctaggaggatcggagcaactggcgcagaaaggaaggaaggagatactcatgccgtcacttcggcacccgttatgggtcaagccaccgtagacctctcatggtacccatcagta

SEQ ID NO: 50208 - DNA, 352 bp, Glycine max
  unsure (1)..(352): unsure at all n locations
tgaaccaaaccttgcgtaaatatacagtgctggtagtgtcagtataatatcaatcacaagccaattattgactagaacatccaataaaataaactaataatggaaagaataaatgattcaaaatgtattaaagtaaaattaaaaaataaatgaaacaatattattggataatcaaatgaaaattggactggttacaccaatctgttatcattacataaggctttatattattgtaatattatggactctctttaaaatgacagctatgatactctctgcgangattaataactttgcttcatattatcacagatattctctgataaccatctctcatgtgaccatgtcctta

SEQ ID NO: 50209 - DNA, 345 bp, Glycine max
tcctccaaccacgagttggagccatgcgtaggggttttttgtgcttttctccattctcaatctttttgcgaagccccataaattgcgttttcgttcatgcgacctccacccacgagtttggagacatgcgcaatgattgcttaatgcaattctccattctcaatcttttttcggagccccatgaattgcgttttcgttcatgcgtcctccacccacgagtttggagacatgcgtagtgattgcttagtgcaattctccattctcaaccctttttcggagccccatgaattgcgttttcgttcatgcgtcctccaaccacgagttggagccatgcgataaggttgc

SEQ ID NO: 50210 - DNA, 271 bp, Glycine max
  unsure (1)..(271): unsure at all n locations
ctgggcttgcgtgccattagagtcaatgcaactattagaataagccaacttaagtagtgacattatgttaactacaagattcattngactattataataacattgattaattcttatgtggttgctcacatgtangtagtgtgcaataatatcttattagaattagtagctaataattagaatatcgacatgaagacnatagatcttaattagatgtattgtaagagttggacggtccaatatgatatatctagacgatatataatactca

SEQ ID NO: 50211 - DNA, 440 bp, Glycine max
  unsure (1)..(440): unsure at all n locations
tatgttgcaaaatntataatagacccccttattctatgtttccaacaacaacaaaataattatgatctttcaagcaacagatacaatccaggttagaggaatcatccaaatctgagatggacaagtcctccacaacaacagcagcttgtccctccatttctgaatgttgctggcccaagcaagccatatgttcctcccccaatgcagcagcagcaacaacaacaaaggcaacaagcaactgaggatcctcctcaaccttccttagaagagttagtgaggaaaatgaccatccagaatatgcaattttagcaagagacaagagccttcattcagagtctgacaaataagatggggcagatggctactcagatgaaccaagctcagtcccaaaattctgacaaattgccttcacaaactgtccagaatcccaaaaatgtgag

SEQ ID NO: 50212 - DNA, 190 bp, Glycine max
  unsure (1)..(190): unsure at all n locations
tagtggtgagtgaagtgtacaatccacattactgatttaattatggcacacctttaacaatgcacattgtaagggtgatgagttntatatgatgactaacattatgctcaagtatttaagtgttaaacttactaagaagaagatgtgttcatcgatcaccctgacgaatacactagaaagagatggatct

SEQ ID NO: 50213 - DNA, 503 bp, Glycine max
  unsure (1)..(503): unsure at all n locations
acactataaaactaagctaacaagctnnttttatagttgagtttggcctttttatcttataagactttntaaaaagtttgagcttggcctttatagtaaacaagccgagccgagccgagccttacataggccgagccaaaggccctcgacaagcagctcggctcatttccacccctagttacaacaagacctaacaactattcaagtggcatcatccctattcctaccttagggaattgaaataaaacataataataaagtccctataatcatataagtttgggaacatatctagatggtcctaatttctccttaagaggagtgggttgaggccaatttgaagaacaaagattgcatatataattgttcccattaaacccacaactaaacctcctatggggaccaagacattntttgttcctttctttcctaggatatctagaacgaanactattgcaaactaacttgaggcaaagaacaaagtcataacccgcccataaaat

SEQ ID NO: 50214 - DNA, 408 bp, Glycine max
  unsure (1)..(408): unsure at all n locations
cttgaggaaattcaaacgacaataccttgggactcgtatgttgtattgagtcacgnaatatctcgagacgctggaaattgaataccgaagctctgagcaaattcaaacgacaataactttttactcggatgtgcgagtgagtcccgcaatatgtcgagacactcggaattgaataccgaagatatgagcaaattcaatcgacaataactctttactctgatgtcggattgagtcccgtaatatatcgagacgctcgaaattgaataccgaagctctgagcaaattcaaacgacaataacttttgactcggatgtcggattgagtcacgtaatatctcgagacgctcgaaattgaatactgaagctgtgagcatattcaaacgacaataactctgtactcggatgtgcg

SEQ ID NO: 50215 - DNA, 279 bp, Glycine max
  unsure (1)..(279): unsure at all n locations
tgactganaatgatagaacctaatatcatctcttattcatgattcaagggtagatctatanaaattgaaccatagaaatgctagaacatgtgtagatctaagatttaatcggtntatttgtctgaatctactataaacaacaccaaaccacaagataatggatgagatacatggagaaaatgatgacaaacaatgaattaaagtaaattgactgatcataagatagaggaagcaaaagaacatcacttagatgaatatgttcttgataccacatgatgt

SEQ ID NO: 50216 - DNA, 256 bp, Glycine max
  unsure (1)..(256): unsure at all n locations
gccttggcctcgaaggtgtagcatcaccatcacaaacacaagaggaacaactagcacccatgttgacacttaacacacaccaaaccatagtaaaccgcgttgcactccctcaagtngaattcctttctctaaattccacacncccagaatatgaactgaactcaaaacttgatatggaacctgaacttttcaattccacacaccagaatcgaaaaactagcacccatattaacacacacctaatcaaatcaaacca

SEQ ID NO: 50217 - DNA, 681 bp, Glycine max
  unsure (1)..(681): unsure at all n locations
tttctacacactagtgttattgggtaannntnnaatnnntanntaatatttttanatangtngttngttgtgtngnanantggnnnnnnnnnnnnnnnnaagcatggtgctgctgtngcatgtcctgtnnnacaccnannnnnnttttttcttaaattttgatagatatgttaatattgatcttatcattctccatcacganctcatcctactggaacgtaatcgctgtgttgcgatccacaatactcttccacacaagcacanagatcctgtgagtgaactattccttgttcattggagaagcaatgtgggaacaactctcatgacctgtgagcttgtatattttgatgccctctccatgtgcgaagattggacagtagaaacatgcccctcaatgacttacattagctgctgttcataccagccattggaggattgaaatgtgtggtagagtaatcatttttcttatcggagactcttggtagtgatatctctgagatatcgcattcgtgaatattgggaagcactctgtcgaccctgctcattttatttgaaaaagacctggacttcgtctaagatcaaaatgacttgattattgttacacatcctctcagactcacgttgttattgaatgacgggtcagaggttgaactaaaccactctaaccctaggagtgagccn

SEQ ID NO: 50218 - DNA, 486 bp, Glycine max
  unsure (1)..(486): unsure at all n locations
ggtggactataccttcgaccaaacacggccgngtttctgtctctgnctttatttaaagcgggttgcagtaccggctccgcttccctaaccgtactggaggcggttgccgtggctttatcctctatggttttctggagttttaacatgacctccgagatggaagccatttgatctttcaaggccgatagatcggccttcatctgttcctgcacgccctcttcattatccatttttctggatcgagtgttataggggtgccttggtgttttcttagttatgatgaaattcctaaagaaataaacaacggtgagtatgccaccaaaacatgagtatgcaaatggatgatcggagcacttggatccaccccaaggttnttagatagcgtgatgagtccataacttctcattntataaaaagaacanagctttcatctagccaagaatatacaaaggcgttacaagagaacctaacgattcctaattatat

SEQ ID NO: 50219 - DNA, 636 bp, Glycine max
  unsure (1)..(636): unsure at all n locations
acatttgtantctnaattantngataacaattttattatttatttatttattttnnttnnntactggctctgggtgcagtgccgctccttctccaanagantaccttgcattaatctttgcttctcttttcatccacgattccctctcctcggttngaagctcactacacgccttacatgatgaaccatgatatcaccatatccttaatgagatgtggagctctggaattgttntgcgaataagtgtgtgggggtattcgnctcatcggataacttgatatgttggctatgcttcatgatgtattgtgcgacatacttgatgtacattgtataatggttcaatggtggacatgctgatgatatgtttgtcctcacctgctctgctactaaccaaacacttccaatacagtacaagaaaaacagagtctataggtctgaggattataccttcaatgacacacattgtgaactcttggcctgctcctatgtaatattatctcactcttttatatctataattaataaaacactaatcccatgtgttatccttgaatagactatctaattctctactgaatacgcacatcacttaagactcttcctaatgcggtatctagtgtagttaatatccacacg

SEQ ID NO: 50220 - DNA, 484 bp, Glycine max
  unsure (1)..(484): unsure at all n locations
ngtgactcttggcaatttctttaaaactagtcacttaatatagttgtgactnttgaaagaatctttagaaataagtcacttgaagaaatgtgacttttggaaatgtatttttcgaaatcagtcattggtaatcgattaccattaaggtgtaatcgattacacatcaacagatgtgactcttcattttaaatttagaaaatcaaaacatttagaggctctcgtaatcgattacaagtattgtgtaatcgattacacaagattaaaatgatttaaaactgtttaaaaacaagttgtaactcttgaaatttgaaatcttaacgttttaaaacactggtaatcgattaccagagagtaaaactcgttggtaatgattntgtaaaaacttcttgtgctactcaatgttttggaaaaatttttagtacttatcttgattgagtcttctcttggttcttgaatcttgagtcttgaatcatgaatcttgata

SEQ ID NO: 50221 - DNA, 544 bp, Glycine max
  unsure (1)..(544): unsure at all n locations
ttatgcaccctgcatnacggacctataaaactcagctgccagggttttggttgcgcactccgacagtgagtctatgcctggcccaacatgagatcatatgctggagaacgtgtgaacgtaacacccaaccctcggtgaacagaatatttgtcatctaccgagacctctatcgacaaatatgttcgctccaattcggtcacgcgnagaggaccagctcgaagttttaactggaagcatctacgacatgacgcctatcgaacgaccgtagggaacttcttgcaaacattctgcactgattttgtactgatttctatcgaccgcatcggtgcttggtatgtcgctactgttgttgctcataacagctggcgcaatcacatctttacatacgctcgaccggcatatttttaataccacgctgacgctcatccaatgttgcgtgnagccgatcctacatactctgaatgatgtctaggacctgtctatcgagcagacccgctcttgcgccaacgacgacactgctatgtgttcaatagctcgtaatgat

SEQ ID NO: 50222 - DNA, 132 bp, Glycine max
  unsure (1)..(132): unsure at all n locations
tatatatttattgttgattttaatgtnnnnaagctcgcggggagtcctcccttnnntactatcacttgggtttttttttcnacccatccaagaggttgagaatttctatttgtgatcccccatgcgatatgt

SEQ ID NO: 50223 - DNA, 709 bp, Glycine max
  unsure (1)..(709): unsure at all n locations
ataatatattattctatttttatatatttttctgngataggttattatttnatttttnnnnnnnaatttgggtagtgggtggtgnnnncnnnnnnnnnnnnannccntaagccttatatatagaccaacctatttctacctttctncncatnccgccaccatacgctttccactatggatataattataactattaataatataattatacatttatatataattctcataatatataatatggtattattaattacatacatatgctattattttgtaatgaccttttgccagcacatgatattatgaattatcttacgcggaagactattttaattccttacaactctttgataatttaaatatgaaaatagttgtanacttttngtgtttcanagaccaaaagcttaaacacatgatatcaagataaaacatcacattgattattacatnacccaatataccatgtgctctatgaccactcaacatancatgaactaatacatcatcagagcaactcaaatctcctanaacacgcatatatacgatggaatactacgaagaataacattctatacttttgagtaatgacattattcataacactaaagggaaacacgaacanacatcatgtcntcacatctanggtatgttattcatgatgtctncgaaggcatanggtcaactctagcatctgtttccacgtaag

SEQ ID NO: 50224 - DNA, 462 bp, Glycine max
  unsure (1)..(462): unsure at all n locations
gcttgacaagactatctttattctactcatttcaacatgatgttaaccaagaaataagcccttcattaatatgaaataatgtcaaatacatccctcaatttagcaactaattgacaaattcatcaaaaaaacaaaatcaaactaaacttgggccagctacatgatccaacacccatttaccacccctaaaccaaccatgaacaaacaactatgaccaaaagcaaaagaaaaacaaagtatttgattatcttcaacttcatttgcaagacatccgtcctcactcctagtactttcatatccacctctcatcaaaagaattgaccctaaattnttagatgttatggatgttctaattatagccttcaacccacaccaacattcaacattacactcatggtagccaccaccattgttggatgacccaccttcatgatgacttccttntccaccatacccatcatg

SEQ ID NO: 50225 - DNA, 304 bp, Glycine max
  unsure (1)..(304): unsure at all n locations
cacacttgagctttgtagctactatatcaaataagtgtaataagatatttgtcttttttttctgaattctcacatcaatgcaactatntgatgaattataagtaaaataatctggaattaanaagtataatagtttaaatctttntaacaatattctttttaatatttataaaaatgaaatananacataaaattttattcctggttatntaataaataacaaagaataataggaagatgttataataaattagctcataatttattattactcttaatagatgtggagaacattcaaaattat

SEQ ID NO: 50226 - DNA, 483 bp, Glycine max
  unsure (1)..(483): unsure at all n locations
nttctactggtccttcgttntctactccactgagatccattctttnttctctttcgaagttnttatgtttcaatttcctttgctacaaattttgtttgttattttaacattcatcgtattgtattctcctgtataaaggtaaagtcttattctttctttattttattttcttaaacataagaaaatctatcactttcaaatactacctcactatcttggaatttatctctacattcaagatttcatctttgattaagatttaagtatcattttttcgttttttaagattcatttatcttgcagacatatcaattaataacaagtggagattntagatagtttaaagtatgtgtatatacttttctttgttatggntgtttagttnttagttgttaatttcttcttttttaaccaatattttttttttcttgaatcaccattcttcagtgatggcaagcggaaaagaaaatttgcaacatggag

SEQ ID NO: 50227 - DNA, 288 bp, Glycine max
ggcactcttaatgtactctaaacaaaattccatatccttttctgcaaagcatctttcaacaatggacgcttcatgacaatgcaaactctctgtatactctattaagatctcctccgaaagcttaaccgggtacatccaccatatatcaatgagatcacacaattcaacttccttcaccagatgaacaactaacgaaaccatgtcttagagatacgggagcaacatgaacactaagcttcgaagcttgaagaagttctctttttacatgcctaactctttgggtgacat

SEQ ID NO: 50228 - DNA, 383 bp, Glycine max
  unsure (1)..(383): unsure at all n locations
agcttcatgttctccatagcactgaagactatgatttatctctntttgntgcccatccccaacttacctatgtaccttttgactacctgcgttgttctattgaatagctaggtctgtatctataactcatgggtaagctaaggaccttttttggtttctggtgcaaggatcgaggaactcgcggtgacctaatgtacatttcactgccaatctcgctggcattgtcagcgtcgggttcaagggaagcttcaagtaatattgtaactctgtgcgtctgtaaaacgactctttgtgctttttatctttatagagaggtagttagttcgttaattacctactactactacggtttggaatgcagctagtctttgcttcacagctgt

SEQ ID NO: 50229 - DNA, 220 bp, Glycine max
  unsure (1)..(220): unsure at all n locations
ctttcttgattgacactcactaccgccttaaggaaatttatgatttaccatatccgttagaattacggacttcggaactgtttgggaataagtgtggaggttttttgtctcattggactactgggtatgctggctatgcttcatgangtattttgggccatacttgatgtacattgtctattgtttaaatgatggacgtgctgcatgacatgttggttct

SEQ ID NO: 50230 - DNA, 305 bp, Glycine max
aaggagacgtttcggacgacacacgccactgggtatcaagtggcatcagatcactattgaaacaagctttgtggacagacaatcaacaccaaaatgactgaagttaaaagactgggattagaatcactcaacgatgagcagactaagtgacttacaactaaattggtcatgatttgcataaattaaaacaaaagagaatttaaacattctgctcatcctgtggctgatcttcatttaaatacagcactgaagcagctgggacatcctaaagaatggattgctctggctctatagctgggactgat

SEQ ID NO: 50231 - DNA, 258 bp, Glycine max
cccgagcagatcgagacgctcgtaatcgacaacagaagctctgtgcacaaacaaacaacaataactttcgacgcggatgtgcgactgagatccgcagtatatcgagacgctcgttattgaaaacacatactctgagctaattcgaaccaccataacttgtaactcggccgtccgattgtgtcccgtactatacctacaccctcgcaattgagaacagaggctctgagcacattcaagcgacaattactttgcactcgg

SEQ ID NO: 50232 - DNA, 221 bp, Glycine max
tgccgagttctctgttccttaattatggccagagctggagacaactgtggtgtatatcatcaactgtacgaatcttggctcttattcctggactcttggactacacatatgccacgtttgttgaaccttgacatataaaagccttccttacgaatatacacattgtccttgacaacttttacaccgctatcccacagagaagtgtgctatgaccaagtcat

SEQ ID NO: 50233 - DNA, 411 bp, Glycine max
  unsure (1)..(411): unsure at all n locations
ccacacccgacatcgaataacactcatccgtgcttgngggctcgacaaactcatcaccttactacttgtcaaggctactacctcaggcatcagacaatgtccttcaacactagaaaacctatctcgcccatataccgacttatagcttatggggattatgtactatctagggtccataaaatacacatggcatcctatgtgacactccgagtcatgtgtcaacccttcatgtcaaccttagcactggagcacgaatgtctgacccttaacagtcaggctccctaactgacaggttatctctaaccttntattatttgaatatattgcaacccttctatctcttggcaggtagttaattatctacaaagtcacacattatctataaggtacaattatcctctagcttttatt

SEQ ID NO: 50234 - DNA, 123 bp, Glycine max
agttgtacaaccgatggagatatattacacttagatagggatgcttctgaaaatgagaatgagataaatgtttattttcatcatgaagtagatccaattttagaagaagtccacagatgttgt

SEQ ID NO: 50235 - DNA, 448 bp, Glycine max
agcttatatgagatatgttgcttatgttatttgcttttggagaacaccaacttcaaactgcttcatatgactaaggaagatttgttgaaatgaacatgaaataatttgtagcttaatttttgcatattgaaaagattaagataccaagatcctctcgtattagtaacaaacatgacaatctcatgttctaagagaaaaaaaacgtaaaacagttatagtaggagccaccattattttgtgtagggtccattaatttcatttgtctttctgtctctaacatgaatttgtcatgttagttactaacataagaggatctaaatccattttctaccaatctgaaagaacttgactttttggactctattctaaaaaactgtttcttgtgttaatgcaactgaagaggtgactctggtgtatgcacaaccctctttaattaaaaaagagaaag

SEQ ID NO: 50236 - DNA, 490 bp, Glycine max
  unsure (1)..(490): unsure at all n locations
atactcaagccttagctganatactaagtaagctgccaactcaattgtnggttagtatattctntaccttcatctgggttgcaggttacaggttgcacacattgtggcggagctcatgagtcatgcttgtgtattcccactgaaggaacaactcatgaagttaattatatgggaaaccagcatagacaanaatttaatgcaagtggattttctagatttcaacatggccaaccttaccaacagcataatcaatggagaactcaccctggtaatcacttcaacaaagaccagggtggaccatctactaggccgctacagcaacaagggcttggcatatatgagagaacaacaaagctggaagaaactcttgctcagtttatgcaggagtcattgtccaatcataatagcacagagtcagccataaaaaatctagaggtccaggtagggcaactggccaaatagcttgcagataaatcttctagtacttttg

SEQ ID NO: 50237 - DNA, 439 bp, Glycine max
  unsure (1)..(439): unsure at all n locations
agcttatgcgcatatttccttacattgttttcnttcacaagacattctattaaccgaaaaaatgcacccatatacaatcaaggcagcttcgttacctagattatttacacgtacttncaaggtgtatttgttacttacatcacacacatctccttggctaaattcacatacatgcatactcaaagcattntggggtaccaaaaattgcacatgtgcacatcttggtatttctaatacctatacatacacaaacttcatgatgaatcttgactatctacacaataaggggctacatttcatgctcttttcaagtttttgctacctaaagccgcatgcaaattcaagtatattttcctttgctgactaaaattgtattcaaattaaaggtataccatttnttgtaatggattttctttacataacatgcaacatatttatg

SEQ ID NO: 50238 - DNA, 420 bp, Glycine max
  unsure (1)..(420): unsure at all n locations
ctcattcattncaaacacaaccattcgtttcaaacaaaacacaccactgaatatcaagttcaatcagttcactattcaaacaagctntttgtacaaacaatcaacactaaaataactgaatttaaatgactgaaatttaaataactaaaacataaagcaaactaaataactaacaactaaattgttcatgatttgcataaattaaaacaaaatagaatttaaacatcctgctcatcctgtggctgatcttcatttaaatacagcactgaagcagctggtacatcctaaagaatggattgctctggctctatagctggtactgatggcatagtgtcctcagatatatgtgtagaggatggctctggcatgggacctggtgaagatacctncttctgagccatagatgtatctgcaacaact

SEQ ID NO: 50239 - DNA, 406 bp, Glycine max
  unsure (1)..(406): unsure at all n locations
agcttgtanggttaaagtctcacgattgtttcgtgctgatgcaacaattggtagcccgggctatacgagacatcttgccaaacaaagtcaggttagcgataactcgcctgtgctttttcttccatgctatatgtagcaaagtcattgattcagtcaagtttgatgagttggaaaatgacgccacaattatactgtgccagttggagatgtattttccccctgctttctttgacatcatgattcacttgattatgcatctggtcagagaaatcaaatgttgtggtcctgtttatctacgatggatgtacccggctgagcaatacatgaagatcttaaaagggtatacaaagaatctatatcgtctagaagcatcatggcagaacaagctagacatgtattttacgtg

SEQ ID NO: 50240 - DNA, 470 bp, Glycine max
  unsure (1)..(470): unsure at all n locations
tctattgctcttattcatctntacttgngctatctaagattttnntattttgttgtctaagattttgcatacacctccttcaaagtgaagtgtgtagcctctctcgatcatttgaccaatgcttagaagattttcttttaggatgggaactagtaggacatcatggatgagtcacgtacctttatctgtctccactatgacagtgcctntgccttttgattcaaccacacttccatttcccagtcaaactttgactttgacagactcttcaatgcttttgaaaatagtctcatccttggccttgtgattgctacatccactatccaagtaccagcttcctcccttttcttttattgagtcttgagtggcatagaacatacattgttcttgatcatgctcctctgcgatattagcttgatgcctatttttttgcgacaatttttctctacgtgcccgaacttcttgcaatg

SEQ ID NO: 50241 - DNA, 450 bp, Glycine max
  unsure (1)..(450): unsure at all n locations
agcttatcatcctttgtgagtgacttatgtattctcttgagtttacttcaattgttctttatagaacttgtcttttctaaatacccttaagcaaaatcatcagtaagcataaactcataaggcttatgatttgtgtttaaaaggttggtcataattaaaacatatagggttttggactcaacaggaagtgcttggattgtgttatgagatgggaacatgactttcattatggtttgatatttatggaaattatatgaaaaatcttttaatccttaggctttgtttgttggtagagaaagaaagcgaaaaagacaagaaataaatagtaaaatgaggtgggactcacactcttacactctactttannattaaacttttttctcttttcatttctttccatttctttccactctaccgaacgataccttaacatgttttgttttacattga

SEQ ID NO: 50242 - DNA, 484 bp, Glycine max
  unsure (1)..(484): unsure at all n locations
acactataaaactcagctgcttcacaatctccccttttgatgatgactttcttatataagaaacgcatacaagctctatcttctaatcgatgactcacttaattctccccctttatttttgagtttaagcttcacttgaaattaagttatttaattatatgagttcttgatttaatcccaactttntctccccctttggcatcaacaaaaagccaaagtgcgtatagagacataaaatcatacattcactcataatcatgcaaacaaggaagacaataatgcatacataaactaagcaagtattataataattcattcataaactataatataatgtcagataatttagagagtcatccaagataaccaaattaaaacaactaaattagaaagtaacatactaataagtgtttcaaaacatagccaaatacacggctagaaatcaatatactaataataataggaatgtctaaactgatggtgg

SEQ ID NO: 50243 - DNA, 339 bp, Glycine max
agaacagtatttctcttccattaagaactaacaatagattatcttgacaattttctagcagcaatactgggccgcgagaactgtataacagctacaacaagagggtcaatcttacctgaagaaagtcatcataagattttccctcacgctgatttgaccggctccttgaccaaagttcaacagttttagcactatctacagcacatatataacacagagttgcagataaagtattgccaacccccatgagatgtgaagcaaagtgtgcacaaagcatagaccattcatctgtctgagcatgctgttaatatgtgataacatgaataatatgtactatat

SEQ ID NO: 50244 - DNA, 431 bp, Glycine max
  unsure (1)..(431): unsure at all n locations
catagaaactcagctatccgcttaagaggtagaaggcgatttgatttattaataggnagaagctcgcgactaacagtgtgaatttgaaaatagagtccaatataggtacgattattggtagaatgacacatatcctatattgtcatcgcttatgtacgtgaagcgacaaactatattatgtatatgtattgatttattcattattgtcacactattataataacattcattatgtctatgaacatattcattagatgctttaatattgggtgaaataaaatatttcaattggtaattatttagggaaaagaaaattactggctaaatcattataatgtatcggggtcccaaataacgatttacagtattcgctcaaagagacaatggcagacaatatgattgtaacgattgacatattatagatatattat

SEQ ID NO: 50245 - DNA, 361 bp, Glycine max
  unsure (1)..(361): unsure at all n locations
ctaagcttgatgattccagatatgtctgactgaacccttttttctaccgatnttacatacatctgggacgttaatacacatatgccaacacacttccaatgttctttttcattaacgggtgaaattattaccaatttccctaagggatctaaattacatttaatgacggatatacagaactccaaaagcttaatattccacaaaatcgtctgcgagagcagcagcagactgtgatttaaaactatcactcccagcaaatgacgtgggccccacttaagttaccgggtttcatctcttattatgtgggtcctatgtaaattccactcaatacaggcgtcggaaacaatttgtaaatagtgca

SEQ ID NO: 50246 - DNA, 430 bp, Glycine max
gaagattcctaaagaagctatagtttttctacacatacctctctaatagctaagctcacctccttgagatgagaagctagaacttagctacacaccccctataataactaagctcacccccatgacaaaaaacatgaaaatacaaaaaaaaaagtccttactacaaagactactcaaaatgccccgaaatacaaggctaaaaccctatactactagaatggccaaaatacaaggcccaaacgaaggaaaaacctattctaatatttacaaagataagcgggcttatacttagcccatgggctcgaaatctaccctaaggctcaagagaaccctagggccatcccttggatctctagcccaatctacttggagtcttctacccaatgcccttgcgagataggattgcatcataatcacaggagcagacact

SEQ ID NO: 50247 - DNA, 491 bp, Glycine max
  unsure (1)..(491): unsure at all n locations
ctcaagctngaaccagcagcagagaatgatcaataaagtataacaatttattttcctattatatcattttactcgagacaaacactggttaagagcatcttagattctagacaagccttaagaaaattgaaaacctgacaacctattatgaagggacaaaaagacatgatctgttatcacctatacaattattgaaagtgtagaagagaatctttcacacataaatatctccttgcattaactcatgaaggatcaacataattttctttaacattatcatcattcatctcttcaccatttctctagattcaagtgaaggaccatgcattcctcaaatgggaattcaagccgtagcagtactagcactgcaccacaacacaacctatatggcctgaggtttacactcntcagtgaagggtgccctctccatagatatcaatgacgaanggtagctagttgctaattaagtaacaaagaatgtgatgtgatgt

SEQ ID NO: 50248 - DNA, 94 bp, Glycine max
ccatcggatacgactaaacaaaccctaccacctgtgggccacatgaaccgtttatgggccatcctagcctcctacataagctcctgctacccta

SEQ ID NO: 50249 - DNA, 486 bp, Glycine max
  unsure (1)..(486): unsure at all n locations
actaagcttctatccaggcacattcttggtggtgaagctcctctttcatgcttattccctagnggatggcgcctcccctctcctcttctcctttgccttccactgcatctccatggtggaaaatcaccattgaaggacctcattgaagctcaaagatccggcctccatagaagctccacaagaaagcttccatcacttgccaatcgtctaacaaatcctcaagtgtctctgaggtctatcacggaactactaaatattgatcatctcatgaaatgattaaatgttatgtggtgcaagtacttgaggacctcgtgaggatgagagtagtaactcaattgtgaactggtgatcataacgaatataaggacaaattggancacttttattgtattttgtgcgtatgggttaagggcaagcattttcttcctacaccattcataattcttctacacccatcattctttaaaaaaaaaaattccaaagtta

SEQ ID NO: 50250 - DNA, 474 bp, Glycine max
  unsure (1)..(474): unsure at all n locations
tactaagcttacgttgctcattgacttcagattgctgcaaagaaggacttttatcttgttggcgatatgcagaagaacatagaccacagactcttgcaacaggtgcatatntctgattcatggcaagttgagttactatgttgaccaaagcatcaaggtttccctcaagcattttattttcagcagatgaagatgaatttgtggccacctcatggactcctctaatgacaatcacatcatttcttgcactgaattgttgggagttggaagccatcttctcaatcaaattcctagctctagcaggggtcatatgaccaagagctccaccactggcagcattaatcatacttctctccatgttgcaaagtccttcatagaaatattgaagaaagagttactcacaaatctggtggtgaggacagcttgcacacaatttcttgaatctttcccantactatacaagctctctccact

SEQ ID NO: 50251 - DNA, 455 bp, Glycine max
  unsure (1)..(455): unsure at all n locations
agctnggcaaacatagttgacacagaaggtttttctcctctatatagaagcatnaaatcattggcaaaagccaaatgagatagctgaatacctgcacagtttatatataaatttaaaattggcataatccttgaggctgctcatatctctagaaaattactccaaacaaagcacaaacagataaggggagagaggatccccttgtctaagaccccgctgccctttgaagtggccataaatggatccattgactgccgcactaaaggaagtggaagaaacacattccatgatccaagtacagaactgggctgggaaaccaatggacttaagcatccaatccaagaatttccatgaaatggaatcataagctttatgcaagtcaattttcaggaggcatctcgaagaggatcttttcattcatatntacgcaaaatatcttgaactaggaagatgtc

SEQ ID NO: 50252 - DNA, 468 bp, Glycine max
  unsure (1)..(468): unsure at all n locations
taacagaaaatgcgcctnggattccattccagaatatgttttattgttttcctcaaagatgtatctgatcatggacttggtttgcaagtaacaaaaattggcatgatttttggcatgttgttctgattacctttttttgtctaatatttattgttttttgtatggttatatactcatatagcatacatttagttttagccataacggaagtggggagcaacttttctgaatatattagaagcactgtttttagttgactattattttaatttaattaataaatatttgataaccaactcctgtaggtttatataacacacctttagatttgatcatcataaatttatattagaatagagaaacagataattttatttctcttatccagcttgaataatacatctactgatttatagacaaaattagtcccaaagaggaaaccaaatctgctattatcaggagatgaaa

SEQ ID NO: 50253 - DNA, 264 bp, Glycine max
  unsure (1)..(264): unsure at all n locations
tgaggcatgcaagctncaatttatgtgggagcgacgcgtttatttttttactctatcgggcagccgacgtagaagttattgtcgacagaattcgatccaatcttgcattgttaatgaggaccgtctcgacctaacacgggacttgaccggacatgctacttaaacgtttaagcagaaagatgtgatacaagctaccaagcttaagaggtagcgccataaatattacgggactctataggacatgcattacaaacgaattgttcg

SEQ ID NO: 50254 - DNA, 340 bp, Glycine max
tatcgagacgctccaaattgaaaacagaagctctactcaaattcaaacgacaataactttttattcggaggaccgatggagtcccgaaatatatcgagacgatccaaattgaaaacggaagcttcgttcattttcaaacgaaaagaacttatttctcggatctccaacaaagtcccgtattatagcgcgacgctccatatagaaagaggaagctggtatcaaacgcaagcgactacaacttttaactcggatgcctgattgagtgccgttatatatcgagacgccccaatgagacacacgacctctgtacatatttcaccgacctctctttttttcggac

SEQ ID NO: 50255 - DNA, 465 bp, Glycine max
  unsure (1)..(465): unsure at all n locations
atcttaagcacctgcggctgcagcttggaatttgggagctttatttttgttgngcggnggngactacgtgggcgtctcctttctttttcctcgcgcccactactagggctcttctgttgttgttgggggccacattggaagcatattcgaacttgccttttcgtagtccgaattcaatcctttctccggcgaagacgagatccacaaagttagctggcatgtagcctataagcttttcatagtagaacgtgggtaacgtatctaccataattgtgatcatctccatttccgtcatgggcggcacgacttgggctgcgagatctctccatctttgggcatattccttaatggactcacgctctcgcttagtcatactctgaagctggttccgatcgggagccatgtccgtattgtactggtactgcctaatgaaagaagttgccacagtctgtcatgatcggatct

SEQ ID NO: 50256 - DNA, 480 bp, Glycine max
  unsure (1)..(480): unsure at all n locations
tgggcaaatcaaatcactcctacattgcatcncagtatttatcttttttctttctttacccactcctcacgtttttgtttttagggaaaaacaccataactaaacgcgccacaaggcatccctatcgcaccagatccaaatctagaacgatgggtgatcaagaggagagacaggaacagatgaaagccgacatgtcggctctgaaagaacaaatggcctccatgatggatgccatgttatgaatgaggcagcccatggagaaaaacgcggccaccgctgccgctgtcagttcggctgccgaagcagacccaactctcttggcaactgcgcaccatcctccctcaaacatagtatgacggcgaagggacacactgtggcatgatggcaaccctcatctgggatacaaccgagcggcttactcttatcgattgtcggccaactactcaccacccgtctagcaagacgatgtgggccatattg

SEQ ID NO: 50257 - DNA, 399 bp, Glycine max
  unsure (1)..(399): unsure at all n locations
agcttgttgagaaattgtacaaactttaggtatttgtttggcatgctattactagatttgccacttcttatctaaccttagaaaggctccacaaagagaaaactaatattggaaagatgnttattttttatgaatggatcttaaacaagttatctaaggagcttaaggggaaagaagctgtaaaggtagtgctcatgccttctttttggaatagtgtggtttacactcttaaagtcatgggtccacttgtcaaagtgcttcgtcttgtggatgatgaaaggaaaccatccatgggttatatctatgaagcaatggacaaagcaaaagaaataattaacaagtctttcaacaaccacgaaagcaagtacaaagatgtgtntgcaatcattgattaaagat

SEQ ID NO: 50258 - DNA, 364 bp, Glycine max
  unsure (1)..(364): unsure at all n locations
tatcaagttnagataatgacattggttgaaatgcagctgagaagagagaggggcctatgctttacttgtgatgacaagtattcccctagccatcgttgtcctaataagcaatattttgttccacagtgggaagaagaggatgaacctgcattacaaccagattcaccatacgaggttgagacagctggtgaccccagtttgcaagatcatcatttgtcttataatgcattaaaaagctcatcaagtcttgcgacaatgcaacttctacgatcaatagatggattgngagtgtagattctactatatagtgggagttcagataacttcctctcacctagactagctcaatgtctgaagttacctg

SEQ ID NO: 50259 - DNA, 397 bp, Glycine max
  unsure (1)..(397): unsure at all n locations
agcttaattcccaaaatcacatctacttgattcttgttcttttatgncaaagnttctaaacaatatggacttgacatcatttatgagggcatttacaatctttattgntgngncagccagatacaaacataaaatgacacatccattatcataaaaaaatttcacatacacacatttatcactatcattaatttgaaaatcatacgaaagaataacttgatcaaatttgtgtgtcattactttagggcttgtttcaaaccatataaagatttaacaatttatttttcaaggaaaaacattttcaaagaaagtgacatctctagatttcataatagtaccattagaaatttcagacatttctaaattaacaactaagaatctataagtagtattatgt

SEQ ID NO: 50260 - DNA, 462 bp, Glycine max
  unsure (1)..(462): unsure at all n locations
nggntcaactgagtagccatctgccctatctgatttgcatacttttttggaggctctgctgaaaggcatattataaattgtcatttgccttactaactcctctaaggaaggttgagatgggcgctcagttgcttgttgactttgttgttgttgctgctattgctgcattggaggaggaacatatggcttgcttggaccagcaccattctggtagggagggacaggctattgttgttgtggaggacttgcccatctcagatttggatgattcctccaacctggattgtatctgttgcttgaaaggtcataattattctgttgttgntggtttttctgctgagggggtctattataaatgtttgcagcagaagcttcacgttgctcattgactccagattgctgcanagaaggacacagatctgtatggtgatctgcagaataacatagaccacagaatcttgc

SEQ ID NO: 50261 - DNA, 360 bp, Glycine max
tcaaacaatttggtgccattgaaagttgcattggaaaacagtattctatttctgagctgccatatagaccatgttaaagccaaccaccaatattgccatctcttgatccttatgccttcagccagaacatgtgtgttgaaggaaatggtgctttggagtttgcgggaaagcacctttgatattcagccaggacatggattcccaccaaataggttgaattttgttgcagtgaatgaataagtgggatgcgtcctcctccttacttctgcagaaagggtaggacatatctgtaatctgcacctgtctcctctgtagatttagtcttgttggcaatctgtccttaagtaacctccaagcaaa

SEQ ID NO: 50262 - DNA, 283 bp, Glycine max
cgaggacataggattttgtactaccatgccctcctgatttccagatgggaaattggcgagtggaggaacgccctgtcatttacgctacgagcataatgtaaacccttacagtgttaaaagccttatagttgggcctaggctttagaagatttacttttgttaagatattgcgtattttgtttttgaatttataatacaatgagctttcttcatctgttcctacgactctacccatgttcattcattggcatggttacttacttttctgaaacgacagatccga

SEQ ID NO: 50263 - DNA, 440 bp, Glycine max
  unsure (1)..(440): unsure at all n locations
agcttgtcgctggagctaattcatttacttttctaactctntcagactggcgactcctaggctcttgaccttgacttgatagaacctctttttaagcaaaggcgcctgactcgatcccatgttttactaaagggaaacaaaacccagtgcgaatcaagactccgacatctatcatgggtggaatggatgaatgcatgaagaaatgcatatgacacagaccctccgtcgagattgtcctcttcttagatacaacattcgggcagcatggctcctgatgtatgcatttaagaaggcgacacgaaccctccgtcggttcgtgacaaagtgaggggatcaagacgcaacccatgcatgatgcggatgtcgaaaaggcacaacacgaggatgtacatagtatgacaatatccccaaataatcatacagccgaggcgtacatgaca

SEQ ID NO: 50264 - DNA, 473 bp, Glycine max
  unsure (1)..(473): unsure at all n locations
aacatagaaactaagctttattgcagccactcatgacacatgccttatgttcctcnttttggagnnatcgngcaacggcatgtctgcatggcatccctacatcaaagttgtaaaatcagcacacatgtaggttaggaatgaaaaaaaactataaaaaacacaacctgttagttgccatactccacaagtgcatgtccattcacctaaattgacctcaaccttattcccccacatgtggacctcatatctcaggcccatgttatcaccacaccaaatgggagtccattgattagcaaaatggaattctttctctagtcttttatactgcactggacataatggtccaggttntccagaaagtttaaccttgcgggcagccatggttctcatgatantaacttctaattcttcaagcattgtgataataggcttgcatctatactgcagaattctggaattgaatacctcacaag

SEQ ID NO: 50265 - DNA, 415 bp, Glycine max
  unsure (1)..(415): unsure at all n locations
tgggccctcgngacctactcacctcgaggttttttactttcttctccatgannggcaagcggatttgtttttatgttgggcccgtcctcttgaaaaatcaaccacccggcctctatggaagatctttcccgggaccaccacgaccaattggttggcgatgagagacggcaagagttccccatatgtcatctggatcggngcaaagatctgtgcctgccttggcaaaaagttccttgtcgtgtttgcgcctaagtgagcattgttggctgagtgaggccgagtcagagctggattcctgagagctcccccctgtgggggtgtgggtgcccttggttgtgtgagtgccgtatcggaagagacctcggcgtgagccgaaaaacttgggtgatgttgcgtatattgtgtggtaccgtgg

SEQ ID NO: 50266 - DNA, 182 bp, Glycine max
ccccccgcccccccccccggcggccccggcccgatatcccccccccccccccccccccccccccccccccgcccccgcccccccccaccccccccccccccccccccccccgcccccgccccccccccccgccccccccccccccccccccccccccccccccccccccgcccccccccccc

SEQ ID NO: 50267 - DNA, 372 bp, Glycine max
gaccccagaccaccatctctggctacaagatgataggacaatggtccagaaaaatccaccaggagcgacacgctgagagctaacacgccgatgagataaccacggcgagtgaagcgatagacctgccaaggcactggtcaacaagccatggagcctaagacacctgaacatggtaacaacagcaccggaccacccaaagcgccgtgtcagagagccaagagtcgaacacacagacgtcatacgcgccaacagtgcatagggaggaacaaacgctcgccacccgacgcccgaggcgcgaagaaaaccaagaaacaccagggccagcaaggaagaaaccatgagacctcaaccagacacaaacaaacaccacta

SEQ ID NO: 50268 - DNA, 322 bp, Glycine max
agcttggctggcaaggagagcggactattccttttgttgtttagcactattggtgctcggtgtcgtcctcttttaaaatatggatgggctagcggatctaccggcaatcaatgcttttcttgctcatcaacatatcatggatagtctggacgttgatgttatggctgatgcctatgacacactcgaccgaacatgcgagaacagcacctcgagaattgtctgttgtacacccgctctttatggatggctggcctctcacatttttcgtcatgaaagtacacccatgtgtcccctacaaggtcaccgcatgtgtgctgagaaa

SEQ ID NO: 50269 - DNA, 369 bp, Glycine max
gtagacatgcacaaattcacaaggcccacaccctgacaatctactgttctgtgacatatattttgtctaaaacacagcttttagacgaaacatacagcttacggttcatccattaccatgatgcacatcatgtaacactgttgctactgaaactaagatgaacactcttgaaaacaagactgatctacggtggagatacacagcatatattcagggcaatggcaaaaaaaagtcacaactatgaatgctcattatggtgacgctattacattatttttggatactatgaatctatgataggtttctctatgaagcaaactcttatcagttcgcatatcacgcccatggacgttccaagactatataata

SEQ ID NO: 50270 - DNA, 466 bp, Glycine max
  unsure (1)..(466): unsure at all n locations
gtcccttagcctgcacacaggcagcatttggtgngtattctccatngcagccaggggggggcaacatagtatccccaaatttatgacttaagagatatcatcatctcaacaacatactgtatgtatctgttagccattattgggcatgggtcaggcaaaaatagaagctattcataaaaatcataatataagtcacatctagattctgccttatagaactgaataaagacattaaaaagcatacaagtatctagcatgcatctgatgtggatttatacctgaatgactgtggtatcttctcctgatttcaacttaaacacaaattctggatcttgcaacttttgcaaagaagattgcattacaataaacaattccagatacagtgcctggtcaacatcactatttccccttctgtcaagcagcatgactaaagaaggaagccacatcgtacttgtatattgttcac

SEQ ID NO: 50271 - DNA, 310 bp, Glycine max
gatagagccaaacccaatccccctcattaaaaacaagctcctttcttcctctattgcccttagatgaatacaccattgtctggttctctatgcgggtcttaaccctctcatgcaacttttttacaaactctgacctagattccccttcttcatgtataaaaagaagcgtcaagtgggacgggaatgaagtctaggggtgttaggggattgaacctatagacaacctcaaaaggggattacttagctgttctatgaacccccctgttgtaagcaaatactacatgaggaagatactcatcccaagacttat

SEQ ID NO: 50272 - DNA, 370 bp, Glycine max
ccggagatgttgatttatttatatagtactaccggactcgtatcttttatgggtgaatgagtttatacatggagttctttgaatacaagcactgtgacactctctacttgtgaagcccagtatgtatctgcaacttcttgcacatgtcatgccatttggctaagaagaatgatggaagaacttcagttgttgcaaaaggaaagcgcacagatctatgttgatcataaatctgcacaagagcttgccaagaatccggtgtaccatgaacgaagtgagcatatagattcaaggtatcatttcattagagagtgcattaccaacagagaagtcgaatcgactcatgtgataactcaagatcaagttgcggata

SEQ ID NO: 50273 - DNA, 441 bp, Glycine max
  unsure (1)..(441): unsure at all n locations
actctgctttggagaaaactgggaccactcatttatttagtaatgtttatctagncaagatctgagagaccatactagtttcctagcggtttctaattatatgggccattaagtctatcatatgctgacaatagccgagaagcccatgaatttcttcgggggcggagtaggtgtctgccattgccttggccttggctaacaatcggngaagttcttgactcctgttcaaggtaagagcaaaccggtccatccacatggttgcctcttggtgtaaagagtcgatcacccttcctctagcctctntttccgcgtatacttgggcatactcgtccgcgaccctatgctcgtgggccgnggctagacttaactcttcttggtacttggcgatgatagctagcatgttggtcttcgtctcgcataaacgctaagacaagactcttt

SEQ ID NO: 50274 - DNA, 364 bp, Glycine max
  unsure (1)..(364): unsure at all n locations
agctntgcacgtaatagacactgatgtgttttcgttatatgttagcanncanncntacttcttgagtatttgaccttactcctcctgcgcgggcgatattttatatgtctatcgangcgngcgcntncatacagccctctgtttatcttgaatataaactatctatatgtatgatcaacttatgtcaagctcactcgggcgtatttactaacattacaacgatattcctaaatatagaagttctgaatgatgcaccaacactttttttttcgacctgctattgcttgtaagttaatgtctatcaaatcatttatccctttcatgaactaggacctgcgagagacatttttctgttgctgaagca

SEQ ID NO: 50275 - DNA, 455 bp, Glycine max
  unsure (1)..(455): unsure at all n locations
tgaaccanaaccggngagagtgtgatcttacactgtgaattaatttatttttgcgagnaanaannccggcaggaatctctgaattgtagaatgaaatgtataaataaggacgtgatgaaggccatgattgtgcatatacaagccttttgaccaanaagcttaccttgaatgataattgtatcctttgcagcctttatgagctgaatgatattgtcaaaaatttgaacccttaaataattatctccagataccttgcttagattctaggagagcatatagttcaaggcaaatttaccccaattttgggggagtgaagttaatagggatgtaaagaaaagggtatagcatcaccacacacaacatataagttgtatgttaaaaaacactgtgctgttattataaggtcagaagtcaagtaatatgaatagatagtgagacagctacctgtatggaaa

SEQ ID NO: 50276 - DNA, 350 bp, Glycine max
  unsure (1)..(350): unsure at all n locations
agcttctagaggttgtgcttatctattccttctctgacagtgcgtgggtaagcccagnacaggtagtttcaaagaaaagaggaatgacagttgtccaaaacaagaagaatgacttgatacccactcggactgtcactggctggtgaatatgcatcaactaccgcatgctgaatgaagccacaaggaaagaccactttcctctgcccttcatggatcagatgctggaaaggcttgtgggacaggcatactattgtttcttggatggatactcatgttaactaaattgtggtggaccccacggatcaagagaagatgacctttacatgcccttttggtgtctttgcctacag

SEQ ID NO: 50277 - DNA, 382 bp, Glycine max
cgcttatagaaatcaagcattattattatttatcctcacattataatagaagcatatgtgcataaataacaaataagtcataagtcatcaaaacataaatcattcgtctaagttacttgcatctagaagtcctaattctcttctaatggtgtagaaagagtctttggttagtggttttgtaaagatgtctgcaagttggtttttagtatctacaaatttttaaaacacagtcaccttttttctaagactaagtgctaattgactatcaacacttaccaagatgagtttttattatcatagaatgttttatcatatcaaaataattttatttgaaatacaatataataatcaagtaattcacacatatcatacaagaattata

SEQ ID NO: 50278 - DNA, 332 bp, Glycine max
actttgagggcatatcatgtccaatcggggcatatacgtataccctgcacaaatacttgtgatattacaattgccttaccccactaacatgtgaaaggatcgttcttttcttggacatgtgcggttgtataggcgctttactcattgattttagcacagtggcccttccactatccaatctgctacataaaagaggaggagtttgactatgacgatcggtgccaagatgctttagattggctcatgtgtactgcgactaccacccctatcattcaggaacctgattggatgatcccatttgagctagtgtgagatgcatccaattacacatt

SEQ ID NO: 50279 - DNA, 275 bp, Glycine max
gcagtaatatatacacaagttactcggaataactaacttataacttactaacgtggagtataagaactgaaaagcacccggcatgagtgctttggtgtatatatatgcaagttgattagcagaagttattggaagcaatttgacaagctcgacaaggatcttcttttgaacgatatgacaatcaattttgatatgttgggtcctttcatgacacacacgatttgtagcaatatgtaaagttgactgggtatcatatgacaaaatagcaggttgat

SEQ ID NO: 50280 - DNA, 457 bp, Glycine max
  unsure (1)..(457): unsure at all n locations
gaacatagaaactaagcttgatcaaactagtacatttcattnngtaggtttggataatgatgnnnnatatggctacttcgatcctgcggcatttgcgcacacacaagcaaaacaaagcaatttcaaataaacaaaattcaaatctaaaaacccttttaaaattagaaccatgtgaacgtcaatagagaactctgtaatcaacattcaacagccacacatacaaaggaaagaagctttattaaggtgtgaaaaccagaaaattaattgaaggaaaacgtacttcttggttagtgttatatcgggtaacaaagtcaaatgaatatggggtaacatagtcaaatcaatgcaaatgcataaagaccaatcgcaaaaataacttggacccataaataagaaactaatggagggtgttggatgttgaaccatgaagcttaatctttggttgaggcttataaag

SEQ ID NO: 50281 - DNA, 382 bp, Glycine max
tcacgttcctgttttgttctgtaatttgtgttcttgtttgcgtgtctgcttgcgttcttgtttgtgtgtttgtttgcgttcttgtttgtgtgtctgtttgtgttattgtttgtgtctggtttatgttcttgtttcgttattgcttcgctcttgttcttgattcattatgtttcaaaattttgtttgaattctgtttctaattatgtttggggacaattttgcttgctggatgaatttggggtttagggtttaggaggccaaatttcctaattgcctattgaaaaaattgcctaaattatcctagacaaattttgaaaagaaagcattttaagaaaaagttgtagaaagttaaaaaaaaagttggtgtttgatctttgaatgc

SEQ ID NO: 50282 - DNA, 455 bp, Glycine max
tgcatgtgcaaaaaggtggacaacctcaaatgctgaagaattgatgcactatataaggggttccaatatgattctggttaatagtggagccacccacaatttaatttccaggaaattagtggtagctttgggcttgcgggtagaggagactcacccaatgagaattaaaataggcaatgggtacaaagccacaacacaaggaacttgcaaaggaattgagcttaagttgggagaaatcaccattccaattgatacattcttgtttgatttagagtggatcaacattgtattagggatatcgtggctaacgtctcttggtcgcatgtgggttgatttgggaaaacagagcatgcaatttcaattagagaacaagtgggtggaattacaaggtgagaccaaaagaatggcaaaacatgttgcttttaaagtctatttggtaaccttacacatggtcg

SEQ ID NO: 50283 - DNA, 458 bp, Glycine max
  unsure (1)..(458): unsure at all n locations
agcttgtagccattagaagagaatgagcatttgttttcaagtatgacataaaatgttagtcagtttgtcagattgattgtgaaggaatgcattaaccgtatcccggtgagagtgtgatccttaaattttgagagaaacgactatcatttagtactgatttttgcgtgaatatctgaagtatggactgaatgcatgaaattgaggatgatgaaggccatgtttgattatgatagccacttagccaaaaagatgaccatgtgcttgaatgaattgtcccttgcacctagtttgagctgaatgaattattgattgattgaaccctgagcctatacagtgttatttcctgctaccttgacttaggttgtaggagagcatcatccacaggaagcgcggttcanagcaaatttgtcccanatttgggggagtaatcatcaagggtaaattgttccaaatttggg

SEQ ID NO: 50284 - DNA, 483 bp, Glycine max
  unsure (1)..(483): unsure at all n locations
nggaggattatggagtacccatcacatgtggtactaggtgtgcgttctttcgatggngcacaacaagtttttcacatccacaaatcgcgcataaacccatcatcccctattgcccacctccaattgagctcacgtactcccacgtagcccatatcctcgtttctctcaacaccgggtccccatcaatcctcccaagcttccccaacatccaggtaaatcaacattcaaacagcacaaactatcacagccaagaaaacagggcaaaggcagaaaactctacctaaaacaccttccaaaatcatagctttttctcacttaaagaccccagtaacatttccttcgttccaattcgttaaccgttggatcgactcaaaaattttactggaagtctctagtacataaatctacattntgaccggtgggatctactagcgaacatccagaactcattcttcattactctntccacaaccagcaaataca

SEQ ID NO: 50285 - DNA, 403 bp, Glycine max
  unsure (1)..(403): unsure at all n locations
catgcaagcttctcttctaatatagaagcagctgatatacttttttttatcaggaatngagaagctttcactgttaacatgataattctgtttttgcacagcttttacagcagctactctagctgcattggctgctctattagaagctgctacagctctgttcaccccttcatctaccttggccatatcataggctttctctgcggcttgtcttgcttcctattttttaaacaaataaacacaattttataatgaaaattgactcataatgctgtaaaatatctaactgtctgcaattcttttcttctcctccattacaaggttgagctaattttatgcacaaaagacaagacatccaaattctgcatgtagactgtatccngacttcaataaaatttggttt

SEQ ID NO: 50286 - DNA, 425 bp, Glycine max
  unsure (1)..(425): unsure at all n locations
tagccctagaggngatggaccttntgcaggtttggagagtttcattatttttgcctataggntggacctcccagaagagtatggagtcagcaccacttttaacatttctgatttaactcctttcgcaggtggagctgatattgaggaggaggaactaacagatttgaggtcaaatcctcttcaaggggaaggggatgatgcaatcctccctaggaagggaccaatcactagaaccatgagcaagaggctccaagaagattgggctagagctgctgaagaacgtcctagggttctcatgaaccttacggtagatttctgagcccatgggccaaggttgggtccaattatctttgcacatattagactaggatgtcattatatttgggccttgtatatagggctccatattgtaggtagggcaccct

SEQ ID NO: 50287 - DNA, 287 bp, Glycine max
gctccaaaatttggctacacaaattcaatttcaaattcaagtgatatctgaatagaaattcagatttccccccaattttgtgtgacacttaagctataaatagaggccatgtgtgtgcatttattaaactttgatcatttgagaaattacacttcaaagttcagacctcatttgaggcacacaatttggggttctttctctccctctgcctccactcatcttctcctaccttcaagctcttatccatggctccttatgttggtgagccttctcttgactcatcctct

SEQ ID NO: 50288 - DNA, 71 bp, Glycine max
  unsure (1)..(71): unsure at all n locations
cggagccccgccaagggcancgcccagcgcaagacgccaacacgccaagccccactagcagacggagcccc

SEQ ID NO: 50289 - DNA, 385 bp, Glycine max
gcagctgagctactgtgctggccaatttcttttgttgtgtttcggccatgctcttacttgcgagccctcttggtttcttgctcaagggctcttgcggtagctgtattttcttatcgtaactcaacacactctttccggacgtctgtagcgaccaacttgaatttttctttggcaactctcgcttttcctagttcggattttagagctcggacttcctcatcctcttccggagcgtttaagttctcttcgttgataatctttaacttggagagccaatctaactcttgtgtacgaactttcagccattcatgataaccaccgatgatgccattacgaaagcccctaagttcttatctttcctaacgggcttcccaaccttatggac

SEQ ID NO: 50290 - DNA, 413 bp, Glycine max
caaactaactactggaaaaaatatggaccaatccaaatcttagttgtcgttactaaatatgttgtgaaattctaagacgaggtgactgctacatcgctaaacgactgaatgcaatgtttgttattttgcttttctgatgaagtaacctttacctgtttactgcgtgtggaaatcccatcataaagattaatatgttatttcaagtggtccaagataatttattataattgttagaccttcagaccttacacatacttagaagggtgcgattcctatatttcaggatattctgcctctgttcttaagagatatttgagcgaaccagagagcgaccataattatcttgtgtcttgtgacgtccacacatgagaaataacgcctcatccaatgtgttacgccactctcacactcta

SEQ ID NO: 50291 - DNA, 410 bp, Glycine max
  unsure (1)..(410): unsure at all n locations
agcttgaaattgcattagggcacctatttttattcttctatgctgnctctacatatataaaacagtcccaccatcccaattatgcaaaatcatatccatatatcattggggcatttcaccgagcacttggtgggcgcacgtttggacataaattgcaagagaatgggggcaatgtggcatgccccattgcttcagaatacaacataggcctaatgccttctcacacaaaccctcaactcaacaaaacaagcatgaattcagatgcgaattgcttcacgaattttgcaaaaaatgagcaactaaagcaccaaaacacatcgatggagagccaaataaccaagggaaattgcacttacttgtggggagtgaattaaagcatganaagggaagcaaaaactcaacaatggaag

SEQ ID NO: 50292 - DNA, 458 bp, Glycine max
  unsure (1)..(458): unsure at all n locations
catacggacacaaaaactcagctgcttaaagctaatngattctatgggcatatttttgttcttgttcttgaaccatgaattgtgttgagtttaggttcctttgatttttgtcttgttattttttgtggctgaaacctaaaccataaaattcttacaaaaatattaaagtagaagaaaacctcaaaaatctagagtgacttgttcacgtattgtagttttgtcatagaagtcatgtctagtcatgaaacttgtcacataagatttcttatgttgtgctgaatattattttcttgtttctttgtctaactcattcgttcatgagtgtatgaaattattgtagcctattatctgatttgagtcaaacctttcatgttaattagagcttaacatgtacatgctaaattcttagagagtcttttgttgtaagcatctattgaacagatncctaacttattatt

SEQ ID NO: 50293 - DNA, 344 bp, Glycine max
agcttgaaccataaccggggagagtgtgaatttattctgtgagcgaacgaccagctgggagtaataatgtgagcatgaatctctgaatattagaatgaaatgtataaatgaagacatgatgaatgccatgattgtacatacacaagccttgtgaccaaaaagcttaccttgattgatcattatatcctttgcacccttttttagttgaatgatattgtcaaattttgaaccctgaacttatatatttatctccagataccttgtttagattctaggagagcatatagttcaaggaaactttacccctacgtttgtggagtggaactaattgcgatgcaaagaaa

SEQ ID NO: 50294 - DNA, 380 bp, Glycine max
ataaaagcacccagcgggagacctttgagaatagacatttcttatctttgtctctaggcaggacctacgaggagcatttgcaatgcccacgcgcttcccagttccgaacaggctcctttccatgtaggtctgatctcgagggggaccctctaacagacttgatgtcagatgcgctcctgggggacggagatgcactcatcctacctaggaagggacctatcactgactccatccatcagaggcgacaagaagattgaacttgatgtgtttgaccaagtccttatgctttcatgagccttccggtagagacctgagcccatgcgccactgcaggctcccattaccttacgccatagtagactatgaagtcgtgatatttgg

SEQ ID NO: 50295 - DNA, 237 bp, Glycine max
  unsure (1)..(237): unsure at all n locations
cgaccacagaggggtacctagaganatgacgcgggagacacgagaccacggggacgtcaagaggggtgctattgcccaaaaccaagcttgaccaatcccgacccaacccgggcatagtcagtcagcgagaacctgagatgtacctaaacaggcgagctcctgacagtcaaccgctacaagaacaaagaccacaacgcatggaggcttgcgtggtggcaggccagctatggatcctga

SEQ ID NO: 50296 - DNA, 412 bp, Glycine max
  unsure (1)..(412): unsure at all n locations
agctttacggctgcaanaatgcattattattatgtttnctttccaacactactatctggaggaaaaagatatatttgttcacaaaactagctttttaggtgcatacacacacgtttcattggtattttttttttaaaggagtaatatctttcatactaaataatacttagttatatatttaattttgtgtcaagacataaaagtaaaatagtttatattatgtatttttaaacaagtgatgtattttatttttcacaatggcgacaatgagattttgatttagaatattgtacaaactatctaaacctctaataactaaacggattctaatgggtatgttaaatggagtatattataaagtattcttcattaaaaggaaacctgccgtcgcattcataaatntatgttcttt

SEQ ID NO: 50297 - DNA, 423 bp, Glycine max
  unsure (1)..(423): unsure at all n locations
acacatagaaactaagcttacaagatactttaagacagattgacggtcttttantattagaagatctttcttcagctctgatttaaaaaatctccacaattgatggaggatgaatttggttctcatggaaatgctgtgaaagtcaatagtcttgaggaacttgatcctgagatacagaccattgtattactaagtgatgcttatggagctgaaagtgaactgggcattgttttatctgagaaattcgtggagcatgacgcatactgtatgtttgatgctttgatgagtggggcccatggttcagttgcaatggccgatttcttctcttcatcctctgtatctgggtcccatagtggcgtgcctcctgtgattgaggcttccgctcgcattgattattagtgtgctcatggagattcatctctc

SEQ ID NO: 50298 - DNA, 299 bp, Glycine max
ggaaaagagagaggggagccaattgagaaaaagggaggaagtgactttggtggtctcacagacttattataaagtacacaaggtaccatgttctattatagacaggtactccttgaaagcttttgaaaaacttcttgaaactttttgaaaaacttcttgaagctgacttactccacacccttatactagctacctctgaaagttcttgaaagatctaaagctagactactacaccatctttatagtagccactctgaagagagtaactactaccacttttatactagctactctggaga

SEQ ID NO: 50299 - DNA, 469 bp, Glycine max
  unsure (1)..(469): unsure at all n locations
tgaccaatcccgacccaacccgggcatagtttgtcttttttatcctgtgangcacctaaacaggcaagctcctggcagtcaacagataaaaataataaagaccacaaagcatggagacttgtgtggtggctggccagctgtgagacttgattgatatatgggatatggcctttggtaatcgattaccaagggtgggtaatcgattacaaggcttataaatgaagacaggagactaagatggtctctggtaatcgattaccaaggggtgtaatcgattaccacgcttgaaaacgaggtcaggaagctaggggagcttctggtaatcgattactaggggatgtaatcgattaccaggcttcaaaagggaactggaagactgtggaggcctctggtaatcgattaccagtctgtgtaatcgattacacagaggaatgggtcactggtaatcgattaccaggtatgtgtaatc

SEQ ID NO: 50300 - DNA, 220 bp, Glycine max
tgcatcagcaatgcgtggaacatatatatgttcatgtctacaatgagtgaatgggggacgacaatcattgtatgacatacgatcacatcttatatgtaaggggatcattccgacatctacaatatggatatggcctagtgaatttccagacatgcctacagtccgatccagtgacctcggtgacgtaggaattggagattgtatacaagacatgatatgc

SEQ ID NO: 50301 - DNA, 280 bp, Glycine max
tccactataaaaacgatccataaagcataggtgttgacatctcgtctaaaatcaaggcgtccatcaccagtagttcctctaggccgttaattactatcccagcgagttctaactagatgtactctacatattggtctgggtaaagatcggataaaagatgttgcaacacaagaaaggaaacacatgtgaatgtaatatgtgaatcataagatcattccaacttggattgtagataatgggaagaacacttgacaccatactcatggaccacaacacagat

SEQ ID NO: 50302 - DNA, 452 bp, Glycine max
  unsure (1)..(452): unsure at all n locations
agcttgtcaagccctccaacttggacaagtgtngttctatttttttctgnctagntgtctggggtggacatacttttggctctgcaagtgagatctgatgtgtaaggtgagaaaagccattgcatttgaaaactttccctttttctaaccgtcggagagtgcattaaagatagacattacattttgtccattgatgcaggcgtgtgcagcacacgcgcaatacttttgcgtacatgtcactcgtggagtaagcacgcactgtagacgtgatgcatgggtaagtggggctgtgtcgcggcgcaaaaaattagggtaccacttcatctcctttcagttaccaaatagcttgtcttctctttaaatggagtagacgtttgatttgtagccaccatcactccaaaatatttctcttctttctccacaagtctcccaaatttttccctttctttttc

SEQ ID NO: 50303 - DNA, 470 bp, Glycine max
actaagcttaacggatgataacgagcaagtactatgtcaccatattttatttgtgaaaccacccctaaaacccataataagatctgctaaacaacttatgacatatttgaagatacatgtacatgcataagaatataagcattaccactacaccaacaagtaccagaatgggactcatcccactccattaatgcaaataatgcatcatggaagcctaagtattgttagaaagacttatgctaataaaacctatttcaaccaggaacttatattaaaagaaccttcaacaacaaagataaggtgatgtaagctccattggagcttgtaggcctaggatcttcttcatcaatggattactttgcttcttgaaagatgaatggcagccgaatggagaatgaagagagagaggagacgccacttctaggagaagatgagtctagaagaagctcaccgccatatgaggccatgga

SEQ ID NO: 50304 - DNA, 430 bp, Glycine max
  unsure (1)..(430): unsure at all n locations
agctcgccgccacagagttntccgactatgtcttttttgtggtggaacaagctacaaaaggagagagcaagatatgaagagccaatggttgatacatggacggagatgaaaaagatcatgaggaagcggtatgtgccggctagttactcaagggacttgaaattcaagctccaaaaactaacccaaggcaacaagggggttgaggagtatttcaaggaaatggatgtgctcatgattcaagcaaatattgaagaagatgaggaggtaactatggctcgatttcttaatggtttgactaatgatatccgtgatattgttgagctgcaggagttcgttgaaatggattatttgcttcacaaagcaatccaagtggagcaacaattaaaaaggaagggagtggctaagaggagttntaccaactttgattctt

SEQ ID NO: 50305 - DNA, 441 bp, Glycine max
  unsure (1)..(441): unsure at all n locations
tactaagcttccttggctttaagatttaaggactcggaccttgtttgacttactctnagngnaataggtaatgctgccaagtttgtaaagccctaaccaaagcatacaattccttatcataagatgaatagttaagggcagcggctcctaacttttcactaaaataagctatcggatgtccctcttgcaataaaacagccccaatgcccacatttgacgcatcacactcaatttcaaatgattttgcataattaggcatagcacgaatgggtgcattagttaacctatgtttgagggcagcaaaggcctcttcttgtttcttaccccatttgaaacccacattcttcttaacaacttcagttagaggagcagtcaatgtactgaaatccttaacatatcttctatagaaacttgctaaaccatgaaatcccctcacctcac

SEQ ID NO: 50306 - DNA, 436 bp, Glycine max
  unsure (1)..(436): unsure at all n locations
agctgtgaatgctctattcaatgggagggataagattattttttgactgancaacacatgcacaggggccaaggatgcatgggagatcctgaaaaccactcatgagggaacctccaagtgaagatggccagattgcaactattggctgcaaaattcgaacatctgaagatgaaggaggaagagtgtattcatgacttccacatgaacattcttgaaattgccaatgctcgcactgccttgagagaaaagatgacagacgaaaagctggtgagaaagatcctcagatccttgcctaagatattagacatgaaggtcactgcaatacaggaggccctatacatttgcccatgagaganatgaactcattggttcccttcagacctttgagctatgactcttcgatgggacgtgaaagaaagcaagaatctggcgctcg

SEQ ID NO: 50307 - DNA, 404 bp, Glycine max
  unsure (1)..(404): unsure at all n locations
ccaacactaagactaatgaacaggaaaactttcatatctttgtctganaagacacacaaggagcaccaggcctctgaagnataaaaatattaccattggaagcagggaacattaacggttaaaaaacgaaggagttactttgtgtacctgcggacagtatttntagcaagtcaatattccaaggcctgacaaaatttgttgagtacctatggagccaccaacagctgatacacgtagaaatagatgctcacttatttgaattgccacaataagatttcagacatggaaaaggacaactatttatctgcattaattgcacagcattgtctttagattnggcatcatatgaaacaagaggtacctctttaataggacacatgttaacatgtcgtctacgcatgaca

SEQ ID NO: 50308 - DNA, 240 bp, Glycine max
  unsure (1)..(240): unsure at all n locations
tgcaagcttaacatcggnttttactagaaccgtttaattanatgttttactaaaaccaagggtgggaaggtaatttctatatcggttggcgccataatcgatgtaggttctacattatatatatatatatattgttccacaagaaccattttgttgatccatttttaaaaaaaacataataccgtgaccatgaagaacaaaactaaaacactatagtattaatataataaatgcaacatg

SEQ ID NO: 50309 - DNA, 391 bp, Glycine max
  unsure (1)..(391): unsure at all n locations
ggggggttgaattaagatattcgctactcttccttcgagttaaagagctatattactttgcacttaagcgatgaagccccttaatgaccatcttcttaaagattaattcgaatgaagcaacctgaatatgaacatgaagcaatggtcagtaaaggagattaagggaagagaaagtgcaaactcagttttatactgggtcggccacacccttgtgcctacggtcagaccccaagcaacccgcttgagagatccactaacgcgcctagtccttttactaggtctaaacacacaaggacaaccctctctttgtgtatagagagtctntacaacgagagactcacgagctcttaatcccctagagaatgagaagaagaagaggaacctatctctc

SEQ ID NO: 50310 - DNA, 217 bp, Glycine max
aaggctactctataaatcacacttgaaacactcaagtgtttctactctcgggaaaagaagcatttttcacacaccttaagacattctcgagatctcatcagccagatcgtggacatctgttcttctgacccctttgtgcttgactcaaaatcttcacgggatggcgccaatccctctttgcaatttcgtatctggcaactcacatacagtgaaacaa

SEQ ID NO: 50311 - DNA, 374 bp, Glycine max
cgaggccacaggaaccaacacgaggtatcaaagcacgcatctcgcagaaagattcacacccacaagagccatggccaccgaacaatgtccgctcctggaaagaaataacatccatacgccacccacatctaaaggagagaggtaccactactgaaaaatacgaatacaaatctatattgaagccatagatctaaacatgcgggaagcaatagaaagaggaccctacacacccaccataggagagagaagcactagcaccacaacacacaaacctagagacaacgtgaccgatgaggaccgaagaagaaggcaatataaacgtacagacaaaaacatcagcactcctaccctaagacgagacgacaagcacacat

SEQ ID NO: 50312 - DNA, 356 bp, Glycine max
agcttcactatttcaccatccatattttttttctgtttataatcaaacccttcatgaatttagcatatgttggcatctactctaacgcctcagaaaaaggaatgttattatgcaattgtttaaaagtatctataaaacgcttgtactatttttccttatctttctttgacagagcatgctgataacgatgatgctcaactggtgaatggtttactatagctttaccattattagtggtttgttcatttgatttcttcttctctttttcacttaccactatttcactggtcaccactgcatcatttttctaacgttcttcttcagctccttctttattctttttctcatcattaatt

SEQ ID NO: 50313 - DNA, 483 bp, Glycine max
  unsure (1)..(483): unsure at all n locations
gaccatgaaactaagcttggtctcctttagtgggaactatccgcctattattgtgttattctaangcccctaaccaagaactagctcattatttcctctattgctcttacctgaatacgcctttgttaggttctctatttagggcttaaccctctcatgcaacttttttacaaactctgacctagattcgtcttctctatgtataaaagaagtgacaagtgggagggaatgacgtctaacggcgttaggggattgaacccatagacaacctcaaaaggggattgcttactggttctatgaaccccccctgttgtaggcaaattctacatgaggaagatactcatcccaagactttatggtgcctttcagaagatcccatattagggtggataaggacctattcactactctctgttgcccatcagtctatggataacaagtggtagagaaaatacatctatgttctaacttaacccataatgt

SEQ ID NO: 50314 - DNA, 333 bp, Glycine max
catgttatttcttttacgaaaattattctgatctggaagcaccgtgacacagctatatgacttgtttcaaatgcctaggggtgcattgcttcacaattcagttaaatgtaattcttttttggattaccgattataaagttactgctatcattctatttacatagaatgacttgttatcatgctctattatataatatttgtataacacaccacagtatttaatgacttcttcaattgtaaggtgtggcgtgttatacacatcattataaatctaaatataaaataaattgaagacatattaaatattgggtatcattgataatgaatattata

SEQ ID NO: 50315 - DNA, 471 bp, Glycine max
  unsure (1)..(471): unsure at all n locations
catagatactcacgctgaagagnntaaagaaagcatatgaggaaaacaatttgttantntatattgatatcctaattatagatttgttgcctgttgcagatatcctccacatggaagaagggcaggtgctagagagcgtggcatcccatgggaaaggctaagagcacctcctattgatacttctccgcatgatcnttcattctccgactgtataaatgatttgtatccgggtgatcacatagagattcaatggaggagaaacaaagaatttccttatggtttgcgcctttctccaacatcttgttttatttatatatttgcattaatcctactaattactgtggctggtaaaaagtctaccctaagagccatttaagttttaccaaacatagaagagaatgactacatactgcaggatcatcgccatattaacagaatcaattaaaggggcagttggatctactttgagtc

SEQ ID NO: 50316 - DNA, 228 bp, Glycine max
  unsure (1)..(228): unsure at all n locations
aaataacaacnaactaatctattgcctttgaaacctagatcttaatttcacataataacaattttcaagtcacatataaagaacatctcatgtacaattatcttgattcacaatagatattaacatcataagtcaaccattcaaatagtcatcattataagtttataaataattaccactactcaaaccaatcataacaccaaagacagactctattccatggggatt

SEQ ID NO: 50317 - DNA, 470 bp, Glycine max
  unsure (1)..(470): unsure at all n locations
ctaagctgccatttataaataaactaaccaggaatgttattaagtantttancttaatctcgggctttctccacacactcacaaccacatgttccacacacaagggtaaacttaccaaaataaaactacatgtatacaaataaataaattcaagtttaaaaaaaaaaggaagagaactaaatattatatactttgaaaataccttgaataatggtcagaaatttataataaaactaaatntatatgaaagtcatctataaacatcaagcgctaacaacatcatagttcaatcaatacatacaacaccatcataacataagtttcatagccccttatcatatcatttatgcatcaattatcataaatcctcacatagctcaatcagcaaaaatcctcgtcatacaccaaaaaataatatggaacacattttattcattaactatcataaactctcatcataactcaatcag

SEQ ID NO: 50318 - DNA, 396 bp, Glycine max
  unsure (1)..(396): unsure at all n locations
gtctganatanattttntaagaagtagtataattttantttatttataataaaaaaatatttcttttaagaaaaatagtttacacaaatgccaaaaaaaacattctaataagcttaacaaacaaatctaaaacaaaaacaaaaatcaagcacaaattctgctcgtcaaatcattacttaagagttgaaattaaagtcagagactaaaaacaaaatgaaacaattttctaaaaataataataaaataaataaatatgaaaaaagaaaaatagaaatcaaaataaaacaagtgacaaaaatatattttacccttaaaaaagataggcatataaatgttggtttgagtggtgcacggaaaaagagaggctaatttgtcgtttgtagtaaagatctagct

SEQ ID NO: 50319 - DNA, 408 bp, Glycine max
ggagcacgaaaatgaaggaagttaaaggaagagaagttgaactttgaggtgtgtctcacatgactctcattcatcaaagttacaacaagtgttacacatgtttctatttatagactaggtagcttccttgagaagctttcttgagaaaactaccttgagaagcttctgtgagaaaactcccttgagaagcttctttgagaaatgtaaagacccgcctcgtcgctacggtatccacactctaatattcgataatttcaatctttataaaaagaactcccttaattttttgagtatgaaaatagaagtgactttgtcacaacataaattcatccaacaacacactatttcttaagtgaatatgcgtaattacatacgaacaataattcagttcatgtcatacacataacg

SEQ ID NO: 50320 - DNA, 456 bp, Glycine max
  unsure (1)..(456): unsure at all n locations
gggagatctctctgggcatcttacgcacacatgagtgncttatattcaacgnnacnaggccgngcagctcaccaattaattgtggaagatggactatgtttaaacttctgaagcttaagtgcctcaaaaatgataagtcccccaaactttcaatgcgccgaacataatcaaacattggagcaccttccgattgaagtacccttagtaacctgaactttgtaggcatactcttcaccaaggattctgacgattcttgatcaccgaacacatgaagtgatcgaatgttcgagctttcaacacttcctgtcaagttgttggaaccagatgctattgctaggtgacgaatcatcccacttctggacaagatccctcgctcgctagcagagtggcaaaagcataaatcttgattcttctcgcggatcatatcacgtactacatcatgaacacgacaacttt

SEQ ID NO: 50321 - DNA, 413 bp, Glycine max
  unsure (1)..(413): unsure at all n locations
agcttgttggattatggggcacccgncatatgttgtactatgtggngattgggcgatggcgcaaatcaactatcccactttcacaagtcaaacataagcataccatccccagttgccctcctttcaactgagctcacgcactcctacgtagcccttatcctcgttcctctcagcaccgggtccccatcaacccctccaagcttccacaatatcgaagcaattcaattccaattaccatgaaactaccctaaaccaagaaaacagggcagagatagaaaactttgcccaaaacacattcacatatcacagctttccttactcatatatcctagtaacattctcttcattccgattcgttaaccatcggatcgacttgaannagttattggaggttcctagtacataaatataca

SEQ ID NO: 50322 - DNA, 469 bp, Glycine max
  unsure (1)..(469): unsure at all n locations
aaactaagcnncccacattgtttctgggtccagtgaggagcatcatctaggtcattttttaaaactnaccccgngggggcgagagatttgcaacaaataacatgcctttgcatggttcatactatttataagcaaaagattatttggtaaactaaagaaccagagaaccaaaaatcataagttgtaaagccgtggtccaacaaaaatttatcatgaacatgcttctttcttgggattatctcacagtgtgaaggtctagatgggaatgaatgtattccaacctaacacattacaatgagtgggcctacaatgatatagagagacctagatgaaggatgtattatgaagatgcacaaggtaatcaatcctcctcccttacattatctccctccattgtgtatcttacctttcttatattgcaattatggggtaacatactaactattaaaaaatttaactatcagaggat

SEQ ID NO: 50323 - DNA, 448 bp, Glycine max
  unsure (1)..(448): unsure at all n locations
agcttcctcgggctttntgagaagttttcattatgtctttttgagaagctagatctttatctacccacacccctctattaactaaattaacctctttgaaaataattacggattaaaataacacaacgaatataatcgaacatcaaacataattactaataatatatagatatatatatcagggggttacactcttgactctaatagtgaaatcaaacaatcactattctattatgaagattttattttcttcacctatgaataatccaaaaatggattatattttcttgacatatgaataacccaagcatgctattataactaaatattcccataatagtctgtgcctctcggatccattgatgttgagggagttgagagtgaaagataaagatagccaatcgcaaattccacccacataacgccacattttaaattttattttcac

SEQ ID NO: 50324 - DNA, 442 bp, Glycine max
  unsure (1)..(442): unsure at all n locations
agctggcggactatacgttcgaccgaacacgggcgngtttctgtctagtcctcttattcaaagcgggctgcagcaccagctccgcttcccttactgtactggaggtggttgtcgtggatttatcctctatggttttctggagttttaacatgacctccgagatggaagccatttgatcttttaaggccgatagatcgaccttcatctgttcctgcacgccctcttcattatccatttttctggatcgagtgttataggggtgccttggtgttttcttagttatgatgaaattcctaaagaaataaacaacagtgagtatgccaccaaaacatgagtatgcaaatggatgatcggagcacttggatccaccccaaggtgttttagataacatgatgagttcagaacttctcattttataaaaagaacaaagctttcatctatc

SEQ ID NO: 50325 - DNA, 440 bp, Glycine max
  unsure (1)..(440): unsure at all n locations
agcttattctgtgccatagtgctcntgttggttatctctaataggcttctctctgtaggaatatgagtctgatcatgtaaaatagcatgatcactagcagccatattctcaataagctccatagcttcttcaggggtcttcaatttaatcttccctccaacagaagcatccaattactacttggattgtggtctcaaaccatctataaaaatatttagctgaattggctcagagaatccatgagttggtgtttgtcgtagcaagctacggaatctttcaagtgcttcactcaaagattcatctagaaattgatggaatgaggagatagctgccttgccttcagctgtcttaaactcangaaaatatttcttcaaaaatttctcaacaaccttatcccaagtcttcaagctatttcccttaaacgaatgcagccacctatt

SEQ ID NO: 50326 - DNA, 431 bp, Glycine max
  unsure (1)..(431): unsure at all n locations
ctaagctcttatgtcctcctatcttaaaccctaantcttagtagtattctaatnccntagnaaacctaacctagaaatcagagtttgcatagataatctctacaatgcaaaaacctatttgtattcctaaaattagattctcacacatttgcaattcagatctagaaccattttttttttccaacacaatttgactcctaaaagcaaggttgatcaagcctaagcatgcatctaagcaaagaattggaaaatgatcacataacaaagaacacaaataagaaattggagaatcacatactttaagctacttcattcaatccaacaacatggagtgtaactacaatggatgatatttggatccaaaagaacagcaaaaatggaacttgctttgtgcaaaaagagagaaattaaagagaaagatggtgaaaaag

SEQ ID NO: 50327 - DNA, 313 bp, Glycine max
  unsure (1)..(313): unsure at all n locations
actatcactagacctgangatatgcttgcagtgaacaacgtttgccaattcatggcaaatcctttggatacttcatggtcttcatcttaagacagctatttggggctttgtgatgcagactgggaatctgatatagatgacagaaggtctacttcatgcgcacccatctattttggtcctaatctaatatcctggtggtctggcaagcagcaagttgttgctatatcaaccacagaagcacaatatataacgttagctcagactactgcagacatatcctggattcacaccttattaactgaattaagagtct

SEQ ID NO: 50328 - DNA, 272 bp, Glycine max
tttccgcgaagaagatccaagccgaggcgctttcgtaacgtttccgtgagtaattacgcgaagattcttgaccgttctttatcatttatcgatcgttcatcgttttcttcatgttctaacggtgtattatctttcacctagctcttcaattcattctttgtacccgtggtggtccacagtttgcttcatgggtttatattctcgctttcattcgctttatataccatctattgacgtgcttaagttatttatttatgttatttctttcctta

SEQ ID NO: 50329 - DNA, 480 bp, Glycine max
  unsure (1)..(480): unsure at all n locations
atagatacnaagctgaggaaaaggcatcttaaagtacctgctttttatcntttcatccaaagagaaggtaaatcctatacggatatgatcatttgagacgcatcaattntcaaattaagagcactgccagacataacgcatgaatgttttgctttcacacaacagcattttcaaagagtgaaatattaccctctctcttaagaagtgcctaaaataataaaattatataagtatttaaagtattagaaatcatgttatatagttcctgaggtattgaaaatttctttaaattagttcgtcaatgttacttagatgtattaacctagagactaaatngatgaatatttctttttacagcgaatattcaatactctatgaactagntatataattttattaacttaagaattatttaagagagaaagtggtacttcaatgaccaaattaatggtttacagtatntcttaaacaaattaaaac

SEQ ID NO: 50330 - DNA, 376 bp, Glycine max
  unsure (1)..(376): unsure at all n locations
aacacgaaaagggcagccgaaaacacaacacaaaccagaaaaataaaagagggagatagatagacgcgnacggagattgggtgaaaagacacggcaaggagtggagcgcaaaaaaatgaggatattaagaaaagagacacgaagaaatttcttgtcgcaatcaccattgtgaaagagattgcagcgtgaaaatcaaagaacaatcaaacaattccaattcggtggaaaccagcaaggtgaatcaatcacgcagtgaaagtgtcagcgaatgcgccgttgctcaaaccaagtatgacatcgacggacgctcatttgggataaacaaaacatattggaattagctactaatatatatttcaaatattggaaactatat

SEQ ID NO: 50331 - DNA, 447 bp, Glycine max
  unsure (1)..(447): unsure at all n locations
agcttgtgactcttggcaannnctttaatttattttcttaaaaaagnngngacttttgaaaaaatcttcagaaacaagtcacttgaagaattatgacttttggaaatgtatttttcgaaatcagtcactagtaatcgattaccattaaggtgtaatcgattacacatcaacagatgtgactcttcattctgaattttgaaaattaaaatgtttagaagctctagtaatcaattacaagtattgtgtaatcgattacacaagtttaaaatactttaaaactgtttaaacataagttataactcttggaagacaatgcttccacattgaagactctacctgcacacttgaagtatgtatttttggatgacagtgaagccaaaccatgtaggatcaagtgcgctcggaataactaagaacgtggggtgaattaatattaatgaaccttac

SEQ ID NO: 50332 - DNA, 397 bp, Glycine max
tctagctatcatggaattagaaaaggggtaattaagtcataagattttaaagtggaaagtattttcataaatgactatacaactagcttaaagatagagttttcatttaattagtacgtgactaattaaagtgtctaactatatgatgtagaataattaaaataacttatagttgaaacaccttgaaaaattataacttaaactgacagagaaaactttgtgtgtgtcattcgggcatatatgaatataatttcagcagttatatgttcttaatcatacgattttgtgttatgtgtgtgcgcgtgattgatctagtaaagtctggtagagatataagaaatagctgagctaaactttcatatgtgcaagaattgcactatatattaagtcacaatgt

SEQ ID NO: 50333 - DNA, 394 bp, Glycine max
  unsure (1)..(394): unsure at all n locations
cctagaaatcagaggtngcatatataatctctacagatgcaaaaacctatttgtattcctaaaattagattctcacacatttgcaattcagatctagaaccattttttttgtccaacacaatttgactcctaaaagcaaggttgatcaagcctaagcatgcatctaagcaaagaattggaaaatgatcacataacaaagaacacacataagaatatggagaatcacatactttaagctacttcattcaatccaacaacatggagtgtaactacaatggatgatatttggatccaaaagaacagcanaaatggaacttgctttggacaaaatgagagaaataaagagaagatggagaaaagcgcaattctacaatggaatacacaaaagtgacaa

SEQ ID NO: 50334 - DNA, 448 bp, Glycine max
  unsure (1)..(448): unsure at all n locations
agctncagcctgattgctaagcgaatcnattccttggttaagcgcgacctannggcgccaagcgcagttccttacggccataattgaggtccatgaatctaagcgccagtcatggaagctaagtgagatttattgcagcaacatgagcgctaagcgagtccctctcagctaagcgcatgctcctctgtacttaagatgcctcattttatctaagctggccagagcatggcttaccaagagttgtagctcttctaatttgcagacctcgctaagcggacataccctcgcgctaagccaagtctctattaaaaaaaaactgattatgaatttgaaacgtcggctaagcgcacgggtccgctaagcgagccttgttgagaaaccaaacgtctctcttgctcgcttagcacagagggctgctaagcgagagtatcggaaaactgcttaagtg

SEQ ID NO: 50335 - DNA, 317 bp, Glycine max
  unsure (1)..(317): unsure at all n locations
gcatcgacangcagatatgaagaaacaaaaagcagacgaacaaaaccaagccggcactgccaatattcaggcacaggctttcagtttncgtgagctagcaactggaacaaagaatttccgtcaggaatgcctacttgacgaaggaggtttcggcacaatctacagagggataattcctgccaccggccaggtcataagtcttctgttttatttttaaaaaacttgtctatggtgaaaaagacagaaactactccaaatatcttcttttggttttcacttaatttgtaaaatttaattgctgagaccccccagcttgg

SEQ ID NO: 50336 - DNA, 309 bp, Glycine max
acgccgcggctggactaaacacaccgacacacgaacccgctcatatgggggttgaacgaactaaaatattatgaacgaaaagacatatttggcggaaagcaacatattgacggacaaataaaactttgaaaaaaagcagaaaatgagattaaagagcgacatgacgagaaaaaagacccgtataatactatttgaacggtgaaaacaatattgtctaatattacaatcctcccgatgttatccttcctccacaaatgtcttttatagatactttataacaaccgagaagtggctctctattaattcaaa

SEQ ID NO: 50337 - DNA, 394 bp, Glycine max
ggaaaatagaagggggaaaaaaaccacaccaaccccaatcccgatatgattgtcactccataaacatgaagctttaatcacttttagcggaacactatatatatattgccattcagtgcattttgtcgttttactagccctcttagtctgaccactacacttggctttatcccatatctatgccatggaggagcttcatcctcctgacaaactctaacagagggaggaggggcaattgactggtgacattaatatcctagaaaacaacattaaatgacaatcataatgcacacaacgacaattatgattctatggcatctgctattaggaatacaaaatccaatctcctacattaatcaccagttacatcactattattgctatacaaagcgga

SEQ ID NO: 50338 - DNA, 368 bp, Glycine max
  unsure (1)..(368): unsure at all n locations
tcagcaacacaaagnacggagaactcataagccctcttgaacaatccatttcctctattataatatgcgacttccctgctaattttgatctctatcctcttcaattcaattatcccccttcctggaaactccctttcttgtattggttaagagatgagagtgttttcttaaatggcctctttgcttagggtaccaaaaggaataaacactagtgaatgaaataaaagaaaaaacttgaaaaaggttgccttatgatgtttggttatcatctctctgccgcatagccactataatatgttaatatgctacacaatataatggcaaactgtttgtgcttgcatactaatgtgacatagattctcatatat

SEQ ID NO: 50339 - DNA, 404 bp, Glycine max
  unsure (1)..(404): unsure at all n locations
tcgcaagggcttgcatggagtgctaacgagtatctctcgctcntttgagtctacgcaactcctacacatcatcatacatcttcaccaaatcttctatcggtgcgacagtcttacggatgcttgacgtatcccatgcctctaatgggatgccccaacacaagacccatactagtctatggcctatgatgatattgctgctccatttctacagtgaggaaaacagcgctcgcccatgcatattctcttcattcgccaattgttccgccttgctatccgagagaccagagaccaaaatcatgtcgacgccgagatacttaagcgcaacattatcacctatctgccagattatgtcggcttcctgtttgtcgaaacttgacattggtcttaggcgaccaacccacgca

SEQ ID NO: 50340 - DNA, 413 bp, Glycine max
  unsure (1)..(413): unsure at all n locations
tgacgcatgcagcttgntctctgaggtcttcacacagcttaatctctaactctctggaactgggacctttctctctctanaaatctctagacatgcagaagcttcaagattatgccaaactcaccttctctctctagaatctctcacatgcagaagctccttgagaaaatggccaaactcttctacaaaatctgattttaggcttaaataggaggctttgttcatgctagcacgcttagcgcaattatgaaccgcttagcacggattagtggatttctgcttagtgcatgcttttctcactcagcggatggactgaagcggtgcgcttagcgaacatgcacagctcatccttcttccagattcttcctagcgctcagtcgaggagggatgtgctcagcggatggctcgctaag

SEQ ID NO: 50341 - DNA, 480 bp, Glycine max
  unsure (1)..(480): unsure at all n locations
atagatacnaagctncatagcgtggctggngtgtgattggcggatcgccatanctanctttaagccccccaagagcaagcaaactcagaatggacatgccctcctgagttcgagttgggaaactggcaaactatcgaacaacccaaaatgttcatggcaaacataatgtaatttgttagtccaaaccctatagctgggcctaggctttagggtttccccctttttgggctcgtcttgtgctatcaaatatatacaaatacagctcttctccatttgttcttgcactttcacccattctcattcgtctgcatgattattaatgtagcggctaaacggtacaggtccgacaatgagtcctcttaaggtactaatatcgaggacccagacgtcaattatgagcagctagtaaaccacactagggatgtagaagatgaagattgcgggctttccccacagctacaaagaatggtataacaggaa

SEQ ID NO: 50342 - DNA, 424 bp, Glycine max
  unsure (1)..(424): unsure at all n locations
agctngaactcatcaactccatcttcattttgtattatcttatctaaagntgaatttgaaaaaatcatttgtgacatgcctgtcaatctcaatatcacattgtttatcttggcctttatataaatagnttacacttatagattcaagtaaaacatttttattctactcaataaaggcttctttttactattttaaaaggtgaaatatattagttttatgatttggcatcaaatatgttcgtgacattgtgaaccaaaaactacattaaggaatgagcttagactntgttgttgcttgtaatttatcttgacacaggtaaagttagaggaaaattgtgaaggggtttggatgagaaattttattcgaggggggaaagttcaaaatttaaagagttttaaaaatttggggagggaatgacccctga

SEQ ID NO: 50343 - DNA, 379 bp, Glycine max
agagaatgagttcaagattgaatcccgaacacatcaagaatgaagaggaaatttgatttctagattcaagaatcaagtttcaagatttaagcttccagaatcaagaatcaagaataatcaagttgaagattcaagaatcacgtaaagactcaatcgagataagtactaaaaagtttttcaaaacattgagtagcacatgaatttttcacaaaaccttttaccaaagagttcttactctctggtaatcgattaccagtttattgtaatcaattaccagtagcacagaatgttttcaaaaagctttcacctgaatttacaacattccaattgatttcaaaacggtgtaatcgattacaaggatctggtaatcgattccagt

SEQ ID NO: 50344 - DNA, 440 bp, Glycine max
  unsure (1)..(440): unsure at all n locations
ccaagcgacgcagctgcagctggaatgcattggacaccattttaattctcatgctgtacctacatataagaaacaggcccactctcccaattttacaaaatcatacncatacattattgaggcatttcaccgagcacttggtgagcgcatgtttggacataaatcgcaagaggatggggacaatgtggcatgccccattgcttcagaacacagcataggcctaaggccttctcattcaaatcctcaactcaagaaaacaagcataaaaacaaacaaaaactgccccacaaatatgagcacattctcacaatttggagcaccaaaagatgaagaatatataccaatgggaagctaaaacatcaaggattgaatacttactcgttagagtgaatcataacaccaaaaatgaaagcaaaaggcaacccaaagtggcttgaggg

SEQ ID NO: 50345 - DNA, 368 bp, Glycine max
ccacaccgccaacggtacaaaatcatattcatacatcatcgaggcatttcaccgagcacttggtgagcgcatgttcggacataaatagcaagaggatggggacaatgtggcatgccccattgcttcaaaatacatcataggcctaacgccttctcattcaaattctcatctcaagaatacacgcataaaaacaaaccaaaactgccccacaaatatacgcacattctcacaatatggagcaccaaaagatgaagaatatataccaatgggaagctaaaaacatcaaggattgaatacttacttggtggagtgaataataacaccacaaatgaacgccaaatgcaaccaagagtggcttgaagaaacaa

SEQ ID NO: 50346 - DNA, 192 bp, Glycine max
cacgaatttgcattgagttcagattagaactagagaagacacgtgatgccatgaagagctcaaacacactatctagacgacgaggactttcacttgaaaactgatagtaaagacctaacgcctattcccactctagatcgtgagccggcgagataaacatttgaccacgaaaaagccacacactcatggact

SEQ ID NO: 50347 - DNA, 420 bp, Glycine max
  unsure (1)..(420): unsure at all n locations
agcttcggtttaggtaagggaagattctcttcctttaacggnngcacgccaangaaaatgaaattgacaggacatctctcatcttcttttcgctcctattggactaggatcaaggattctttctttttttttaggtatcatttaatgtgagtttgatgttctcgataacacaaagataaattttaatagttgtaaataaaatatgataatattatcttacttatcttatcgcgttagtctaaagtattttttttttaattgagagaatatagttggattataaaacattaaggacataagttacttacctcgtgttgagttcgggacaatctaagattcaatccaacgagtttattattttttgttaacaatgtttccactcaatctaacttgactttaataggattatcgtgagtcgat

SEQ ID NO: 50348 - DNA, 412 bp, Glycine max
  unsure (1)..(412): unsure at all n locations
ccctactatcancnggataggggaagaatctccatattagagaattataatcgtgtgctcctattactacctttaattactaagtgcctatcttagctctcccaacagtaataatagagtttagttttgaatttgagaaaaagaattatgcaccttacaaagtttatatagtcattcaattataattattatatatgataagtttattaatttttataataattatcttaaaatagttcaaacataaatttatgattgaatgactctaaaattattgtatatgcattaaattctttgaattttgatagattagttgaccatttaaaaaaattgaattcaacttttatctattagtatcgtagaaatttacaccttgcagtcaatcaatcaagaaccatcgttagtatcatat

SEQ ID NO: 50349 - DNA, 446 bp, Glycine max
  unsure (1)..(446): unsure at all n locations
agcttatgcgcatgtttccttacgttcgtttatttgcggaagacattctattaaccgaataaatgcacccatatacaatcaaggcagctttgttacctattatttttacacgtacttccaaggtgtatttgttacttacatcacacacatctccttggctaaattcacatacatgcatactccaagcattttggggtaccaaaaattgcacatgtgtacatcttggtatttctaatacctatacatacacaaacttcatgatgaatcttgactatctacacaataaggtgctacatttcatgcccttcttttcaagtttttgctacctaaagccgcatgcaaatttaagcatattttccttcgctgactaacattgtattcatattatatatatatattttggaatatgttnttttcatacaacattcaacatatttatatatatt

SEQ ID NO: 50350 - DNA, 471 bp, Glycine max
  unsure (1)..(471): unsure at all n locations
taaactccgaagagagganatggaccaatcacgagttactgntttatcttgaaagatgaattgaaggcttgctcaaggtccaaaagaagtttgtctctgcggttatgctagacagagaccaacatgttggctgttatcaccaagtaccaagaagaactaaatctagccgcggcgcacgagcatagagtggcggacgagtatgcccaagtgtacgcggaaaaggaggctagaggaagggtgatcgactcgctacatcaagaggcaatgatgtggatggaccgatttgcccttaccttgaacgggagtcaagagcttccncgactactagccaaggccaaggcaatggcggacacctactccgcccttgaggagacccacggacttctcggctattgtcagcatatgatagatctaatggcccatataattagaaaccgttagggaactcgtattgtcactcagatcttgact

SEQ ID NO: 50351 - DNA, 256 bp, Glycine max
tacttgcgatgctaagcactgtctattgatgccccttgcctctttcttatggctttgttaggatgatactgctctttgaggcacatgcttgcggatggttatttccatgccgatcctcatacaggataccttggtgcaataaatgatggatctcttgcgtattttgtctctggagtgatgggggatattccatggcattaccggactgggcttattcgaatggtgagaaatgcttacatattactcatttttatgg

SEQ ID NO: 50352 - DNA, 376 bp, Glycine max
ctttgaagtaaaatataccaatcgaaagatatgcctcatgactgtgggaagcctttgagaactgaaagatggagagcggtgttgcctacttcatcttgccaatttaaaacccttttttcccggtcctcagcaagtctttggcaatttctctgaagccatccaaccaagacctccaaggccttagactgatcatatttcacagctatgtgcaacgcagtctcacttcggacggtcacatcttcaatggaaccagggcaagccgacaagaacttagccacaagatcagttctcccagtatgagtagcaatatgcactgttgtgttcataatgcgggtcttcaaagactggtactcgtagtacagtgccctaattatgc

SEQ ID NO: 50353 - DNA, 386 bp, Glycine max
  unsure (1)..(386): unsure at all n locations
agcttgccgtggagcaacccacttcngtcctatcttctttagactggggaaccctaggctcttgaccttgacttgatagaacctccttttaagtgatatgtatttgacttgatcccatgttgtactaaagtgaacaaaaatcggtgcgaattaaaactccgacatctatcatgggtggaatggataaatgcatgaagaaatgcatataacacagatgcaatttatgaatacgggagcccacgaaattgtctccgtatttaagaaggtggcacggaccctccgttggtttgccaaagggaggggaccaaaacagaatccgttcatgatgcatatgccaaaggcgcagcacgggagtgtacaatatgataatattcacaaaatattag

SEQ ID NO: 50354 - DNA, 447 bp, Glycine max
  unsure (1)..(447): unsure at all n locations
taagttctctgattacatgttcattggagatagggagtagtggttntttgtttgctnttgcagagaggtggcacaaggaaactagcagtttccatctacccataggagagatgagtataaccctcaatgatatgtgtcataccctaatttcgtccggggatcattgtttggtggcatgcaaccttcgcttggtcgcctcaaggtactcaacacccatcgttaggaaatccgtaaagttccgtgacattccgaaagtcaaaaagaagcattgttgcgcaatccataaagttctgcaacattccggaagtcaaaaagagtcttgttgcgtaatccgtaaagtttcgcaacattctgaaaggaaaatgggtgtcgttacgtaatccgtaaagtttcgtaacgtttcgggaaggaatctagcaaaaagaacacgagaacaggagtgtattt

SEQ ID NO: 50355 - DNA, 313 bp, Glycine max
  unsure (1)..(313): unsure at all n locations
gcttgaaccgacggcactanttctgattcgactaccacaggagcacttcagaaaacattctcaacagtcacatccttctatttgcttcttagctgcccatccaaggcttatatatatgtgacttgcgacacgaatttaacatgagtttccaagaacaacaaggtcttatcctcttacaaagcaaaatagctttatcctcttacaaattccttcgccaatacactcgtgattcaataaggaattatttgagcgctcacattgttcaatctatctctttcaagagagatctcttcttctcttcctctttattctg

SEQ ID NO: 50356 - DNA, 321 bp, Glycine max
  unsure (1)..(321): unsure at all n locations
ggacactaagaaactcagctgactggcgagtgacttagcctagtttactttanttttaggcaaccccncagaacgagatatccaaagagaacacgccgactgattactcgcttttattctactaaaaggagtgtgatgatgattatattattatatcacccccttttttatttacaacgagggtaccgcacgaccgaacgggcagaattcattttaaccgagatcaacggatgataccaatcaaacgatcggcggaaaatttatttattttttgatctagcgagaaatgactcatataatgggtttgcacgcctaatgagg

SEQ ID NO: 50357 - DNA, 303 bp, Glycine max
agctcagaggcacaacaacataggttactttaagaagaagagagcacgagcaaaacagggcgcatatgatataactcagcacgcaggcaccatttattttcacacgaacactgacggcgacagagttatgttaatgacaccacaccacttggtcaacaaaccgatgatagcgacgtgacgcttacagcggatcctaagaaaactgatgttaacagatacacattatttacacctatgccaccacgctcatgataacatcggctgtgtcaaaaatcgatgataagctgccgatgatacacatgc

SEQ ID NO: 50358 - DNA, 385 bp, Glycine max
ggctaacccatggaagctcctaatatctccacacttttttttatgggccattcttggatggccttgattatctcagggtccacttggaccccatttctaccaactacaaaacctaagaaaactatattatctacacaaaaggtacacttctctatatttgcatagagggcgttattcctaaagactgaaagaacttgtctgagatgtcctaagtgatcatctaggctcctactatacactaaaatatcatcaaaataaacaactacaaatctacctatgaaatcccttaagacatgatgcataagcctcataaaggttcttggtgcattagtgagcccaagaggcatcactagccattcatacaaaccaaacttggtcttgaaag

SEQ ID NO: 50359 - DNA, 384 bp, Glycine max
  unsure (1)..(384): unsure at all n locations
agacgcataacaaataagccaggctattggcactttttttggcttaacacaccacatgattatgatgatggatggctcaaattctcacaaaggtaaactcatcactttcaaattgagctttcaaaactatcatgacatgtagaggagaatcaaggatttcaagtcacaaaatgtcaaaaacttttattctcaaaacaattacccatttcttgaacatatcctataattcaaagaaaaaacatgcaaagtcgtacatgcacacaaaattgacccaaaaaattaaactaacaattcgacgaaactaacaacattaacaaattattcaaaccaacanaactagccaaacccaagaacactcctcccccccccatacttaaacaacac

SEQ ID NO: 50360 - DNA, 402 bp, Glycine max
  unsure (1)..(402): unsure at all n locations
atcctanacacacaattacactaaacacttttatatcttaaaatgtgactctgaatctaacccaacctcaaaagttagctcacaggatgattgttcttcacttatattctcactctatcttggncttatctttagtcaatgggaaacttgagttttttcactccctcattcccaacacattttgggtttgatgtcatggatagcatggtggataatcctttgtatggatttagtataagctcttgtatcattttagaatgtagaattgtacttaactcaagtccaaaaggtagctcataggattgcctttcacttttatactctatcttggcctcatctttaacaatgtgaaacttagaattttttaatagaaactatanaaaagacataaacttattacat

SEQ ID NO: 50361 - DNA, 458 bp, Glycine max
gtgcaagctggggagccaccaataccatgaagcctgtgcatggcttcttctgcaagctgctaaagactgtcattgaaagcacacttaactatcactatctagctacttctagagcaatctttcttagctaatcactccagtcgtgtggttaccttcagaaataagtctatgagccatgttgataggacgcatatagtgggtaatgatatcagttggcaaaggagaagctgcaagagcgagatagagcttcttcacctttttctcctgaaaaaaaaaatgattgcacaagtactccttaataacatgaaaaatgcaataccagatacaattaatttttatcttcacttggtgaagaaggcactctttcatacagtacaaccccatctaatgacccacatagctcatttcttatatgagtgtgccttttaagtagtagaaggttatctaacataacatac

SEQ ID NO: 50362 - DNA, 481 bp, Glycine max
actaagctgcgcatatcacatgaatgccctacttgtgaagagcgttcctttttttctgtattcaatgagaacgatgaggtgttgcttatggcacatgacagctcgcaagaagaggtgtttaatgagtcaaatgtggaaatgttgtttcttgactctgggtgcaccaaccatatggatggaagaaaagataggatattcaatcttgatgatcgtttcacagattttgcaaattgggtgataactgcaacatgcctgtcatgggaaagggaaatctgaagctcgttattggtggattatttcatgtggtaactgacgtttactaccttccacgattgatgatcaacttgctcagcattggtcaccttcagcaaacgaatctcaccattgtcttctctaatgattcgcgcaaagtctatcatgataatagaggcttaataatgtcaactccaatgtctcgtcaacagaatgtacatcatacatg

SEQ ID NO: 50363 - DNA, 324 bp, Glycine max
gccatcaaccgagggaagcgaggaaactcaatggcagagcgacactgaaacagcggcaaccaaaagacacccccaacagccaacaagacagccaccagttggtctcccagaaggctgaggcccacgaagacaatcgggccaccatgacaacatgaacaaaacctaacaaaagcgcgtttagtcgatcaacccaaaacacaacattgggcagccaacgtcacaaggagcgggccaggataaagacaaactaaacactctaaaaaggaaacaaagaggtgtcaaaaagacctccgccattagggccatgacacaacgcacaaccta

SEQ ID NO: 50364 - DNA, 449 bp, Glycine max
  unsure (1)..(449): unsure at all n locations
agcttcttntactagttatagattggcactttnttgatgttaggatggactgacacaaattcgcattgatataggaaggggtaacagatcgccggatctatatattataaatgccatgcgccataccttaatttcgtccgaggattattatttgatgatatacaacctttgattggccgcttcgagatacttggcaccctctgttgcacaatatgtgaagtcccgagacgtgccgaaaatcaaaaggaagcgggcttacgtgatccgtgaaaattttgtaatgtgacggaaatcgaaaggaggtgtttttcgcaatccgtgagttttcgtaacttcttcgaagctaaaaaagagtaaatacataatcccgaaggattcgtaaccttgcggaaggaaaataagtatcgctacgaaattcgtaaagtttcgtaccgtacggaatagaatta

SEQ ID NO: 50365 - DNA, 465 bp, Glycine max
  unsure (1)..(465): unsure at all n locations
tnctcggggccatntactgcgagaacaaacttttttaagtttgttntaccaaacaaggcctatcttaatgcagaaaatgtcatgctcatccctctaatttgtattatactcatatgatccattcatgcacacacgcatgtgtagaaaacaccctattatttatatcaacatacaaggatattcagaacattctagttaccacacatatataaatttctattggaaagaatacttacacgcatgctcaaggtattgtgcccatatgttcatatcctaaacatttgctatttacaaactacctatacatgttacaaaattataacgcgtgtctcatattcatttatatgcatgctggaaagctagatacattatgcacacactcttgcatttgataaggaactcttatgccatctatctacacttgaggcggaatgcacatcatatatttatttggaagcaatctcg

SEQ ID NO: 50366 - DNA, 455 bp, Glycine max
  unsure (1)..(455): unsure at all n locations
agcttcaccacgaagagactgccttgtatatgatatcttatggaggaagcttcaatggagaaacaaaatgagagagagagagagagaaagtggcctgaaaaattgaatgaagaaagggagaaaagttgaactttgaagagtgtttcacaagtttctcattcatcaaagttatgacaagtgttacacatgcttctatttatagcctaggtcactaactaaatgaaagcttccttgagaagctagattttagctatatacccctctaatagctaagctcaccttcttgagaagctagagcttagctacacacacccctttaatagcaaagctcacccccatgccaaaatacatganaatgcttagctacacatacccctctaatagctaagctcaccccatacccaaatacatgaaaatacacaaaaagtcctactacaaagactacttataatgcg

SEQ ID NO: 50367 - DNA, 394 bp, Glycine max
  unsure (1)..(394): unsure at all n locations
ctcagctgtcccccctcccacctccatttgcgccattcttttttttgttgtctggatgagacnctccaaattatttcaaatttatctatttctcataaattgctatattttatttgtcgcatgttttttttttgcaggtggtcatcttgtgtacaaattgctgttagtttaatttgtttattattttagttattttttattaattatataacaaattgcctatttgtgttacggctgtttaatttttataatataaatttaattaagattcataataaatattactataataatgttattatgcgtatttaacaaagataggcatattattattatatataaaatatatatatatacgcgttcttatattattttctgaaatttgtgaaatcga

SEQ ID NO: 50368 - DNA, 329 bp, Glycine max
  unsure (1)..(329): unsure at all n locations
agcttgaaaaaccaagcaaccgaattatctttttcttttgtgatatncaatcacagaccctatcagaaccaatgtaggaacgacaattacggccccatattatttgtatctatattcagcctcacataattcattcatatataagaaccgattctgatttattagctagctacaagaaaaaaaataacattagagacgaaacaattcatatatcaattttacgaaatcatcactaaattttctgcgactctaacgaagaaaaagcagttctaatttatcactaaattgcatgactaactttttattcttcatagcgctcgcaactaata

SEQ ID NO: 50369 - DNA, 438 bp, Glycine max
taactgcaaacaataagtagcagtattaataaccatggaatgttacagtttaggcattcgaacaattgaaggcataattgagagactgtaggtattataattagataaatagttggctttcatgcacataaaaagatgcacatctcattggtggctgttatcacctaaacttctaacgtggcaagaataatgtttttattctatgcagttggttccagagatacacagaaatatcaatctgccaaattgcacagatgtgaagtagtgactcctagtaatatgcactcttaagaaactagaccacaagggatatatgaaatttattctgtttactaatttacaagtcagtggaagggaaaaaaaaaacttcacttcaaggaccattaatattcgacatttgaaaagaaaatttacttacagctggtcagtgaagatatc

SEQ ID NO: 50370 - DNA, 336 bp, Glycine max
  unsure (1)..(336): unsure at all n locations
aaaggaaccagagccaccaccgtatttgataaccaccgtttctggagcaccgaacaccagcaacgcttggaggtcattataggatggtcgctccacagagagaggggcttccagttcatagaggatgagtacacaaatcttcaggaggagatagctagctgacattggacgtagctggtgactaccatggctaattttgaccctgaggtagtcctgcagtttcatgctaatgcttggcccacagaggaaggagagcgagacatgcgttcatgggtgaagggtcagaggatctcctttgacgtacatgcncttagctaatcccatgagacccgctat

SEQ ID NO: 50371 - DNA, 452 bp, Glycine max
tcctctaccgtaaaataatattatcggcctttgtttttttaagaactgcgcaatgtcggctgaaaaatatcagtcgtggctatatcacgaccgatgtttttattttcgtttcaattcaatccctcgaaaatttttggatattgcccaatacgaaatggtcgatcggcgtcatcaggtgatgcttgcttcttattatacacctgctggagcggtcatctttcctggccgacatcgactatcattttttttatcagtgtcggtgaataatgttttttggccgaagcgggctgatgctttctagccgagtaaatgagaacacaccagtgtcggccgagacacagcttcggatgagctcccacgaaaaaacagagccgacctacattgtaagctttgtatgcgacagcgaacaaccaaaccacatcctctctacatgaaaaactattatcggctgc

SEQ ID NO: 50372 - DNA, 345 bp, Glycine max
tgccaccagctccgtggaggcctctcatcctgtacatgaccatcttaaattattttatggggtgtatgctggggcaacatgacgaatccggacagaaagagcgcgcctgtcactacctagacaagaggctcccgacctgtgagatgagctactccttgctcaaaagaaagtgctgtgctttagaatgggcatcccttctactaacgcagtacatgctgagccacactacctggttgatatacaagatggaccccgcacccacatctatgaaaagccagctctcatgcgacgaacaagtcggtggctagttcagctatccgagttagacataatctacacccccca

SEQ ID NO: 50373 - DNA, 364 bp, Glycine max
  unsure (1)..(364): unsure at all n locations
tggaagcnccggcanccaagcatgngatcattgcgaactcagcgtattatctgtgcattggagcatatcagcctccctctgaaaggtataatcaaagcgtgcaatttctcgggaaaggactaactttaaaacttagaaaatccttttgaaaaatcagacttttcgataaacgtctgcttctcggccagtgcataatcgtacatgcgctaagccatgagttgcaagcacttagcgcacaaccctagcatttgaggctgactatagttgctaagctagccaaggttagctaatccaatataaattcaagtagaattcagctaagcttcgccttgatggaagtgacagctatctatggctaacggga

SEQ ID NO: 50374 - DNA, 465 bp, Glycine max
  unsure (1)..(465): unsure at all n locations
tgtgctaacactnttctttacttgaaaagtatcttatatatcgatatgtatgaggactcggaattaggataaaatctaagtatctgaatagcatcaccacattaacaaataatataaatgtcatgttatggagagcccgataaaaacaaaacaaattaatgaagcctacactaaaaaaaaagtcatgcatgattgcatgttataactattttgttataattatcttgataccatttaccaactgtcgctgttgtgcctaacaaccaagtgtcaattagtggctgtgaagatcaaccacacaacgaattaatgactaagaccttgcaacaagaaaaccaactgaaatgtttaaaaatgtgctcatttgatcttttaattagcgtttacaatttccattttcctacattatgaaatctgtactttagaagaaacaatacaccagtacatagaatagtatatcatgct

SEQ ID NO: 50375 - DNA, 90 bp, Glycine max
atacactttcatcatacaatgcacaaatacttaatcaaagatggctatatatgtatatatatatatatatatatatatatgtatacacat

SEQ ID NO: 50376 - DNA, 595 bp, Glycine max
  unsure (1)..(595): unsure at all n locations
agggggaatatcagtgaatatgnctnacacnncatactnttanagctccactgcanggaanncatgctatggctaggaatccaattttnnggtnntattattagannaagcatgannatagggactnntttgtangggattgagttgccncatgattggcactntgcactcaagtaacgtgggagatgctnttcantggtgtgtagatatatgtgaatatatggcatataaatatgttgcaaagtgtgtgaatatatggcataagaataccttgcanagtgaatgaatagtanataatgcatttcacaatatgtatatttgtggataagtagcnatagggagcctttaaannataatgtccccgtgccaaagatgcgacnagaatgcttccaaatgatttatgatgtgtaattgcccctcagaagtggttgatgactgaaagttctttcaatgcaatggaggcgtgattaaattggcttcaaggccttttctataattatatgatggacacaaaaattgtgtttaaaatttcatgttgtgagttttgtggaatataagattatacatttattggccgaccctcactcctattatt

SEQ ID NO: 50377 - DNA, 439 bp, Glycine max
agggagacgtgatagctgaaggtaccaagacgattcattgcatggccagggtaatcttattaggatatgatatattgatggaacatatgaacagttagagtatataaatatttactgctaatagcaactactatgcagatttctttactgctcacctgactgaactgatgaaacatactatagcagatatgcttaaacctacataataaacatatgttataacattgagcttctctcagctgcatctgtgactatagagatggcctatggaaaaaggagaacaataagactttagacacttaatttggattaagaaatctatcctttagtttgggccgtacattacaataagggcaactctaataatgtgtatcactgctaactcaaagttgccgggaacagggcgaatgccatcaattgcaaatttttgcaacctggg

SEQ ID NO: 50378 - DNA, 178 bp, Glycine max
  unsure (1)..(178): unsure at all n locations
aagaaaacgttcgatgattnttttattttatttattaaagaatttgatatttattatatttttcaagaatttgatatttatattatttgcattttggttaaccgggtacaggtgaacacggtaatttgattacagtgattaacagatacaccaatgacggtgaatatgtatattatta

SEQ ID NO: 50379 - DNA, 230 bp, Glycine max
  unsure (1)..(230): unsure at all n locations
tgctctcataaacccaccatccnctgttgcccacctccatctaagctcacgtactcccatgtagcccatatcctcatttctctcaacaccgggtccncatcaatcctctcaagcttccacaacatccaagcaaaacaacattcanactgcacaagctatcacagccaagcaaaacagagcataggcagagaaacttgccaaaacaccaaccaaatcacagcttttctcac

SEQ ID NO: 50380 - DNA, 215 bp, Glycine max
tttaagctactactctttataacttactactccacccatatactagctacccatacaaaacataaatcaaaaaagtctactcaagacactaaatgcctaaacaagctaacccttactacaaatggcaaaacaagccggtaagaaactatttatttacaaatagcgctctctaccctgctaatcactagtataacctagcttctgatttacctacc

SEQ ID NO: 50381 - DNA, 219 bp, Glycine max
  unsure (1)..(219): unsure at all n locations
gatacacgtgtatgagcataaacaatcaatctacaaattatacataatttattggaaaataaacttatcttatntaaatgactncnttgcacaatttaataagttatcaagaatatcacagtataccttaaaatgttcattatattatatnagataattagaatttgttttatctctatctngatattaaaaaaatatcacangtaaagtctttaatct

SEQ ID NO: 50382 - DNA, 239 bp, Glycine max
  unsure (1)..(239): unsure at all n locations
tgaacctatgctganatattacaatagacctcctaacctcatctcanaatattcccagcagagtcaatatgacctgtccagcaacagatacaaccctggatggaggactcacnctaacctcagatggtccagccctcagcaacaacaacagcagcctgctccttccttacaaaatgttgctggcccaagcagaccatacattcctccaccaatccaacaacaacaacaaccncagaaac

SEQ ID NO: 50383 - DNA, 282 bp, Glycine max
  unsure (1)..(282): unsure at all n locations
acatagatcacagactctngcaacaggtgccgatttctgattcatggcangctgagttactatggtgaccaatgcatcaagtnttccctcaagctctttattntcagtagatgaagatgaatctgtgggcaccacatggactcctctacggacaatagcatcatttcttgcactgaattgttgggagttggaagccatcttctcaatcaaattcctagcttcagcaggggtcatatcaccaagagctccaccactggaagcatcaatcatactcctctccat

SEQ ID NO: 50384 - DNA, 163 bp, Glycine max
atagaatcaagaaagaatgagttcaggatgttcatgatagaatcaagaacactctaagattcatgaatcaagatcaagattcatgactcaagattcaagaatcaagagaagacttaatctagattcaagagtcaagagtcaagagaagacttaatcaagacat

SEQ ID NO: 50385 - DNA, 200 bp, Glycine max
cgagatccctctgtatgcggaccttttacattcgctatgtcccaaggagtccattcatcacacatacgcgtatcaccacagatctcagctgcgattaccgtcatacgcaaacttactctatgcatatggcgggactccgaggtctcacccttcgagggtactagactgagaatggggccggctcgcaaagtgctatcagc

SEQ ID NO: 50386 - DNA, 230 bp, Glycine max
  unsure (1)..(230): unsure at all n locations
gacaagtgatcatgatgtgaagcctagagcaagcctcttaatgttgatactggagtntcaagtgtgaccacattgatctttacatagaanaggatctccanatgtgctggtctaaagccactgaaggatgttgctgtagaattgtgttgtatcacatgactaccacagtaccactttcatctatcatatgactttcactgctcatctcaatatcatgaatcacatccatc

SEQ ID NO: 50387 - DNA, 616 bp, Glycine max
  unsure (1)..(616): unsure at all n locations
tgganncacnnnnnaaggannnnnaacgactcnactagcatatagannttgctcaagnngaacccaaatanataggttgcttcagaattcacacatgcccatanntttttggcttatactgantatcatntaaanggcgngaattggcggatnntatatactaaagaagccacttatcattttgaagggtgcttcattgcaagacanaagtactatctggtgaaagacaagctntccaatttctcatatcctccatttcgtcactccatgtgtattatggtgttacccatggaatgggtagctagatcttgttcgtatttggggatagatgtcactaaatcttatcctctcgattntntctttcgaaatancgttatatatgcaatcttggtctcatgggaggcgttacatatacttgaatgcttgtctgattcgtattgggaatgcttcatacttgattttcatgagatgtgatcgaaaatatatcttatcttgatcgtatacacatctataacctagatcttgataggtcggatatgatatcttaagcatagctgaacacgtcttataatgntgaaaatgcattatgagaactcgtctctcactagaataggtt

SEQ ID NO: 50388 - DNA, 243 bp, Glycine max
  unsure (1)..(243): unsure at all n locations
tataatatcttcttgatatttggttgcatgtatggtgatgttctagcatcgtttggatgcangaaaacatggttcacgttcctcatacaaatacaaaaggaagtaattatgccatccataagtgcgtgactttgtataaatgtgtttgtcttagagtatctatttagaaatatcgatattaatataatcctctttaagatcgaatttagtcatacattctaatatattagtcttttttattat

SEQ ID NO: 50389 - DNA, 215 bp, Glycine max
  unsure (1)..(215): unsure at all n locations
ctagatgtaatatcaatgatagagacgaactaatacanatatctatgtgtcttatatgctttctatttcttttttgtttaaactgacctanggtttgaatttgattnttgttgaaaactctttcaattntgcanaatttgntcctatcgtttgaacttgcatttgtgaaaatntgttatctgtattgataaagtatactntacacgataactttg

SEQ ID NO: 50390 - DNA, 299 bp, Glycine max
  unsure (1)..(299): unsure at all n locations
ctctggtaaacatctatgttccttcatagttgttgctcagcnattccatatctctntggntgncttcagtctacatatctttntatactcattcctagataaagtgcatgntagaagtatatgagctnttgcgtcaactccattatagntaggtctatgtctgtcccttctgctttagatntangaatgggtatatcttcaattgtgatgatcagctagagtctgtactgagtgngagtggagtatgtntggttgcattgtggaaacccctagatgtggatcaaaaatggtcaaacgtg

SEQ ID NO: 50391 - DNA, 165 bp, Glycine max
  unsure (1)..(165): unsure at all n locations
ttttttgtcaatgtgataaagaggtcactgctggactgatcagcagccatgacgaggaaggactgaactgaggcaatcttagtgactacagaanatagtattcgtgtggccatgaccatagatatgtgtgtagtacttggctgctaaatgagcaatggtcaatat

SEQ ID NO: 50392 - DNA, 224 bp, Glycine max
  unsure (1)..(224): unsure at all n locations
cctttcaccaacaaaggttngaagatcatcaaacctatccaaaatctttngaagaagagaggaatcttctccaccatgtccttcttcatcaataggtcgagcaccctttttcacccaagagccatcatgctctttttgatatccaaaggatgcaatgacagcagcgcctattagaaaggatctcttgattgaacataaagtcagaatcagagggatgttaagtg

SEQ ID NO: 50393 - DNA, 258 bp, Glycine max
  unsure (1)..(258): unsure at all n locations
catagaatgaatcatcttacaaagttagttacatcagttggttatatagttagttacaagagtaactaactcacaactaactgaattaactcttagttacatagagatcaaccaactaaactaactctaagctaactntagttacatagtaatctatcatctatgctaagatataatacctgggagtgctngcataatagaattattggctttcactactcatattttgaatggctcaataacgctagtctttgtcta

SEQ ID NO: 50394 - DNA, 209 bp, Glycine max
  unsure (1)..(209): unsure at all n locations
aacagatgtgacatgaaccattgctgctatngtaagaaatatactaatagttatggtatccttatcgngtatgttgatgacatgttgatngcaggatctagtatgacagaaaataacaggttgaagcaacagttggcagaaaactttgaaatgaaggatcttggtccagctaaacanatccttggtatgagaattcttataaacagatc

SEQ ID NO: 50395 - DNA, 181 bp, Glycine max
  unsure (1)..(181): unsure at all n locations
ataatatcgtnctcatacaccaagagggctgtgataatcgaaccagtgaatcgcananatagtgagtgatctgagtgagatntttcanaaccaagagatattaggagacccgacaatntcgtgaaccatngaaggctngcctgcttgagcccatanagtgaacgctgcaatcgacacacca

SEQ ID NO: 50396 - DNA, 267 bp, Glycine max
gatgcatgacgattcgctagagtgcatcttaagttgaagaacacatattatctgatttatgtttgagatgctatctaatagataaagctgttgatgatccattccacaggactgtctgatggtatctgcccttgctatattgtgtgtgactagcttcatgtttctgtctgctcgtgtgaacattccacactgtaacaattgcaatgggcatataatatgtgataggaccataatgatggagaaactcccctttgttccatgttgttt

SEQ ID NO: 50397 - DNA, 261 bp, Glycine max
  unsure (1)..(261): unsure at all n locations
taaagaacanaatccaaggatatcaaagagagaccaaacaaaacatttacatatntcccaatgaacatcaaggaatgaaaggaatgggtaacatctaacatganaggatccaaagagtcaagacattcgtgaatatcatccaagcaacccaatcatgacaaaatagttaatcagcacaatgatgagnaagtgataagcctcacaagatatacactntatctctcaagtgtctaggctactggttactctcgaagcacccat

SEQ ID NO: 50398 - DNA, 300 bp, Glycine max
  unsure (1)..(300): unsure at all n locations
ctctagcaagaggtttagtgaagatgtcagctagttgatgcccactatcaataaactcaatgcagcaatcaccctttgatatatgatctccaagacaatgatgtcttatctctatatngttggttctaaaatgaatgatnaggattttagatagattgatagcacttgtgttgtcacatttcaagggaatgtgatcaaggattacttcanagtcttcaagttgttgtntcatccagagactttgagcacaacaactnttagctgcagtgtattatgcttctgtagtggatagtgctacac

SEQ ID NO: 50399 - DNA, 257 bp, Glycine max
  unsure (1)..(257): unsure at all n locations
caatatacaaaaatcganactaanaaattaaacannaaanaaccttgattctattagaaaatatttgtcaaactggtcataagcaaaatgaaatttaacaattaaaataagcaaaagcaagactaattntaggtaaaaataatatttttgtttgaaacanaccaatgtcaattatgaaagaaactattgtgaagaagcttctcgggtccttcaagcttaataagatcttgtgcaaacgaaacacanaaatacaatct

SEQ ID NO: 50400 - DNA, 477 bp, Glycine max
  unsure (1)..(477): unsure at all n locations
agannaaggatcccatgatntcttgnacnaacncngcaatgtncnangagtgagcnaaggccacttccttttctggacttttagctttaggggaaatcgacttgaacctaatctcccgctgtgcgtcttgggcatctcgttttgctcgcggccgtttcaacagctttatcaaacctaaataaacccacgtgtcaatgtggtcgtaatttagtccaccaaacatgttctactattatatgattacccatacctccagtatggatcctcttccttataatctagccgcgatatgcccccactttctatccttacagacacatagggtgtccctggtaacctatttaatttatatcatcaaaacatgggttcaaattccgggtaatttccgatgtacgataatgacatggccattagaccttgcacctgacactagttctactacgtgcacgctatatgttcttagataaggcacgtttt

SEQ ID NO: 50401 - DNA, 233 bp, Glycine max
  unsure (1)..(233): unsure at all n locations
gtcttcagatggctactntagagcanatganagttgantaaaatgttatgaaactgacagaagatcanaaggtgtgtntcgccatcctcatcgagcttcatgacctgatcantttgtcatcatcttttgaggcctcccaggtgtgcttttcgttcgaagtttttaatttcttgttctgtgcctttgttagtgcanaattattgaaagtctgttatgttgaatactgattaagt

SEQ ID NO: 50402 - DNA, 208 bp, Glycine max
  unsure (1)..(208): unsure at all n locations
tatttattntaatgttattgtccagctttatctcgatacttaattgagggagtgtagaaatatagattgatttagtggagatcttaaaatctcaaattattgcacatctaaatatatgggatgcattaatgagaacaacttagagtaatctggattcataattctgattattccttattatattgtagacacttagtgtgtattgatt

SEQ ID NO: 50403 - DNA, 107 bp, Glycine max
  unsure (1)..(107): unsure at all n locations
tgcattgatcgatcccggtgagagtgtgatctntaaaatttgagagaaacgactatcatttagtactgatttttgcatgaatctctgaagtatggactgaatgcatg

SEQ ID NO: 50404 - DNA, 229 bp, Glycine max
  unsure (1)..(229): unsure at all n locations
gtggttcatcattgccataccatacttgaacctaccttcattccaggaacttgtgagtcaagctgaggaagagtntggatatgatcattccatgggtggcctcacaattccttacagtgaagatgtttccaacatataactgatcacttgaatgtacaatacatctcgcactggtgcagacactgacttatttaatagacattttatacaatacgcatcttctcaacct

SEQ ID NO: 50405 - DNA, 163 bp, Glycine max
accactcttacgacgtctgtgcgacaactgattttcttggcacttgctttctagtggttttaagctgactcttatctcttcgagcttaagttctcgtgaaatcttacttgaagccactaacttggtcgaacttagcatctgaaccccgtgatgcatacaagcc

SEQ ID NO: 50406 - DNA, 565 bp, Glycine max
  unsure (1)..(565): unsure at all n locations
tgcnnccacannnaaggggnnnagtaagtcaaatgtcttattctcaactgctgggggctntatgacgctgatcttagctcatgatgttcttatgggtttgccccatggagacgcagcggaagacanaagagaagatgtgagaggagacgtcatccactacggaataagccatggaagaaggagcttcaccacccagatgagccttggtatagacgcttggagatgatgcttcactggaggaaaagaaagatgacagaaagagagaggcggagcacgacattgatcgaagtataatggagagaatgtgaactctgagttgtgtctcacaagactctcattctcaaagttacacaagtgtcactgcttgattttagacttgtagctccttaaagcttcttgaaaacttcttgagagctacttggagaattcttgaaagctaagctactcaccaccctctatactagatactcgtgagattctgaagatcctaaactaacctgctcctcgcttaatctactactcttgagaagctactactcccccctaactagtccctgacaaataa

SEQ ID NO: 50407 - DNA, 240 bp, Glycine max
  unsure (1)..(240): unsure at all n locations
cacttctctctctatcgaatatgcttaagaaaatngattccgtgaagaaaatccaagccgaggcgcttccgtaacgtttacgtgagtgatttcgtgaaggttttcgaccgttcttcgacgatcttcattcgntcttcatcgntcttcagtcttcaacgggtaagtacctcagaccaagcttttcgattcattctatgtacccgtggtgggccacattntgtntcatgtatatttattctc

SEQ ID NO: 50408 - DNA, 202 bp, Glycine max
  unsure (1)..(202): unsure at all n locations
gagcatntaatgtttgcattanatgcacatcccttcttcatgcanagtccattntgataggggtaacgtgcttgtacttcagtagagaagtcatttctttcatcatagcaggtttgcaacaacatagtgcgcctttggatgaggatcaacgtcttctagactaatggacttcattattcttcataagactttgacagatcct

SEQ ID NO: 50409 - DNA, 273 bp, Glycine max
  unsure (1)..(273): unsure at all n locations
tatatagcagntcgnngagaaggtggcctggcaaggagcccgaccttctattgtgggagataatgataagtttacagccaaggcacctcaacagcatgagccagaaccagataacgatcactcatctgaagccaccatctctggagctgtgatccaatgaggctgctcatcatggaccaatgccagcgtcagctgatgcaccatttccaagagtggatccatcttcacctcagcacgtagcagactctttcattcctgtcttanagatacatg

SEQ ID NO: 50410 - DNA, 253 bp, Glycine max
  unsure (1)..(253): unsure at all n locations
atggatgatcaagaaagtntctagagtcttagaaagagtatattanaataggaagggaattcctattgaagtagcanaaggtttggccaagaaatntaagttaaaaagtctttttcaagagattaactctttggtaatcgattaccagaggatgtaatcgattaccagtggccaaaaactgatntacaacagctattaatnattgaattncaaaattgcactgtgtaatcgattatacatatatggtaatcga

SEQ ID NO: 50411 - DNA, 533 bp, Glycine max
  unsure (1)..(533): unsure at all n locations
agaaaaaatatccctcagtactttatactcagctaagctcttcactgacatggctctaatgatcgaaaagatgcttgtggaacctncactcgactaagacactgacaaanacatatatcctacattttggacaaggtatgacatgcanggcgcacctatatatcttcccatcanacctttgatgccactgtgatcgcatacccatatcagctagatcatgactggtagttaagccatccttcgcttgcttgagcgtaaggaggtcccatgacactgcacaacatgtattcaatcatacatcatacatgcttactctaatcgaccgtcgaaatcaggaatgacactcttttatgctacctacttaatctctttggacttctaaacatatcagggtgaaccctgtttccggtcccacaacgatcctaatatatgcctgctccataaaacgtttatntgcttacgaatatgggttaaaagcatctacctgacaatttctcctctcattatgaaatgggttatacaaggctgcgaag

SEQ ID NO: 50412 - DNA, 223 bp, Glycine max
catatttctgattcaaggccagctgggttaccaagttgaccaacgcatccagtttgccttcaagcttcttagtttcagatgatgcagatgggtttgtagctacctcaagcactcctctaatgactatggcatcatttctggcgctaaactgctgggagttggaggccatcttctcaataaatttctggcttagcaagagtcatgtctcaagggctcaccactg

SEQ ID NO: 50413 - DNA, 311 bp, Glycine max
  unsure (1)..(311): unsure at all n locations
gcttatgctctcatacactttgctttatactggttatttttaattcccatgatcatttgtctgcatttattctatacatttttctgcactcgatctctgactattaacttgttaatgacgctcgctattattctntgtgcaattacctctggaattgtagttntcactcattaatggctctgtaattccgcttatttcttattggttggtgtgattatgtgtatcaattgtggttgtgaatatccctataaataattgctctgctgtattaatttgtcacgcttcttcttgattctttttcttcatcaact

SEQ ID NO: 50414 - DNA, 222 bp, Glycine max
ttgaacatggcaggaagaaaaatgagcctcaaaaaataacactccctgagctgtaactgagagaaaatatgaggaagaaataccaatttgccatgagtaatgagatcaagacagtaaatccccagctttttgcaagtcccatggggaatgatctatcatcatgatgaatggactaatcctatggatttcttgtagccatcaacagcaattcctatgctatgt

SEQ ID NO: 50415 - DNA, 232 bp, Glycine max
gagctgcacctttttgagtgggtctgtctctaaagctacctttaaatgcatactcatgtttttcagcttacttatttccctgaaacattacatgtggtgcgctaccctatacaatcatgatgctgaaaccaggggagttttataccttgccttctgttataaatataggacgaaataaaatcacttccttgcgcagattggagattttaaacttcacactctcatgttaatg

SEQ ID NO: 50416 - DNA, 583 bp, Glycine max
  unsure (1)..(583): unsure at all n locations
aggaannattgactagactagccgaatcaatnnttgnggagagccttggcatttttcttgagaagcctctgcatacactatagtctggcctttgtcttgagctnnttgcatgttangaagttctagagagagaaaggtccaagttctagagagttctgagagattnntgtgtgtgaagatctgcagagatgagagtttgaggcagaagcccgtctgagagcttgagatgagnttgtgagtgattgtgagatcctatangtgaaggagacatcctcaccactntgtattttgcaatctttngtcctggtcttctcttgtgtgnanagganggttcttgacccatgganagtaaatccctctatggatcttncctgangtaccttgatgtaatatattctatctatgaatgatgtttgngtgtctctgggcttctgctttcattccatatgccttacctgacacgtgatcatgctttgtaggaatcacagggaactgttgatctaacgctctatacggtagtgtgtcttcacagatcggtcagactaatggatggtgctatccggttgtggtagctacaagaatg

SEQ ID NO: 50417 - DNA, 147 bp, Glycine max
  unsure (1)..(147): unsure at all n locations
cttctttctatatctctatgtgattatctataattcattatgtctatacnttcaacaagtacagagactgtagataatatcggatcagaatgatgtaccttggtgccatcctgttagcattaaacttatgatagacttattggaata

SEQ ID NO: 50418 - DNA, 556 bp, Glycine max
  unsure (1)..(556): unsure at all n locations
aggggnatataactagactcagccacagaanatcnnataaccatttccaccatcttgaaaagagcatgaggatctcanganagctcataaagttcacttatgttgatttgtcttgganacctctttgcctagcagtgaanaagatacttgtgtttgtgaggaagtcanagcactactagacgaanaggtattcagtggacgaaaaactcttcttaaggattntcaagacatggaagaaagggtaaaatcattaaccacaactnttgaagattagtagaaggcacaaggaaatgatcaaacaaaactccaaatgcaggaccctcttgaagaagcatagtttgtattatatggaaagtnggcatgnactcacaatcanggcctcctgaaagggaaccctcaanggtcataagtgctaccacaccatatctaccaagaaagacccaaagattggtcctagacaaataatctgttaatctctgtagccaaaacacatctgttttgtaggttgtcaccataagcaaaattgtcatccttaccatgttggtggactcaagaa

SEQ ID NO: 50419 - DNA, 189 bp, Glycine max
  unsure (1)..(189): unsure at all n locations
agagcacaagtcctagactaatcccaatgatcttttcttggtttgtacaaatagccttctcactattcccttntcttaagtggcttttgaccttatngtaacaacataactttatttctctctntnttacattcaacttatnntgtgtgtgtctggatggctaactnttttcttttcattcttttcaac

SEQ ID NO: 50420 - DNA, 256 bp, Glycine max
  unsure (1)..(256): unsure at all n locations
ggtgcgcggtagatgacgtatatctctgcacgtcacctgagttcagagtcagtgtgacaganattgtggggcggccgacanaagtgagtctcttgctcctacgtatcctcaatttgtgatgaggaactcanacttacgtagttcttgataactgtgagactaanatagtctcggtgttttttcactaaaatgcgaacatgcattagtaaagaaacaaaacttccaactgatcaaagcaacatatgcttttttttat

SEQ ID NO: 50421 - DNA, 261 bp, Glycine max
  unsure (1)..(261): unsure at all n locations
ttattgaactaatcagtcgctatgctcataggggaaccattgatcctaagtatgatgtaaaggatagactaatatttagaaaagggaaattgatgattctctgaaattcatctntgagaaaccagaatttacaagaatntcatgacactaannatgggggccatgctggaaggactaannaccattgctagaattgcagtcaattttattggcctanaatgcaagaagatattaagtcctatatcagatgttgcagtatct

SEQ ID NO: 50422 - DNA, 321 bp, Glycine max
  unsure (1)..(321): unsure at all n locations
ctgactttaacaccatttttcttaaagaataaaagatattttaaataataagttaaaaatatgaattggataataataatggcataaataattatgtctaaaatgtttatattattatngagaaaataattattttaaatgaaaacctacacaaatggctttcatgcagttatatggtgcanactgtgctaataagggactttgtacactgaattcaaagattataaatctttgaatatacactcgtctcatcgaatcagcttaggaggacggccttacctattacttttacctttctaataaaacaattcctgttttttt

SEQ ID NO: 50423 - DNA, 237 bp, Glycine max
  unsure (1)..(237): unsure at all n locations
agcatanaccacagactcttacgacaggtacatatttctgattcaaggccagctgggttaccaagttaaccaatgcatctagttttgccttcagcttcttagtttcagatgatgcagatgagtttgtagctacctcatgcactcctctaatgactatggcatcnattttggcactaaactgctgggagttggaagccatcttctcaatcaagtntctggcttcagcaggagtcatgt

SEQ ID NO: 50424 - DNA, 270 bp, Glycine max
gcatgatcgggcccgattgggctgggacgcaggcttacatcttgcagagtaccaatcaggcactatactaccctccacctacatcttaacggcatactcatacatcaatatcttgataatctccaaatagggcaacatatccttcatctcaaaatttctcatgtactgacctgaattatagtcataaacaattacgtgacgaaatataaagagctcttctataagcacatttgaagaatgtgatgcgttggtatgcatcatactgtgtca

SEQ ID NO: 50425 - DNA, 256 bp, Glycine max
  unsure (1)..(256): unsure at all n locations
atcaacaagaatcaagccaaggctatngtgcangcaatcaatggngcanaacacaccaatngattatgatgatggatggctcanattctcacanaggtaaactcatcactttcanatngngctntcaaaactatcatgacatgtagaggagaatcaaggatttcaagtcacataatgtcaagaacttttattntcanaacaattacccatttcttgaacatatcctataattcanagaaaaacatgcanagtcgta

SEQ ID NO: 50426 - DNA, 202 bp, Glycine max
  unsure (1)..(202): unsure at all n locations
actacaagcctctaagtgaaaaccatgatattaccatatccttcacgaactttggagctgtggaattgttttgggaataagtgtggaggggttttgtttcattggacaacttgttntgttggccatgcttcatgatgtattttgggccatacttgatgtacattgtattattggtaaatgttggacatgctgaatgaaatgt

SEQ ID NO: 50427 - DNA, 183 bp, Glycine max
  unsure (1)..(183): unsure at all n locations
atgacactcacanttttcggattctgcacagtttgtgaaggcaatttgtcaaaatnttgngactgagctnggttcaactgagtagccatctgccccatctgattggtcagactctgaatgtangctcttgtctcttgctgaaatngcatattctggatggtcattngcctcactaactcttct

SEQ ID NO: 50428 - DNA, 469 bp, Glycine max
  unsure (1)..(469): unsure at all n locations
aganaaacacatggatcttgagaacaaanactacgctaaagaagctaataaggacatatgagtatatgaaagggtgtggaatgattgtatataggagaaagtaaattaaaaggtgctcacaaacttattctcaagtaccacaggtatcatgcttattatgctaatgcttctgataagcagtgtacaccttgcatagctatgctactccatgccaaaacatgatgaagaaagcttctgagaagcttcctangaagcaagtgtacacccctcaatagctaagtcatcccacgaaacacgacccctcatactagctatccacgatctgaatcaaaaagctataagtaaccatcacaggatctactgacctattgaggattaaactaatgacaaacaggcaagagaactgctaatactaaagggtcaattatatagcacactagtataaccagctgctgtatgccacttgagt

SEQ ID NO: 50429 - DNA, 262 bp, Glycine max
  unsure (1)..(262): unsure at all n locations
tacataatacctntaagctaaccgacaagcaattggtggatgaaatttactaccgacaacctctcacatatgcaggtaatcaatttcggtttcaatgtatgcaactgaaacatgatgctgatgttaacacaatgttaatgtgtaatcatgaatattcgtttgttggtccgaatgagtaattatgtagcattgctagaaccccagaatggtatttaaacttacttgaagctactatgaccnctacgcatgatgtcgcgctata

SEQ ID NO: 50430 - DNA, 467 bp, Glycine max
  unsure (1)..(467): unsure at all n locations
tgggagtnnngaattgcatccagcatgaataacaccatactaagcttggagaacctanaactaggtagtctaacataataattgggaactcgttctaatccatgaaaacatattcnaccttcaagtagtgaaagctanagaaaaataggacttaaaaactaatcttaatgaagcgangtgaaacctaggaatactaaacaagatggagttacttaagcttcaatcccccaacctcaaaatacttcaaaggtacaaaatcctcaataatcatgtattatgaaatggacanactaataccactgaatagacatgtcgaagattaatcaattatcaacctgaaccctcaatattataactcactgcccactttataaaaagaggaacattaagttatgnacactcttatgactaatccaacgagtactctatcctcacttactgtgtcgtacactcctatgcgaaacatt

SEQ ID NO: 50431 - DNA, 180 bp, Glycine max
  unsure (1)..(180): unsure at all n locations
ataatttaagagtgagtcaacaagttcaagatcaagtttaatttcaagcttcatgagaaganatcaagaagattcaagaatcaagagaagtttgatttcaagattcaagagnagatgaattcaagattcaagagaagaaatcaagaagacttcacaagggaagtattgaanaatattttc

SEQ ID NO: 50432 - DNA, 512 bp, Glycine max
  unsure (1)..(512): unsure at all n locations
tgggnatatactcgctcagtcatagcgacgctgatgtgtgagggcgatcgcctgatcacaatgaagcctcttatgcatcaactattatggtcatgctctctgagttcagttggaaactggcanatatcgaacacccaaattttatggcnnacataatgtattgtagtccaaccctatagctggctangctttatggttcccctttnntggctgtcttttgtatcaaattatacaatacagttttctcaattgtcttgactttacccatttattcgtctgatgttattttgtgcggtaacggacaaggcgacatgagtctcttaagactaatatcagaccaaagtcatttgacactagaaacaactaggatgaaagagagatggtgcttcccaactaaagatgtgacagagaccgaatgaacccatgagaacanattaactggcgtgtagaaataaagtaagtgccggctacacacattaatactgggttctacaatacaaaattctttgacg

SEQ ID NO: 50433 - DNA, 298 bp, Glycine max
  unsure (1)..(298): unsure at all n locations
ttgtctctgaggtcttacacagcaaaatctcanaactctctggaacttgtacctttctctctctaaanatctctagacatgcagaagcttcaagaaaatgccaaactcaccttctctctctagaatctctcacatgcagaagctccttgagagaatggccaaactcttctacaaaatctgattataggcttaaataggtggctttgttcatgctagcacgcttagcgcaattatgaaccgcttagcacggattagtggatntctgcttagtgcatgcttctctcactcagcggatgga

SEQ ID NO: 50434 - DNA, 177 bp, Glycine max
gaatgcgtgaacatctaacatctctaaacatggtaaagtatgatagggaacctttaaaactgtagttgtgacatatagcctgccacctagttgtgtctgctagctactgcttgatacactgacagactgaagatgaatgaactatgcattattgaactctttgattggtatcatact

SEQ ID NO: 50435 - DNA, 226 bp, Glycine max
  unsure (1)..(226): unsure at all n locations
cttccaagctattatcttctctctcagagaggctctctctcactctattatagtgatncactctntgtctnggatgggtaggaatgaatgctcctacccttatttatactactccacctccacaatgaatggtggagattactcgtatcctanggtggagactaattctctagaatgctccacacattctangaatctctacactcttctacttccttccatactc

SEQ ID NO: 50436 - DNA, 590 bp, Glycine max
  unsure (1)..(590): unsure at all n locations
agaggaacgacgtgaacatgtcatagnnnnngaagnananncttaatgcggatgccatatatntctatagatntatgtttacaataataatcttataatanaaggatagcaaccatttatcaatattcgnacttaattaagttctgcttaactaaccattatttgtcactcctcaaagcctcactagatctcacagtcttagaacaatccttgtaaacagagaagaaaccatgactctnttctcaagcttangtgagataataataatattccttggtgaaacagtatgccaatcaacattaattgccatgtgcaattttctcgcagagaatgtgcaacatctngcttcggtatcgccgtcatttatatacatggtcctttcaatcatgtggtgaagatgatgatataatgatgttgtaattaaaatcagcttgacctgatgagtccccnaccatgcccagagatcctcttgaagaaaccttcacattgtgagcaattacttaataataaaaacacacacctcctccgatatatattaattgataactattcaccatacatctttaaattatattatctcggaatgaccg

SEQ ID NO: 50437 - DNA, 182 bp, Glycine max
  unsure (1)..(182): unsure at all n locations
ctcacaagaataaataaatctacatctctgtcaccgtttcgccactattgtccaagaatagctctnntttattcgtaggataaattctntagaaataaaaccccttctcattacattanaaaaagtaaaataataagaagagtacattgcagctctatcgtctctacctnctcatcattatg

SEQ ID NO: 50438 - DNA, 573 bp, Glycine max
  unsure (1)..(573): unsure at all n locations
agggaaatcgagtagagctgcaacgtagatangaggagcaaagggccactnntccttttactgggactttctctcngccacatattgtgggaaaatctgaccttnganacgctaaaatgctgcctcggttggcatgccgattctctggttccagttcctcgcgtttctctgcgtccgtcagtgccatgtttcgaaagccagcaatatatatatcagaacgctcataatagaaccccgagcgtggttcacatgtcggtttcgttatattttaagtcgcacgcacaacgatgattgttaactaattaattaggaattaacccataacctccaggtttggattctcttccttaattagctatcccgcgatattgccacaccttttctacccttacaagaaattatgctatcaccgagtatcatattattatatattattcaacacaccgtttcaaattcgggaaaattcagatgttcaatatatgatatgccaaattgggatttgactcctgtcttaattttgagctggacaactaatatcttctgaataagggtcctatatccacattataattt

SEQ ID NO: 50439 - DNA, 227 bp, Glycine max
  unsure (1)..(227): unsure at all n locations
acctcaacccgtagcaccttcctcatctgcaaatgaacctgcccaacttgtctctaacccagaaataggtaatgacaaanatntacctaacaatttctatgcagatgaatcttccactggcaattctgatatgcagaagcagcacatccctcctctttcattccctncaagaagcggnntccaacaaaaaatggaagatgcagagaaagagatcttggaaacattta

SEQ ID NO: 50440 - DNA, 251 bp, Glycine max
  unsure (1)..(251): unsure at all n locations
atactcagcaanaacattgcttgcattgatccaaaaagtttgctttggttcattgaacacactttggtatccatgagcataaaggttgtaagagaagactccaccgcgcttatttggataacttctgctagacagagattccatattatgtctatgtacgacatgcttcacagttcagatcataaaccattttcaatgttcatggttgtgacccacataattatcgtnttagaaaaccatgacatatattt

SEQ ID NO: 50441 - DNA, 234 bp, Glycine max
  unsure (1)..(234): unsure at all n locations
gggagtaaacgcacattntatctatatacaattgtntgttgcttgctagaatcttgacttcaggtattgtattgtcatcatcattaggggagattgtagatgcaatngcctctggtgtttagatgatgatcatgatgatatgaatgaaatgatgcatatgggctnttcaagattaaattcaagacaatactttaagaatacaagtcacaacatcaagataatcactagtaaatt

SEQ ID NO: 50442 - DNA, 237 bp, Glycine max
  unsure (1)..(237): unsure at all n locations
aagcgagaagaaatgcttctttttccacttgtgaagatgttcanagcttggctatgaagatggctcaaactgagaaacatttggtatttccattgcgttataaacttattgagctagcttcgatattgccggcgtcgacagcatccgttgaaagagctctttcagcaatgaagattatcaagtctaaattgcgcaataagatcaacgatgtgtggctcaatgacttgatggtatgta

SEQ ID NO: 50443 - DNA, 271 bp, Glycine max
  unsure (1)..(271): unsure at all n locations
cacacacacagcttttnctagtcgatcactcttatagatgctcccncttnngttatgaatatatgcttatcttaaaattaaagtatntactcatgtgagttctngatttatccctatntctctcnncccttggcatcaacananagccaaagtgtgtatctaaacttacagtatgcatatatatcttagacattcatacagcattcataananatattaaccacaacatgaagtaaaaccatgaagtacaatcatanatagataacttata

SEQ ID NO: 50444 - DNA, 267 bp, Glycine max
  unsure (1)..(267): unsure at all n locations
tacaagaatgactngcctagtgagtataatgtaagtgccactctcaatgtgtctggtctatctctttatgatgcagatggaggagccttggatntgaggacaaatccttttcaagaaggagggagtgatgaggacatttgataaaatatggtgagagtttctctctgggttccttgttgaaccaattatcagacttatcaaggtaatccttgtggcgtctacccagacttatctatcttcattggaagtggcgtctacccggactta

SEQ ID NO: 50445 - DNA, 125 bp, Glycine max
ctgacatccaccaccggctatcgcatgagacttatgactacagcactctgcgcacaataaagacaagacccaacaggagtgtgtgctgcactggatttggtattatggtgtgcttgtatcataca

SEQ ID NO: 50446 - DNA, 63 bp, Glycine max
gggcatagtcggtcagtgagaacctgtgatgtacctaaacaggcgagctcctggcagtcaaca

SEQ ID NO: 50447 - DNA, 102 bp, Glycine max
  unsure (1)..(102): unsure at all n locations
ctgggatgggtgtcatgttgactgtggaagggagatttatttgcccatcgccgatcgcactataccgatatgacggtgnccatatccaataagcngatgtga

SEQ ID NO: 50448 - DNA, 253 bp, Glycine max
  unsure (1)..(253): unsure at all n locations
aaaacttaatggctgagtctaactgaaaatgtggcaaccaaaagtcacccncaacagccaacaagtcagcccncatttggtctcccaaaaggctgatgcctatgttgccaattgngcccttattacaacttgaactanacctaactaaagcccttttaattngataacccanaacatanttntggtcagccaactntacaaggatngagccattatttagacanactaaacactctaaaaaatgagacaaagt

SEQ ID NO: 50449 - DNA, 231 bp, Glycine max
  unsure (1)..(231): unsure at all n locations
gatacaatctntgcatatgagaatgcttcagaaacattaagaaagctagcagatgggcctaatagatatgttataacttggcaaggatacgacataagcaagtattcattntacacaaaagcacaagatgacaaaagtacaatgcagaacaacggtgtcaccctaagggcagaatctcaacactttgcangtgtgaatgacgccaatcccaatgtagcatccatcccttac

SEQ ID NO: 50450 - DNA, 246 bp, Glycine max
  unsure (1)..(246): unsure at all n locations
tctgcacctgtngcaagagtctgtggtctatgttcttctagagatcaccatacagatctctgtccttctttgcagcaatctggagtcaatgagcaatctgaagcttatgctgcanaaattataatagaccctctcaacagcaaaaccaacaacatcagaataattatgatctttcaagcaacagatacaatccaggttggaggaatcatncaaatctgagataggcaagtnctctacaacaacaac

SEQ ID NO: 50451 - DNA, 210 bp, Glycine max
gggcttgtgactggtaaagaatactgtgcattgctcttcctgatctatcccacgatgataaaaggccttctcggtatggaattagaggaggatttatatctagctcactgtgtaatgaactgcaagcttttttataggtgcgggatctacccatttttattgcgaatccttaaacagcggtgagataatgtgggaagataaacccaaatg

SEQ ID NO: 50452 - DNA, 171 bp, Glycine max
  unsure (1)..(171): unsure at all n locations
actgggcaaatgaagaggatgagaatgaggaaggaacccatgttgtggctgccattcctacatggtcaaacttcccaccagcccaacaatgtcatcgctcagccaatatcggcccttctcattacccaccacctagtcgtccacaaaggctatccncaaatcatccacaaa

SEQ ID NO: 50453 - DNA, 226 bp, Glycine max
gctgagacacagcaacgtccgaatgcagatatttttttcttgattgtcacctgcctctgattcactggaatgcgatgacaaccccgcattaccacagcataagaacttacgttaaacttatttggcctagttaaggttcctttgtaagcttggctttgtttgattataacaagacttttattgtctggcttaccattattttgctgttacttttttaacgaatcat

SEQ ID NO: 50454 - DNA, 214 bp, Glycine max
  unsure (1)..(214): unsure at all n locations
gagaaaacatctgattgactttcgtttatttactaaggtattttgatatatattattatttaccccttnntttgatatccaacgtggttacggcacgaccgaacggtcggaattcattttaaccaaatttaacggatgatacaagtcatacgatcggtgganattagtttatnttagattaacgagtatgactatataaatggcttagcacgtc

SEQ ID NO: 50455 - DNA, 300 bp, Glycine max
  unsure (1)..(300): unsure at all n locations
ctctcttcagttggccagcgtagtctgtgtagcatgactggaggagagtaacggaatctcanacaccaaaataatcatatntattgacccacttaananaaaaaggtaaatgagtcattcactttgtaaactgtaacaatttaattcttaanagaataaaaaaaattctaatntaatctttcaatatataaaaagttcgataattatgtcatgcatataataaataacannatggttcatgaaccttacaanataatgaccaaatagtcttttaaaattataatttaatgaccatatgat

SEQ ID NO: 50456 - DNA, 227 bp, Glycine max
  unsure (1)..(227): unsure at all n locations
gatcataatcaattatattggtctntaggtaaacccaagtcanataagaatatnntaatcgactacatgcctcagttaatcgataaatatttatatacaagactttataaatagttggcctttcatagagtctttaagcttccaaatcatattctattctcaagacttatcttcggtgagaggggttttaagctgaagtaatggagatcaacaagattcacatcttt

SEQ ID NO: 50457 - DNA, 268 bp, Glycine max
  unsure (1)..(268): unsure at all n locations
aaaatgctgctagacttattaatgatttgaatgtctnntaatttttaaaactntcgattaaactngattntgatccctatatatctaaatggatgaatntagttcttcaagtttataacatatatgactctaaccatntttttctgactaacnagttagggtgaattcaatttgagaaaattgaattcatccacattcttattaaccgagtntatttcttatcaactagactaatggactaactcttcttggatatgtgaattaatca

SEQ ID NO: 50458 - DNA, 300 bp, Glycine max
aactcagctgatagatacatggattctaattacagatgcttcttttcataaaatctttctttctgttctgatagagactcaggtcttattaaattgactatttgtttccttggtacaataatataatactataaatccttggtacacaggagattgcaaatttagtgcaacttggtgtggtccttgtaagatgattgcgccatattacagcgacgtatctgagaaatacacatctatgatgtctctttgtagtgatgtggatgatctaactggtagtcctgaatctacataatactacta

SEQ ID NO: 50459 - DNA, 231 bp, Glycine max
gcattaatattacattctagatgtttgctaaagcatggtgcattgggcattaagtcatgctaacccaatgatttctttcttttattgttctattaagccgtaccctctcccgagtggcctaacccttataatcgattcacgcattcattccttatccctaattaggcgttaccctctcccgagtggcctaaagactaacagaaaataaagtttgaaatgcagaatatataa

SEQ ID NO: 50460 - DNA, 71 bp, Glycine max
cacaagcccaagacccacaccctgtgccacctcaagagtacgactccacgagccttacctcgatctctcac

SEQ ID NO: 50461 - DNA, 242 bp, Glycine max
  unsure (1)..(242): unsure at all n locations
cctacctagatggtccctatgtactcacaccatgtatatgttangtgtacgagtgaatttacaaaaagatggtgcaccactcaaagcattcatcataccaactatgttagggacgtggtgcctaataatacctatattgggcaccaacaaggcacaaggatttaagctcttgcgaaccaaaccctcatacaacaacttctttacttgaggaataaactcaagcccaagaggtgtggaatact

SEQ ID NO: 50462 - DNA, 252 bp, Glycine max
  unsure (1)..(252): unsure at all n locations
gaatgatgtcaagaatgagtcaacaagttcaagatcaagatttgatctcagattcaagaaaagacatcaagaagaatcacgattcaagagaagatgaattcatgattcacgggaagaaatcaagaagcaacangtcaagacttcacaagggaagtattgaaaatgattnttcacanaccanacatagtacagttttgttgtagaaaaagaattatctcannattttctgagttaccagagtatttactctct

SEQ ID NO: 50463 - DNA, 269 bp, Glycine max
  unsure (1)..(269): unsure at all n locations
ctatacgagacatcttgccanacaaagtcaggttcacgataactcgcctggtgcttttcttccatgctatatgtagtaaagtgattgatccagtaatgtttgatgagttggaaaatgaaggctgcaatatactctgccagatggagatgtattatccncctgctttctntgacatcatgattcacttgattgtgcatctggtcagagaaatcanatgttgtggtcctgtntatctacggtggatgtacccaggtgagcgatacatgaag

SEQ ID NO: 50464 - DNA, 245 bp, Glycine max
  unsure (1)..(245): unsure at all n locations
gtacgatgagccctacactatatgctctagatgccagctgtggctaaagaaccaattaagatccatttttctaattttcattagttntatattttacatttgatgtaataagttaagatgactcttcatatgtcttaaggtcaatttgatgaatttaaggcttcctacaccattatgatagctagtannggtttatttctatttgaaattaatgcttagtgggaattncgtttctaatgggaaat

SEQ ID NO: 50465 - DNA, 245 bp, Glycine max
  unsure (1)..(245): unsure at all n locations
tcttncatncccacctagagaaaattcanacanaataatggaacaagcgacaaaggagatcttggagaccttcatgaaagtagaggtgaacatacctctgctagatgccatcaagtagattccaagatatgccaagtttctaaaggagctgttcacccacaanaggaagctcataggcaatgaaagaattagcatgggcagaaatgtgtctgcattgataggtaaactctgtcctcacattcctg

SEQ ID NO: 50466 - DNA, 262 bp, Glycine max
gctgcagcactctaaggatcccgtaccgagctcgaatcgcctatagttgtctatacatttactggcgtcgttacaacgctgactggaaaacctgcgtacccactaatcgcttgcacacatccctttcccagctggcgaatagcgaaaggcccgcccatcgccttccacagttgccacctgatgggaatgggcctgatgcggatttctcttacctctggcggatttacaccgatatggtgcctctcagacaatctgtctgatg

SEQ ID NO: 50467 - DNA, 247 bp, Glycine max
  unsure (1)..(247): unsure at all n locations
gtgacaactattggcattgtgctccttcaatgttagcangatgtttctcggtttcaccatcgactntgtcatatcaacaataattctcttctcatccttagtcaatcgcccaacgtatggatgtccaactaatgacttcaccaattcatgattatgaatcccacagatcaacttgaccatccaacattgccctccaatcactgggttcccacgaagcttgaagggacaaccacatnttctacttcta

SEQ ID NO: 50468 - DNA, 252 bp, Glycine max
  unsure (1)..(252): unsure at all n locations
taccattatgccaacaatatgtatatgaggcacaanattgatacaaatagatgtgggaaggataatagcttctgagagaagtcactaaaggcaccaacaatcattccatanattgacttggtccctagagccaaagatccaacccatgttggtcttggccagatngaaatgaggtctaatggaaggccatatggaggaatttctatacagagaanagttttcattcctcttaatgaatctagcccctataaa

SEQ ID NO: 50469 - DNA, 213 bp, Glycine max
  unsure (1)..(213): unsure at all n locations
tgaggatgaatgagacacccgtgctgtgactgccatatctatacagccaagcataccaccaacccaacaatgttattactcagccaataacataccttctctctacccaccgcccagttatccacaaaggccattcctaatatcaaccacagagcctacctaccgcacttgcaatgacanacaccactcttagcacanaccatatacatcaac

SEQ ID NO: 50470 - DNA, 261 bp, Glycine max
  unsure (1)..(261): unsure at all n locations
catcatggggtccacttggccgcagatcctcacttttggcgtgttttgaaaatcgccccttttgccatgtctgagntgatctattaaacctatcaaatgtctgaactgctacacagcaccataagccttcagaaggctcagaggttctaagtgttccagcgacgtgacagaagactttagaaatgatagcgtctattttgcgtgcccatttcacagcatttaatgtctggacagagccctgtctgcaagcggactgactgg

SEQ ID NO: 50471 - DNA, 559 bp, Glycine max
  unsure (1)..(559): unsure at all n locations
aggggaagagctagaatagcttctaagagacgctnanngagctagagctaggctcacatacctctctaaaaacagagctctcttnctagtgtattataaacncgaanttagctacacacccnctataatatctaacctcacccgcatgacatataacatgaatatacgagaaaaacgtccttactatcaagaccactcaaaatgccccgcaatacaantgctcaaaccctatactactagatggccataatacaatgcccacacgaaagacaaacctattcttatatttacaaagcatatcgggcttataacttggccatcggcgtctaatctaccctaaagctatgagaaccctanggcgtcccttgatctctatccatctattgaaactctacccatgccttcggaaagatagataaaacatcctctctcaaagcttttagtccatcccacttagttacaatacaaataggccgtaaacaacatatagtggggagcaaccggacaaaacactataatttttttgtttagcccccctcgtataaacaaaaatataaaa

SEQ ID NO: 50472 - DNA, 71 bp, Glycine max
ctaagcacaactcaccctatatactacgctcgctttccggtaccgacatactttatctgcgaggaacaaga

SEQ ID NO: 50473 - DNA, 257 bp, Glycine max
  unsure (1)..(257): unsure at all n locations
acctatactcgtcactccttcacacacaaataacacaaacacagaacttcctctactacctgtgnttgtggtaaaccttacaatcaccgncacaaattcattttcataagctacatgatcgagcgcatcacagaacattctctccggctgtcaaacacttacacaccaatccacataatgttagcttcctacgacatattcactttattaaatcactcacagcgatgaacattattacctgagaagtattgaacgca

SEQ ID NO: 50474 - DNA, 213 bp, Glycine max
  unsure (1)..(213): unsure at all n locations
cttnncttcgcaactggagttcactattgctaccccatagagcntccgcgaaattgttccggccatactcttccttgcgagccctcttggtctcttgttcaagggctcttgcggtaattgcattctcttcccgtaacccggcacactccttccgaacgtgtgtagcggccaacttgaacttctccttggcaagtattgcctttcctaactcgc

SEQ ID NO: 50475 - DNA, 259 bp, Glycine max
  unsure (1)..(259): unsure at all n locations
aacaactaacaatcgtaatgtnttggaatcactgtcatcaacaaatattgtttctctaaaccatntaatgaaagttatattgtactcttgtaaaaccctcatcatngttcattttgggttcattgtntgtaactatttgtgagcatctgtgtacggaatgacctctgttgtattgataatatatatatagatgcgcttgaagacctcgtcgcgagtcattgaacaacattgtatccttgtngtacccttacccccgatg

SEQ ID NO: 50476 - DNA, 596 bp, Glycine max
  unsure (1)..(596): unsure at all n locations
agggaaaatgacggattgancagngcatgnagtngaacanacannacttanngcagctcgaccgccttctgtcangatcnaantagttaatatgtgattaattatgtcatcatgtataatngganatcacanacattattcttgtcatatntcatgtacataaaanggttaccacgaataaagtgtaatgtaggagtgctaacacaaatccggtatggacagaccacaagaactcttcacttggacagacaagtggngtactcttggtcacattattgacatctttcattatggaaccatgtggtcgacaatgacttcaagtgtaattcgcacaaccagaaccagctgttttataatgcacggaaagctgaattatgagccatgctcatgcatatccattaagaccaacgaaagaaactgcaacgcgtttatactaaccatatgggacatatgataccagaatacaatgccacctaattagtcaccaagaaaaaacagtgactaactagaatactttagaatgaatgaagaggcacatttacggtcgtctcacacaaatacacaggaccttcatgtgcaggaccctactgtgtagg

SEQ ID NO: 50477 - DNA, 220 bp, Glycine max
  unsure (1)..(220): unsure at all n locations
tcttctagacttccaaggccattgagcaccatnggcaggaggaatggtgatagaaacgggaggtcaagaatatctagtgacagatatcgatcattggctgagagtgcgctgcacgatcgattatcctctgaggtatctatgccagtatatcacggaactctatctttgtgtcagtactaatggcaggatatatctgtgtaactactggaatctaacacct

SEQ ID NO: 50478 - DNA, 235 bp, Glycine max
  unsure (1)..(235): unsure at all n locations
acgggactctatcggacatccgagtaaaaagttattgtagtttgaatttgctcanggcttcagtattccatttcgagcgtctcgatatattacgggactcaatcggacatccgagtaaaaagttattgttgtttgaatatgctcagagcttccgcattccatttcgagcatctcgatttattactggactcaatcagacatcccagttaaaagttattgtggtttgaatttgctc

SEQ ID NO: 50479 - DNA, 488 bp, Glycine max
  unsure (1)..(488): unsure at all n locations
aaaaaaaggatatagttgactcctctgaagccgtcaannaanactctacattatcttagatgcatntttttcttaccactctcacgnnggtttttacggaaaacaccatactaaacgcgccgcagggatcctatcgaccatatcatattagaacatggtgatcagagagaccangacagatgaagccgactgtcgcttgaagaacaaggctcatatgagcctgttagatagcactatgagacacgcgcctgcgcgtgtattcgtgcaacaacctactttgaactccacctctcctaacatgtagagggaagacccttggacatgcaccttattggatcaccgacgctgcctatgatgccccatattacacccgttgagaagagcgccaatgcttccgcataagagactctacaccgacattctatgacctagattctgaggtgcagttatcccatccgaggcgacagacggctaccaattattccatg

SEQ ID NO: 50480 - DNA, 552 bp, Glycine max
  unsure (1)..(552): unsure at all n locations
agagctcnnnatgataccatgtataccgcctatgatactctgcattacncgacgactactacgaagcgagcgtctctcacactcatctgtcccttgaagaggcatcttctctctctcttccttctccattccgatgacagtcatctttcaacaagcgcaggaatgcatagttgaagaagatcctacgcctacgagctgcaatggagcttacatcaactgcttcaagagctttatatatcctctccacgacaccatattgntgaggtgctcttgtggcgggaaaactatggtgaattgcatgttcttcacacaaattatcaacacactcattatgaaattctagtccacgatcacttataattgacacagtatgtagactgttctcattgtgaatcacttcggcagttggcgaaaggcatcatatattggtatcgaaaatgaagtccaagtgtacctggaataatcatcagcaattactaggtcatagtagttaccacctagactcatagatcttgatggttccaactatatcatatgaagtagttccagcgg

SEQ ID NO: 50481 - DNA, 693 bp, Glycine max
  unsure (1)..(693): unsure at all n locations
acacatctcgtcacntctcnnaccatatanncctgcgtgtttttttttgtnngaatctatcncgcatcctactctctcccccncnancagacgcgngnnnnttttgataccccatgctattngngacactatatgatactcaagctngctagntgctatctacccatctcactaccagcaagcattcacaatatgtacctatatatgaccaanatcccattaaccctctataaagtagcactacatgatttttattgtccttgttcgtcaaaaactacgagcttgctgctggaatgtaacaagctaatatacgcttggtcattgtagtcaaaagtagttcaaataactcccacaattataagtgcaataccctgaccctctaatatgctataatggtacatgacaaagcagctacttacaccacaatcacattagcttcgtatataacattgctcataactatagtactcaaatcacaactggagaaacaatgttgcgcttggttcgaacaggatgacagataggctgatggacaggacaatgcagagggtacagagaccaacaaagcatgaacaagtgttnggctactggaaccttgagagacaaagtgcagatagtgagaacaggcatattcagctttacgatgcaaaaacaatggtgaagtattgcaatatgctttatcagggggtggct

SEQ ID NO: 50482 - DNA, 327 bp, Glycine max
  unsure (1)..(327): unsure at all n locations
gtgtggaagagtcagtcttcctacctttattttgtgactacagagtggcacctgtagatatgtncgcggggtcaggagaccttggggacgtcaggtggggtgctatttcccaaaaccaagcttgaccaatcccgacccaacccaggcataatcagtcagtgagaacctgtgacatacctaaacaggcgagctcctggcagtcaaccaataaaagaacaaagaccacaaagcaaggaggcttgtgtggtggctggccagctatggatcttgagtgatatctggaatatggcctctggtaatcgattaccaagggtgtgtaatcgatta

SEQ ID NO: 50483 - DNA, 389 bp, Glycine max
  unsure (1)..(389): unsure at all n locations
gagcatctcattttttattctgtgaaccctctgctttattatttcgatatatcaaactttacagacatctctcttattgtactcggaacactccatcttctctatgaactattgacaattgtgacgttctccataattatcaagtaaaggttcagctcatctgatcatatttgattagaacatcataagtatgagtcacacgaatgcagcagccacgccattatatggtcataaccaacaaaactgcaacgttgaacaacactgaacaatttatgatatatgtaataattctggtgtatctccatagggcatgtttctcatcaatatactcgattccagtaatattgtcatgttctactatngagaacaaacacacataagacaagata

SEQ ID NO: 50484 - DNA, 148 bp, Glycine max
  unsure (1)..(148): unsure at all n locations
atctcccatttctacatcacacggtttagattgggacccactctgcatgtatgtcaattcaccaagccatatacacgtcgtgtaattcttcttaatcccatcacacaatagatgctcccgtatgtcgnctagtatttgtcggcttcca

SEQ ID NO: 50485 - DNA, 269 bp, Glycine max
gttgaatcactttcaaggttgaattgattgatctgatcatacaatgtgatcataccaaatgcctaaaacattaagccacctcaaatacggtatcaacagaaaattaaagtttgaaaccttttaacttgaagagtgctatttgggcgattaaaataaaaagttaaactatgaagctttccttgcacctgatatgatatagatattgtttttaaaaaatcttgctatgtctcttagaaattttattactatgaaaacggttgtgaaatgcc

SEQ ID NO: 50486 - DNA, 181 bp, Glycine max
cctacttctgaggggcaactcccactttatgaagactatcccggacaagacgatggggaaggagatacccatcttggccctctgcttcacctcaaagatccatccccgcatgaactaccccagccgaacataatccgtcataccccggtctcgcccacacccataaaagaatctgttccct

SEQ ID NO: 50487 - DNA, 67 bp, Glycine max
aggaggagaaacacggcgcttgcgcatcccccaattctactcacttctacccattccaagctctaca

SEQ ID NO: 50488 - DNA, 424 bp, Glycine max
  unsure (1)..(424): unsure at all n locations
tccttgagaagctagatggtggctactcacacnnctctaatatctaagctcaccccatgccacaatacatgnaaatataatgggaagctttcttgagaagcaaggaaggtagctgtcatgataagctagaggggggctactcacacccttccgatagctaagctcactcccatgccaaaatacataaaaaaaataacaaanaagttcctaccacacagactacccagaatgccctgagatacaaggctaacaccctatactactagggtacccttaacttgtacccttaatttgtagggtaccctacaaacctaaaatggacagaatacaaggcccaacagaaggataacctattcttatatttacaaagaaaagtggacccaaccttggcccatgggctcaaaaatctaccctgaggttcatg

SEQ ID NO: 50489 - DNA, 419 bp, Glycine max
  unsure (1)..(419): unsure at all n locations
ggtgagaatacttcaatgtcccattaggaagtcaaatgtctctatttgagtgattataaaaaatattaaaaaatcttgatttatagactttcatatgctatctttngagaaataaaaaatactataaaataatgtttgtgtaataattaagataattaatactatactaatatgacatatacatctttacccattcaactattccttctatcccaaaataattatggtcattaatgaatagataaaagaaagtagtagttntataaaattaaccttatatcatcattgatttatttataaattttgtcatctactgttaatattataagaaatatatgtgaaaaaataattaatgttacattaaaaaattaaaatgataattattttgaaataaaaattttctgttatacgataattat

SEQ ID NO: 50490 - DNA, 215 bp, Glycine max
  unsure (1)..(215): unsure at all n locations
tgcacgaattctaatatgcaacacttagcagaagggtcaattgaaaggtcatatagcaattcaattctaatccatatataaccgtatttatatatattcatattccccaagagtctactnttcaaatataattttattttcatcanaccgtatgtgaatcanacanagtaaaaaactatgtgaagtatgtcaaagttgaaattggaaaacagcat

SEQ ID NO: 50491 - DNA, 537 bp, Glycine max
  unsure (1)..(537): unsure at all n locations
nggacatatatgtttgactacanttgtgcaagctctcnttgnganataggaagaagagctcatctcttcntancattcttatggttagtcatgaagttctccttataggaatatctatacttcttgcatttgcttagnaagattatcactngcgattctattanattggcttcttggtacttatatgtaatggttttgattttatgaaggagaataaaatcacanngcttgctgtctatattctaacgtatggaatagttagttgcaagatgctgtcaacgtggatcacaacacnacaatgactgatgctgtgagctaacgtggtatttgtaattgcaatatttgctggcttcatgctgatcaagctattgcatgattcatagaggtctactgtcaagaaagaccaattgatgaatcttattaagttcttgattatctattgtcttgagcgctgcttctttactatagagcacacctaatattattttttgattatttagaacagttgttctttcttattatactacaaaggtcacg

SEQ ID NO: 50492 - DNA, 345 bp, Glycine max
  unsure (1)..(345): unsure at all n locations
tatgagaangcttctactcattagcttatggagaagcattctctttttaattttcttctcctattagggcttatagaanagcttatccaaacaaggtccactatatattctgcaatctggtactgtgccatatatatggatggagggtttggacatttgaatatgtgtagttgttgttaataacaatgatgcttatgcctttgggcatgggtttggactatntgtatcaaactatagttgtgtattggtattttggcggaggaattgcacttgcttactacattnttacatgtatattatgtaactggtttcattttattgctacatgtgaggtataactattat

SEQ ID NO: 50493 - DNA, 214 bp, Glycine max
  unsure (1)..(214): unsure at all n locations
tcttctagactaggagtgatcacatgcagtcctcttgaacccttaccacccactctgtcatcatgccgagactcangaaggccaatacgtttagccttctcaatgtattctgaacaaaattcaatggcttcttctgcaatgtacctctcaataatagatgcttctggacgaataagaatctttatatacccttttaagatcttcatgtatcgct

SEQ ID NO: 50494 - DNA, 367 bp, Glycine max
catatcttggtatgaccaggcaaagatgtcttgatagtcttttagcacggccatcatttcttcatggatgggtgcgatcatacccgtgcctatctttacttgctttttcccactacttggtcctaagtccactagtttcgtctcttcttgatgaggccccatctcttgggcctcatgggcaactatattctccaactctgggggaaagcccacatactcatcctctttactgttcgtctgatctgtatcttgctcgaaatcgatggtcgggtcccaggtattagtaccttcgagggactcgtcgtcggatctggcactttacgagtaaagaaatatacatgctaatgaatgagaatgggtagagacg

SEQ ID NO: 50495 - DNA, 51 bp, Glycine max
aaatttctagtgtctcatatatattcccgggactcaatcggacttccgagt

SEQ ID NO: 50496 - DNA, 356 bp, Glycine max
  unsure (1)..(356): unsure at all n locations
tcactcggaagtcctattgagtcccgaatatatcgatatgctcngaaattaaaaccgaagcccctagcaaattcgaacgacaataacttttcactcagaagtccaattgagtcccgcaatatatcgagacgctcgaaatttaaaaccgaagcttgtagcaaaatcgaacgacaataacaattcactcggaagtccgattgagtcccgtaatatatcgacatgctcgaaatttaaaaccgaagctcctagcaaattcgaacgacaataacttttcactcggaagtcccgatgagtcccgccatatatcgagacgctcgaaatttaaaaccgaagctcgtcgaanattaaaagacaat

SEQ ID NO: 50497 - DNA, 240 bp, Glycine max
  unsure (1)..(240): unsure at all n locations
agatgtgacatggaccattgcagctatgttaagaaatatactaatagttatgttatcctcgtcgtgtatgttgatgacatgttgattgcatgatctagtatggcagaaattaacaggtntgaacagttgttggcagaaaacttngaaatgaaggaatctggccagctaaacatatctttggtataagaattcttagaaatagatcagaaggaaatttgaagttgtgtcacgagaaatata

SEQ ID NO: 50498 - DNA, 406 bp, Glycine max
atggcgtgagatatactgtgaggaaatggatgcatttggttatgaaaggaattacactcgcgcaagaaataatttgtgttcttctttcagtggcaaagcaaatccgttgattatactccccaaaatttctaatagctctgcaatcccattatgtttctcagtttcaaaaatgaactgataaaatatattggtgattgctttcctaatgaagggtcggtgcaccatatatttcccatatatacgatgaagaactggcttcaagtaatcccgctccctgcgatcttctgaatcacataggtctaatagtttgagaacaaatgaatgatcgacatatctttttgctaattttgcatcagtctcaggtgatgcgacaaaccttataaggagttcatatacaatttgaaag

SEQ ID NO: 50499 - DNA, 329 bp, Glycine max
ctttgatgaatgagagtcttatgagacacacttcaacagtcaacttctcatcctcttttcctcattcaatctcatgctaccccctattctctctctctctctttcttttcctgcattgaaatttcctctctatacttattatccaaggcactctcttggtgatgaaggttcttcttccatggtttattccctagtggatggtgtctcctctcacctcttctcctttatcttccgctacatctccatggtggaatatgaccaatgaatgacctcattgaagctcacagatgcagcctacatagaagctgcacaagctttcttgcatcata

SEQ ID NO: 50500 - DNA, 469 bp, Glycine max
  unsure (1)..(469): unsure at all n locations
ttcacttatataataatatgatatgtaagataataaatgattttaatatgtatagagttaagaaattgaaattcaaaatttaaaattgtgttgacattaataatcaaatcaaatctgaatcaagtaattaatataaataataaaaaatcaaattatgtcataatgagagatataacaatgataaaaatttaaatttaaaattaaaaagtttaccatacattcataatcataaaatcaaatntgaattaagaattntaatataaaaatcaataaaaatgtgttctaatcaaaatttaaaatgtagtaatttattntagaactggtaatgaataatttaaatttttaaattgtatttaattatcagttaaatattgaatggtaattaattntgagagacttatatatnntattaaatatataatgtaaaanaatatggaatgattatatatatatatatatatatatatat

SEQ ID NO: 50501 - DNA, 419 bp, Glycine max
  unsure (1)..(419): unsure at all n locations
gtggactctaacatngttaataaaattactctgttggctgactaanaaanagatatttattattagagaaaggattatactttttttataattcgatatagaatgtaattnttatttattcaatcattaaattatatctatatactatcgagatcgtttgcatcanattttgttaaaattgaacgacaataaataggtaatcaaatgattcacatttagtatattttaaatttttttattacgtcgattttaatttatatgaacaaaatatcaaatgattctgcattgatataaaattntgcatgtgtaatctatgtgaaagagactttcaatccaacatcgaattntaatgaaacattatcccgttgaaagttatagatgggtgtaataattatcanagttactctagtgtaatttga

SEQ ID NO: 50502 - DNA, 531 bp, Glycine max
  unsure (1)..(531): unsure at all n locations
tatatatatatatatatatttttttacccccatttttctatccgaagatatattatataaggtacaatattatttaatatattacgtaacgatgttaccgtatatgatatatatattatatatatggttaatatgaatatggtcaatataaataaaggctctaatatttatggatatatatattactctataatattcaataaccgatttntaatgcttacgtactaataccgtaatataatcaataagtgtttaatatatagagtacttatttatatatatatacagtaatatgtataatacatctaattacatatgtatatgtaatgtggctacttatatattataatatattaattaatgatcgcgtatgatatcggtatattaacttatatataatagctctatattatatatnttatatagatatacaatagatatcaagcctacacggcattgaatgcgaactgtagacctatctgttctacgcttgaagtagatgggatgtatcatatatacaatttctaaggt

SEQ ID NO: 50503 - DNA, 379 bp, Glycine max
taaagtctcacgatcgtcacgtgctcatgcaacttttgttagtcgtggctatatgagacatcttgccgaacaaagtcaggttcacgataactcgcctgtgctctttcttccatgctatatgtagcaaagtgattgatccagtaatgtttgatgagttggaaaatgaggacgcaattatactgtgccagctggagatgtattttccccctgctttctttgacatcatgattcactcgattgtgcatctggtcagagaaatcaaatgttgtggtcctgtttatctactgtggatgtacctggttgagcgatacatgaagatcttaaaagggtatacaaagaatctatatcgtccgaaagcatctattgttgagaggtacat

SEQ ID NO: 50504 - DNA, 413 bp, Glycine max
  unsure (1)..(413): unsure at all n locations
ntgcggatntggtcttcgccagtgaaaggatcgatgtgggttctaaaagaggcannattgatcatcctactangacgactgagaaaactggggcaaatgaagagggtgagaaagagggagaaacccatgctgtgactgccattcctatacggccaagtttcccaacaaacccaacaatgtcattactcagtcaataacaaacctcctccttacccaccacccagttatccacaaaggccatccctaaatcaaccacaaagtctgtctaccgcacttccaatgacgaacaccacctttagcaaaaccaaaaacaccaaccaaaaatgaattttgcagcgagaaagcctgtagaattcaccccaattccagtgtcctatgctgactngctcccatatctacttgataattcaatg

SEQ ID NO: 50505 - DNA, 552 bp, Glycine max
  unsure (1)..(552): unsure at all n locations
agccatggtgatccctgttgacctctgccgnactctaagcacctgagctgcagctntatataaagagtgatggaggagagtctcacttgttgtgcttctttcattgctggaatatgatacanattactataataaacttgggattgagcaacattaactacctnctcatatattcatatacatttgattttaaaattatcaatttcgtgatttaaatttttgtcttcataaagcattngagtcttttgttcacataatatgtataccactaacaataaagntccaacctatgcatcagcctgaaatggaaatangaaggggaggnnggngnncntncnnnnatnnctnncnctccnctcctctttattctctctccattatctatccacgaatctttttaactcgcactccttttctctaactttattattctctttttcatcatataaactatccactttttactctcgcacatctttacttattagctatcttttaatatgtttgtcgtctattaattaacattcttactccttacactttctatagttt

SEQ ID NO: 50506 - DNA, 247 bp, Glycine max
cttaagaataatgtgtataagtatttttaacattaatagcaatggactcaaaccaatgtggtgagttagttagaaacattatgtagggtgatcactactacaattaaattataactatattaaacactaagtactaacacatagttatatgatcttatggaaactagtatactaataagcctacagaactaccctgattaataagtggagtaaggtatctttaatatgttatgaaatattaaaggta

SEQ ID NO: 50507 - DNA, 440 bp, Glycine max
  unsure (1)..(440): unsure at all n locations
ncaatggttgnncctgttgatcccttccggaccttagcacgcgctcacttgtgtatgttaaagaaagtctatcaaatttaagattgtgggagctccaacaactgaagaacgtgaactgaatgattggaggtggaacctacttcggggaggcacggggctacgggatttcgggagaaagccggccccccgtattagaacgtgaaaagaagggactacacttatcggaaagtcggagttgtctacgcacgggaggattacacccacgcgtcgtaacaggacgacaccttatcnatgtgcaatatgactcaaaggtttatttccttttatgcttnntggtttatgtttatgtttggatttatctttggcacaggggttctcctctctatctaatgcagagaacaactcgtgtnttaacaacgtgtagtgttgctttccaatct

SEQ ID NO: 50508 - DNA, 573 bp, Glycine max
  unsure (1)..(573): unsure at all n locations
agggacaccagatcgactccgttgtagccgcttaanaccttttacatagtagcagactacatggcatctgcaatcaataaactatatctgataagtaaacattaagtcgatccaatgtgcgcatatcatacaaaccatgaacatanggctcaaagagaagnntgtatcatcataattcttcatcatctaccattgacaatagatgttagcataacaaccanacaacataatgagaagtgtcctagtagaagcttccaagagcaaaagttcacttttccttttgcaaattctccnnctctctttgttgattgcccttcgatgagataaattgcatgtccanaaccatanngattcacaantacatagaaaatgagaggaaatatanatccttgcattntntgcttacacnatgctctttctgttgtacatctcatcaccatangaaaatcatattaaanacccantanngttgtcaagagaattcanagtcattcggctcatcgtgatataagacanagtgatactactgagagagagatctctactatctcagtacaacctacacacatgttt

SEQ ID NO: 50509 - DNA, 427 bp, Glycine max
  unsure (1)..(427): unsure at all n locations
ctacttcacatcgatttatttggtccctctagaactatgagtgtaggtggaaattactatggcttagtaatagtggatgattactcaaggttcactcggactnntgttttgagaaccaaaaaaagaagctcttgatgcttttcgcaaacttgccatggtgattcaaaatgaanaaggtctcaacattgcttcaattagaagtgatcatggaagtgaatttcanaatgattcttttgaaaacttttgtgaagaaaatggaatttaccacanattttatgccccaagaacacctcaatagaatggtgttgtggaaaggaaaaatagatcccttatagaaggtgcaagaacccttctaaatgaaacaaggttacctaagtacttttgggctgatggtgacatactaattgttacacctgatagagtaata

SEQ ID NO: 50510 - DNA, 197 bp, Glycine max
  unsure (1)..(197): unsure at all n locations
ataatgctcaagatcatgatgctcaaaatcaccaataacagaatgcacagattcaccagtaatggaatgctcagaatgatcaaaaggtatanaatgatgcctaactaatctatganatgtcctatctatctcangatcanagggttgtaagtcaaatggattgcctctagtcatacactacattcaacatgcacaca

SEQ ID NO: 50511 - DNA, 283 bp, Glycine max
  unsure (1)..(283): unsure at all n locations
gttcacgataactcgcctgtgcttttacttccatgctatatgtagcaaagtgaatgatccagtaatgtttgatgagttggaaaatgaggccgcaattatactgtgccagttggagatgtattttccccctgctttctttgacatcatgattcactgaattgtgcatctggtcagagaaatcaaatgctgtggtcctgtttatctacggtggatgtacccggttgagcgatacatgaagatcttnaaagggtatacaaagaatctatatcatctggaagcatct

SEQ ID NO: 50512 - DNA, 587 bp, Glycine max
  unsure (1)..(587): unsure at all n locations
ataatactatggagcacctgcngcatgctagctngccactcagctcgcccaggcgagcatggttgcttcctccantancatcttgtctntggaggaatcttctggagggcccatgtgggcctgttngctatntgcacccncattcttactaagtacacncccctgattttattggngactctttattctcagagctacggaaacttacgaatctcctcacgatacgttgttatctttccgtaatgttacagaaccttgcggattacataatcattccgttgttgactcacggaatgttacggaacctcactaatcgtgcaacgatgcttctattgattccggtgtgcacggaacctatgattgcgcacatatttcttgggttccgcatgcccgaattcaccaatcgctatgtggggcaagtcctacacgacaacaaagttgatgcttcagcaatgtcccaaacaaatacggttacagtgccctcttattgctttatggaataaggaagaatatatacctatttcctccttcgtgacagagccggaacataaatgtcgctctatgctcgtccgcggacacagacaacg

SEQ ID NO: 50513 - DNA, 205 bp, Glycine max
  unsure (1)..(205): unsure at all n locations
gtattagattaacatactggctagtctaataaagtaaaaacatacctctttctttagacaaacaattncatagaagaagtntgattatatataataattgaataaaataaaaaacagttgtttataaactattttgtacggacaaccataatatatcaaccttctatatttcacctggaacattgtgtcggagagaatggtaaag

SEQ ID NO: 50514 - DNA, 389 bp, Glycine max
  unsure (1)..(389): unsure at all n locations
atatcttatctctgaaaagctttgacatacctgctgcattctttaagggcatactgtttccgctatgtgaggtattttgcttggttctatgnntggttttgatgttctgaattaatcattggtggatattctcttaggttctatttgtggcattctattaattcttacttatggatagactttttccttttcatctaaatacatttcacgtgtcctctagggtgacatgcatctaatattggttattataattactggaatatagaggggaaaaattaagtatgaaccctgatttgaaaatggaaatatggataacatgcatgtggaatggaaatggactgaatagtgacagtctgttatgatgcattggaatgattgttggtttcatg

SEQ ID NO: 50515 - DNA, 585 bp, Glycine max
  unsure (1)..(585): unsure at all n locations
naagggaattaatgacgcctggtagaccnctcatanaganannacaagnntaaacatgtaccctcnccattctgttagctatcatgtccacagatattcatatatgtcaatatagatnganaagtaataatcatatcacactatcacatgatatatgctacggcctacgggacagctcgagcgaacanacttgcttggtgagtaatgctaactggttgtagaacacgcccaagtaattcatatcattctacatcacttgacatgggagttcggatcaatgtctnttgttctgcgtgatagcacggatgcagatcaacttcgactctacttctaaatctagacgtgaatgatatcaccaaattaataattgataaacttngcaatagcaggtgttgcaaattgatgaagcacaagactggactagaagattatgtctcttcataaatgatacatgaccatccccttactgaataacgctccttattggagcaaattcccttcgcccagaacaacctgaacatagcttcttctggctaatgctttatgcaggagacatccaattctctcccttgaagaacccttcaa

SEQ ID NO: 50516 - DNA, 302 bp, Glycine max
  unsure (1)..(302): unsure at all n locations
ttcttgataaacttcttataaccactctaagagacaaaagaacccagtgaattaagctgtttttccaagttaaaattattctatacataaagtcaaatcagattctggaaaacttgtacacattaatttatatataacgtnttggtttttaaccaagtcacatgaaatagtgtgatccatattaccaaccttacttaataagataagggctctattttaacttacgagaaagaatatattgttttcttaactatctatatgaagtaccatanatgagtaatatgctaaaacttgttaagtat

SEQ ID NO: 50517 - DNA, 310 bp, Glycine max
aacactttattgatgatgactgactctgtatctcaaaagcattcgtggacactcgctcagaatgccatgcaaagttttgttctcgccgaaagagctccaccatggccaccggagcagattgttaacccatcacctgaaaatggagaacctggcataaaactctccccattctccacttcatacactggtgcagccagcgaatacatagaatgatatgcaacaccagggggtccaagaggaccgctcttgtactttggccttctctggggtgcatgaagtgaggcccttcccgtgccatctcctctgatac

SEQ ID NO: 50518 - DNA, 499 bp, Glycine max
caagaggtatgacagtgctaatggatgaggccctagacagtttattgtgaaagactagtctataaggagcgctctttcgatatcactcttagttgcataatgaccttccttcttaataatcttctaggacgaatccttgttcctcttatttcatatcgccctatggctcttctgaaagcgacaggaccatactactatcttccttctctcgtatggcacttctagatattcttcctcatccctcttatgctctatgggtttaaaaagtgcaacccttaagatgtcttgaccttggctttctgtgataacagtgagagccataacattctgaagaaagcttcctcttaagatgctgctctacccttatgccgagctggactaagacatccaggtccctatttggaaggagctcaacactggtctctcatatgcgatattaagtctactaacgaccctaccaaactgtgtctttgctcctactgacgccaatactcatccg

SEQ ID NO: 50519 - DNA, 483 bp, Glycine max
  unsure (1)..(483): unsure at all n locations
tgatgtgcattcaaatatactatgtagacgctaatgaagacttatcatngtttatttaattgtattcattatgcgatataatctgttgtaacccgttactaaccaattaatattatcaactactcgtntggtttagcaaggaaattgatggtccaacaaatatcatttacgcgtgcagcatacatcattgtcataattgacaacacataatgacatgcatgcgtattacagtttgagcgtgacaacacattggctgacttcagtacacatgttgaaactagcagtcgctcgacaacacattggttgacttgactacacattatcgacaacacattggctgacttgactacacatttacgcgtgtctatatttttgtaaacaaagttaaacaaatgctcggtcacaaccatctatatatatggcagactatgctactaaatcacacaatatcttgctttcaaataatctctctactgatacaca

SEQ ID NO: 50520 - DNA, 539 bp, Glycine max
  unsure (1)..(539): unsure at all n locations
tgatgatgctnnnntttgacnnccccattgatnnnncnnnnnnntttgaataccattgcatgtacgngacacatgataccactcaagcttctctgcgcaaaatcactataacaccatattaaggaccaattctctatacgatcctctttgcttttatcggccaacatggaccattcgaaagcattaaatcgatacatgactttactgccttctacgagaactacgtacgtctgatttccatcttgatggaggatacgccagagcaaaagcctcgcttttgtcgactctgtgagatggctagaggtgcaaccccttagctttctcaccaagtaaaatggatcatcttaaggccaacgccttaatgaccaccttccagaaaaagaatactgattcgccatttgaaaaactaccaggtcgattccttatacaattaagaatactagagcaaggaaaancctgtgacccacgagacaatatcacaaagctataagaataaaacgtaaatgaaaatagacaattgagcatattgccactgatat

SEQ ID NO: 50521 - DNA, 313 bp, Glycine max
tatatatagaactgcattaaatattctgataaaaggatgttaaattgtgttaaatagtcaaatgaagagttcttggtataactataaatatattgaccctattcaactcaagtagatgtagtagatttatttccatgaaatatatttgttatctcaaactataagaacactataatgtcttacaaataaatttgtatcttcacatatattatctaaaaatgagtcaaatatgtttttctattgatcctattgactttctaaaaatggctataagcatatcttatcttctaaagtagttttttctgtaaatgag

SEQ ID NO: 50522 - DNA, 611 bp, Glycine max
  unsure (1)..(611): unsure at all n locations
acggaatatgtgttgaggncnctngttgatcnccnctggcacnggacncncanagncacctgaggatgcaactanactttcatatgtctgngaatggactttattatantactttcttccaaactgtattgcactgaatcattctggctttatttggtgaaatgttacattccaagatagtaatgtcaccttcacaatcaccattggctctcaagcttttagaacgcaatttccaatcacgctatcttatgcaatgacaattaacaagtctcatggccaatcactttctattgttggaccttattcgccataaccagtctttagccatgtgagattatacgttgcattatcaaagggcaattccaagctatgattgtaagttcttattcatgattaacaccatacgacatatactccttctaccantgtattcttcanagatgttctcaatatcttacatgtaactctaaattttgaacatctattgtctattattgcgacattcctacttgtatttactctatacatctacatactcgcatgatgaatacttctacatcctcatttacatgtatgctgtatcttatcacacatattctcttgtttattcg

SEQ ID NO: 50523 - DNA, 558 bp, Glycine max
  unsure (1)..(558): unsure at all n locations
natgacacgccttcgatnancccacactaatgtagaccattgncnngnnccnanattagataccnctagcatanacgcgacactatagaatactctatcttcatgatgatgaatcaattattcttgatgaggacgacacatttcaaanaggcgcatttaagaatgagttattccgcttcataacaagatcacttcaagaatcaagacaagacatcatgaagaatcaatattcaagagaagatgcattcaagattcaagagacgaaatctagaacaagtcaagacttcacaatggaagtattgaaaaggctttttttaaaactcaacataacacagagtgtttatacctgagaacgtgatgcaggagacttgctaactatggtaaatgagcgcctgaaattatatctttttattggattctcaacgccctgaaaatgataaagtgttgcacagatacattcattcgtgagacaaattaaaaagaaaatgtcgatcatgggtactaaacatactgtgaaagccacattttgatgtttacatgggctcccataccatttcc

SEQ ID NO: 50524 - DNA, 162 bp, Glycine max
  unsure (1)..(162): unsure at all n locations
gagtgaatatgtgcaagtcttgaaggcggaactcanaagaacccaactggtcaaagagaagttcaagacgacgaccatcaaggtccggaaagagtgtgacangctgaaggacatcaacatggccacagctgaagcattagaacaagttgaaggtatgatatt

SEQ ID NO: 50525 - DNA, 279 bp, Glycine max
  unsure (1)..(279): unsure at all n locations
tctgagtatgacagtcaccgctttatgagcgctgtacaccagcagcgcttcgaggccatcaagggagagcgacgcatccagctcanggatgacgagtatactaatttccaggaggagacagggcgccggcggtggacatcactggttacccccatggccaagttcgatccagaaatagtcctcgaattntatgccaatgcttggccaacagaggagggcgtgcgtgacatgaggtcctgngtgaggggtcagtggatcccgtttgatgcagatgctatc

SEQ ID NO: 50526 - DNA, 70 bp, Glycine max
taaggctccaccaactaaacttagacatgttgttcatatgaaacttcacttacctttcacatcaacatct

SEQ ID NO: 50527 - DNA, 277 bp, Glycine max
  unsure (1)..(277): unsure at all n locations
gagtcctctcacattgtggagggttgagtcatgtctcagtataanaantagcagtcgaatggtcaaaatcagaatgtttcaaatcaccagcaacataatgctcataatgctcanaatgatcangatgcacactatgcctaactaatctatgaaaggttctatctatttcangatcaaaggatngtaatcatgtggattgccttagtatgcactatatgcaacanatcatgtatttctcaaaagcaccagnggtaaaagggggaaaactacactatca

SEQ ID NO: 50528 - DNA, 466 bp, Glycine max
  unsure (1)..(466): unsure at all n locations
acatgtggcctcagatatcttaagaaggggggttgaattaagatattacaaactgtttccccaattaaaaattctactttgattctaatgcaagttccaagttcccttaaagatgaatttctaaatgatgattcaaattaaacaatctgaatgtaactgttaagcaacaataaataaaagagtttaagggaagagaaagtgtaaacacagtttttatacaggttcggcaaagtccgttgcctacgtccgatccccaagaaagccgcttgggagttccactatctcgtaatcctttacaccttctgaaacacacaaggacatcccttcctttgtgttcagatgctttacaacaagagactctcagtctcttagcccttngatcagaaagagaggaagaaagaaatgatcttcttgaagagacagatgttacaatgaagtgctcaattccttattgaatgtcacaagt

SEQ ID NO: 50529 - DNA, 98 bp, Glycine max
atctttgcttcagatcatagtggtccatcagaatggtggctgtcactgtcctcttcttctcatgtcatagaattatctcctagtctcactcatgattc

SEQ ID NO: 50530 - DNA, 377 bp, Glycine max
  unsure (1)..(377): unsure at all n locations
gtcactntacatgtgttacactctngagcacatagtgccaatatatagaccagatgtcatgcccagcaccatcgatcaatatnggcattgctatattccttagggatatacgtctctgctgacaaattggagtggtttgaccatattagattttatcatggcatggaagtgcctcaatatgctcaataattcatgtcctaatgaggttagatgtgagaaagaatggctttagttagagattngagttaatacgcgccatgtatgtcaccgatatgagacatagagccttcatttgacacctaagcaagaggaagagtatcgcgagcttctatgagacatatagccttcatttgaggaggaagattgattaccttact

SEQ ID NO: 50531 - DNA, 155 bp, Glycine max
  unsure (1)..(155): unsure at all n locations
taaattctactaaggtttatacaaacaaaagaaactttatcaattcacgctaatcaggaaaagttccaatgttcagggttcacactcaacacaagaacctatccaatttacaacaatnttgcatcatgacaccaattggtctgtcaaacacaatc

SEQ ID NO: 50532 - DNA, 377 bp, Glycine max
  unsure (1)..(377): unsure at all n locations
taataagtatgaagcacatagtaataaataaatagctatatttcataaaattgaagatagtgtgtagccactaaagaattgcatacaacctccttttctgtgataccaaatggtaacatcaattttggggaaaagcttnctagtattaagactntctttcttctagttgtatcttacaagattaccgcangaatatcatttccaagtaactaacaagaacatacaaagcttcttttaaacatatggcagtaacacagtatctaagaactactacatttatgaactttgcatttaccatagaacaaattgaacacacaaataacatgtgccatccaacatacnntgaatttctagttgtgactatgagtctcatcaca

SEQ ID NO: 50533 - DNA, 369 bp, Glycine max
  unsure (1)..(369): unsure at all n locations
acaatggccggtgtcggtcggtatatggccccgactgatatcctaatntcatttanaacagcaggccgataatgtttttttaccgtagaggaagttttttgtattgcttgtgcctacaaaatttacaatgtaagtcggctaggatnttctcggcgagctcaaccgaagatgtgtttcagccgacacttggcatttcttcattagtcggtcaagagaacgttagcccacgccggcacanaaaaaacatcattcacagaaattgatcgaaaaaatgatatatgacgtccgcgtggagagatgaccgatcgaggtcttaaaaggaagcaattaccggatgacgccgatcgaacatttcctaatcgacatcat

SEQ ID NO: 50534 - DNA, 423 bp, Glycine max
agaaggtgccctgtgacctaacacggcgactgggagcactatgtgtgcaggaattgtctgaatatagggaaacatacagcaaattcttgctatgcatgagacaaaaacatctgcctatgatgctatgacagaatagtttcgaatgccaatgcccaatgtgtgttcacgacaagtaatgtgacaaggagtaacatgcacacaccatgatcgtcacaaggtgctgatttcatattcaagttagtatgttgtatgacatgagcaaaatctactgatgtgagcaagaaggaggatgtccacttggtgtacccatgagacatgacgatgtcagattagagaccaaactgagtcactgttaataataatattgtactacctgcaagtatgctgttgtggatacatccctctgtggatgaaaagctatgc

SEQ ID NO: 50535 - DNA, 309 bp, Glycine max
  unsure (1)..(309): unsure at all n locations
tcaagaaacacacacacacactntntcctagtcgatcactcacataaattctncccctttgtttttgaatttgtgcatatcttanaattaaattgatttctcatgtgagttcttgatgtaatccctatttctctccccctttggcatcaacaaaaagccaaagtgtgtaacacatttgaaataatcaaataanactaaacatccatacaacattcattgagaaactaacaaccaaaccatgaagcaagaatcatgaagcaacaatcataaatagattatctataanacccatatagtcaaataacatac

SEQ ID NO: 50536 - DNA, 437 bp, Glycine max
tctgtaatcgattatatgctatctattcttgtgtaatcgattatcagaacactaaatagggcttttcctcaacaaaatatctatgtctatgctaaaaacatctaactatagcagtcatcaatactgatactcatttaattcaatcaaacaagaatcaatcacacaataacacaccaatcaaacacaattaaaatcttataatcaaatacaatcaatcaatcattaaccataaatatttcaatcaaccaatcaatccttatttatccaaatcactaatatctaagaggcctaattctcttctaatggaaaagaatgtttctttggtgagagggtttgtgaagatatcaacaagttgattctttgtatcaacaaattctagcacataatctcccttcagaacatgatctcttagaaaatggtgtctaatttctatatgc

SEQ ID NO: 50537 - DNA, 421 bp, Glycine max
  unsure (1)..(421): unsure at all n locations
aactgagttgatnccttgaggactctaacacgcgctgcactgggacgtggctcttagaaggccccttttttcttatatcccttctttcctccttggtaagacacattattgttaaattctggggaactgtatttctaggtattatatgccaagtttacttgggctcctcacggttgcagatctgactgcgtaaaactacactgtccgtgtggccatccgctaaacttgtgggcaccaaatatgctagacattattatgcatctgttgacttggaaatcctgacaccagctggaacgtggaactatagatatgtgataacatgcatgttatgtattattacagatatgtcgatagtgtacgaaagcccattaatctaaaagcagtctatggactcatattgtatacgggttatttcacttgt

SEQ ID NO: 50538 - DNA, 503 bp, Glycine max
  unsure (1)..(503): unsure at all n locations
ntttatggaacactcgtcattacntcgtagaaccnctnancaccgcngctgcaacttaatatngantaaattttcatatctgctggaatcgacactattatgngaatctattacacaggcatatttgatccaaattaatagctgttgttatcatcttggccactggtaactatacatcctcggaatcattacccaaagcaatctttgaaaaacatttatatacattttcggcaacctttgcttcttagtaagattcctactattataactctcctaacttaagatgcatgacatctctgagttactattctcgtctgaaaagctgaaagctggatctttgcatctacacattctttgatcttggaatcaacctacaaagagcacattccccgcgcaaaaaaatatctaagctcgggcctataatatcattcgagtaaactttcacaagtaacaagccgttaaccagaggagaacactttctcattgaaatgaagcaaaacacc

SEQ ID NO: 50539 - DNA, 413 bp, Glycine max
  unsure (1)..(413): unsure at all n locations
gttctaagagggatatcttatgttntatagggtgtgtgatctagagagtaattagagtgaacaatgaanaacgtgtaacatcctttacccaaaccaagttattaaataaaatattacagaaataggatataattttttgttgcggaataaatgataagtttaataaaaaagtctaagttgattgaatacgtgagtattggaattccttatatcatgtttaattcttatatataaaaaaaatatgaatttaaaactntaataaccatgcagtacaaaggcatcacatatatcctcataataaactcaaacttcattaaatactataataacaaataaaaggtatcgatcgtcaatgatgatannatatatatataanaaaaaggtatatatccacccacacttaattgtcttac

SEQ ID NO: 50540 - DNA, 497 bp, Glycine max
  unsure (1)..(497): unsure at all n locations
agttagagtgaagcctgtgacacctgcaggccctaagcactgcgctccgctgttaatacatgagttgatcatgggtagagttatctcttttgtttagagagcgcccactgtaaataactttcaatgttgcctccaagaatggcccgagagcttgctcaagaagccaggaagacaggcggcgatgaactagtccgctccgagacacagcaccgcttaagagcgtgacacaccagncttccaagcatcagggatggcgttctccgggcgagcgtcagctanggacgacatatactgattcagatgaataggcgccgggtgggacactggtactccatgccaattgaccaaaaagtcttgagttacgcatgttgccacagagaagcggcgtacataatctgtgtaggcaggatccgtcgagnaccttagcaatctggatatcgatgtgtgaaggcagatgcatatgcaagagaccgctgtggtcatagagctcccactgg

SEQ ID NO: 50541 - DNA, 466 bp, Glycine max
  unsure (1)..(466): unsure at all n locations
nttaactgaatatgcaacgttccaattgtgttttaaatggtgtaatcgattacaatatattcgtaatcgattaccagtgtatctgaacattaaaattcaaattcaattgtgaagagtcacatcttttcatgaaatgctttgtgtaatcgattacatgattttggtaatcaattaccagtgacatgttttgaataaaaatcaagatatgtaactcttccaatggttttcaggtttttctcaaggttataactcttccaatggtttttcttgaccaggcatgaagagtctataaaagcaagaccttgaattgcatttcaataactntttgatatattcttttacaacctttgaatctctttgaacatcttcttgaacttcttcttcttcttcctttgccaaaagctttctgagatttctggtttcgaaactctgttctttcacagaanacanaagtgtactattcatc

SEQ ID NO: 50542 - DNA, 628 bp, Glycine max
  unsure (1)..(628): unsure at all n locations
actgccgggttgannncntttttgatcaccctttcacgngcancttnagncacctgcngctgcagcttataataataatatattganatggaagctaaaattgatctttcatgacttgagacacctattctctgctattgcttttatcgaaagcgtagcgagcttttaactttatgaataatgttatataataatacaataatacgccnatgagaaaacatgaagattggtactcatcaaaacatacgtctggtcagttcgggtaccgtggaagtcaaatacttaatccgcacccgcccgtanaaaccgctactatccannttttatttatntcatctcaatccgatcccaaccatgcacncttnntttatatcacggnncagtntnggatntatgccntaccctagtgggantgaanannaatannataataanaccactaaattcatatcaacatatttctttnttaatttatattntnntaaatcatttaatatatatatatatatatatcttatcgcacaagaactcatttnttatggagataattnttttcttaaaatatcttaaaaagaaaaataatnnttgttgacaattactccccatactctatcgtgcatcgcgtacn

SEQ ID NO: 50543 - DNA, 157 bp, Glycine max
  unsure (1)..(157): unsure at all n locations
cactctctttacaaatgatgaagatgtnttggtcaacttcgaatatcactatgggaattctaatttacaagacaagaagcatccatgggctaagttgatcaattttggtggattattaatatcgagctcgatagataataattaatctagcatactc

SEQ ID NO: 50544 - DNA, 536 bp, Glycine max
  unsure (1)..(536): unsure at all n locations
tgagagctcntatgaacccatgattagcgacctattagactatgctgagngaattgaacgttgtgtcgcgcgcaanattgttagctgtggctctatgtacttcacagagagatacgtggttgaacaggacacattaaaggattaagaccataggctcttacaaataatgaggaatataaatggaatgaactgaatctcttatgactagcttaaagaatgagacgacagttagcacatgactcacaccacttacatggttattaaagtcttacttgattatangaatggaagttatggagcagtagtgtgtaatgaaagtctgctagcttaagaaaaatattaactataccgtgtgttctgttcaatgccatgacacatatatatnggtaccaaacaaaataatataagtatatatacatatatatacgctgacctatcacgcttataacgcntntctataagcctaaacctgactattaatttacacgctgttaaaaagctcgagcctaccttttattaatagccactcaggcccg

SEQ ID NO: 50545 - DNA, 146 bp, Glycine max
agaaaagaactcgaagcaaaaaaaagcaagctgagcaacgaaacatgcccagacaaagagaccacaaagtccctgaacacaatcggccaggacttttctgcccgcaacaaaaaaacgacaaaagcgatatcagccaacccaaccga

SEQ ID NO: 50546 - DNA, 446 bp, Glycine max
  unsure (1)..(446): unsure at all n locations
gatggctcatgaacccttgttagcgacctttgaacctgccctccgaacatagatactatcgtcgtgcaangagttgntcaatgtgtatgactttcatgaaatgcacactgtctgaaaccaacatcctttgcattttaaagcctttaattcaagactagttgtctaatgaaaacatcttggaaagcaaagtaaatctgtgttaaatggaagatacagattaatgattgatcaaaatagttccaatctgtgcaagcatgtgagaatgaaaaatggatagtgacagaggtttatactattaccccacctgngttacatcaccttccttaagagaattcccacacacttgtccactgaaggatacccttattcaaacttcattccaccaactatctacctactcatactcacatgattttttacgcctactaacttgaacgtttgatatc

SEQ ID NO: 50547 - DNA, 91 bp, Glycine max
tcatctaatctatctaattaatctatatacacacatcagagcccacattcgcagtctaattattcaagtgcagagattctaacttctaagc

SEQ ID NO: 50548 - DNA, 311 bp, Glycine max
atcttgttgtatggtttacgatgtctctagaacatttccattggatttaattatgaaatctggcattttcaggtgaaaaagaggctaagttttgaattgcaaaaagtagcagctgggctaagctcagcagttgggctaagcgcatatccactgctaagtgcagcttcagcatgcttagcacaaaggagaatctggaagagcatcagcatcaaagccacgctctaagcgcgagatcagtgtgctaagcgcagcaggtgccttcagccaggcaaagtgcgagaatggcgctaagctcaatttcacttactctc

SEQ ID NO: 50549 - DNA, 619 bp, Glycine max
  unsure (1)..(619): unsure at all n locations
nnnaagggaatgtagttgactcactgtgcangctccatcataagtgtcagggaaantatttgtgttaatggagaatgcttctgtgtgatggtggcaacctcgactattgtaagagttgtatgcttgtgacgcatgtcaagctcccctagctaggacgactgtatgttatgctacttctggcaagttgtctgcagtggacaagctattgatcttgcaagcataattagacgtgtcaggtggatgatgttcttatatatgatgattcagcccttttctgatcattggaggatgcatagaagacatatgtntcattttgtctttgctacaggcgagtgcaacacacacatactactcttgcatacgtatcactcatggagggggtgtgtactgaagatgcactacgtggtgagtggagctgatcatgactaataaataatgcacatcttagctatgcaagtaacgaatgcaccctctcctaatgagtgaagttgattttgattgcacattttcatttttcttctctggacaagtggacactattacaggttgacgattgtcatgattctaaataaagcttcaattcttccaccagatggatatgcacattcccatatcatcg

SEQ ID NO: 50550 - DNA, 381 bp, Glycine max
  unsure (1)..(381): unsure at all n locations
agatacccacatataaaacatatcctcctaagaaagcaccagagtaatcatgaaataacctaccatagcgaagggaaccatgaaatgattctaccagccttgggtgcatgaatattgatgttaaaagctttgatgacctgcaactcactcaaagaggatctcatacagctggaagtaagataaccggcccacaagcaaaatatgagcanacataaggatcattgcttgctgctatgagacaaaaagattatgaaagcaggcttgattttggcaacttaagatcgcccaaaccatagagataaaactagcttgaacaacatctttagcttgcgggcgaacaactaatttgccaacaaccaggataagatccataggagaagc

SEQ ID NO: 50551 - DNA, 356 bp, Glycine max
tcatcatgtgaagtttcgtcctttttctctggcatatacatgagtgaaaaatcagctagatgaccgactatatcattcaagaaagggacatattatgcagagagatataccttcagaacacacatttgttgcactattggaactgcagaagctttttcacgaaacaaagaattttgtgcagacgtaaaatgaattgagatagttcttgaagtattaagagataacaaaggtaactcattataaagatccgcatggtgctgaagaagtgcagtaatctggagacgttaataaatattaaaatgaatgctcaaagaagtgtagacaatagacgatcaattaaataccataaaataaat

SEQ ID NO: 50552 - DNA, 445 bp, Glycine max
  unsure (1)..(445): unsure at all n locations
agaatagtgtacctgtggccctagcacgcgctcactgccacaaagactttgtactagaaattctttctctaagttttatcatcactgatacatactcaactggngngaggttatttaaacttttgaattatgcttatcttctgtgaatgatgcatctcatatttgatgtatatctgtactacaaacatgaactcataataagtggcaacatattctattattgtatctttctgccacttactatgtatacttacaaatttgtactcttgaggctgaacatcataggacccgttatctcttaggcagtaaaacattcaagatgatgattaatatgattgtcacacgttgttagtatgctatctgcaatatgacataggcaccgctagaggcctcctagctacagagtcaagatgcttctgtgaacgctagttaaactaggaatttt

SEQ ID NO: 50553 - DNA, 377 bp, Glycine max
  unsure (1)..(377): unsure at all n locations
acactcaacacgctgctacttaaattcttcacagtgtgatgccaagtanacgcagcanaacctcctactggcttgtatatatcaatcctagtcaaattatcattgttgatatacacatcanacactctntcccccacccttctcacccttccttcaatctctgcaaaatgcagccacaccaagtaatcgagcttcgcgtccacgctcaattcgtactccagaacaccatcaccctcctccgccgtcaccgccgtcatcgccgcgctctggtacagcttctccgggaagtaaattggcttctgctcggtcccgctgataccgctccgcgtcgacacggcgcggaccttgctccggccggntcggaagtcggagtccga

SEQ ID NO: 50554 - DNA, 451 bp, Glycine max
  unsure (1)..(451): unsure at all n locations
caatttctcactaagtaaaatggatcanttttaagttccaacgccttanaatgnatcacctttaagtaaaaaagaatcacttgataagaaagaactacgtangtctgatttcctcatcgcaattgggaaatacgtaggagcaaagggaaacacccttgtcgaccacacaaaaagaaaaatataaaaagggcataaaggatataaagacataaaanagggaacataaaaatcaaagtcatgtttgcacattcgattaaaggctgccgtcccttgngacggacgtgtggngtgctaataccttccccgtgcgtaaatacaactcccgaacctttcacttaanagttcgtagatcgcgtcttttctggttnttctgacgttntcctcanataaacgttggtggcgactccgcgtgtattcctttcgtggaacacgcatcccgcgagtcacgcgt

SEQ ID NO: 50555 - DNA, 459 bp, Glycine max
  unsure (1)..(459): unsure at all n locations
gctgttccaacctttattaattcattgtatataaacttgtcacattgaagacttgaatctaatagacgggatatttaccttngcacaaggacttcaaatggcacctgattacaagcaaataaattgataaacatgttatggagtagaaatttataaacatattctatatgaatttggattacaaagtatagcanaacatttacaaagacatacatcttgaacaaatgctcttgatttatgtccagtagcatatgagagtaaggatgtcatcatcggtcaggtcttcacacggatccaccttcttcatgatagcattaagttacgtggaacatgcattntagacaagttgaatagggtcggtctgtagagtaaattaattttttagggtctatattcggtccataaaagtctatggataaaggacaattccacgcgtccaaatgctaatttgaaaaatat

SEQ ID NO: 50556 - DNA, 568 bp, Glycine max
  unsure (1)..(568): unsure at all n locations
aaaattggtgatacnttgttggaccncttaacaccgcngctgcagctgcaggactnggnctttttataataatagtaataataagatatgtattacttanattctttctccaactttgaattggacgttcactttggtaatcttgtgtaataaaacgttcgctctanatgttaacacatattatcgaggtgacactctaattctgattggagacaataacatctaatgaacaatgaactgtgtcttatttctgtccaataagaaattgtgtgctcgactgtantaacttactgcactctgttgcatacngaattgtgagaattgagagggtaaacaaatcaatttatcttgccatagtggaaaattgtatatgcttctgaccattgtcgaagatatttattctgcttgtgatatttccagctaatggaagagactgcagagtgctacattatcccaatgagattggctctatagattgctcaaaatatctcgggaaccaaaacttgcctattatagttgccacattttgctattgtatttagatcactcatgttgtaaaacagatgcg

SEQ ID NO: 50557 - DNA, 443 bp, Glycine max
  unsure (1)..(443): unsure at all n locations
atgagggttctgaatgtggaaaattctctatattntatgataaaacaataaggagatcagttacaattaattggcaactcatgatctttnttttgtttgtggattgcaaaagatagaagtttaagactatttgctgctttgcttctgttggtgctaatgaggttgagggattatatcacggaaatcatagcaacaaactgagaaataaaaaaaaagcagcaggggaaataatgaagattacgatggaaaagctctttattntatttaggcattatgttagcctttacattgtgtttggtgtctcgcccatgttaacaatattaattatgtgaactctcaactcattngaatttgtggtgctgactagaanaatcttttaatgtattgtgttctatttcacgccagntatttgatatacacacaataataagggcatggagtaa

SEQ ID NO: 50558 - DNA, 636 bp, Glycine max
  unsure (1)..(636): unsure at all n locations
aaaagtgtaggtgatanccntngtttgatnaccctcgcacgngcnctcanagncacctgagggcatgcaagcttctcggggccatnntctgcgaaggaaacatttgtaaagntantcttattagtgnngacactactcttaaacacaaatggcatacaactcttctaccatatatacanacatcaatgtanatttagagcaagctttatgcgcatatttcttacgaaacgtcacttgcacaagacattctattaactaagaacatgcacccatatacaatcaagggagcttcattacctagaataattacatgtacttncaaggtgtatntgttatatacatcacacacgcctgcttggctgaatatacacacatgcatactcaaagcattgtggggtaccaaanatngcacatgcgcacatctnggtatatctaataccctatacatacacanacttcacgatgaatcttgactacctacacaataaggtgctacatntcatgcctnttttcaagtttttctacctaaagcgcatgaaattcagcatatnttctttgtgactaaaatgattcaataaaagatatattctttgtatatggttctccatacatgcacaatattataatatntttggt

SEQ ID NO: 50559 - DNA, 242 bp, Glycine max
  unsure (1)..(242): unsure at all n locations
tttataggctcttcatgtctggtctatataatcattagaagaggtatcacctttaaacaaacttgaanatcattggaagagttacatctttctgattttgntcaaaactctaccaaatcattgaatcgataccaaatcattgtaatcgattacacaaagcattntagtgaaaggatgtgactcttcacattntgaatttgaattcaacgttcaaacacactggtaatcgattaccaatatca

SEQ ID NO: 50560 - DNA, 547 bp, Glycine max
  unsure (1)..(547): unsure at all n locations
agtgtgtcnaatgaacgcatctatagcgacctttagactctgctagcctaganggatggaccttttcagggtctggagaggatcaatagncatgcctataggtgtgttcttncagaagagtatggagtcaacaccacttttaatatttctgattaattccttttacagggggagctgatattgaggaggaggaaccaacagatttgaggtcaaatcctcttcagggggaagggacgatgcaatcctctctatgaagggactagttaccagagccatgagcaatangctccaagaggattgngatagagctactaaagaaggccctanggttctcatgaaccttanggtatatttttgagtccatgggtcaagggtagatccactcttctttgtnatattnagaataggttttcttcttctgggccttgtatnnttggtcattctagtagtatagggtttagccttgtatttcannggcatttgagtagtctttgtagtanggacatntttttgtatttcatgtatttttggaataggggtgagcttn

SEQ ID NO: 50561 - DNA, 175 bp, Glycine max
gagactttatactcggcaacgagatacaccagattttatgagtcctattataatagagaccagttttgcttttcgatctatacttaaataacagattgtttccacatatgtaacttgatctgtcatgtcaaacaacaattgatgaaaagtaaacctggtaatctctggacctatc

SEQ ID NO: 50562 - DNA, 550 bp, Glycine max
  unsure (1)..(550): unsure at all n locations
tgatgcgcagnnnttttgaaacgccattcgatanacccgacancaatgaataacattgcantgccacganagtttgttaccttcccactctgctgtcngaatgctatgacacggacagngangttantgatatggtgcatcaacctcaatctcaggtatccaatctttctcaacccaacaactccacttattcaaataattcatgtctacccagatggcaattcctcttcagttatcttgggtttcttatgatgttatatcctaagattgtttttatgaatgctgaatgaactctttttttttctttgggggggggggggggggtgagcacatctctctctcctcaatcatcttcacatccttccaccccctcacacattactattaactgactctccaataatcatttataaaaaataacttaattctatgttgaactaatgctaccgcttttaaccactacgtttatttgactatattctatctcttcattaaaataatattctttattcttcactctctccatttcccctgcttcatatacaaacct

SEQ ID NO: 50563 - DNA, 330 bp, Glycine max
cttgaaagtgagggtgaccaatatgatgatgccacacacttattgatgaatgatggtgggcatggttaagagatggggatgatagggatgggtgcaacttgtacacctaatcttcattctttccttgcaaaagaactacttaggtctttaggcttttgacatcacaatgtaatggaagagaatttaacataaacataattagttcaacataattgtgaaacaaatatgagattggtagtcatagatggaacatgtagaacattacatatgtgaacgggagtggtagatgtggctactttagatgaaccatgatgagttatagtaagaccc

SEQ ID NO: 50564 - DNA, 222 bp, Glycine max
  unsure (1)..(222): unsure at all n locations
tattcagcgtagcaccaggcgttaaggcaccattactggctannaaatcnccccgcctgccatatcgagactgtgtatcattagcattgcgcatgaaccatacaacgatgtgactgatcgcacggatacacctgtgcttgcttatattgcctgtaaacgggcgagagtgcatatgcacgtaacaaatgtaactaccggatgctgacaaactatctatacctt

SEQ ID NO: 50565 - DNA, 157 bp, Glycine max
agcatgtcagctgctctattattgaacatcatactttcacttcttctctttggagtgtatatttattatttcttattatgtgaatctctggagccaacagtatccttctacaaacttaaggtgattctttagccaatgaatattcaaaagctaagtc

SEQ ID NO: 50566 - DNA, 398 bp, Glycine max
ctgcttctactagctcactatcctggatttctacactatggagtgctcagggagttgaattagttgattccatgaattgcatcgacaattaatctagattggatcctctttctgcttcattatgatggtaaggtcgtaactttggctccccatgaaaggtttccattgaggagttcttaccataatgaatctcatgatttttcattgagttatgattagctttagcgttgacatggtatgccatgaattcctcggacacactttctatattaagagttctttcttcttcatattgattgtaaggacttaactcctattcgcactcttgatcgtgtgccgtcaagatattcatttcaccccttaaaaagctccagatctcatggaactaaatcatctgt

SEQ ID NO: 50567 - DNA, 554 bp, Glycine max
  unsure (1)..(554): unsure at all n locations
tgatgtgtgnnnnattgatacccaatcgatnanccgcnnnattgattaccttgtatnacggaccatagatactcacctgacttgttagacatgtttgtcatgantaggacttgangatngantnggcaagatggatgagaggaatgtgtgatttcgaaatctgcacttatngtagaatttgctggtcaataggtgtagcaaaattttggctttgtgcagaaaaatgctngtgtgtggtgggctgtggaaagagtagtacagaatgagttctgaacgtttgctagtagatcccaacggtcacaatgtaggcttaagtactagagacttccagtaaaattttcgagtcgatccaacggttaacgaattggaacgaaggaatngttactgtngtctntaagtgagaaaagactgtgatttggttggtgttttgggcagagttttctgccttttgccctgtttattggctgtgatagttngtgttgttggaatgtngaacttacttggatgtgggaagctggggaggatngatgggganccggtgttgagagaaaccn

SEQ ID NO: 50568 - DNA, 407 bp, Glycine max
  unsure (1)..(407): unsure at all n locations
ttgttgagtggttttattagcattttgttagttgaaataaaggctcaaacttgtgtttaagtggttgttaattctcttgngatttgcaccacctatgggctcgttgtaatttaaataaattaaagtttaataaggtgaaaattctaggattgtggctgcctcttggctgaccaaggagttgcacaattntccatatgtttatgtgtcttaattctagttttaattangtataatgacaccatcaattgttggtatcaattctagttttaattaggtttaatggcaccatcaattgttgttattggtgatcatttcacttgtgtaaccaacttgatgtcattcctatntataggctgcacattttctaataaaaaaaaatagaccttgaatttgagttttaatcacct

SEQ ID NO: 50569 - DNA, 377 bp, Glycine max
  unsure (1)..(377): unsure at all n locations
cacaacagtgagtgcagctataaatgcagctccaaagagtagtagtggaaggtatgtgatatatgtgaagggtggcgtgtacgatgaacaagttgaggtgaaagcaaagaatataatgttggttggagatggtattggaaagactataatcacaggtagcataagtgttggaggaggcaccacaaccttccgttcagccactggttggtaagcttttattattttttattattgttaattaattctaatcatttcttaagtcttatgtttgactgtgttacataanaataatttaaagaaaattaccaacaattatttaaattgtctataagaatcagaattcatgataaaattgtaaaaaaatgattatggtatta

SEQ ID NO: 50570 - DNA, 574 bp, Glycine max
  unsure (1)..(574): unsure at all n locations
tgcatgagtgnnnncnatttgatangcccatcgatgtacccgannnnnntttgatanccattgctatntacgcgacactatagactactcaagcgtagcgcacggctctgatgctgatgctctgccaaactcgctttagcactgagtgcgcgacacgctcattggccaactgctacatattgcaatacactacttatcgccatcttaacctgaatatgctcatattgtagtactagatgctagggtaacgttctagagaccaccttcaccattcgattgcacttatttgcagatatcatttcgaacaagccattcttatgggaactctgctagctgaggagcatgacttctatactaacgatagtcgtgctaagtgactcacaatagacgtccttcttatgtgtgcgttcaacagaaaactattagcatccatgtagaataactgagagtcctttaagaaagcacaatattgacagagactatggcctcaagtgctgaacatgggcatactctcctcatatcaatgttacttcatcctatagacttaggtaccaaatgagctcgcactggtatn

SEQ ID NO: 50571 - DNA, 406 bp, Glycine max
  unsure (1)..(406): unsure at all n locations
attgtcgttcatgcatcctcatccattgagtacggtgccccatgaattgattgcctagcgctgttcatgcatcctccatcatcaaatcttattcggagccccatgaattgattgtcgttcatgcatcctccaccattcagttcagagccttacgaattgactgccaagctctgttcatgaatcctctatcatcaaatcttattcgaagccccatgaattgattgccattcatgcaacctccaccattgagtccggagccncacgaattgattgcctagtgatgttcgtgcatcctgcaccatcttattcggagccccatgaattgattgtcgttcatgcatcctccaccattgagtccggagccttacgaattgactgccaagctcttttcatgcctnctctatca

SEQ ID NO: 50572 - DNA, 167 bp, Glycine max
  unsure (1)..(167): unsure at all n locations
gcagcttgagatggtagacatgatacatgtagggtttggntggtcattgataaggagcccacattattcatgacacaatgcaatattgatgattggannatttatgcaanactggtcatgcatgcacctatgtggacactcaagtgtcaatattttatggtcatgtg

SEQ ID NO: 50573 - DNA, 450 bp, Glycine max
  unsure (1)..(450): unsure at all n locations
tctagccaaatggacttaccttgaattaattccttngatattccctttgagccttgtttccctttccttggtttgaagctcactacaagccttaagtgaaaaaccatgatattaccatatccttaaggaattntggagctttggaattgttttgggaataagtgtggggggtttttgtttcattggacaacttgttttgttggctatgcttcatgatgtattttgggccatacttgatgtacattgtatattggttaaatgttgaacatgctgaatgaaatgttgtttctcaaaggctaaagagtaaaaaaaaaaaaaaaaattcaaaaaaaaaaaattcgaaacaagataaagaaaagcaataaagttgagtgaataagatcttgaatggcacaagaatgatgaaactcttggttctaactcttcatgttaatatttatctttacttct

SEQ ID NO: 50574 - DNA, 233 bp, Glycine max
  unsure (1)..(233): unsure at all n locations
gtgatatatcaagaatagatgtgtcattagaanatatatcttaattaaaccaaggacaccttaagaattatctgantaannaagcttannataattgggaattgatattaagctacaagaatttntttatagtcaagaacanagagaataccgattatcacctcatcaatataaacttttaggaattaanattaatgttntnttataattctgagcaactataaactanaaac

SEQ ID NO: 50575 - DNA, 342 bp, Glycine max
  unsure (1)..(342): unsure at all n locations
catctgttcttnctttccgagatacttttccttatgtaagcttgcgcaggtttatagcctaacccacacttcccgtgatttgctttggtgctcaccacgctggctctgccgacattgatcttgcccaaacccattctgggctcgtagccgtatcccaacatcacccgggccaccatcattgccgtatcatacatgcaaggctggccagagagggaatctaccgatgcaatgtttactacctcagaagaatggaaagccgtttgcaatgactcctctgcggcttccacatatggcatagaggaagggcatcttaccaagacatcttcctcacccgatactatg

SEQ ID NO: 50576 - DNA, 501 bp, Glycine max
  unsure (1)..(501): unsure at all n locations
agacaccagagtgacactgttgaagcccctannnnnaaaganngggcatctattgaatggggtctctattctttgccaaangtatccaagtttgagctcgagtagatggctgcccaccttattattaagtggcatttcccttagcctatgtctatgacatgctcatctacagactcctctatttcctagccttcacttggacctttatgtgaggacaagtgtgctactatgtctggccaaactgcgtctcgtctggtcataacatgcagtatgttatataacctcattgcagcactctgacaatggctcagtagctgtcatcagctaattgactcaacttttacgctcagtggcctatattaggccatgcatacacaccagtgagccatgataaccacgatctgtttctgctttgtatgactgactaatgccaccttcctaagttacctgggcacctggttatatgtctttattcttacatggtaatgtcccctcctgccc

SEQ ID NO: 50577 - DNA, 411 bp, Glycine max
  unsure (1)..(411): unsure at all n locations
tctacgaagaagctccctgcgaagnggtctangaagggcaccattaaagaggattctagtgtgtccccacaagctgacacaggctttgacaaacaccaattctggagcgtggaacatcaatagcatttcgaggccatcaaaggatactcattcctcagacagagacaggggcagctgagagatgataattttcgcacttccttggaggaggcggagctagacaacagggatcgccaaacttgtgattatccttcattaatggtttcagntcttctattatcnttgtatttctcttgtgatctgacattatcttctttcaattagtatgtccattgtgataaactgaacatgntagtatctgtcgcatagcgaagtaattatcgctttgngcatatggtcgtacttacttta

SEQ ID NO: 50578 - DNA, 136 bp, Glycine max
atcagatgctcaaatgtatgctcaatatttatgtcaaatcaccatacagaatgacagattcccagttatggaatgctcacgatgatctaaacgtataaatgatgccttactaatctatgaaatgctctatctatct

SEQ ID NO: 50579 - DNA, 110 bp, Glycine max
  unsure (1)..(110): unsure at all n locations
cattcatgggtaatcgattacagggcttaataatggagacaggatgctaatntagcctctggtaattgttggacaagtggcctcagatatcttaagaagggggggggggg

SEQ ID NO: 50580 - DNA, 158 bp, Glycine max
  unsure (1)..(158): unsure at all n locations
tgtatgtctctcccttgcgggattcctcttcacanagggaggaattgttgttgtgaatgtataatngatcccccaaaccttctacggagatgtcttgggccacgtgagcttcattcaagacttttactagcanagctcgatgatgctcagagctcatg

SEQ ID NO: 50581 - DNA, 466 bp, Glycine max
  unsure (1)..(466): unsure at all n locations
atcctgatgaggatgttccatatgttctcatgactggactaatacattngctgtccaagtttcatggtcttgcaggtgaagatcctcataagcatcttaaggagttccatattgtctgtcccaccatgaaaccccctgatgtccaggaagatcatatctttctaaaagcttttcctcattctctggagggagtggcgaaagaatggttgtactaccttgctcccaggtccattaccagctgggatgaccttaagagggtgttcttggagaaattcttccctgcatctaggaccactgccattagaaaagacattttaggcattaggcaacttagtggagaaagcttgtatgagtactgggaaagattcaagaaaatgtgttgcagttgtccttaccaccagattntttagcaactccttctgcaatatttctatgagggacttagcaacattggagaagagtatga

SEQ ID NO: 50582 - DNA, 580 bp, Glycine max
  unsure (1)..(580): unsure at all n locations
aggggacatcgtcatcagcctgtgcagcgcancnnannnnnnatgcntntngccatgtgtagtagggtncnnattcttcattcttacacaccatgccgancctatatatccanngcatcntgtatcgggcaacaataccatgttcttgaagaaattgattatatgaacctggcgtctcgccatcctctgggtatctaccatagtactcaccacctctatctgatctcacgacttaactgtgtgtgcatagtgttcctcaacattagcccgtaaagctgtagatgcatctaaagctgcattattggaatgacgtanatagagatacctatatcgcgaatatcatctctggatgcatgaagatcttcggctattgctccattgctggcctacaatgtctgctgatgattactattaataaaactcaccttgcaccctttatacttgcagctgctccccagagcatcacaccgctcaaacacgactcaagtctacgctctcattctatgatgttctcataaatgtcaactcaggcaactaggattctcacttttttaccacaacctctaataacacgttttac

SEQ ID NO: 50583 - DNA, 371 bp, Glycine max
actttcttgatacataatctatgtggatgttgcatgtcttaccatagacatcattacctaataccttccgccatatttggaacaaatatgccttgaaccacaatgctctcctacaacctaaagaaaggtagatggagattatatatcaacaggtttagggttcaactcaatcaatcggattcaagctcaaaatgggtgcaatggattcatcattcatgaacagggtaagctatttggctaagtggctaattcaatcaatcatggccttgatcatttccaaatcatgcattcattcaatatttagagactcatgcataaatcggtactcaatgccagtcattctctcacaattaaaggtcacacaacttact

SEQ ID NO: 50584 - DNA, 394 bp, Glycine max
  unsure (1)..(394): unsure at all n locations
agaagatgctatctgagcttacatgtcaattcttacgtaacattaattaagggtttaatacacgaataaaaaaagagaaatactatgtacaatcaataatttctttttgaaagagtgctggtgtaatttattattttattaaatctcctatctttttcagtaaatagacacatattacattntatccataatttttttagaacttacttaatatgtattactttaacatatcacaagagataaaatcttacataaatatatgtatataaattatagagataaatggttataaaaagttataataatataacttacagaacatactttattataatgaatataatatggtgctatttaagtcttctttaagaattatatgacgaaatttataaca

SEQ ID NO: 50585 - DNA, 480 bp, Glycine max
  unsure (1)..(480): unsure at all n locations
agactatcagtttgtcacctttagtcgngtcctctgagncacctgcagctgctgctgtgttattcacatggttagctttacaaacgcggatctgctgnctnctgtgatactattatgctacactgtgattgacgatattatttgatggcgatattgattttgatcttgagacatgaatatgtgaaatgtgtgaacgagtagtgtaagatgtgatgtacacgatcatggtgaatgtgtgactatgttaagagatattttctttataataatattttttattattattcaccacccacgtagtgctattctttatagtagatggaactactcttgggtgttgatcggtctatagactaacttggtatggacaatgtaggatggttgaaacttgtaagagtgacactgttgttggtaattggctatttgatatgatgagtcactgagttttttattcataatgatttgaactgacgtggtacg

SEQ ID NO: 50586 - DNA, 473 bp, Glycine max
  unsure (1)..(473): unsure at all n locations
aacacaaaagttagtcgtaaatgacaactaacactttgtcatatacacactaagacatactcctaataaataccatnntgaagttaagtgaaatacataactatatcaacgtcgaaggaaacacgcatatattattgtattacatgacagctgcataagtaactaaatgttcaatcttcacctaaatcaacaaagcctgttttcaaccttgacaaattggtatattgctacattctactaatatatggtatgggtcactgctttgcctgatgataacaatgtgtagaccataacaaagctagtggtggtaacgaacaatggtctcatagaaatatttgttacataaggacatacacattgaanatatcagaacatattnttttacaataattacacaaataggatgatcatgcatntagctgaacaaaatgattgtcatacacatgaccgatacatatgacgcgatgcacaaa

SEQ ID NO: 50587 - DNA, 472 bp, Glycine max
  unsure (1)..(472): unsure at all n locations
gtgactngagtcatcaatagattatatatatgtgaccatggtatgagtntcaataatcatcaatcatctgtgaatcatctatctttctatcttttttcaacatcatctctaaaacatctttcaatcaatctttctacacaattttctaatgcatttctctttatctttctaaaagttgtttatcaacactatctctctcaagaaaagttctttgttcanaaacttgtgttattcagctnnttcattctcttctcccgttgccaaaagaacgaaggactaaccgcctaaattcttttgtgtctctcttctcccttacaaaagattcanaggactaaccgcctgagaattcttttgattcttcccttccccttaagcaaaagatttcaaaggactaactgcctgagatatcttttgtttccccttacaaagattcanaggactaaccgctngagaaattcttgcccaacacatt

SEQ ID NO: 50588 - DNA, 340 bp, Glycine max
  unsure (1)..(340): unsure at all n locations
tacatagttgtttttgagacaatgactggattattcaagagtctctgccttaatcgaataccaccggatttaaatgactacttctctctctataagtggttcagaagtgaacaagaacactgtaatcgattacatagatcttgagctgtttgcatggtttgcgaagaacactttaatcgattacttggaggatctacatcgatacatcgatcttgagttgcttccatggtttgcgaagaacattntaatcaattaaacagataatctaatcaattacttcattgaattaatcgattcccttgtagatctaatcgattagaggaagcaaccctgctcgcct

SEQ ID NO: 50589 - DNA, 395 bp, Glycine max
  unsure (1)..(395): unsure at all n locations
tatggtccctttcaggacttagaatgctttggcaaagtggcctatcacctgcaattacctgaagaagcttgagtccactctattttccactgctccttgcttaaaccattcagaggttccctggaatagtcggaaatggctccattaccacaacaattcatcaattatcaacccttagtttctcctctggctatcctcaattatcgtcgggtacctggtacacctaatgctccatgggaggtgttagtccaatggcagggtctgtctccagatgagacctcttgngaagatnggtcccaactatgccanaaatatcaccttgaggacaaggtgatcttantagggctggggaatgatatgataccagaagcagataacatagcattcgaaataga

SEQ ID NO: 50590 - DNA, 541 bp, Glycine max
  unsure (1)..(541): unsure at all n locations
agtgtatagtttcttctttctctcctctanactatataagntataactatggcagaaatgttatgttattgtatatgctaatactaatacaactgcagagcaagcaagatggtcctatggtagacttagttagagccatgtgcagtgtccacgatgatgaaatcanngacaacctttagctttngagtacacattgaacacaattatgcattttgatctgagtgtgtgtagtgaggtatttaattgagcactaatatatggtgtgatgtatatcatgtgtattccaggtganagaagatagtataacatcaaagaacattatgtctgaatggtgaagaagaacaccaaaaatcatgggaagatgtgcatnctggtggggcaccttacattttttgtgtgttgtgtcattaagatcagcnatcacttctccaccacaaggacccantcactatggcttgccatatangaatgtcagtttactgtgttngatctgctgctctgtatgggtgtcgtgagcacagtcactctatgcgatactgtg

SEQ ID NO: 50591 - DNA, 459 bp, Glycine max
  unsure (1)..(459): unsure at all n locations
tcacanaatanaattagcattacatattggactatcaagtgtggactgcaacattcaagtagagtcgttgtcttcatcctatacgggctccttcctcaagatgatctcccacacatgttggttaggccggtaataaaacacgacctcatctccacccatcaagtgattctccattaagaatccgtgccaagggtcatccacatattgtatagcattatgcatggagatgctccatatgccacgaacgccaatcctatgttgcattgtcatacatcgtgttgaagcatcaacaaaatcgagagcagcggtaggcaagaactagatgacaataaaggaagtgaaatttgttagtattgttaataatacacaaggacgacttcatcatatgcataatgtctcaccaatggtgtanggttggagatgatagcatttacattcacagtanacacataagtccta

SEQ ID NO: 50592 - DNA, 478 bp, Glycine max
  unsure (1)..(478): unsure at all n locations
ggatatgacgttgatngcncttgttgagcaccttggacacggcnctnnaancacctggagctgcanncttctttgcttgatatatgtantatatgaatattaaccacgtcttttntctcattcttgggggtataaatatcaattatgcactattttctattcatgcggctaacctccataaatgaactgttttcctgttcagttgtttgtacgatgcctaacacatattcacttgaccttgaagtccactaaacagaactcagattaactgaaaacttacaactcaccctttcctataataaactgtctttaaccctttgaactatgccactgggtttttctcaaacacctatgatatcctctcggagactttcactagagaacaatctcctgtcaaccaaagctcacagaacaatgcctatgaagtacaacacaacatcattctcatgattgtggctatgaatgtgtctgcacaaag

SEQ ID NO: 50593 - DNA, 225 bp, Glycine max
  unsure (1)..(225): unsure at all n locations
tagtcgaagagaagttcaagtccatagccatcanagtctgaanagagtatgatgaactaagggatgtcaatatggccaccgatgaagccttggaatgagaaaccaagaaggcccgaaaggaagaacacgaccaaagcatagttttgaggggctttatagggcagcaatagtgagctcaagctccgaagaggtgaaaggaatcatcacgggtcataggcatgatct

SEQ ID NO: 50594 - DNA, 340 bp, Glycine max
  unsure (1)..(340): unsure at all n locations
agtgggtgcagctgtgctccctgngtttcgaaatggcgatcgtggagcgacccgagaattcggtgtcaaatccaatgtaatccagtagtttgaaccctattgctgggcctaggctttagggttttctccttttgtcaggcatgctttctttaaatgttctagtgattntaatatatgaccttctttattgatatgatccctcatacactntctcccatttcattntttttgcatatttattnttgttgcgattaaatgatttaccatagatccaatgttgagtcttgtgagagtagcgatagcgaggacccagatgtcgactttgagcggncaataagtc

SEQ ID NO: 50595 - DNA, 454 bp, Glycine max
  unsure (1)..(454): unsure at all n locations
atgccaccgtgctttatagctccttttattaattatgtcttgctatcagattaatagcgtaacttttacataattaaacgagtaanaaataaccttaaatcaagatatgatgttgtggttaaggggctgcttttaactntacattcattgactgagttcaaactttagccagcaaattagagaattcactctccaaatattcctaaatccatcatacctagtaattatatataccatanacaaatcacacaatgtatccgtaatttacattatntanagaagttaattattacaaaccaatacttanaagattcttttccacatgaanggaggggaatcggatttggtgcgttatcctccaaatagaatggaatagatattaattntggggtttgacaaatatgcatacatnttataaattaatgagactctagctttgaaatgctatctacgt

SEQ ID NO: 50596 - DNA, 190 bp, Glycine max
  unsure (1)..(190): unsure at all n locations
acatccacaatgcgcgcataaacccaccatcctctgtggcccacctncaactgagctcacgtactctcacgtagcccatatnctcgtttctctcaacaccgggtccccatcaatcctctcaaggcttcacaacatccaagcagaacaacattcaaacagcacaagctatcacagccaagcanaacagagc

SEQ ID NO: 50597 - DNA, 387 bp, Glycine max
  unsure (1)..(387): unsure at all n locations
gaaacttcctgctnttattggtgaccacagagtggtacctgtatatatgtncgcggggtcaggagaccttgnggacgtcaggtggggtgctattgcccaaaaccaagcttgaccaatcccgacccaacccgggcatagtcggtcagtgagaacctgtgatgtacctaagcaggcgagctcctggcagtcaacagataaaaggaacaaagaccacaaagcaaggaggcttgtggtggctggccagctctggattntgtgtgatatgtggagtatggcctctggtaatcgattaccaagggtgggtaatcgattacaaggcttataaatgaagacaggaggctaagatggtctctggtaatcgattaccaaggggtgtaatcgattacc

SEQ ID NO: 50598 - DNA, 378 bp, Glycine max
  unsure (1)..(378): unsure at all n locations
tctacatacatggagagttctagagagagacaggtccaagttccagagagtttgatagaatctgttgtgtgaagatctaccaagactatagctggaagaggaagctgtcttgagagctcgcgatgagtttgtgagcgattgtgaggtcctacaggtggaggagacatccccactacttgtatttctgaaatctttcattctcttctctttgctgnaaaggaagcttcccagttatggaaagctaaatcctctgttggatcttccttgtaagtacttgatgtagatatctttttatctatttaatgatgatttgcgtgttcactgagctatcagaacttctttctaccatgcttttgccttgatcacatacttgcatgt

SEQ ID NO: 50599 - DNA, 523 bp, Glycine max
  unsure (1)..(523): unsure at all n locations
gagaggnnatgaaccgtgaggncgnnnatgataccttgataccgaccatggananaagcgtcggtgtggnctcatgttcaataggcggcgcnatttattagaccaacaacaactcacaggatatacctgttattaaaatatcaaatccaattatttggtcaatctctatgctttttttaagaacataggttggaagtgacatagagctccatatgtataaggaaagaaatgtagctcctagtttgactatgcacatcgaatcatgtaggtgtatgggataaccaataccatggcacttcagatattgtaaccatatgttgataatcctgactaattatggtctacaagatgacttgagctagaagctcttctcatcatgaccacagagtcagaattaaatggtctacaggtgactttagtcttttgtaattgataccaaaacttttttgatatataacatgtcacgtaccacgctggctgcttactggtgattcattaaagtgctattatgctatcgagacag

SEQ ID NO: 50600 - DNA, 439 bp, Glycine max
  unsure (1)..(439): unsure at all n locations
atgccgtaccaagaccttggagcctactttaagccatacaaggactntntcaaccgatatactttctcttcctgtccacgaactacaaatccttcaggctgctctacaaaaatttcttcttccaagtgtccattcaagaaggttgatttaacatccatgtgatgtataatccaacctttatgtgcagcaagagctaacaacagccttatggtatccaacctggcaactggaaaaaaagtttttgagaagtctaccccgaacatatgcacatatcccttcacaacaagccttgccttatgtttgtttatagaaccatcaacattaagctntgttctataaacccatttcactccaatgacattnttatctntaggtttctccgtgagctcccatgtttgatgtttntcaatcatatcaagctcctccttcattgcactta

SEQ ID NO: 50601 - DNA, 539 bp, Glycine max
  unsure (1)..(539): unsure at all n locations
atgaggcgcgntttgaacccatggatgaccnnnnnnatgataccttgcataaccgaactgtgacactaagcttccacgccgtcttattatataccgatagtgacttgtcagactcctctatgtgacacatgaattgacactaacagtccttccaaacttatatatatttatccagagacgaatccaacctaatatacaaagatggaatacgtaggtgtaaagattaatataggcagtcatgtattatacataatatanaataagccatgtgaatatatatatcgaatcttcgcatgtgcctctcaatacgtgttcgaaatgacttaacgatactcaacatagtaaatccaagtctattgctangtggattgttgtaacgtaagtatttatacaattagctatacatattttcacactgngggataatttgacttaacggtgatatctcaatccataatgtatatataatagacaaatggaagcactgcggtggtattatgtatgtactgtagtcacaactctgaaatcaaaaaattgcg

SEQ ID NO: 50602 - DNA, 372 bp, Glycine max
cacatcaagtgatgcttacccacattcacattcgatgatctaagataagcagacgcttgaagtataacacatgtcaatatggactgtattctaccatacgtacattgtggatgatatctgtgaggactgtcatcactggctaacactattatcttctggaatgatttcgatgagccgtcacatgctcactcttcattctaatgatcatagatgtcaatagcacaccatataacggcgttatgacaatataaagaagctctgcttggtagaatgctatatattttgcagcatagaagacagaaaataattgacaagcttatgtcacttgtcaatccgaaactatgtcctctcattctaattgggtacaatagt

SEQ ID NO: 50603 - DNA, 369 bp, Glycine max
  unsure (1)..(369): unsure at all n locations
ggcttctacaatctcnctctttttgatgatgacaactctgttatcaagaaacacatacacatactttttcctagtcgatcactcacttaattntccattctccccctttgtttttgagtttatgcttcacttgaaattaagttaattacttatgtgagttcttgatttaatccctgtttctctccccctttggcatcaacaaaaagccaaagtgcgtaacaagtataaaacatacatacactattaatcattcacaagacattcattgaagaatataaaaccaatcatgaagcaagaaacatgaatagatcanatatataanaactacttagtcatataacataatncataattgttcaaacataccat

SEQ ID NO: 50604 - DNA, 431 bp, Glycine max
  unsure (1)..(431): unsure at all n locations
nnnaaatgaaggggttganccngttgacacctgccggccctaagcactgagctgcactaactagaacgacttcaggtggaaacactctgctcaatgctgctatagatatgagtgccttcatggctgacatcttttgagcaatgagaccttgattgagacaatcttttagatggaggaggagagactacccaggcagacataacactgatgccatgataagcaactaacaaccacactataaacagtatattgatactgctgtagatgagccaggaaaataagccaagcaagcctacaatctatgtgtgagccaacactgaagcagtaataatttatatatatttatgatttgccaacgtaacgctgtatttactttctaatccttagattgctgttataaaaattgacttgataatggaatctttagtctg

SEQ ID NO: 50605 - DNA, 421 bp, Glycine max
  unsure (1)..(421): unsure at all n locations
tctagtcgtccatagaccttctctgtggtacggtctagcatacgttgcatctgtgcattcatcgcattcactaacagacgttgagcgccgtccaactgatggtactcgtcaccaccaccacctgctccagccataatttaacaggaaaaaaaaatgtgcaataaaaattattaagggttcaggacctcacaacactctactcacgtctcttagatggtagtacactcgtgtttaatgctctcaataggcttttgtgtaatgtattccctcttgccttttaccactcgtgtttcctcttaagttcctggatggaccaaattagacacacanggtaatatanaatataaggaaagacaatataatgatcacaaacagatctgatttgcgataacaacttggacatgatctggataataatata

SEQ ID NO: 50606 - DNA, 349 bp, Glycine max
  unsure (1)..(349): unsure at all n locations
gctatgctgtanacatntataatagaactcttcagtctcaaaaccaacaacaacagaataattatgatccttcaagcaatagatacaatccatgttagaggaatcatccaaaactgagatggacaagtcctacacaacaacaatagtctatccctcctttctagaatgttgctggtccaagcaagacatatgttcctcctccaatgcagcaacagtagcaacagtcacaacaaagacaaccatcaattgaggctcctcctcaaccttccttagaagagttagtgaggcaaatgaccatccaaaatatgcaatntcaacaagagacaagagcttccatttagagtctgac

SEQ ID NO: 50607 - DNA, 356 bp, Glycine max
  unsure (1)..(356): unsure at all n locations
agatgggaatatgtctctagcaaaacttcatcgtgagtagtcttctattaatatagactgtgaaggtcatttgcttgctattactaactcactaaaatattattaatttgctataagaaacctatgaaaatgccgcaacagagaaatatggagaaggataaatcataacatcttacagctgactgtacaagtggttggtgaaaacaaaaagggtagaatccacaacatgggtaatagcttggagcttatgagctggtctccacagggttcatcttcaacaacggtagtgtcatcttccacaaattctatacaatccacagaagacatcactgcaatatctacacggaagncttaca

SEQ ID NO: 50608 - DNA, 351 bp, Glycine max
  unsure (1)..(351): unsure at all n locations
actatttttatcanacagatgatatattgtgatatgcaattcaaatccttacacttttcctttattcaaattatatcattntgtgtgggagagattgcttatctattcatgcccttcattcagtatgattgtacgaccggtctattaatacttanagttcacctctggttctgtgctagaaaagacttatttattgtattgatgttggaaatattgctgacttacagctattggctgcagntcatgtccagtacttgtcagactggtggatccttgaatgggtcttatantattaatagcatctgataatatgacttgaattcccaaattcactattagatgtcaatatat

SEQ ID NO: 50609 - DNA, 282 bp, Glycine max
  unsure (1)..(282): unsure at all n locations
aataagaaaggacanaacttagatgcagttctccaattatgaattggagtttcacttttggtaatttgtgtaataaaaggttggctntaaatgttaacacatattatcgaggtgaaactctaattttgattggagaacaataacatctaaggaacaaggaactgtgtcttagnttttgccaataagaaatagggtgctcgactgtattttacttactgccactctgttgacatacaggaatntgtgagaatatgagagggtaaaaaaaatcatattttaact

SEQ ID NO: 50610 - DNA, 169 bp, Glycine max
tcaccttgatgacatgctatagaactatagaagagaaggagtagcactattagggaaatgttggcatgactacaacaatacttacataggatattcattccaaaattcagtatgacaacctctatgatatgaagaaaaaaatgagggaaatgacttcagatgttataaa

SEQ ID NO: 50611 - DNA, 329 bp, Glycine max
  unsure (1)..(329): unsure at all n locations
tgatcatgggcaggagttgatccttgcttaatatcaattaagattagttcttaattattgtccacgctctatgctcaagagcttgtgtaagggagcatgttattgttagacatgctcatttacctctgagcctaacagtttatgcccttaggagagttggtcattgacaaaatanatacggtcatgtagtgcatatttagaacatatttagtagttgacttgtcaattctttcgttgcaacagagattacaacagagtngaccatgcgaacgcaatcaaccttttgcaagtctcatgcatcatatccattgatgcaaaacagttccctc

SEQ ID NO: 50612 - DNA, 393 bp, Glycine max
  unsure (1)..(393): unsure at all n locations
agctngcttctacacaaaggactaaccgcctgtgatatcttttgtttccccttcacaaagtttcaaaggactaaccgcctgagaactttgtcttaacacattggaaggtacatcctttgtggtacaagtagagggtacatctacttgggttgttgtaactgagaacaagagaaggtacatctcttgtggatcagttcaagtggagggtacatccacttggttgttcaaagagaacaagggagggtacatcccttgtggatctttgcttgtanaggaatttacaaggttgaaaagaaatctcaaggactgtatgtcgcttggggattggatgtangcacgggttggtgccgaaccagtataaattcttggtgttgtcttcctcttcctacactc

SEQ ID NO: 50613 - DNA, 483 bp, Glycine max
  unsure (1)..(483): unsure at all n locations
agctngcactagaataatctggagaagatcaatcctgacaaatggagaaatctgcatattaagctggtccatgacacccgcaattacctgctccagttggaattaatgcatgttaaaatgcattaaagtatatctgtatttattcctaatggcaactcanaaccaagccacttatctacctcanactgaaaatcttaagatatganaacataagaacaattttgaataaagaaaatagataaggatagataatttgacatgccatggtgaaaaaagagctgaactgaatgattgcttaatttctttcttctttataggaaaaaagagctccatgattgtatttntaatgttgctctcatggaatgatagtaatgtgcacacctgtgtctaccttatatcaccaacattaaacatattcatactagataatantttttgtactattaatataagaaggtacaatgtatatcaatagaaagttaa

SEQ ID NO: 50614 - DNA, 343 bp, Glycine max
  unsure (1)..(343): unsure at all n locations
agctntctacgatgggttgagccaatctgttattttgattacacaaatntaatgagatatgagataggattatntacattccggccccgcttcctctttctatggatgaaccatttacatatagttttcatcactcagattctggttctataatggtcgttaattcggcgaccaagtcggccaggcacttggccttcatcgcccccttgaattgtacttgagcccaaactgaaacaactcaattcactaagctatcattcagcatatatgtggcttgagatggaattcaaaaataaatnttatgtcatcttcatctgctatactaattttatgcttctcccac

SEQ ID NO: 50615 - DNA, 264 bp, Glycine max
  unsure (1)..(264): unsure at all n locations
tgcttttattggtgaccacagagtggtacctggagatatgtcgcggnggtcaagagaccttggggacgtcaggtggggtgctattgcccaaaaccaagcttgaccaatcccgacccaacccgggcatagtcggtcagtgagaacctgtgatgtacctaagcangcgagctcctggcagtcaacagataaaaggaacaaagaaccacaaagcaggaggcttgtggtggctggcccagctgtgaatttgtgtgatatgtggattat

SEQ ID NO: 50616 - DNA, 341 bp, Glycine max
tgctgcagcttaacattcaattgtgatgcgtttcgaatattacgggactcaatcgaacatccgagtaaaaagttattgtcgtttgaatttgctcagagcttcggtattccatttcgagcgtctcaatatattacgggactcaatccgacatctgagtaaataggttattgtcgtttgaatttgctcagagcttcaacattcaattccgagcatctggatatattacggaactcaatccgacttccgagaaaatggtattgtcgtagaatttgctagagcttaacattcaatacgagcgttggatatatacgggactatcacaatccgagaaaagtattgcg

SEQ ID NO: 50617 - DNA, 347 bp, Glycine max
  unsure (1)..(347): unsure at all n locations
tcataactcagctggccatatatcagaaattctgctgatcaccatacagatctctgtccttctttgcagctatctggagtcaatgagcaacttgaagcccatgctgcatacatttataatagactccctcagcaacaaaaccaacaacaacagaataattatgatctttcaaacaatagatacaatccaggttggaggaatcatccaaatctgagatgggaaaatcctccacaacaacaacagcagcaacaacaacagtctgtcccttccttccagaatgggtgtggtcccaagcaggccatatgtcctnnctcaatgcagcagcaatagcaacaacaaagacaaca

SEQ ID NO: 50618 - DNA, 255 bp, Glycine max
  unsure (1)..(255): unsure at all n locations
cgtataggccgaagactaattttcatgtttgatgatctatcattgatctttctgcttatattcaattatcatctactattactgaattgtactatatgtgttgagtaacattattatcttacatatattatctcctttccttcactaatttatactgtcgaattatttattatttgtttacggatttatcagaatgcgatgtgtacttattcacacgtcctcgactttcttatcggttattatacttttaatttn

SEQ ID NO: 50619 - DNA, 202 bp, Glycine max
  unsure (1)..(202): unsure at all n locations
cataaacgagtacgtggtactcaacacatcctgaanataacattaaatggatattagatatgcatatgatttcaaaatttgacagataaaagtgtttaattactcaccaaactattacagtcactntgtacttagcatgactttaanagtgactgagttaggaacttggtggacaaggggtgtcatttangataagctnttt

SEQ ID NO: 50620 - DNA, 118 bp, Glycine max
acaagtttagtcgtggacaccgctgctctgccaagatattcctattaatagcttatgacgacaacatatcgtgggaggagattccgcctgatgacgcatttttggagcgaaagacatg

SEQ ID NO: 50621 - DNA, 503 bp, Glycine max
  unsure (1)..(503): unsure at all n locations
tttagtacgcatgcgagccgcgatcacttacagtcacctgaagctgcaagctttgagagaaacctggactatctattttaatttcaaaaggaagtcatatctagtcacggtctgagagaccatacaaggttcctaacgatttctaattattgtggccattaaagtctatcatatgcttgacataagccagaagcccatgaatctctttcggggcggagtangtgtcttgccatcgctgggcctggctaacaatcggngagntctttgactccgtcaaggaagagcaaccgaccatcacatggntgctctggtgtaagagtnatcacncttctctacctcttttccgatatactgtgctactcatcggatctatgctcggggccgggtaacccactcttttggactggcatgaagtaacatgtggctcgctgcaagagtgaacagcttttggcttgacagcataactcttttaaacctgatggctggatggcctcttcttgaat

SEQ ID NO: 50622 - DNA, 471 bp, Glycine max
  unsure (1)..(471): unsure at all n locations
caanagtgaagaagaaggttccaggtcctttgaattggtcccaacattcccttctgaattccaacttggaaaatggcgagtggaggaaccccccggcatttaccccaccagccttatggtaacccttaccggtttaaaaagctctataggtgggcctaggctttagaagtttctttttaaggctttgngtcttttggtttgaattcataatacaaggatctttcttcatctgttcctagtctctacccattctcattcattngcatggttacttctttttctaaaacggcagaatcgatgaccactccctcgaagggtctattacctgtgacccgaattatatcttggagcttgaatgaatcttacggataacatggagatgaggttgggactacctcccatcttgaattattagcctccacgagacagaacccgcgccctattaacaaacatacctctactctttgattt

SEQ ID NO: 50623 - DNA, 211 bp, Glycine max
cgatgggaacatggctttactaattaagatactgaattttgaactagatgatacaaatatgtgttttataagataaagagatatgttaatgggccatttatttatttatttaaaatgagttaaatatagttctttttcttatataaaacaataaatataaaaatagaatcaatcatagactcagagtaacctatctattaatagaaacata

SEQ ID NO: 50624 - DNA, 389 bp, Glycine max
  unsure (1)..(389): unsure at all n locations
acgatgccccggagtatcttatagatggtatgtatgccaactgaacttcacatataatttaatggcatatgcagtggtctaacaagatgctaaatgtgatcctaataccagatccaagataatggtcttcttgaaccttgatgcattaattatataaagggtgggtatgaaagtggtggtcttgcgagaaattattacatcgccgtangtaatttccatgtgacacactattgngaatgtacctgctcaactgacctgacaacttgcataaattatttatnaaactaatatggttgcagttacacgttaccaatccatatgcctaggttgctccagctgcttcttggcagtgataaaaangatatctaatgataataataaatgcctaa

SEQ ID NO: 50625 - DNA, 378 bp, Glycine max
  unsure (1)..(378): unsure at all n locations
ctgcagcttatataacatttgaaatcattctttgatgccaaccttattaaccaatgtgagattcntttaacaaataaaactaagccttatctttctctatcttattttcttgatcttgaatttaaacttgaagtaaatntagacttgaagcaatcttgttctttnggcatcatcaaaacttatatacattcattcacattcttcccttttttatgatgacaaccatctgaaaggagtaaagaaaaaatatttatgtgcgacacgttcactcccccttaattntgcaatgattgcttagtagaanaaatattttcanaatatatgttcaagtaaaaaaattcccttttcctagagatatctctttccctttagaaacat

SEQ ID NO: 50626 - DNA, 466 bp, Glycine max
  unsure (1)..(466): unsure at all n locations
atatcttgatcctttgagaccgggatccttagagcacctgaggcatgcaagctcatcttgaaccactgaggctcaattttaaactacaaaggagtgaaatctattctaaccaatatgcccaaggcataaagccagggttattataggcatattaaggccccaactataaggcgggggttaaccaccttaagaagcaaaacaagacctagtagcttaggccaattactttaaactaatcaaaaaactatctatgttgaattgacttagtgcaaacaacctattataaaataaaatacattcaaatgctaaaanataaaataatatatgcagcccatagtgacttgtattcactggatcaagatctgactttcttttactttggttgagctgaggtgacattttcaacatttttgcttctactctacctgtgnnagccctaccaaatgttctccttacaactctattt

SEQ ID NO: 50627 - DNA, 247 bp, Glycine max
agcaccgagctgcgctatgcgaacttattaacctttaggcaacccacacgatatatgactcagcaaatcatctagtgagatatccaataaggaccgctacacacatatgcctcttcaaagtgtgccagcagcgatgtctctcatacgacacacacgtgccacaaacacagcctagtctctaattctaaaagaggagaagactcaaatcattacagaacaacctcataagcgacaaaagggaaggtct

SEQ ID NO: 50628 - DNA, 191 bp, Glycine max
  unsure (1)..(191): unsure at all n locations
ctctccgcatctatatctaactatttacgataataaaaaaaagaagacacaaagcccttgtttacaaatgccacgccagcaagcaccattaaacaaataagtaagcattactttcaagatgtgtggcttcatctgaatcatataatctgtacctcncaaatgattgactgtgctcttcttcaacatctgat

SEQ ID NO: 50629 - DNA, 132 bp, Glycine max
accacagagtggtacctggagatatgtcgcggcggtcacgagaccttgtggacgtcaggtggtgtgctattgcccaaaaccaagcttgaccaatcccgacccaacccgggcatagtctggcagagagaacct

SEQ ID NO: 50630 - DNA, 216 bp, Glycine max
  unsure (1)..(216): unsure at all n locations
ggacctctagagcacctgcagctgcagcttatgtgatgaatcagttgatcatgtgnttttatgttgacaaagatgatgacaaaaagtccaagagaatgatttcaagattgagtcaacaagttcaaagatcaagattgaatcaagattcaagagaagatgatttcacaagaagattcaagaaatgacatcaagaagaatcatgattcaagagatgat

SEQ ID NO: 50631 - DNA, 350 bp, Glycine max
  unsure (1)..(350): unsure at all n locations
actcttaaagcaaaaatggcatataacctccctccataaatattaacatcaatggtaatttagagtaagcttatgcgcatatttccttacaaatgttctcttgcacaagacattctattaaccgaaaaatgcacccatatacaatcaatgcagctccgttacctagattgtttacacgtatttccaaggtgtatttgttacttacatcacacacatcttcttggctaaattcacatacatgcatacccaaagcatttngtngtaccaaatatttcacatgtacacctctgtggatttctactacctatacatacacanactctatgatgaattctgactatctacacaat

SEQ ID NO: 50632 - DNA, 380 bp, Glycine max
  unsure (1)..(380): unsure at all n locations
cggatcttaagcactgggctcagctatgctagaactcctatttctttatctcaaattataccaagtatatataatctgaagaaatattctaacatggagacttatctttgaatattttcagaatacaataattctttcaaaacattgtctatatgctattgagaagattattncacttcatctttccaccttgacttatgaaatagaccctttgcaattgtttctctaatcataccacatattnttgccacaatattaaaaagagaggagactaatggatcccctttccctcaagcctttagtcaccaactcacataaacttacttgggttctcatntactaccacctaggcttggcannacagacttgacctatgggta

SEQ ID NO: 50633 - DNA, 147 bp, Glycine max
  unsure (1)..(147): unsure at all n locations
gtggatcaataacaatgcctataggttggacctcccagaagagtatggagctagtaccactnttaatatttctattttaaattcctttggagatggagctgatattgaggaggaggaatcgacagatttgaggtcaaatcctcttca

SEQ ID NO: 50634 - DNA, 267 bp, Glycine max
  unsure (1)..(267): unsure at all n locations
atcatatcttatatatcccagggacatgctaatagagatccctacagtacaagtgcaaaacctagaccatatagaaagttcaatatcaaaaccatcgtgatggtgagtccagcctaacttaaaatcagccattcggacctgttaaagacagtgtgccttttgaagcctntatgcaacttaaaactatgccaaatatcactcctaaatgcaagaaaatattattataaaaaaataatcagccaaatagaatagtgtttaccagatgat

SEQ ID NO: 50635 - DNA, 305 bp, Glycine max
  unsure (1)..(305): unsure at all n locations
gcttctacctccggaatgttctccagtggatttttcattcctttagagattccatctgttctttgacagntaacacacctctgaacatattcataagcatncttgcataatgtaggccaatagaaatcagattggaggaccttgccaagaatcctctcttcattggaatggcctncataaagtgaantatggcaatgccataatatgcttttgccctcccctgagttatacatctcctcangagattatctgctccaatcttaaaaagataaggattatcccacacatagtaattagagtccctg

SEQ ID NO: 50636 - DNA, 528 bp, Glycine max
  unsure (1)..(528): unsure at all n locations
ntagctgatattgatctcgagacantcgagctgcagcnctcaatttgngattgtgctcnatgactgctgttatatataaaccgagtccaacccaggctgtctcaaagacaccctttgaattattcaagggttggatacccaagtttgcgacatatacgcgttttgggatgcccgtctgaagtaaaaatctataatccacaagagaagaaactagaccctaagactattactgggattttcattggatatgctgaaaggtctaaagggtataggttctaattgccatcccacaacactatgattgtggaatcaatgaatgcaaagtntcttgataatgattgatcagtgtgagtgatcaattcncactantcattccatttggattattgttatctttactttttcctatttataagttcacttatccttctctctagtataagttcttattattcatatttttgtcttcttctacgtactttatttgtctcctgatattttctatttctttcccttttatattgttcg

SEQ ID NO: 50637 - DNA, 300 bp, Glycine max
  unsure (1)..(300): unsure at all n locations
ctgtcgacatcgtcgcgtgatgaatcattcacaggttgaagagaggagaccttaatcctataacgcaacgtgcggacaaaatggcagttacttgaaggcattattgcaatgcggaaggtattttgcgcttcactatccatgttcacacatttatgcagcttgtggntacgtgaacatgaactactaccaatatatagatggttgttacaccaatgagcacatcttaaaagcataatccgcacagtggtgacctctcgggaataaagcagcaattcctccttctgatgaggcatggacact

SEQ ID NO: 50638 - DNA, 321 bp, Glycine max
gaaccttcacccgacgaagacactgacaacaacttatcttctccttcttggacaaagcatggctggcgtgagggcaatgtatatcatattgccatcacaccgtggatgcaactgtgatcatatacccacatcaactagatcttgacgagtattcacgccatccttcgttttgccttgaatgttaaggatcgtcccaatcacactatcacaaacatttttctccacatgcataacatcaatacaatgtctaacgtcaagatcacaccagttcggatgatcagagaaaatggacctcttcttctatatgcaacatctgacttt

SEQ ID NO: 50639 - DNA, 263 bp, Glycine max
  unsure (1)..(263): unsure at all n locations
gctcctccaatgcctgcttggtatttctatttttgtttcananatttgactctaatccatgtaggatgatggcttaaatcctaacccatgttgaacaaccaaattccaacttcttgtcaaattcttcaatacttgtcacgttgaatggaatgacattgttgtcaaataacagataaatttcttgactagctttcctccttatattattgaaaatgaaactgatggcgtattgaccctcactcatattccattaaaaaactata

SEQ ID NO: 50640 - DNA, 289 bp, Glycine max
  unsure (1)..(289): unsure at all n locations
aacaacatggcgcgctntctaaatacttgaaacggatgggattcacttaactagtataaaaagtgtttttttctatccttaaccgattcctcacgaataataaatccggactaatgacgtgagtttaacagcacatattattggaaaaactatctcatcatattggatatttattctacttgaataagtgtcttatatatcaataatttacacaaacaaaaagaactaaatatgtgttttcaaaggcattaaactttactcaagagatctagctcatgtcgattatatg

SEQ ID NO: 50641 - DNA, 354 bp, Glycine max
tataataatacgatacatacatgtgtaaatatatgatgttacttatgttctttacattcatatataaataacaataactgtttcttacttgccatgagagagtattaagattatgtgtaaaatactttggcagtatcacgcgggattactattaagctaagagatattctaaaagtgatattaattagacttatgtatatctgaggttaagatgtaaaatattattcttcgtttatatatcaattcaagacgaacatcgatgaacgatgtaggatgtgatggaatagagatacatggagcagacggatacctgctggatcacgttctaaaggacacagtgaacgacagatatga

SEQ ID NO: 50642 - DNA, 263 bp, Glycine max
actgagaatatcagtcagattgtctgagtgattgggaaagaatgcattaaccgtatcccggcgagagcgcgatccttataatttgagagaaacgactatcatttaggggtgattgttgcatgaatacttgaagtatggactgaatgcatgaaatcgaggatgatgaaggccatgtttgattgtgatagccacttagccaataatgtgaccacgtgcttgaatgatttatccgttgcacccagttttgagctgaatgatagatt

SEQ ID NO: 50643 - DNA, 311 bp, Glycine max
  unsure (1)..(311): unsure at all n locations
tggactctactaggggcaatattccttggcacccttaatcatgttcaatctgctggtaaagttatgtcttttaatccaaaaaaggaaacttggttaccatgtgagagttatttggataaatgaaaatagttttggatgttatatgcatgagtatttcaatgcttgcactactacgaaaagtgtgttttatgacaggcgttctactttngtaattatgtgtctgaaaaatccttttatgatgcacattctaagacggctattgaaaaccgccttataatgtgtgctcctcataaaacattatgacgggttta

SEQ ID NO: 50644 - DNA, 305 bp, Glycine max
  unsure (1)..(305): unsure at all n locations
tgcttttatttgtgaccacagagtggtacctggagatatgtcgcggnggtcaggagaccttgnggacgtcaggtggggtgctattgcccaaaaccaagcttgaccaatcccgacccaacccgggcatagtcggtcagtgagaacctgtgatgtatctaagcaggcgagctcctggcagtcaacagataaaaggaaaacaagaccacaaagcaaggaggcttgtggtggctggccagctgtgaattttgtgtaatatgtgagatatggcctctggtaatcgattaccaagggtgggtaatcgatta

SEQ ID NO: 50645 - DNA, 338 bp, Glycine max
  unsure (1)..(338): unsure at all n locations
atagtaccgataatgtgtctaccatcacgattatcatctccctttttgcacatgttctgtagttgcatcctatccggaaccatatcagaatagtactgatattgcctaacgaaggcaaccattaggtccttccaagtatgcactcgggaagggtccaagttagtgtaccangtaacaactaccccagtaagactttcttggaagaaatgtattagcagttcctcatctntgcgtatgcccttatcttccgacaatacatctttggatggttcttggggcaagtagtccccttgtacttgtcanagtccagcaccttgaacttgggaggggtgatgata

SEQ ID NO: 50646 - DNA, 461 bp, Glycine max
  unsure (1)..(461): unsure at all n locations
tattctctanagagaacgtagatgttgccttgataagcaactctacagagaactctaccatttcaagctaactactagcagcgtcagatgatagcagagtcatgagattacacgccttgtgatgaactctcggaactatctaatgatacatcgggggaatctgccaatntccataaacaggatacatgattggcaccaatatgactaggcacatgagcatttatattatacatgaaggctatcttatacttttaccatcgcgatcaaagcatagaacataatagattggcgtgatagacataacaatttatttcataagctgcatgatctcccctaactttgggtggttctgtctagaatcctttctatactgcgattcagttttcgttccatatataactatgatgagatttttaagagacttaatttgctaacaaaggtttagatgtgactttgtcatg

SEQ ID NO: 50647 - DNA, 445 bp, Glycine max
  unsure (1)..(445): unsure at all n locations
gcttccatcacttttgctcctacgtatcctcattntgtgatgaggaactcagacctacgtagttcttgataactgtgagactaaaaatagtctcggtgttttcttcaccaaaatgtgaacatgctttagtaaagagacaaaacttccaactgatcagagcaacatatgctttttggatgaaaaacaatgtgtctattggggaaggagagtatgctaatgaaattntctcataaccgtaaatgagattttggatgttagcatttcgtttctaaatgatccatttgaggaagcactgngttcaacaaaaatagaagataatcactcaaagtgtatcaatctcacacatgtatatgttttatcctaattccgaaccatagatatgtcatgacttgattntgcanatcatttnctatcaaatcaaagaatacatgcatgatcatggatc

SEQ ID NO: 50648 - DNA, 222 bp, Glycine max
acattatactctagtgatagagtgatccaccattctcttggcctatttgaacatttccaattactggatctactttgactcattgctcttgccctgcacatcacatgaaattatgccttttatttttattatctcaacaggatattttatataaagccgaagctgccaaatattgatgtcaagagttacctaagtggattctaacgtgcactaacaagttat

SEQ ID NO: 50649 - DNA, 282 bp, Glycine max
tttcaagtcagaataccgtcttgccacctgcataatgatcatgcaacgcgaacccctgaggccgccccggtcgtaaccatatctaatgttgacaatatatctcaagatgcgcatgcacacgtaacatcatgatctggtaaacaacctacggtataggacgagttatgctttaaaataacaaccctctgcattataaagaatggtaattattgaatccggtacttagctatcataatgttagactagaattcagtgttaaccaggacttggaatattccagtt

SEQ ID NO: 50650 - DNA, 559 bp, Glycine max
  unsure (1)..(559): unsure at all n locations
ntgtgatcctctcgacccgngatcctctgagtcacctgcggcatgccaagctaattgcgataatgacaaatcactatacttttaaatgctntactttcattntagactacaaattcaataggtgggtatcaaatagctcttttagtatttttggtggtaagaaatgatcatgaatcattttaatcaaattaagaagaaaatgaatatatatatatatatatatatatatatatatatatatatatatatatatgcacgtgggggtgtcttttatatatatatatatatgagcgcgaatcattttgatctctaatggatgaggaacctatagaatngtcaataaatgcaattcttatattctagttaagagtatatacacagacactctccgtgtagcatgctcgtgtctagttatgtatgtatgacattancacatcgtgagacacacttgagacacgctataaacttgtcactagataaaataaagaatgcacacgggaggtcatgtaagataaaatatcgctagggtggagtgtggtagaatatctatctcatgtcn

SEQ ID NO: 50651 - DNA, 349 bp, Glycine max
gtgcgcacgcaagcttctagtacagggtaactctgtttactgtgtggtgggagacaactctgatgatgatggcgaatggaaagagagcgcgagagacaactccgatggtgtaaacgaatggaaggcgaggattgatagagagtatgggttacaattacctccgttttgtgtgagacacagacctggagagggctccatagatggaataggactgtgacagggcgtgagaatgataatgcgacactcgtacctttggaagacgatgtttgaaaactaaagttgaactcttactttcatcatcacttcatgaagaaatcaatatcaaattatggttgcgcactgatttcgc

SEQ ID NO: 50652 - DNA, 328 bp, Glycine max
tcttaagtcacctgcaagctgcaagcttctcccatttcttaatatgggtgatgtgagcgaaaagggctcaccctttaggcacttctctctctttcgaagttgcttggaaaaattgtttccgtgaagaacatctaagccgaggcacttccgaaacgtttccgtaacgttctcgtgaggaatttcgcgagagtatcgatcgttcttcgacgttcttcattcgttcttcatcgatcttcgatcttcagcgggtgagtacctcgaaccaagcttttcgattcattctatgtacccgtaggggtccacattgcgtctcgtgtatatttattct

SEQ ID NO: 50653 - DNA, 301 bp, Glycine max
  unsure (1)..(301): unsure at all n locations
tgctctctgngggtctatttataaaccatatgcatacaatgtgaaatgttccatctattcttgaaaattgattccttccataaatagccttaagccactgataatttttctgaaattggtccaagcggactggagagaggacattaattatggtcatggctatagattggaaaaattctgtaatatcagaatagtttccctgctcaaagtttcattatgatgataatataagtgctcatattgtacatggttntgttggaattgcacaatactgtaacccaatcccttttcaagatcaaac

SEQ ID NO: 50654 - DNA, 556 bp, Glycine max
  unsure (1)..(556): unsure at all n locations
cgccagtattaantggttntaggtatgagaacntctttanaacntaaatannanaacanaagcatgatctgaaccnttcgagccggatctctaagcacgcagctgcaactttcagactgaattaattgtcgtgttttgctaaaaacatgccaaaaggtttccaaggtcatatactcactattcaatatcatctctagtgtggtttttgnnatncaagtgctacctcaccagcaccacacacaacaatattttcaattaaatttccatttgaggaaagcaaaaacataattggaaaaaatattggtgaaatccaatcaccctcctttatatgatagcatgcnnnnnagactaacctatttgagtaaaagatttacatacctagcttcgtagccattacaatgtggtgttctntatggcaattctcagagatatgttattgtccttatgttaacattcctctccaagagaaaataatataaaagtgataaattaagggagttctatagctaaactactactgaaaaacaccgggaagaagagaatgaaactaatgttt

SEQ ID NO: 50655 - DNA, 543 bp, Glycine max
  unsure (1)..(543): unsure at all n locations
ntgttcgtcatcatggcggccagcgatcctctaagcaccgctgctgcagctagctactctgtaggtttatcctatatgagcgaggtatgggccaccccactactcttgtatgagaaacgctctctctctctcaagtggcaggtcacatatacacgtcggaaacacttctagacactctctatcagcggggagagtacacttaaagacctttgactctagtgctaagctagacaagatcatgtacagcttgatcgtctttcgtttgagaagtatcaacttgtgcgggagagatgaacagtatatcctgactgctgtagaatcatcgacacgccactttgatcattgcagttccacaagacatggatggatgataaccaggccatacaaagaataacatcaagatgtctcaatggcagacatatcaaatctattaagaatgtgctccagaaaggccacagagcgatcagcactctgagaaggttcctacacccttggtgggctctccgctagactttaggaggacacgacaaagttatgtttctg

SEQ ID NO: 50656 - DNA, 468 bp, Glycine max
  unsure (1)..(468): unsure at all n locations
cgttcatcttctgaacttccccaacattagtgaggctatgcatctctagtatcgntgngcactctgcagggntagcttctattatgtggtgggtaatcatgaagcccagaaactnttcaccaccaacccctaaggtgcattgtctagggttgaggcacatgtcatacttgtgaatctctctgaacacctcttcctagtctgtcacgtgttgtgctatgttgagagacttgatgatcatgtcatcagtgttgtacctgcctattcttacctttcgcagttccaatacccggggattattctgtgcatgtgcgcacggaatttgttccttaagcgcttattgtttaccatcctctcctccattcgacagtaatttataaaatttggttagatttagcggaaagttatattgttataactatttccttaacaaaaaccccgagaaaaaaaaattaaaatctattttgtttg

SEQ ID NO: 50657 - DNA, 83 bp, Glycine max
taataaggaacaatggtatgaacattgttatggtattcactaaattaatgcgcttcactttttctttgatggacgggcattga

SEQ ID NO: 50658 - DNA, 367 bp, Glycine max
  unsure (1)..(367): unsure at all n locations
agcttannaaactatagaagataatgctacgtcgactgcttccaatacagctagggaagcggaaccggtgctacagcctgcaataaacttgggtcgagacagaaacacgatgggtttcaatcggaggtatagtcctcaagcctacccttatgatttgcctccagacttcactccccgtaccgctccaaacgatttgagccaagcccctaccttcgaggggcagctcccttctcatgccgactatcctctgcaagaagatgatgaaggagatgctcatttaggccctctacttctcctcaaggattcggccccccatgagtngccccaaccaaacatagtccgccacgtcctgtctccatcctcaccc

SEQ ID NO: 50659 - DNA, 316 bp, Glycine max
  unsure (1)..(316): unsure at all n locations
atctagacacacaaaccaaggccataatggaatataggtaaggtacaaatgatcatagtcattggcagaaatattgacttctgtaactgctactaagcttgcaatggaagacattgcatatatatattgatgaattttgcattcactaacacaaatctgtttaatttgtacgctcaaatctattagcttatgtgttcaacttgaaatatgaaatttctattttacatcttttatttggcattatgtaaccttgtccagcacatcacacantgttctntgatttctcttggccatagattagacctagtttatatag

SEQ ID NO: 50660 - DNA, 335 bp, Glycine max
gcaagctatgttcaacggtgcaaaaatatgtccattattatttcttaataagttaagcacccggcaagcaactgcaatggagatatgccctttgaaccttgaagtcactcaatagctatacgtcaacaaatagcatcaaaaggttaatgggtcgacaaattttcgaccaagcaaatcaattgacaagatacgaatttaataattcgggcctcaaaaataaagctgaaatcattatttcacctagtgttaacattgattttgtctgaataaagaagcagataaagatataaaagacatggctaagaagcaatccacatggtaccccttctttctca

SEQ ID NO: 50661 - DNA, 503 bp, Glycine max
  unsure (1)..(503): unsure at all n locations
tttacagtcttaanantatanngtgtaggtgatnatncaannnnanannaagaaacnacnnnnaatgtgtgctgatacgtgcacgacaaanaaacgacggaggagacagctaggcgaatgacggagcnctttctttatgtcttctctcaacaactcatcagttattgtgcttatttcgagcatatcgcgcggcgcgaagcacttttgactaatagaaccttgcacatatacgcaacgctgaacaaaacgtgaacttatatactggacaatcgtggctgaagccacatcttttgcaagatcctcttatccacttttttggtttaccagccaactcttgttacatacctatctactatggatcttacgtgttctttactggtgaaccacaattttctatatgagatacattcatccaacgcatgcatgctagaattaggcgaaaataacaatttgagtaaaatttaccaagcgccgaatcgcggattgggtcgctactcgaggtc

SEQ ID NO: 50662 - DNA, 381 bp, Glycine max
  unsure (1)..(381): unsure at all n locations
gcagctgcagttttaatatttacttaattactctcaatnntagntnctctacttataattattcgcattntatcttcacataatttttaaattatntaaactaaatcactntaagttntattcaaaaactaatagaaatgtagtgaaggtatggcattattaacttatagtaatatatataaatgaacaaaaaatgtataatatgtaatgaattttttataattttatttaaatatttgtgcggacctatacaaatttataatatatcacacctctgttatattattattctttntatttggatttgaatntaaacaacaaactatntgtgttctttatcataaacatctattntttataagtaacatgctcaaatggaaa

SEQ ID NO: 50663 - DNA, 152 bp, Glycine max
cccgagcagcctaaggcacccgttcagagggaggccccccaagttcgaactccaaccacgactcgcccagccgaaagttccaacggaatgaggaacgtctccccgaggccaattccagaattcaccccacttccaatgacgtatgaagacct

SEQ ID NO: 50664 - DNA, 274 bp, Glycine max
tgcagcttgccaagagcttcattcattgatggctccttcgatgatgaagacatcatgcttgtcgagtccaacaatgtcgtctccacgtcattttaacgtgaaggatatgtgggagccgacaaagcatactgcgccattgatgaggacggacatgccaccttgacaatggatctatgcatagatgtggacgtactcctcccactggataccgccctaggaggcagagaggtagtagctgctagaatcaacgaatcattggaataagttgagatcg

SEQ ID NO: 50665 - DNA, 364 bp, Glycine max
  unsure (1)..(364): unsure at all n locations
ctgcagctggcaacaatactctatttcatctctatcatgcanttttctttctttacccactcctcacgtttggttttttagggaaaaacaccataactaaacgcgccgcaagggatccctatcgcaccagatccaaatctagaacgatgggtgatcaagaggagacgcangaacagatgaaagccgacatgtcggctctgaaagaacaaatggcctccatgatggaggccatgttaagtatgaagcagctcataaagaagaacgcggccactgccgccgctgtcagttcggctgccgaagcagacccgactctcttgcaactaccaccatcctccctatacatagaggacgggatgggcacact

SEQ ID NO: 50666 - DNA, 238 bp, Glycine max
  unsure (1)..(238): unsure at all n locations
nttgnngncgnnnnggtcgnnnntcaatnttatgtttgaagcttatctcttattctgcatccactcgttatagattattcaagctcatatccctcatgttggctacaaaactgcgtataatacaacctccggctcgtcctctagatttattttgtatactttaccttcccttatgctattcatactatagtccactaaccaatccgtttgctcctcttagcttagtcgtcatatactt

SEQ ID NO: 50667 - DNA, 295 bp, Glycine max
  unsure (1)..(295): unsure at all n locations
atctaaagatgggggttccacttccagaccattacaactggtgcatatggatctatttggactaactagaatgtcgatatttgaaggaaagatatatggatttgtcatagctgatgactattcaagatatacattggtatccttccttgcacatcaacattaagtcttccaaggtctcttgaattatctatanaagagtgtaaaatgaagaaaaaaggtttttcatttcttctattataagtaaccatggaatcgagcttgagaatggacatttaaatcattccacgagaagaat

SEQ ID NO: 50668 - DNA, 258 bp, Glycine max
  unsure (1)..(258): unsure at all n locations
actacttgtaataaattctaaactgcaatttgggcgagaaaccacatatacataacttagccaaattctacaacattagaatgaanaattccaaataaacccaaaaccgaaagctagtaaactaggcatacattaacacactaattaacccttgatgcttagcaaataaaactaattaacccttagttgttaaatgaaaaaacttagatngcattactntntgtgctgttctctaattaaggatacagtaattcacat

SEQ ID NO: 50669 - DNA, 311 bp, Glycine max
  unsure (1)..(311): unsure at all n locations
tgacctctatcatgnatatattcattttcntcanaaccttctcttccattcgagaagttggcaaactcaatattcactctcctccttacatccacatcaagaaagaacctcttgaagcattttaatctttcacgagtgagctccatgtcttgatgtggagagaacctcgattagatatcttcaacttaaccatttcatgactataatatctacaattaaaaagaaatatatacatgattaaaatctatgtaattctaatacaaaatgtaagtaaaaaagtatagagtctattacctaggtattaaagaatg

SEQ ID NO: 50670 - DNA, 297 bp, Glycine max
  unsure (1)..(297): unsure at all n locations
gggacaatgctaatcattaatgctacactntaagcattacaggagctagcangtcattagttctacacttgggccatagccagtcattagtgttatagttggaccttattggaccttgagaaaccatggttggtacacttaaacattattcggccttagttaattgctggggctaaactntaacctaattgagcctaacttaattattagtggtacaatgagctgtggtgggcattaaatagtctttaactttacaatttagcctagtatggtctttgacaatcattagtgtcacac

SEQ ID NO: 50671 - DNA, 267 bp, Glycine max
  unsure (1)..(267): unsure at all n locations
aaatgatagcattacttgtggtggacttcttaaatgataaatntaaatgataatattacctttgcacgtaattatagatgatgaatttaaagaggatatatacatcaagctgaacctatnttcaattntcctggtttccaagatgatgcttctttcaagatgctgtctnctttactctctcttcgaaagcattacccttgtcatgggtgatccatgaaagattcttccaacatcataaggacacaacatcacganagatgcatgatc

SEQ ID NO: 50672 - DNA, 220 bp, Glycine max
  unsure (1)..(220): unsure at all n locations
tgtactctttcatacatggcactcgccatgggtggctgataacgacaatcatatcgttcaaaacaaattactagggaattctgtagcacaagataacctagatcaaactcagaaatatgattcaatatggttcctacattcattcacatataaatagaaagggggatntttgtcaaacaatttgtgagatactctaagagaatgtgaaaacacaaaaaca

SEQ ID NO: 50673 - DNA, 294 bp, Glycine max
  unsure (1)..(294): unsure at all n locations
catacagntgctcattcaaatcattcgcagacactcgttgcatacaaaacaaaccactgcatatcanattcaactaattcactgttcaaacaagctttctgtacaatcaatcaactcaaagtactaaaatttaaataactaaaatttaaagaactgaaacataaacattgaaatttaaatgactgaacataaatcataaaataactgaaataaactaaattgttcaaaatgcacanaattaaatgtcttgctcctgtgcatgctcattgagatccaacacctgagcagctagtg

SEQ ID NO: 50674 - DNA, 262 bp, Glycine max
  unsure (1)..(262): unsure at all n locations
atagaggatcgataaacaatactatggtgattagtgtattttatcattacctcaacagtgaccatctggaatgcanagagggaaagttataataagatgaagtatgaactggaaaggaaagctaagaataaaagagagtgtgtgtgagttgatcgaagtatgagaagtttatgtgtagagtcttcaacactaataccttcctagagagtgtgaggaatgtccacttccaagaatctttttaagcatacaactcatgttatta

SEQ ID NO: 50675 - DNA, 234 bp, Glycine max
  unsure (1)..(234): unsure at all n locations
gaaagtccgattcagctgcataatatatcaagacactcganattgaatgccggaagatgatgagaaatttanattggtcataacttatcacacagatgtctgattctgcccataatatatcgagatgctcgaaattaaccatggagctctcgagaaatcaaatggtcatacctttcaattggatgcccgatccatgcgcatctttatcgagactctcgaaattgacaacgaagc

SEQ ID NO: 50676 - DNA, 464 bp, Glycine max
  unsure (1)..(464): unsure at all n locations
atgaagctngttaccacttgtagacaagtggcctatatatctatagatgggggggtggattaaagatatcaccaacctatccctaattaaaaattctactttgaatttaaccctaagtcctaggtcccttaaaggatgattcacaaataacaccaatctggattgtaaatgtaaagccaacaataaataaaagatgttaaggggaagagatagtgcaaactcagctttatacttgtntcggnncacacccttgtgcctacatccaagccccaagcacccgttgagagttcactatcttgaaaaaacccttacaagtctgaccacacaggaaacccttctttgtgtcaattgtttacatagagaccctagctcttatnctttcaaatgagaagagaaaaaccatctctttgaaagatgatgaccatagcatcataattccttcgaatgacgggtggtgctgagtt

SEQ ID NO: 50677 - DNA, 281 bp, Glycine max
  unsure (1)..(281): unsure at all n locations
cggatgcctgantgagtcccgagatataacgagacactcgaaattgaatgttgaacctctgagcanattcaaacgacaataactctcttctcagatgtttgagtgagactcgtaatatatcgagacgctcgaaattgaatgtttaagctttgagctaattcanacgacaataactttttactcggatgtctgattgaggcccgaaaatatcgagacgctcgaaattgaatgttgaagctctgagccaattcaaacgacaatatctttttactcggatgtct

SEQ ID NO: 50678 - DNA, 246 bp, Glycine max
gcgacgtggcacatcaatacacacgtctatcttccatctcagccctggcataagaacatgtacacatcgcccttagcagtcaagctattgggccgacaagttaactctaatacctcattacttgaatattaatgatagtgttgcaaccctcttatcaagtggcaggtacttaattatctataagatacacattacatataagcaacaacttatctactagctattgtctacatgctagcaattatc

SEQ ID NO: 50679 - DNA, 93 bp, Glycine max
  unsure (1)..(93): unsure at all n locations
tctangaggcatgcatgcatctattccccagtgcttacacaacggacggttgtgctggtgagcatttgaagaggcgatctcgcatttaatctt

SEQ ID NO: 50680 - DNA, 298 bp, Glycine max
  unsure (1)..(298): unsure at all n locations
atcgattatgataagattggaattaattaaaattgagttttggcttccaaagaaacctttctaacaaaaaatttccttctcacttactcatgatgatgcatgatgcacaaaacatatgatatggactaagatccacattcaatataacaaccaatacaaatgtcacttaaatgagttgggcagggaaaagataaaatatcttcaagcttttatganacttcaagctntagtcttgatggtgttcatgttgctccctctatctctaacanaattaacaattttattacatggataatat

SEQ ID NO: 50681 - DNA, 105 bp, Glycine max
  unsure (1)..(105): unsure at all n locations
cttaagcactgcagctcagctgaatagatacacatatgactattgtctattnctcatgacgtatatccttgtggangaacctatgtacgttatatacatcatatt

SEQ ID NO: 50682 - DNA, 316 bp, Glycine max
  unsure (1)..(316): unsure at all n locations
tctcttctaacanattctttcttcttacacttgtactgaccgctcctttcacacgcaattaacatatatgaagttcttcctctactaccagtatatgtatcagacctcataattactacnaacaaaaccgtttcatgggcaaccgttcgagtccactgcaacacagcatctcgggttgcanagacctacaatgcaaccccagcatattaatttttacacaaatcatacattaaaccaaacgactaanacttatcaacatgaatacctgagaagtattaaaagccgctgaacaatcaacatgtccttcattcacacc

SEQ ID NO: 50683 - DNA, 272 bp, Glycine max
  unsure (1)..(272): unsure at all n locations
agcttgccacccagctcgcccaggctatcaaggttgctttcctccagaagcaacagccttctggaggaatcttctggagggaccaagtgggtctggttgctatttgcgcccnctttnttactaaatgcacccncctttctattttttggtaattctttttccgtaacgttacgaaacttcatgaatttcgtaccgattgcttatttccttccgtaagttatgaatccttatggattatgtatttactctttcttagctntcgaagaaggtac

SEQ ID NO: 50684 - DNA, 318 bp, Glycine max
  unsure (1)..(318): unsure at all n locations
ttaagtcacctgctgctgcagctatatgcatagaaatattatcatatattgttcacaanaaagacattaaaataatgctcttaagacaattatcaatgagaatatattctcaatatatcactcatattataattagatattgtatttaagtcttatcataaatataccacttaaatttatcaatgttgattgattaatttaatttatagtaccatcagattaatcaataaatatatcaaatttaagaacgattccatgagaagaagctcgtgtccaatggatctagctcagttgataatacacactatgtgctgagtt

SEQ ID NO: 50685 - DNA, 313 bp, Glycine max
  unsure (1)..(313): unsure at all n locations
ctatggaatanaagaactaatggctgagtgtaattgaaattgtggcaaccataagtcacctccaacagccgtcaagtcagccaccattttggtctccaaaaggctgaggcctacgtttgccaatgggcccttattacaacttgaactnaaactaaataaagcccttttagttgattaacccaaatacatattatggtcagccaactntacaaggatggggccattatttagacaaactaaacactataaaattgagacaaagtggtgccatntagtcctcctccatttgagccatgatacaactcacaacctt

SEQ ID NO: 50686 - DNA, 394 bp, Glycine max
  unsure (1)..(394): unsure at all n locations
cccgaaaagattgatcatccgcaactgagcatgttactgggaccctattctntcctaccaaaaagctgtgaaagaagttgaagagactgcttccctcatcaaacctgataaccccttcagcagccataacaaataaaaaggggccanaggatccncttgcctcanacctctttgaggcttanactcctcagttggactaaccattacaaggatggatattgaagctgaagaaagggcagcctttaacccaaccaatccacctttcatggaaacccatttctctcaacatatagaatataaatggccagaacagagcataagcttctcaagccacttaacactaacacgattttttgctctacctctcacacctcactacatcagactcatgaca

SEQ ID NO: 50687 - DNA, 360 bp, Glycine max
  unsure (1)..(360): unsure at all n locations
gagaggttccatcaaccgccctaattccttgatgctggtggtatctatgcctttaaccttgacttggtaaaacctcttgccggtttgattagtccccatgcttactaaagtgagacaaaaagctggtgcaaatcaaaactccgatatctcatgggtgggatggatgaatgcatgaaggaatgcatatgacacaactgtattttaagaatgcgggtgccctggacattgtctcctttatagacacaacgtctaagggtagcaaagtgccccaatgtatgtatttaagacggggacccggaccctncattgattttgtctatagatgggatcaagacagaacccctatgctatgcatatgca

SEQ ID NO: 50688 - DNA, 267 bp, Glycine max
tactaagctcttcgatcaatctatgtacccgtagtggtccacatagtgtttcgtgcgtttttattctccgatagattacttattatacaccctcgtgacgtgcttgagccattttacttaagtgatgagacgcttaacttataaataaaatacattgcgcccgaactttcgaagtgtatgatccattaactcggggtaaaataaataccgaccgttcgggagtgccgtaaccacgatggaaatcagaaagaggtaaagaattatatc

SEQ ID NO: 50689 - DNA, 113 bp, Glycine max
  unsure (1)..(113): unsure at all n locations
gaatcacgattcaagagaagatgatttccccagggaggtattgaaaagaatttntcacaaaccaaacatagcacagttctgttttacaagaaaagcttgtctcaaaattttct

SEQ ID NO: 50690 - DNA, 407 bp, Glycine max
  unsure (1)..(407): unsure at all n locations
agttgctaacacttgtttgactaggttaattatttgatcactntagacagtaattgatgttcaatagtttattagacctgaccttctgagtattgtgatggatttgaggtttgtaggctaattataagttaagtcgggttctaattaaggggcatggaggtccttcaaacaaagattgttactataaatgataaccatattttctttttgttacttccaatatcttttaaggagtgtcttagggagaaagtctgattagattaatagatctaanaataacanaagtctctttacttctgtttttaagtcaggttggattaatattaagttattgaactatntgacaanttttaaatngatcccattaatatagaagatatatnggattcttaaacttataaaataat

SEQ ID NO: 50691 - DNA, 388 bp, Glycine max
  unsure (1)..(388): unsure at all n locations
agctntgcgngattggtctntgccagagaaaggatctatgtgggtctgaaaagaggcaaatttagtcatcctgcttggacgaatgagaaaactggggcaaatgaagagggtgaggatgaaggagaagcccgtgctgtgactgccattcctatacagccaagtttcccaccaacccaacaatgtcattactcagccaataacaaaccttctccttacccaccgcccagttatccacaaaggccatccctaaaatcaaccacaaagactacctactgcatttccaatgacaaacaccacctttagcatacaccataacaccaaccaagaaatgaattntgcagcgagaaagcctgtagaaatcaccccaattccagtgtcctatgctgac

SEQ ID NO: 50692 - DNA, 456 bp, Glycine max
  unsure (1)..(456): unsure at all n locations
tcgattcattctatgtacccgtagtggtccacattgtgtttcgtgcanttttattctcgttttgtttactttntatacccnctgttgacgtgcttaagccattttacttaagtcatttctcgcttaacttaaaaataaaataaatttccaccgaacgtttgaattgtgttatccattaacttcggttaaaataaattccgaccgttcggtcgtgccgtaaccacgttggaaatcaaaagaggtaaaaaaataatataataatcaaaaagacatcttttagtaaaataaagcggaaaatcaatcggacgttttctctgtgggatttctcattcttaatcgaatntgataataactaaagtgaaactaaggctaaaatcaactcgcctagtcaagctcgtccacaaaaataggctntggaaggttgcatttcaatttctcactaagtaaaatggatca

SEQ ID NO: 50693 - DNA, 294 bp, Glycine max
  unsure (1)..(294): unsure at all n locations
tgaaccctngctaatagaactactccaagtccaaatacttgggtattctcacattattcacggcgtaaattatcttgtagtcgctcttcttactttcatcggtaaaccatgtatccaacttgttgagagtagcttgatagcattcaccttgcttccctttggaagacttggctatcttttaagctctagaggggttgctagccatatgcagaagagaaatacacggttcggaagcataagaagggtgggttcatagaggggtgcgtaaaggaggtgttggtgtgatttgtggat

SEQ ID NO: 50694 - DNA, 398 bp, Glycine max
  unsure (1)..(398): unsure at all n locations
cttgagggtgcgtagcccaccatcttttcatagtagagtatctataatgtgtctaccatcacgatcatcgtctccctttccatcattgggggtaccacctgngccaccagatccctccaccttttgggcgtgttctttgaaagacccgtccccttttttgcaaatgttctgtagttgcatcctatccggaaccatatcaaaattgtactgatactgcctaacanaggcaaccattangtccttccaagaatggactcgggaagattccaagttagtgtaccaggtgacagctaccccagtaagactttcttggaaggaatgtatcagcaattcctcatatnttgcgtattcccccatcttctgacaatacatctntagatggttcttgggacaagtag

SEQ ID NO: 50695 - DNA, 347 bp, Glycine max
  unsure (1)..(347): unsure at all n locations
agcttgttgnggccaaaaatgaccagcctctcctattagcctcactgctgagaccctctttgctacatctcagattctcaaaaacctcctcaatgggaatgttctcctgcattaaaaaaaaaaaaaaaccatcattgaaaccacaaaaggcacagcaaggaagaggcttatagagtggttcagatctgttaccaaaatctacagtttctttcaacacagcctccaatacttgagacttgtcacccatgctggaccacttcctctacctctctctcccaactgtgtttactaaaacaaatataataaaaacagctatgatattaacacaatgcgtgcacaccacatac

SEQ ID NO: 50696 - DNA, 472 bp, Glycine max
  unsure (1)..(472): unsure at all n locations
tatgtgtagtggaacaatcctttgataccatactccaactctatgatgcttaataacttctaaaacttgcctgtcgattaaagttagcaagattgacgttaacatgaaagtaagacaattaaggttgtttggcttgtcctctattgtccttagatgttgatttcttaataattacaaaagttatgtattgtgctntatgttgtcaaaattttgtgaaagatatggaggaaaaaaaagtttacttttaccatttcattccccanaatttgaaaataagaagtcaaattaatacaaaattagatttatgtagttatttatgaaaacatgtgaattctaaatgaaaaccggaatcaaacaaaacacactgggcagtttgtatntagttgatgactntntcttataccatatatnggcttatattcattaatgaatgtatgtacacctgggaggtntctgcttaatcattaaaata

SEQ ID NO: 50697 - DNA, 198 bp, Glycine max
atccttaagtcacctgcggctgcagctttagaagttgaattgaattcatagctgtaatcgataccacccttgtgtaatcgattactagtaacggaattatttgaaattcaaactaaaaagacatgacttgacaaaattaattgtgtaatcgattaccagcgaggaaatttcaaaaattactttgaaaagtcacatctc

SEQ ID NO: 50698 - DNA, 461 bp, Glycine max
  unsure (1)..(461): unsure at all n locations
cactgaattacaacattccaattaatttcaagatggtgtgatcgattacaatatattggtaatcgattaccagtgtgtttgaacgttgaaattcaaattcaattgtgaagagtcacatcctttcacaaaaatgcnttgtgtaatcgattacaatgatttggtaatcgattaccggagataagttttgaacaaaagttaaaagatgtcactcttataatggttgtcaagtttttctaaaggctataactcttctaatggttttcttgaccagacatgaaaagtctataagaggaagtccttaacttgcattntaaaaagaacaattattacaatcctttacaacctttgattatctgtgagcatcttcttcttcttcttcctttgccaaaagctttctaaagttgtgcggttnntacaaaccttgaaaacaaaagtgtgctattcattnnttctttctcttc

SEQ ID NO: 50699 - DNA, 376 bp, Glycine max
  unsure (1)..(376): unsure at all n locations
agcttgccacccagctcgcccaggcgagcatggttgcttcctccagaagcaacagccttctggaggaatcttttggaaggcccaagtgggcctggttgctatttgcacccncatttttactaagtacaccccctggccttttttttggtgattctttnttcgtaaagttacgaaaacttacgaatttcgtaacgatacttgttttctttccgtaatgttacggaaccttgtggattacataatcatcctctttttgacttacggaatgttacggaacctcactaattgtgcaacgatgcttccattngatttccggtgtgtcacggaaacttacggatggtgcatcaatattttcttttgtttccggcatgtctcg

SEQ ID NO: 50700 - DNA, 493 bp, Glycine max
  unsure (1)..(493): unsure at all n locations
tttgtcatcacctannnaaatccattttaaggtccaaatgtcttgaaatggtcttttccgcttttattggtcaaatgtagatttctaaaggcctaaaatcaacatgtagctntattacctctttcaaaaataaatggtccaatgccttaatgttctctctcttttcaaaaagaatcgaaagattgtttaatggtccaacgccttanatgacctttcattcaataaaaacatatcttgcaaaaaaggataaaaaacaacttaaccaatgcttagtcctcanagaactacgtaggtctgatttccttatcacaattgaggaatacataggagcaaagggaaacacccttgtcgaccacaaaaagataaaaatataanaaggcataaaagacataagaacgtanaanagggaaaataacatgaattgaagtcatatttgcacactttgataaaggctatcatcctttgtgacggacgtatggngtgctaatacctt

SEQ ID NO: 50701 - DNA, 340 bp, Glycine max
  unsure (1)..(340): unsure at all n locations
agctngcctgtccgatgcagtcgtaatgatggcccgagttatgttggggaacggttacaaacccgggatgggtttatgcaaagacaacggcggcataactagcttgataaacgccaaaggaaatcgtgggaagtatgggttaggctataagcccactcaggcagatataaagagaagcatcgcgggaaggaagagcggtagtcaaaactcgcggttgagacaagaaagtggaggaagcccacccttccacataagtaggagctttataagcgcgggtctggnggacgaaggtcaagtggtcgcgatatacgaagatggtgttccgagtacattggatttg

SEQ ID NO: 50702 - DNA, 394 bp, Glycine max
  unsure (1)..(394): unsure at all n locations
ggtttctacagtaaagactcttctcatggccttcgaatgtccagcttagtcattcagacccccaccattctgctccttcttgggataaggacaatctctctaaatatgtcccttttgcctacagttgaagcatttcatgtctttatcgacacaatttgaggagatgtagtttggcttaccacacttaaaacaaatgattaggattgagaaagtagtgggtttgctatcattaccactagtaaaccccatagcaccagtcctctgattgttggggctattaccatgttgcttangaggggttaggtatggttttccccgattntgagattcattctttntattcttcattgngctcgtactccgataataggccaccctgtcttaagagtcctca

SEQ ID NO: 50703 - DNA, 368 bp, Glycine max
agcttatgcaacattacattgtcaagatcaatgatgttcatagctgattcacgttaacaccagcgctctaatagcttatgcaaacataaaagatgcagttagcaagaatgataacagtatttaatgggtcaaagatcttaaatccctacatgatatacctcagaatttaaaaataatcataatacttaattacttattgactttggtcctttatctcctcctatgttttgaaatcatcctttacgttgatagacaatctccaatggatttatccataagactcataaaacagatgttcactgtgttctttcttcctagcaagctagatttccttatctcattcataccatctaaatccaacttgcata

SEQ ID NO: 50704 - DNA, 477 bp, Glycine max
  unsure (1)..(477): unsure at all n locations
cgcaatttatcaaatacgactctgacttgttctacttgacttaacttgtaaggaatcagtaattagaggtttttattattattgaaaattactatgttatgggtgtattgaaaatcattgtgcaaatgagttaataatgctttttaataaatatattgttattcttaattcattaacttaacatttgtaagtttttgcaatttaaatatcatgtcgaaagagagcataaactttcattttttacattcctatgagctcnaatttttttcatagtggttgtatactattattgctaatgtcatatgagccgagcccgctttgctctggacactgatccagaattatgggccagttaagttacaatgcccccanaattaagttcttcaaaatttacatttaagactctttttggcggcttttgaaaattagttttggatcctagttctatctttgcgtaagtacaccttttttatatgt

SEQ ID NO: 50705 - DNA, 343 bp, Glycine max
  unsure (1)..(343): unsure at all n locations
agctagctatagttgagcgcgctgcanaatatgtatcacagttgaaagtaataatctggttcttatctatngacttaggtgattagttctcccattattcatggngaactnttataaattttcaggaaaaatatcatttacgacttaaagtgctagaggagagtttgagaggaaattctaacagtagttatcgcggtacccccgagggaagaagtatgagcaatggcccttctcgtcgtcaatccctaggtggagctgataacttctcaaaactaacctcaaatgggttgttatctaaaagatcaccatcctcttaactgaggtcatgcctattctctaacac

SEQ ID NO: 50706 - DNA, 488 bp, Glycine max
  unsure (1)..(488): unsure at all n locations
nttannaatgtccgagaattaacgganataattaanatntgactaggatatgaaatagtttaattagctgcaatttaagatttgactcatgtttggtgaccgatgatatttcaatacatgttcgatttgttatgtatgtgcatatataatattaaaaaaattctcttgaatgactgaaattacgttatgaaatgtaatgtaatgtctaccaattcgattccaatatntaattgtatcctcaaataatacgaataatatgtgttacatgttgaaagggaaaaggtgaagatcagttttgacaagcctttcatcgtactagaaggcgagggacaaaagaacacttttgttgagtgggatgaccatgattcaagtgcagagagtcctacgttcacaaccatggctgacaatngtgtcgtcaagtccattagctttanggtgagaaaacaaattgcttatttattatttcattctttgaagttttttttata

SEQ ID NO: 50707 - DNA, 372 bp, Glycine max
  unsure (1)..(372): unsure at all n locations
ccttttattttgnttgcnaatatacacactcctatgtgtcaaccatagaattttatatctacccatctcatccaccctcttttcttagaaaaaacaaccaccatattgattgagaacacatctattgagactcttattaggcctgtgatcatcaaccaacacaagctcgtccttttctacaatactaatggatctggacccagttgtttgttgtaacctctccatgatcgcaatctncaccatgaattgctgtaacacttgcttctaatcgtggttcgcacatttcacagatatctgagttgtatttcagtatgtgcttctacactctcacaaaccctccagagactgacaacattcttttctaaattcctn

SEQ ID NO: 50708 - DNA, 472 bp, Glycine max
  unsure (1)..(472): unsure at all n locations
cttgtcatcacctaanacaaccattattaaggttcaaatgtcttgaaatggtctattccgctattattggtcaaatgtacatttctaaaggcctaaaatcaacatgtagctttattacctcttataaacataaatgggccaacgccttaatgttctctctcttttcaaaaagaatcgaaagattgattaatggtccaacgccttatatgacctttcattcaataaacacatatcttgcgaaaaaggataagaaacaacttatccaatgcttaatcctcaaagaactacgtaggtctgatttccttatcacaattgacgaatacatacgagcagatggaaacacccttgtcgagcactataagataaatatataagaaggcactaaagacataataacgtactaaagggaccataacatgaatcgatgcatatatcacactcgataaaagctatatcctttgcacggacgtat

SEQ ID NO: 50709 - DNA, 303 bp, Glycine max
  unsure (1)..(303): unsure at all n locations
agcttgcctcanagaggtccaggaatgacaaggctgtcaaaggaactagttccgctccggaatatgacagtcaccgctttatgagcgctgtacaccagcagcgcttcgaggccatcaagggatggtcgtttctccgggagcgacgcgtccagctcatggacgacgagtatactgatttccaggaggaaatatggcgccggcggtgggcatcactggttactcccatggccaagttcgatccagaaatagtccttgagttntatgccaatgcttggccaacagaggagggcgtgcgtgacatga

SEQ ID NO: 50710 - DNA, 486 bp, Glycine max
  unsure (1)..(486): unsure at all n locations
ngcatacattatataccatatatgctgcagtaagtataagtacaagttggattgggaatcttnttgttgattcattctgatttaatatttttcacagatttcaataggctctttgacttgtcaaatacgctgaaaatggcatttgtgcttagcgaagacaacaagcgtcttgtagacaattattttcagcaaccacaatctcagttttatattctttgtctctttaagatacacctcanatggtggtaggcgttattaagacaacttattgatttggtctgtgagtcacttaattatctttacatttaatcaatttgttgtcaatttactaaagtcatacttgcgaccatacacaacattgaagtacacgcctttaaagaaaaaacattatttagcacatacataggtatganacacacgacatgattnttctacatgcatgagcataattnggtggtacataaatgataatgagtctgataaaaa

SEQ ID NO: 50711 - DNA, 346 bp, Glycine max
  unsure (1)..(346): unsure at all n locations
agctntgatgatgtcgaaaagaaatcacatgtttgtcatcatcaaanagagggagaatgtgaatgtatgtatacatgantttgatgatgccaaagaagaatcaaacaaggctgcttcaaatgataagcatttgcttcaagaataattcaagaatgcttcaacaaacaaagccttgtttcaagattcactaaagaccaagtcttgccttaaaacanagtgctttcaagacatgcanggctctggtaatcgattaccagaagacagggttgagaaatagctgttgaaaaagggttttgaatttgaatttcaacatgtaatcgattaccatatgtctgtaatcgattac

SEQ ID NO: 50712 - DNA, 522 bp, Glycine max
  unsure (1)..(522): unsure at all n locations
ctcagcttctgtgggacatcttgacttgctttccaatctgacattcactcacanattctgccttcttctattntcagattgggaatgcctctaacagcacctttgtcaatgatgttcttcatgcctcttaagtgcagatgtccaaatctttgatgccatattttgacttcatcttctttggagaatagacatgtggaggagtaactggtttcttgaggtgtccataggtaacagttgtcctttgatctgctgcccttcattaggacttcactcttctcatttgtcaccaagcattctgactntgtgaagtttacattgaatccttcatcacacaactgactgatgctgatcaagttcgcagtcagtcccttcaccagcagtactttgttcagactangaagtccatcatggactagctntcccattccagtgatctttcctttagagccatctnncaatgtcacatagctagtggagcaggttcaatgtcaccaggaattcttaaactctgcatgtgtctgg

SEQ ID NO: 50713 - DNA, 438 bp, Glycine max
  unsure (1)..(438): unsure at all n locations
tgggaattctatcatgatccactaattatnntaattgataagactctagtgcagcccatacccaatggagacnccaaaattgtaaaatcattaagaataaattcatctttcaatttcattaaattgataancaaatacatcgtctacgaagcttatgccactgacatagaactatcttcaaagtctctcttatatgctatagttcgtagtgggtggccaaggaagtatacgggtattttcttaattaaaccagtatgtgccttgacgttatccccatctctaananaataaattatanngatatctaccacgaattctactttgtatnccatcttaggcttgatgggttccactccctaaccacgacagggaaaaaggcagtacaccacactcacactacatacacactacacacacacacacacactcacacactct

SEQ ID NO: 50714 - DNA, 417 bp, Glycine max
  unsure (1)..(417): unsure at all n locations
actcagactctatccatgctcatctaggggagaagctccttcttctatggcttattccctagaggatggcgcctcctctcacctcttctcctttgcctttcgctgcatctccatggtggaaaatcaccattaaaggaccttattgaagctcaaagatccagcctccatagaagccctagaagcaagcttccatcaattcaagctcttatgaaccataccctcatccaacaactcctttacttgaggaataatctcaagcccaagaggtgtggcagtgctaacaatgtctgttacaaagaagaagatgtagaggttttctaagaggggaagtttctataatgtttatctttattgcanaatgaatttctttcttagctaacctcttggaggagacacttacctncttacactttctct

SEQ ID NO: 50715 - DNA, 375 bp, Glycine max
  unsure (1)..(375): unsure at all n locations
agcttgtcanaaaggaagcaagttaaatactcctttcaaagataaaacgttgtttccacttcaaaactccttgaactacttcacatatttatttggtccctcaagaactatgagtttaggtggaaattactatggcttattaatagtagatgattactcaaggttcacttggactttgtttttgaaaaccaaaaatgaagcttttgatgcttttcacanacttgtcaaggtgattcaaaataaaaaaaggttttaacattgtttcaattagaagtgatcatggagatgaatttcaaaataagtctttgaaaaacttttgtgaagaaaatggaattcatcacatnttttctgccccaagaacaccttagtagaatg

SEQ ID NO: 50716 - DNA, 515 bp, Glycine max
  unsure (1)..(515): unsure at all n locations
nggagaggatgcttcaatggaggaaaagaaagagggagagttagagagatgtgggagcacgaaattgaaggaataaaagaggtatagaagtggaaccttgaagtatgtctcacaagactctcattcatcaaacttacaacaagtgttacacatgcttctatttatagactaggtagcttccttgagaagctttcttaagaaaacttccttgagaagctttcttaagaaaacttccttgagaagtttctttgagaaaacttccttgagaagctagagtntatctacacacacccatctaaaaactaagctcacctccttgagaagcttccttgagaagctagagcttagctacacacacccatctaaaaactaagctcacctccttgagaagctatcttgagaagctagagcttagctacacacccctataatagctaagctcaccctcatgacagaaaaacatgaaaatacataagaaatcctactacaaagactactcaaaatgccctgaaata

SEQ ID NO: 50717 - DNA, 331 bp, Glycine max
  unsure (1)..(331): unsure at all n locations
agcttcttgcgtagccgctcttggtgctcagaatatctcataaacaaatccctcttattactagttattttgaattcattagttcctgaatgtacaaccttcaaattgttgctcgttcccctctttcttttctgaanaaaagaanatcaatatcaaagaaaacatggatgaagtcctaagaaaatcaatatcaaagaaaacatggatgaaatcacaattaagaagcacaactaccaatctttcagggtcctttggttaattngtcttgtctctttatgtggtggggttttgtttaataataatatacttttgccttcccaaaaaaacttat

SEQ ID NO: 50718 - DNA, 455 bp, Glycine max
  unsure (1)..(455): unsure at all n locations
ctaagctatccaccctctactaaaccatcagtgttcaacatgagactaactttattcgaaggaatacaacgaataagcacttcatttttccttctaatatagcaatcggaacatgaccttcatgagattagtattccttgatgtcattacaaatataatcccatggtttcaaaggtttcaaattctagctaatccacatgagtgttcctccacaaccaaatggagtgacaagcagcccacaatgttgtccaattgtattgattggaaaagcccatcgatttgactaaggttaagatgaatccaatattgaagggaggtaattaagaaagaccctctgaactntgaatcaaccaagtgaatctcaaattgactatataaaggacaatcccgcatgacatgcactattgatttcacttaatgagcagntatgacaatgaagagatctcgcactccat

SEQ ID NO: 50719 - DNA, 327 bp, Glycine max
  unsure (1)..(327): unsure at all n locations
atccttgagtcacctgcngcatgcaagcttatggacaaactccaaaggcttagacaagggagtatgggtgttgaagaatatacacaacaaacggaactactctttntaagagctggacgtatggagcaggaaagaacaagcatagctaggttccttagtgggattaatatggaagtgagggacaaggctgaactccttccatatagggacctagatgagctagttcaactctgtgtaagagtggagcaacaacttataagaaagccttcttcaaatcttatacctctcactcttatccaaggaaggaccaagcccatggaattttgg

SEQ ID NO: 50720 - DNA, 387 bp, Glycine max
tcctgactcaccatataccttgacccagtgtgagaatgtcaatccttaccctcggaagcgaaaagaatagaagggaaatttccaatcacagaataggaaagaaggaagatttcccatcctagagaaagcatgtcaagaaaagaaggaaaattcccaatcaaagagtgggagaaagcataaagaaaagaaagaaaatcccccatcatagaatgggagaaagtaaacaaggaagaataagaaggaaagacagctcctgatcagggatcgtaagaatacagaacaaatgtgcataaaggtctttggaccggacaatatctgaataatacacagctgtcaccaaatgaacaaaaagaaggaaaggaaaccacgacctaaaatggtcttctc

SEQ ID NO: 50721 - DNA, 349 bp, Glycine max
  unsure (1)..(349): unsure at all n locations
agcttagtanagctaggcactaacaggaagtgttgttgatataccaattaanactaaacccaaccaaatacacctttggtgtgaagtccgagaagctgttatgatttatcgtaagtcagaaagggatagagatagatcccgagatagtgaacgccatccttganatgccggaaccacgcacggagaagcatagtcgggggtttctgggcacgctgaattatatcgcgagatttatctcgcaactcacctctacctgtgagccgcattttaagctattacgtaagaaccaggcggtcctgtggaacagttactgcatagaggccttctagaagatcaaacagagtctcac

SEQ ID NO: 50722 - DNA, 503 bp, Glycine max
  unsure (1)..(503): unsure at all n locations
ggcaactacaatggganactccattcagagctttctacagttaanaatgaacttaagagtgtagagaaagagaaagttgtagtggagacccttaccatgttaaagggtcaacttactttgtctatggtatgtttgctcctatgtagtgtgaactttctcaaggaaaatgtttactgttaaacattagctaatttctataaatatgataagatcgtaagcattaaaaacattgtctttntatggtagtagtcctcattagtatgcacttatgaactatngctacaaagggtttcttaaagatattntggtttggatgaaactttgattattttttatatattcttattaagttttttggtgaaatgatattatgtgtggatgcctttttaaaataataataacttctatttaatatatattatagaaatttaaataacacatctacacatcatcatttaataaagaanatgtaacgganaaatctctaaacaatgtataaaatg

SEQ ID NO: 50723 - DNA, 94 bp, Glycine max
  unsure (1)..(94): unsure at all n locations
agcttgctntacagactgcgacatactagtgttcttgttgcaatatgtagctcatgagagagttcgacttgagccttccaatgctctatgctca

SEQ ID NO: 50724 - DNA, 311 bp, Glycine max
acacatgctctgtgtctattgagagtatatcagagaggggcagaatcgcaattatctaaatgagatgggtgtgccatcattagtgctgggtgcacctacaccaccctagtgtttgtttgaggttgctgctggcactgtcgcaagtaatatttacactacccacgtgagtggattgttatgttattccaaaactattcttcccatagatgactctattgagagatatacaacactatcgcatatttgttacacacattgcggtgaataaatacatggtacactggatacatgatactgttatacaagactat

SEQ ID NO: 50725 - DNA, 270 bp, Glycine max
  unsure (1)..(270): unsure at all n locations
agcttgtgcanatcanatcactcctacattttatctctagcatgcattnttctttctttacccactcctcacgtttggttntttagggaaaaacaccataactaaacgcgccgcaagggatccctatcgcaccagatccaaatctataacgatgggtgatcaagaggagacgcaggaacagatgaaagccgacatgtcggctctgaaagaacanatggccttcatgatggagggccatgttaagatgaagcagctcatagagaagaacgc

SEQ ID NO: 50726 - DNA, 468 bp, Glycine max
  unsure (1)..(468): unsure at all n locations
ctttatgtgagaggatgtgactcttcacttttgtaattgaatttcaacgttcaaaggcactggtaatcgattaccaaaacatcgtaatcgattacagcttnttgaaattaattggaacgttgtaaactcagcttgaaaaactttntcaaatccattttgctactggtaatcgattaccagattgttggtaatcgattaccagagagtaaaaactctttggtaaacatgttttgagaaaaaaccatgtgctactcaattttgagaaaaacttttcatacttatcttgattaagccttctcttgatttttgaatcttgatcttgattcttgagatcttgaaccttgaatcttgattcttgactcttaactntcttcttgagtcttgaattcttcttgattctatcttgaactctctgaatgttctctgatcacttgacgttgtctttgatagatcttgagctttttgcat

SEQ ID NO: 50727 - DNA, 319 bp, Glycine max
  unsure (1)..(319): unsure at all n locations
agctnnctccttatttcaacttgtacttttctgttgctgcgctcctccacctaccacaatatatagcatatataattagctacaaaacattcttcatcccacgtaatcacatttctcanattgaaacaaacgaataggacttcagataaaanaaaatagatatagaagatggacaactaatctgtatgagagaacatgtgaagtcactagtgatgtgcataagtgaattcaagaatctacaagtagcatgattcaagacatttgagtctttaagctctttctgcccataataacctaaacgagattttaaattggtatc

SEQ ID NO: 50728 - DNA, 483 bp, Glycine max
  unsure (1)..(483): unsure at all n locations
ctatanaaactcaagcttggcttacggantccattggagatccctgcttatattttattgttttcctcttcagncttctgtatgagactcaattaaatattctaggaaactagctcatatatatagttagtcagttacattatatttatatgtgttggttctaaaattacacctctaatattaataattaagtatatgcccatgttctttttttgcttatatcccaaatctatgctcaagtacgtttatttaactatcatttattgtcacatttgactttgagtgagttgttaaaaactgtgagtgatgtcatatctagtatattttatgaatgttgctagagattaatattgatcacgttcatattgtcaaattattttgataatttctttttataatgttgagttctttattgtaaaatctatctaggattttatttgattgggaaatttggctataaatgttaagggacatatacctctt

SEQ ID NO: 50729 - DNA, 353 bp, Glycine max
  unsure (1)..(353): unsure at all n locations
agctngcttgtggggcttctatggaggctggatctttgagcttcaatgaggtcctttaatggtgattntccaccatggagatgcagcggaagacaaaggagaagaggggagaggaggcgccatccactatggaataagccatggaagaaggagcttcaccaccaagatgagccttggataagaagcttggagaggatgccttcatgtgggggaaagaaagagggagagaaagagagaggggggagcatgaaattgaaggaataatagagggagagaagtggaactntgaagtatgtctcacaagactctcattcatcanagttacaacaagtgttacacatgcttctatttat

SEQ ID NO: 50730 - DNA, 322 bp, Glycine max
accttgggaaactggctgttcatttccttcacaattgctctttttaaagggagctttccccctttcagaattttctcctttaggacaggcaaaattgtgccatttacttctctttggggaaacatggagggccggttttgagggctaggacaaaggcttaatgtgcctattaaatacctttattgtccacattgattggagtaattaatctttaccaaagcgagtgacaatgagaaccttccacgacttgtcactaatcacaggctcttcctcaggatttcttgacacccaagtaaactggagaggtatgttcaaatttact

SEQ ID NO: 50731 - DNA, 174 bp, Glycine max
gcttatgacaattagaaattctcgttatcttccgatgaattaatttgatcggctcgatatattataagtctgaatcggacctacgtgtgaaaagttatgaccatttgaattttttgagagattcctgtgtttgagatttcgagcgtctagatatattatgcgcctgaatttgac

SEQ ID NO: 50732 - DNA, 345 bp, Glycine max
  unsure (1)..(345): unsure at all n locations
agcttagatgaacatttntcattntctatacatgtgtgagggttaatttcaagttacttttcaatgagaattgacgtgcgcattattaatttgtttcatgtaaaanaatatgtattaatcgattgaaattgacatacgacactattcatctgcatttggtaaataattatgttattttctcaacaataggttatcttttgtatttctctttctcacatcacgtattttggcctacatttttctttcttttcttccttcttctgtcttttttataaaaattattgtgaaaatatgaactgaggataataatactctctattaaattgaatgacatatcagcatttg

SEQ ID NO: 50733 - DNA, 510 bp, Glycine max
  unsure (1)..(510): unsure at all n locations
nttcattgcaatcatttccatcagcttcgtttaaagcattttctatgtccattgcagtgaacatgtgcacagaatggcacccatctgatatccagatagtctgagacactgcaaagtgcaaaataataactaaatttagctgcagagagaacaaagtacaaaagataactgacttgtacaagagaaaaaattcaaggtttttttaatttatttctcttaaatacatttgatctaataacttattttataaccataagttttaacattcttctgtgatccaattgctattgaaattctgaagcttaaattttgaaccaactgagggtgcctattataatcttccaatcttttgtcattgttatctgaaccaaaggtggcacacgtagcatgtagactataagtcagggcaacatttccagccacaaataagtgaacctacaangctctttagtttctcttcggaaatctttanatctcattcgaagacacacaagttataaaaaagacaca

SEQ ID NO: 50734 - DNA, 390 bp, Glycine max
  unsure (1)..(390): unsure at all n locations
agcttgtaggaatatggngtacctgtcatatgtgtgtactangtggcgatcggacgatggtgcaagtcgactctccacatccacaaatcacacataaatccatcatcctcagttgcccaccttcaactgagctcacgtactcccacgtagccccttatcctcgttcctctcaacaccgggttcccatcaatccctccaagcttccacaaacatnncaagcaattcaacattcaaacatcatgaactatcanaaaccaagaaaacagggcagaggcagaaaactctgccgaaaacacattccaataccacaactttctctactcaaataccccagtaacattttcttcgttctgattcgttaaccggtggatcgactcgaaaaatntactg

SEQ ID NO: 50735 - DNA, 457 bp, Glycine max
  unsure (1)..(457): unsure at all n locations
tggcagcccaacctcattacaaacctagaatgtccttcgtgattcatttgtgtgtttatttctgtatggtatgagatgatatgcaaaagttgggacttctgttagttgtttataatggaatgatcctaaacacttgagcttgagtgaaacaacgactgtgaggctttggttgatgattctttccttgatatctgccattctcactaacttattntagttgtgactctaatgcatatgttcctatcattgaaaagctgcatgtttgcgaaaagcaattgattgaagtattccatgatattcacttcatatgaatgaatttctctgtgaagcanacactanttggatngaccactgtattttgtcacttgaggacanggtgaactatttttctttgcttgangacaagcaaaactgtaannattggggagtnntgtagtcgtcttatacgactaacttt

SEQ ID NO: 50736 - DNA, 340 bp, Glycine max
  unsure (1)..(340): unsure at all n locations
cgatcctctgagtcacctgcggctgcagcttnttatagttggcttggccttttatctattaagattttaaaaagcttgagcttggcatttatagtaaacaagccaagccgagccgagccttatataggtcgagccaaaggcccttgacaagcgggtcagctcattccatccctacttagaagtcatccatcgctagattcttctgttcatcgtgtaatatgcattggtcatgtgtatgaaaatcattntgtacaagtaattgcataattatgaatttagttaacatgctacaaatttagttgcgtatctaatgttcaattaccactgtcgttatgtaaca

SEQ ID NO: 50737 - DNA, 444 bp, Glycine max
  unsure (1)..(444): unsure at all n locations
ttcctaacaagccaacttacaacagctagccccaagatactcaacataaggatgcacaggtcaaagttgagtatgtgaaaagattgtatgaccaagtgaaggtgcaaattgcaaagaagaatgaaagttatactaagcaagccaacaagaaaaggaaggaagtggtacttgaacctggtgacgatcctggacattngagggcaaatgttntccaagaaggagggaatgatgagaatcccgaaattggccaaatacaggctaaagacccaagtggagaagggcgaaggcccaagtggagaaggataaagcccccgagtggagaaggatgaaggcccagaggcagagacactatcaagactattaattngtgctgaaggcccagaattaattgaaggcccaagataaatatgttntttaagtataaattttatttattggaatttt

SEQ ID NO: 50738 - DNA, 360 bp, Glycine max
agcttgcaccctccaccccatcaaagtcgttcactctcatgccatcaagttcggcctaagctcccatctttacatctccatgggcctcgctgatgcctatgctcgtaacggcgatgttacgtccgcatagaaactggttgacacaatgcttgataggagtttggtgtcttataccaccatgcttacatgctacacgaaacacgggatgctcccggaagtgaaggtgttgattgataggatgggggtgaaagatgtggtgtgttggaacgtgatgattgatgggtatgcccagcatgggtgttcctatggggctttagtgccttttataaaaatgatgatgatgcatgggaatgggaatgg

SEQ ID NO: 50739 - DNA, 412 bp, Glycine max
  unsure (1)..(412): unsure at all n locations
ntntgagttgcttgatgccattgtggaggaagttggagattataatgttgttctagttgtaaccgataatgggagcaactatgttttagcggctaagttgttggaggagaaaaggaaacatatttattggactccttgtgcagctcattgtattgatttgatgcttgaagatattgggaagcttcccttgataaggaagacaattagaagggcaattaatctagttgggtttatctatgcccattctagtaccttaagtttgttgagaaatattacaaacaagagggaattggtgagacaagctattactagatttgccacttcttatctaactttggaaaggctccatanagagaaagccaatattagaaagatgtntacttatgatgaatagaccttgaacaagttgtct

SEQ ID NO: 50740 - DNA, 352 bp, Glycine max
  unsure (1)..(352): unsure at all n locations
agctttcgattcattctatgtacccgtagtggtccacattgtgtttcgtgcatntttattctcngtttgtttactttttataccccctgttgacgtgcttaagccattttacttaagtcatttctcgcttaacttaaaaataaaattaatttccaccgaacgtttgaattgtattatccattaacttcggttaaaataaattccgaccgttcggtcgtgccgtaaccacgttgganatcaaaaagaggttaaaaaataatataataatcaaaaagacatcttttagtaaaataaagcgganaatcaatcggacgttntctctgtgggaattctcattcttaatcgaattgat

SEQ ID NO: 50741 - DNA, 463 bp, Glycine max
  unsure (1)..(463): unsure at all n locations
ctcagcttgttgacacgcggagattacgtcaactnttgtgctcacaagtattgtcatactgacatttgagtcacgttgacgggcggagataccctagtggttatccgtataaacattcttttttgctgtctgtaaaacgaaaagcctgatagcatgcagagactaacgtcgtcttctgcgcccatcgtcaatcgcggccgacaagcccgttgacacgcagagatttacgtcattttccgcgctcacaagatctgtcatactgacatttgagtcatgctgacggacggaaatacccaagtggatatccgtataaacattcttttttcctgtctgtaagacgaaatgcctgatagcacgcagagactaacatcgtcttctgggcccttcgtgaatcgtggccgacaagcctgttgacacgcagagatntacgtcatctntcacgctcacaagatctgtcatactc

SEQ ID NO: 50742 - DNA, 166 bp, Glycine max
agctttctcgggccatttcttgttggtgatgatctatagcgcacaacggaatcaaacaatgcgacaaaggatgaccctacggctgcaaattcatcaatccccggggtatggcttttgaaaggggggacaaaaagtatttgtatgataaaacgccaccccttttttc

SEQ ID NO: 50743 - DNA, 313 bp, Glycine max
  unsure (1)..(313): unsure at all n locations
agcttagaagcactngatcctttagcatcatctatacatcaaaacatctggcttctacataggagtcatttgacttaatccatcaactgaaaaatccttcaactatttctcgtccttggaaaattctttgtgcaagaatcaactgcttcttcctcactacganggttgtgaaacaagacaacaattggtacctctaagccctacactggggcaaatgaaaggcaccatgcataaacctcaaacaaacctatgggcagattagaagttctcatccaatatgttccttgctacaaggtcatgacgaaagacaacg

SEQ ID NO: 50744 - DNA, 448 bp, Glycine max
  unsure (1)..(448): unsure at all n locations
gagcttctatggaggctggattttattgatgttctttaatggtgattntccaccatggagatgcagcggaagacaaaggagaagaggtaagaggcggcgccatccactagggaataagccatggaagaaggagcttcaccaccaagatgagccttggataagaagcttggagaggatgcttcaatggaggaaaagaaagagggagagaaagagagaggggggagcacgatattgaaggaagataaagggagagaagttgaactttgagttgtgtctcacaagactctcattcatcacagttacaacaagtgttacacatgcttctatttatagactangtagcttccttgagaagctntcttgagaaaacttccttgagaagcttctttgagaaaacttccttgagaagctagagcttagctacacacacccctctcataactagctc

SEQ ID NO: 50745 - DNA, 288 bp, Glycine max
  unsure (1)..(288): unsure at all n locations
agctnggagaggagagagtatgcgcgtgtatcttatcatgttattatcattactacctagtaacttaaactttcattctgaccaacagacattctttactgtctattgtgtaaccatgaatataaagaacgcgctcttcattgatcattgcgtattgggagaattctatatgccatagaaggcacacatgtggtcagactaatatgttaccacatcaaaatatatgtcagttatcggattcatttcctccacttttttcttctcccttttgggaagcggtgcaatggt

SEQ ID NO: 50746 - DNA, 452 bp, Glycine max
  unsure (1)..(452): unsure at all n locations
ntagccaaggcctctgcatactgattgacaacattgntggttggaatccttctggaatctagtccaagcaattttccatggcgagaaagtatgtatctagaaaatgaccaactaatataaagatatttgtaaaaaaaatccttaaaacgaaaatatatttccaccatagttcatataaataatttcaaccatagttataattcaatatagcaacacaaagtgaacaaccccacaactgctattgtagagaagttagctgttatataaaagttcataggtacaagataaattagcttatactattcatcataataagtagttaacaatgaacaaattagccaaaattaagtttctactaaacataactactaacagtttcaaaaaaatccaatcacaggatgaatatggttgaatggaaaaaagtgagttggaacaaaaaataaacagggatc

SEQ ID NO: 50747 - DNA, 336 bp, Glycine max
tgcacgaaccagctaaaaatcaagtggaacaatacaacctagcattatgggttcactccattaactgtattttagttctcattagacctaatcaatacatatacctctgaggtatagtcatacagagagaatgcagcagcctaatttgacgttctttattttggatcaacaaatgctatattgttacatcttgctataatgctagcgggatggattcaaacatgcaacctctctctctcccttactcccttcaatcaccaagccaaccttttatctccgcctatttgagggattatcacttataattattatgggatgaaattttatgttgaagct

SEQ ID NO: 50748 - DNA, 474 bp, Glycine max
  unsure (1)..(474): unsure at all n locations
ntagtttcccttntcctttcttttcaacccattcaagcatgtttaaaggtttccctttctttcctttgaaataaatggttttagctttggttaacatgcaggtcaaacacacatcctctcccaaagttatataattgagatcgatatatgtgctacgtgggaaataactagggatctacgcgcaaagcctttnttttaaataaaaaaaaaccattntaacatcgataaacactcttttaatatctgtgaaaataacaagactggatcacgagtaattaaattaaaacatgggtatagttagaagacaaatcataaccaatgctgttaagatattggttaagaagttaaaaaagaagaaatntttatttattttatgagatcaccatacacgtaaaggatgaggatggtgcgagcttgaactattnttaccatatacgactcaattcaagtgttgaatgttatatgttcctctat

SEQ ID NO: 50749 - DNA, 324 bp, Glycine max
  unsure (1)..(324): unsure at all n locations
agctntctacgatgggttgagccaatctggtagtttgattacacacaattaatgagatatgagataggattatttacattccggccccgcttcctctttctatggatgaaccatttacatatagtcttcatcactcagattctggttctataatgcgccgtaattcggcgaccaagtcggccaggcacttggccttcatcgccccccttgaattgtgcttgagcccanactgaaacaactcaatatactaagctatcattcagcatatatgtggcttgagatggaattcaaaaatagattttatgtcatcttcatctgctatac

SEQ ID NO: 50750 - DNA, 459 bp, Glycine max
  unsure (1)..(459): unsure at all n locations
tctaatanatcttatntagttaaaccctgattctattcaattgcctcttagacctaatagactgatttatctgacaattatatataattattcattgctattattattattatatatattaaatttttgtaatttactgaatctttttaaatgttaatcatgttggtctacatagaaagtcaagttagagtttataactaaatttattgaaaaattagttggtcatttttaaatgtcttattgctaaaacattttataataaaacttagaatatgcttacatcatatagataagtttgatttgattcttataagacttcacatacatacttttattgttatcttagtgttaaattgagacaaatatactcgtacgttagaatagatttctatgtaggttatacttatattcttaacanagttttggagagataataatcaagtcagactctaatcatat

SEQ ID NO: 50751 - DNA, 107 bp, Glycine max
  unsure (1)..(107): unsure at all n locations
agcttaaagtaccgaatgagataattgcagtctttgttcanagtacacgtacgtcatgttaatttatgtgggggcatcgtctttaatttgagttggtactctcaatt

SEQ ID NO: 50752 - DNA, 359 bp, Glycine max
  unsure (1)..(359): unsure at all n locations
agcttgataacacgcagagactaacgttgtctttttccgncttcgncaatcgcggacgacaagcccgtggacacgcagagatttatgtcatcttccccgcttacaagatctgtcatactgagttttgagtcacgctgaccggcggaaatacccgagtggttatacgtataaactttgtgcttgatggtagacaaaaagcctggtaacacgcagagactaacgtcgtcatcagcgctctttgtcaatcgcggccgacaagcccgatgacacgcggtgatttacgttatctttcgcgctcacaagatctgtcatactgacttttgagtcacgctgacgggcggaaatacccaagtggttat

SEQ ID NO: 50753 - DNA, 382 bp, Glycine max
  unsure (1)..(382): unsure at all n locations
agcttatccaaattcagatcgaatttatgttggcttatcttatccttggctagcttagctgaccaaatcagcctcagatgcaagggttgggcgctaagcacttgagactcgtggcttagcgcatgatcaaagatgcgcttagcgcgaagctcacgcttagcgaaaggactattgatgtgccattattttctcctatntcttaacctcttttgcaccattttaaataccgattagtcttaattgtcaaatttattaggcagttttattatttgggcccattcagctaattgatgtttttaatctaatttcaggaattaatgaaacattgngcttgaatctataattgtgcttggacttgaagaaagcagactaatttattcta

SEQ ID NO: 50754 - DNA, 468 bp, Glycine max
  unsure (1)..(468): unsure at all n locations
ctattacgcgacctataaaactcagcttaggggttagtttactaagcacattacattatgaacattatttccattcaaacattaaattttgtattttagtcgtttcttttgaaattgaaagtatctcaagcgataaaagaaaaacaatatggttaaatatgtttttaagtatctgtaaacaagataatattcgcgtttagttcttcaatagtaaattctcctttntatcccttattcatganactggttgaaatgtgctctctgtcttttttaaaaaattcatattttttagtctttcatttataaaaataaacaccacatatatacattttcatgtagaagggataaaaaatagatgatttatttttgaggatcgtcttactttacttaaatacacttaagaacacataacctagaagataaccctgattaatatgtagtaatgtaagagagcaatatatgactaac

SEQ ID NO: 50755 - DNA, 288 bp, Glycine max
  unsure (1)..(288): unsure at all n locations
tgttcaataactgctggttatcgactaccatatatgtgtaatcgattacacagtgcannatttgaattcaaaatttaatagctgttgtaaatcagttttggccattggtaatcgattacatcatctggtaattgattaccagagagtaaatntgttgaaaaagactntttaacttagaattcttggccaaccttttgctacttcaattggaattcccttcctatntaatataccctttctaagactctaaaaactgtcttgatcatccatcttgaatatctttaattt

SEQ ID NO: 50756 - DNA, 355 bp, Glycine max
  unsure (1)..(355): unsure at all n locations
atgagatggtgntgaagtattggcgaatcagaatgccattccttggattatagggttgaaccaagctcatgcttttacgaaaaggttcatcaagtcaagttgaaatatggaagtaatcgtcttgcaaaattggggcaaaagatgaatcgagtcgcatcactgcttcatctactgccaaacatatttagggatatggatgtccttggtacttccagtcatggaccatgttgaaaatctaaatggattcaaccccatatcctgcgtaaaaattcgcaatacttcaactgtacatcattcgcatacatccatgcttttcattggntgcattgctcatngcattctttccttgaaaaat

SEQ ID NO: 50757 - DNA, 325 bp, Glycine max
  unsure (1)..(325): unsure at all n locations
cgatcctctgagtcacctgccgcatgcaagcttattactagcattgtatgtagcacttaaatgtttctcatctctaatttcagttcttgaagtacttcgctagttaacctgacttttcctaattgaacagaattgaaattgctatcctcatatgtnntgtaatcacacatcatctgtgaatatgtgacagggtcatacataacaactcatttagcagggaaataccacccggattaatatctaaaaaaacatttttagtaagtatgctttcaatggaacaatttttcatattgtaattatatcaataattgtttaatgctcatca

SEQ ID NO: 50758 - DNA, 415 bp, Glycine max
ctaagcttatgagcgacattcgtggttaatgatgtgagagaatgttgataataatgatatctcttattaaacgaggaataggttaaaatcaaaataagttatttcttctagaaagttatgcttacgcatttgtgagttatttgccaacaccttttatttataagtagaaggtaattgctactcaatctaattaagaccaactttgtcgtgactatgcatgttaggtttttcctagagatactagcttgagtctctactgtctatatgatgacattcctaatcatattcaagcttcatgagtgacattcgtggttgatgatgtgagagaatgtcgagaataaggatatctcttattaaacgaggaataggttaaaatcaaaataagttatttcttctagaaagctatgcttacgca

SEQ ID NO: 50759 - DNA, 375 bp, Glycine max
  unsure (1)..(375): unsure at all n locations
aagaatttactntctctatanggcgagagtataccacctatgatctgcgcatatccatgctaatattaacgctcccgcttaacatctgtagcatgcctacgcttctctgcatggcatcatatacgaacatatcatcttctggaacaggccagcatcatattccatcatcgcattacgcgtgacccttggcataaacatgcgaatacggtcatcatgctttatgttctaaagaaggcataccttctgtttgtatgttacatcatgcgtgcatcttcgcattttctctacgtcactagaacaccagtggacacgtctatatttgtgtagcgtcatcgcagcttatattcggccgagatgcaaccatatagagatact

SEQ ID NO: 50760 - DNA, 355 bp, Glycine max
actcaagctgaacgacgaagtgtcctgcgtggatgctcactgctctgtttgatgacctcgaagtgcccgctggagatatgtctcggtggataggatagcatgtggactggagggggtgcgctgtggaccacaacctaccttgaacacatgggacgcaacgcgtgcatactcagacagtgagatcctgcgatgtacatagacatgcgaactcctgaccttcaacagatattaggaactgacgaccacatacgccaggcgtgcatgtggagactggccagcgtgctagagctgaacgacattgtgagacatagtctctgtgcatcgaaacgaaaggtgggcatcgatacatggcttg

SEQ ID NO: 50761 - DNA, 351 bp, Glycine max
  unsure (1)..(351): unsure at all n locations
ctgcagctgtcccntccgctgcaatgccttcacttttctccaagtccttttcatcttcttgcaaactcttgtagcgtacgaacactntatcaccatccaacctagtgccaagcaactttggaagacagttggtggttcgaccttatggtcttaacaaaggcgatggtggcgttagcaaccttatggcactccactttccagacagtgcgagcagtagccctccatttggcgacctatacctccaaggacgtcaccttgtgcaaagctctttggtgccactgtccattctcctctagaattgccaaacttttctggataatactttggcaaaatttgtagcgttctataccc

SEQ ID NO: 50762 - DNA, 479 bp, Glycine max
  unsure (1)..(479): unsure at all n locations
actcagcttctatgaaggttcgttcctaatttctctacaattgaatcactctctcaatgagctggtgaagaagaatgtggcatttacctgtggtgaaaaacaagagcaagcctctgctttgctcaaagaanagcttactaaggcacctgttctatctcttcctgacatttctaaaacttttgagctagaatgtgatgcctctggagtggaagttggagttgtattgttacaaggtgggcaccctattgcttattttagtgaaaaaattcatagtgccaccctcaactaccccacctatgataaagagctntatgccttaataagagccctccaaacttgggaacattaccttgtttccaaggaatttgtcattcatagtgatcatcaatcacttaagtacattagagggcanagcaagttaaacaagaggcatgcanaataggtagagtacctagagcaaatttcatatgntatcaaat

SEQ ID NO: 50763 - DNA, 51 bp, Glycine max
ctgtatgccgcagtcgactctaaagagcccggggccgttctcgtcatctct

SEQ ID NO: 50764 - DNA, 299 bp, Glycine max
  unsure (1)..(299): unsure at all n locations
agcttggtggccttgtgagatatgctccctttgttatgaacaaacattggttatctgccatctggattttatcctctacacattgttaagagctcaacccttagaggctgaggactgataccatactatagaagcaaataacacaagaagggggatcgacatgngtttttataaacttaatacctttccttaagattgaaaaatacatttatcatctaatgaatattaatctaacacacttagagagattttgatacatattgtatcacacaatgagaaaaaccaatttctttgaaaac

SEQ ID NO: 50765 - DNA, 425 bp, Glycine max
  unsure (1)..(425): unsure at all n locations
ngagctgatntagaggtttaaggagtcagaatctatctacttagtctcaatcctacactttgaaaatttcaattttgcattntgagctctagttntgtgtttagtggcccaatggtagttttaattggtttttagttaactaaagtctcgttcggggtggttgtgagtttctggttttcagttaactaagttttaatctttaccctaacatttactttcccttcccctttgacgttgactatttctttcatggtgctcacacttgctgctatttccctctctttgttgatatactactggtcatcatcgtgtcgctagccaatcggtgacggtcatcnatggtgttggttgttgtgatcttgtcttgctcctcacctcactattatccctcacgttcttacttttccttcatgtnntctacaccg

SEQ ID NO: 50766 - DNA, 219 bp, Glycine max
catcaacattacataattatccaaaagtatttgtaatatctatcctaagcatatttctgatagttagtacttatatatgtgtacatcaatcatacgtgctatgatataccccatgaaagaaaactcacccataagggaacagaacaacaagtaaggagaatgtttccccatactaattaatgattgtgtaccaaaatttaaataacactgctcgatcat

SEQ ID NO: 50767 - DNA, 114 bp, Glycine max
gatcaggggaaactgatactattctgcggtgtgtgagtataggctactataagacattcgcattgaatatgactctgagcactatctttgtttgaagacaataactgagtgacg

SEQ ID NO: 50768 - DNA, 383 bp, Glycine max
  unsure (1)..(383): unsure at all n locations
agcttctaccttcatgcaaagttacgaggattttatcttatatgttctggttcttctaggatagcaatgtcagcatccaagcttactaagataccacttcttgagtcatgtggattaaataaaatgattaagttctgtcaaaaactattaactatatatgttggttctctcccctgttcgtggcaataggggtacactattatagttatagatagtattactgagagtgaaatatcatgttttcaacggngatatactcattttatgtagagatgtaagcaatggtaccacatggacagtgtcatatatatgcatcaattgcagaccttatcagcaatataataaatntgtctccatctacatgcatgccattaccaagcttt

SEQ ID NO: 50769 - DNA, 489 bp, Glycine max
  unsure (1)..(489): unsure at all n locations
taaaatactgcgataaggaagtagaattgagaggagacatgagaaggggatgcacagtggcgataatgggaaatataagagggaggtgggtgagtgtaggaaaactctatcagaggcagtatagtcttctcacgatttgtccaaaaaggagaaggttctaatagcattttatgaagtgaaaatagtaacccccctcgtatttttgtctggccctgtctaagcatgcattntgggctctttttcatgccctattttgctttatttcaccttngaccaaaaacactcgtagattcagccttcaatgtagggttctaccatttgccttaattatattcctaaacactgaanaacactgcaactgatagaacactaagcaggtgctaccatggtcaccttcacggtaatacaatcatggggttttcaccatttgcctctctctcatcattgcaccattctaattctttcaatttttcattgcagatgggtttt

SEQ ID NO: 50770 - DNA, 359 bp, Glycine max
  unsure (1)..(359): unsure at all n locations
agcttgtatcttcatgccagatactttcctttatctttcttttnaatagtggattgtgcagaacaaggcaaaaaaaagaaaagtagcgctaaactttcgcttttaataaatatttttaatttaataaaattttcaaatacaaagtgacaaattatcatacatttaatcctgcaatattctatgtctctttaataaatggttttatatataattctgctcatatagaaataaagaaaccgttctttaatttattcattccatttcaaaattatactctcaatctaaactgtggagagataatattaatattctatttttatattattttcttgacaatctcaattactaattaaatttat

SEQ ID NO: 50771 - DNA, 293 bp, Glycine max
  unsure (1)..(293): unsure at all n locations
ctccggttgttgcccaaccaanataaaaatcttgtgtttgtcttcttcttccctacactctttattttccgctgtgcacttttaattatcgcctttacttttggttaaagttcaattactggtctttactttcttaacttagtagtaaaagcctaattaaatctagtaacattaaaaaagataagttttaattattcacggtaccattataattaattccacccccccttcttaattattctgagggcacttgatccaacacctctggcatcaactgaagatctactcctatc

SEQ ID NO: 50772 - DNA, 385 bp, Glycine max
  unsure (1)..(385): unsure at all n locations
ntntgaaggatcaagaagtgccttatgaatcctcccgtacttatgccaccagtacctggaaggcctctcattntgtacatgacaatcttagacgagtcaatggggtgtatgctggggcaacatgatgaatccggaaagaaagagcgcgctgtttactacctaagtaagaagttcacgacctgtgaaatgaattactccctgctcgaaagaacgtgttatgctctagtatgggcatcccatcgcctaaggcagtacatgctgagccatactacctgggtgatatccaagatggacccggttaagtacatctttganaagccagctctcacgggaagaatcgcccggtggcangtcctgctatccgagtttgatatagtctacgtca

SEQ ID NO: 50773 - DNA, 412 bp, Glycine max
  unsure (1)..(412): unsure at all n locations
gcttcctcggggccattcctgcgaaggcaaacattnggaaagttagttntagtgggacattactcttaaagcagaaatggcatataacctcctcccataaatacaaacatcaatgtaaatttagagcaagcttatgcgcctatttcctnntacaaacgttctcttgcacgaagacanntttataccgaanaacactgctgcctcatttacaatcaaggggcagcttcgttacctagaatatttacacgtacctncaaggtgtatttgttacttacatcacacacatctccttggctaaactcacatacatgcatactcaagcatgttggggcaccaaaaattgcacatgtgcacatcttggcattttaatacctacatacgcanacttcatgatgaatcttgactatctaca

SEQ ID NO: 50774 - DNA, 436 bp, Glycine max
  unsure (1)..(436): unsure at all n locations
tgtctttttatatntccaactctntgaagtaatgtttgtattgattgttacatcttagtctctatatttctatatgtacatcatgcatcatcatgtagagataggaagattgtttttaaagttagaaacttcttttgtgcataaaattctttattttaatcgattaccagactgttcgtaatagattacacaacttgtttgtagtttgcagaaagattctagtttcggtttaattgattaccggttatccccaatcaattacatagctcagttgagaccatatctagtttttcatgagtctcttgctttaatcgattactcggtgatcgtaatcgattacttcgttcttgaaagtgttacagaagtgatcgagaacaaattaaatcaatacattgttcttganagctttctangtggtgtgaataacactttaatc

SEQ ID NO: 50775 - DNA, 308 bp, Glycine max
  unsure (1)..(308): unsure at all n locations
gcttcttagnttcagatgatgcagatgattntgtattctcctcatgcactcctctaatgactatagcatcatctctggtgctacactgttgtgagttggaagccatcatcttcaattacaattctggcatcagtaagggttatgtcttctaggactccaccactggcagcatctatcatactactctccattgttactgagccttcatanaaaaattgggaaagaacctgctttgaaatctgacagagagggcaactggcacatagttattaaatctctctcagattcatacaggctctcttcactga

SEQ ID NO: 50776 - DNA, 441 bp, Glycine max
  unsure (1)..(441): unsure at all n locations
tcatgatgaatcaagaatgattcanagagtgttgatgataactnaagcttcatgatgaatcaagagtgattcaaagaagttntgatgataacaaaggtgatgacaaaaagatcaaaagtcaagaacacttcaagataacaaagatgatctcaagaatcatagaatgagttcaagattgaatcaagaacacttcaaggttcaaaaggaaatttgatttcaagaatcaagaatcaagtttcaagattcaagttccaagaatcaagattaagattcaagactcaagattcaagaatcaagagaagactcaatcaagataagtattaaaaagttntttcaaaaactgagtagcacatgaatttttctcanaaccttgtaccaaagagtatttactctctggtaatcgattaccagaatattggaatcgattaccagtagcanaat

SEQ ID NO: 50777 - DNA, 259 bp, Glycine max
  unsure (1)..(259): unsure at all n locations
catgtctttgtcaaaatgggctttaaatggagaatttccagtaacaaanaagcatcattccagtacaaataggcttttagcttataggctaaaataaattaatgtccccttttcattcaccctgcaatgcatatttgtagtatgacgagattggccaagttttctaagcaggcagaagaaatggagctaagaagatcgaggcacattaaatttttaagttaatcagtataaatttttctattctttccatgcactcagc

SEQ ID NO: 50778 - DNA, 356 bp, Glycine max
  unsure (1)..(356): unsure at all n locations
actcagctgctctanattacattgatgttngtatttatgggaggatgttgtatgccattttttaagagtagtgtcccactagtaaaactaactttccaaatgtttgccttcgcgggaaatggccccgaggaagcttgcctcanagaggtccaggaaggacaaggcagccgaaggaactagtttcgctccggagtatgacagtcaccgctttaggagcgctgtacaccagcagcgcttcgaggccatcaagggatggtcgtttctccgggagcgacgcgtccagctcagggacgacgagtatactgatttccaggaggaaatagggcgccggcggtgggcatcacttgttactccca

SEQ ID NO: 50779 - DNA, 125 bp, Glycine max
ttgaggtaattgtaagctgctcatccctacctctcatattatagacacaccctatttctatgagatacttataagttttctctgtatgtaataaagaacatattttagaggaataagatatcatt

SEQ ID NO: 50780 - DNA, 428 bp, Glycine max
  unsure (1)..(428): unsure at all n locations
ctcagcttattattctccatgtcaacctanagtacanaaatgtctctaatatgcaccaaacataaaaaaatggtacatcaattcaacctctaattntaactttatattgtttattaatttatggaaattcatctttccctttttaatgtccctaaacaattggccaaggagttatcagaatccaaggttatcttttctgaccaccacaaccatcctccacgcacaccttccacgaggccatggtgccaccacaagcagaatttgcgaggcaagccagataggatgagaggaaaaggtgtaatgatagtggaaatttgacacaatataattgcatttccgtggntgaggtcaaggggtgaaaggatgagtaatgacngtaacaacataanaatggccatttaatcttttttcttcttctcttgtttaat

SEQ ID NO: 50781 - DNA, 358 bp, Glycine max
  unsure (1)..(358): unsure at all n locations
cttctttctcacctcggacgccagggatggacattcaacaaggcaactatgggtatcggcctctaccctcacaacatataangccctcaaatttttctactaataatattatcaatataagttaatctctaaaagcgcacaattctatttttagttnttgctaatgaaaagtcactcaagagagactcagtaaatttatcagcggagcatataatccctattggatatttatactgttcaacatttatgctaggtaattctttcttgacacaagacgtaacttttggagcacctcatgtttcctcttaggtctctcatctcttatctatatctcatcttattactcatcagcaatatt

SEQ ID NO: 50782 - DNA, 491 bp, Glycine max
  unsure (1)..(491): unsure at all n locations
tcacatttattatataggacaagatggagaggttgcttatttgacaatngacatggatagaaaaaacaaacaaaataaggaagaagaagaanaaggactacaatacatcaataaattagacactacaagactaaaccacacagtatacaatcaaggagaaaattgaaagatagcacttacgtttgcgcctccacatgccatttcagctccttgttctcctcgtagattcgcttcatcttctcttcctttgcctccatatgcttctccttctcctccagaaccatctccgcctgctcgatccatgacgataactcctcctcctccagaacctccttctcctttttagcgtctctttcagcaagggcagggaccagagccgcttgggctccacctcgagttcaacctctgataactgtaaataattgattttatagagaanatagccaatattgcctgaattaatattaacagttattgtgataaaagtaaaa

SEQ ID NO: 50783 - DNA, 355 bp, Glycine max
  unsure (1)..(355): unsure at all n locations
agcttcctctctaagcttcttatccaggcactctcttggtggtgaaactcctccttccatggnttattccctacgggatggagcctcctctcaccccatctcctttatcttccgctgcatatccatggttgaaaatatcattgaaggacctcattgaagctcacagatccagcctccatagaagctcctcaagcaagcttccatcnagtggtatcagagtacaaacgcttcaagtaggtgctccttagacctctattaattgtcagctataccttctcctacattgttgattcttcatgtttcttcatgtatctcctcacatgtcttgtgctanatgttgtaacatgatttttta

SEQ ID NO: 50784 - DNA, 409 bp, Glycine max
  unsure (1)..(409): unsure at all n locations
caatgaatgttgccgaatgtgcttatgggtcctcatttggtaatccttggaataagttcccctgtattaaatgaatcacagaatgagggtagtttatgttgtgagcttgcactttagaacgtgcaacaccggtaaagaattgcggcactgaactacttgaatagtcctcaagggtaactttttgctggtgttcatctgccatggaaacgacttctggcaaataggtcgcagattcccttgatgatggtgactcacgtgatgaggaatcagaanaatgagtttcttcctcaagaatggacgctactatcctgtcttggcagtactttcttcttctctcggctctgctccttctcaacgtagcttcaatctccaagtccagaagaactataatttctgtgggagatctatg

SEQ ID NO: 50785 - DNA, 278 bp, Glycine max
gcagattaactatgcatctcatgataagacagattagttgttggtagccatggttgggcacccagtggctgtcagatcaccaccacctattaaaagagatacattgtctaatactccagtggagaccaacataacccttccattgaatgaagtgttggtctattcagtcttttcagcataatagattcctgttaaaaatactacacgttatataaaaactttacttactaacagataatatcacagctccatgtcatcagtaattaccctcctccaaa

SEQ ID NO: 50786 - DNA, 111 bp, Glycine max
  unsure (1)..(111): unsure at all n locations
agctngccanattatcttgagattgagatatattgtttattaatcacacaaaaatgaacatactaagtatgtattgcagaagcaaatcttcatggtgaatcaaaggtgatt

SEQ ID NO: 50787 - DNA, 268 bp, Glycine max
gatctaccaccaccatcgctcttcttattttagtgtactattatgctcaacaatattacgacttcgagttctagccgtcgatctggctatattattatgacatttgaacaatttatcatttctgttatctgcatagtatgattgaataattatgaattatgttatatgactatgtggcttttatatatttgacctattcatgcttcttgcttcatgattgattaaatttttcaatgaatgtcttgtgaaagattagtaacgtatgtat

SEQ ID NO: 50788 - DNA, 371 bp, Glycine max
  unsure (1)..(371): unsure at all n locations
ntacaggggtacaaatctcaaagaacgtggcctgatgngcttattgtgcctcatgcggcaacacctaggaataagtccccctgtattaaatgaatcaactaatgtgggtagtctatgttgtgagcttgcactttacatcgtgcaccatcggttaagaattgcggcactgaactacttgaatagacacaaatggtaactatctgctggtgatcatctgccatggaagctagttctggcaaatccgtcgcagatgccctagatgatggtgactcacgtgatgacgaatctcaataatgagcatctgtctcaagaatggacgctactatgctgacctgcaggggttttcttctctcattgctctgctccttctc

SEQ ID NO: 50789 - DNA, 365 bp, Glycine max
  unsure (1)..(365): unsure at all n locations
agcttgtgtngcttgcttagcacgagtgtctgttntcgcgcttagcgcaactattcttgcttagtgagggtacctgtattcccgttgagcgcgtgctgcgcgctaagcacgtcttgggcttggcctttttcaaaattatgctattttatgcatctttttgacttataatccttccttttcatatctgcaagctatgaatgagaaaaacattagtttttaacaaattaaacataaataactgctaaataaatatttgtaaggatatttccattatatgtttatcataaaaaataactcatatttagccgttatcaactattatcgagtcatttcataataacactacaaaatcattgacatcaatt

SEQ ID NO: 50790 - DNA, 468 bp, Glycine max
  unsure (1)..(468): unsure at all n locations
ntatatntanacacaaacacacaaatgacatgctcctgatattcactagttgatctcgcaagcaattaacttagactagcggttgtttaccaaattccagcgtaaacaggtatccacaccgaactcgccagctccattggcgatatccggccacgtgtcaaggactggtgtatctcgccattcatgctggcgatacacttgcatggctacgtagaaaagagacccagcttgaaaatagttttagaacaaacctattttggaaattagtttctaaaactaaccccattaggtcaaaatgtcggcaacttggtcctccacgagttaaagaagtcacaaagcggtcctgtgaaatgtagaatgacgccctcgatatttcttttatttgcatatatatctccatagacatgtgcatgatgaataagatcttcgaaactctagcangatatgggtgaacgtgacatccctcat

SEQ ID NO: 50791 - DNA, 306 bp, Glycine max
  unsure (1)..(306): unsure at all n locations
gctagacttgttgctaatgaatttactcagaaagatgacattgattataaagagacattttactggtctcacganaggattctttcatgattatcatgacattagtagcccattatgacttggagctacatcaaatagatgtgaaaaccacctttctgaatggagatttagaggagaatggttgtatggaccaaccaatgggggttctcagttgaaggaaatgaacacatggtgtgcatactaaagaaatcaatatacagtcttaaagcaagcttccccgcaatggtatttgaggtttaatgatac

SEQ ID NO: 50792 - DNA, 439 bp, Glycine max
  unsure (1)..(439): unsure at all n locations
gcttcaaagttntctggttgctaaaccttganaacttgtgctattcatcttttcattctcttctccctccaccaaaaagaattcgccaaggactaaccgcctgaattctttntgtgtcactcttctcccttttccaaaagaacaaaggaataaccgcctgaattcttttgtgtctcccttctcccttgtcaaagaattcaaaatgacacagngagaattcttttgattcttccctttccctaatacaaaagtgttcaaaggactaaccgcctaagaattcttttgtatccccattcacaaagtatcaaaggtttaacagcctgagatatttgtcttaacacattggagggtacatcctttgtagtacaagtagagggtacatctactngggttngactgagaacaatagagggtacatctcttgtggatcagttctagt

SEQ ID NO: 50793 - DNA, 366 bp, Glycine max
  unsure (1)..(366): unsure at all n locations
agcttctgaaatgtgggctgagtgaagagagagttgctttntggtttaaaaaggctctttctcttttctattattttattataagttatgccacatgtctccatttgagtggagcaaaaggcccacttttctcatgatgtgactcatgctcacccacatgaagagaaaaatctgaccttttgaaatgccaaagtcttgcctcaatttgcgtgccgtttctctggttccagaccctcgcgtttctctgtgcccgtcggggccacgtttcgaaagtaggcaatatatatcaaaacgctcagaatgaaaccccgagcatggttcagaggttagttttgttaaattttaagttacacgcacaacgatgat

SEQ ID NO: 50794 - DNA, 356 bp, Glycine max
tgatgcaggtgagtaagtaactacctcatgcactcctctaatgactatggcatcatatctggcgcataactgctgggagttagacgccatctactcagttacatttctggcttgagcaggaggcatgtctccaatggctccaccactggcagcatctatcatacttctccccatatcactgagaccttcataaaaatataggcgaagatactgcttccatatctgatggtgagggcaacgtgcacatacctatatacatcgcatacatgtctcatacacgctctgtccagtgacttgtctaatgcctgatatatctttcctgatggctgaggtcctgtaagagggaaatatgtcta

SEQ ID NO: 50795 - DNA, 427 bp, Glycine max
  unsure (1)..(427): unsure at all n locations
ctaagctaacaataggtccactcttcagaaattgcacaattcatatgagctactatgcgtcgaagaggcaacttaagagaaaaacaagtcatagttgaagctagaataaaaacacagactttatactggatcacttaaactcatgagctacaaccagttcttcttcaaaaccttgaagggttccactaataaaaaaaatgtattacaaacaagtattgtactctttcacttgtggatacacagtattttctaggccactcctaacacattcctaatctcccctgagattaaacaaaacccaagtatttgtatcacaaaagccattcctagctntctaagcaatacttcgaattgaatactatattcacagctctcatagagaggatacacaataagcttgaatacaacaaaaataactctgcaaggc

SEQ ID NO: 50796 - DNA, 247 bp, Glycine max
tacggcaacagataagaagaggagacagtacttacttggtcagcgcttcaccattctcacagatcaccggagtgtaaaggaacttctttcccatgttattcatactccggagcaacatttatattttgcgcgcctgacgggtttagactataaaacaagtattgctccggagccaacaatcaggcgggtgatgctttatcacgcttaccggaacagacgacacccacatgcatggtactttccatac

SEQ ID NO: 50797 - DNA, 433 bp, Glycine max
  unsure (1)..(433): unsure at all n locations
ntacacgatacaatcttgnttgtattcaggaaggtaaatatatatacagatatgcgcaatgatggtgatctatcttcttcatacatttctgaaaattgacatctctccttttcggtacgttattgcatgagaattaagaaaataattacaatcataaataatttgatcagttaactttaatttaaaaaaatctaactgtgtgttttttgttttttaaattcttgaaatccagaataaaaaataataataatccactaatcctttnttaaaaatgaaacagacaataaattgactggagaaagtgttatatatctaaatccgctgacaaaatttgactaaatattaaacagacatgatcaatgtctattaacggctggcaacctttcttcttccgttcacatgattagattagagagaagtgtgtgggactatc

SEQ ID NO: 50798 - DNA, 347 bp, Glycine max
  unsure (1)..(347): unsure at all n locations
atccttaagtcacctgcggcatgcaagctngaagtgagaaagagtggaagagtcaatcttcctacttttattcgttgaccacagagtggtacctgtagatatgtcgcggtggtcaagagaccttatggacgtcaggtggagtgctatttcccaaaaccaagcttgaccaatcccgacccaatgcgggcatagttagtcagtgagaacctgtgacgtacctaaacagacgagctccttgcagtcaaccgataaatgaacatagaccacatagcaaggaggcttgtgtggtggctggccagctatggatcttgagtgatatttggaatatggcctctggaatcgaatac

SEQ ID NO: 50799 - DNA, 282 bp, Glycine max
  unsure (1)..(282): unsure at all n locations
taaagacaatagcatcacttatggcactaaatagctacgagctggaagccatnttctcaattaaatttccggcttcaagaggggtcatgtctccaanggctccaccattggcagcatctaccatacttctctccatgttactgagtacttcatagaaatattggagaagaaactgctcacaaatatggtggtgaggacaactggcacatagtttcttatatctctcccaagcttcatataagctctctccactgagtcgtctaatgcctaaaatatcctttc

SEQ ID NO: 50800 - DNA, 348 bp, Glycine max
  unsure (1)..(348): unsure at all n locations
tgcttctagctcacgccgggaaccctctaatttatacccgtgcagcctaatgctcccgtccagagggaggcccctcaagttcgaactccaaccactactcgcccaggcgaaagattcaacggaatgaggaactttcctccgaggccaattccagaattcaccccactttcaatgacgtatgaagacctcttgtcattcctctatcggcaaaccaactggggcgtaataactctcgggaggatcttccaaccccctttcccaaagtggtatgatcctaacgcaacttgcacgtaccatgggaatatcccggngcattccatcagaaaatgcttggtcttaaatacatgg

SEQ ID NO: 50801 - DNA, 205 bp, Glycine max
tatactaacattccatggcaataatatcgaagagttgttatacaatgactccaaaaattattaatagttggagcttgagaatatgacggttaaatgtgatgaacatgtgtacgatggaccctatgaatatcattcagaacgcttttagacgatatattgtgcctgtgaataagtggaagatgttaacactcgatgttacaataat

SEQ ID NO: 50802 - DNA, 381 bp, Glycine max
  unsure (1)..(381): unsure at all n locations
tgtgttccttgatctgtatcaatgttaataaaatcttcttgcttgatccgctatcagtgctggaccttgaacaattacacgcaccgttagccatagtatgttgctgaggatgacactgacgaataccagtcactgatagatctagctggcgaaatactagaagagagcttttgtggtacaccatcagctctgatagacattatatcttccgttcagctcttatttacagaagcaatacttgaaggtgtttcgatcaaccgatcacacgaggctggcttataactctctttctaataactaaaagagcatataccaatanttgcttcaaaactatgctaccggaagaagatgtgaggcactgattatatcctgcgtgagccg

SEQ ID NO: 50803 - DNA, 481 bp, Glycine max
  unsure (1)..(481): unsure at all n locations
tctgcttatcatgtggcattatatntgagcttttaaaatgtntntatntngacttgcgtatcaaaaactatatgattctcatactcggtttcctgttgactacactcgtatgatgcagattggaggcagnggagctcttatatcacccttgacctatatttttgatgaagaaactccaagatggcgtcagctcctatctaaacttgtgctgtagccatctatgatcaatctatggagtcatttgtggatgtttcgttttcagatacttcaaagtagatgagcattaaatctatggtgaaagctgcaaaagcctagtaccccaaaatggaggacgtagataactaaaattgcactcttagattggttattttgtacaagcctggatcttcttcctttcgttctcttcataacantcggtaatcgctagagaagtgactgtcttctntgtcctttccgggggaattgtattncaggtgaactg

SEQ ID NO: 50804 - DNA, 341 bp, Glycine max
  unsure (1)..(341): unsure at all n locations
gcttttccacgttttacttgatacctgtgtggttatgcaantncaaaattctgttataacagcttatcaaaatatcttgtatgaaatggctataaaaaggggtaatgatgaaataaaaagatatgagaattattccctgcaatttagcttttcttttattccagttagctatcaactggtccgaccttagcttttcttttattccaggtagctattcacagacctaatagaaagaacacaatactaaacatttatttaattaaatctaataaaaaatttacttcaatcacattatttaacaaaatacttgcaaggtaggggtgtcctctaagagctggagt

SEQ ID NO: 50805 - DNA, 275 bp, Glycine max
catagcaggctcacaacttggtgactgttttcattatctctcgaccttaatgaggtccatgatttccttgcaatcatggcatctcttcccagttctctttcaacagcaagcctccgttgatatacaaagtttcacctttcaacattgccaatggagtggaatgagatgttgtccaatggtgcatcaggaacatatccagacacctttgtgccagatttctttggcctctttgatgtcgagacatctagctcgacgatatcatcagaatcagatga

SEQ ID NO: 50806 - DNA, 316 bp, Glycine max
  unsure (1)..(316): unsure at all n locations
agcttgaatgctctattcaatggagttgacatgtatatcttcagactgatcaacacttgcacagtggccaaagatgcatgggagatcctgataaccactcatgaaggaacctccaaagtgaagatgtccagattgcaactgttggctacaaaattcgaatatctgaagatgaaggaggaagaatgtattcatgacttccacatgaacattcttgaaattgccaatgcttgcactgccttgngagagaagatgacagatgaaaagctggtgagaaagatcctcagatccttgcctaagagatttgacatgaaagtca

SEQ ID NO: 50807 - DNA, 330 bp, Glycine max
tagtgctacaatatcaagatgaagaagttgcttgataaataataaataaagaattacactatgcaactactatttctctaacaccagtgatcttttataacttttagttaaattgaagtctggaggtaaagtcaatattacctacgaacaaataactaaaaatatgtatctttgctaaatataatcatgtttgatttgaaacaattaatttcgatgtttttatcaaattaaacacgcactaaataattaaattaacattaaagaaaaggattatttatatgcctcataaataaacacgcactaaataactaaatacaatattatttatat

SEQ ID NO: 50808 - DNA, 416 bp, Glycine max
  unsure (1)..(416): unsure at all n locations
ctcaagtctgcaccgttttactatngagattntcatatataatattgaagtgtgagatatgatatattataaaagcagtaaaatatgttggagcataattcgcccagaactcgcccaggcgagtctgagttggatcagctctcctaggtgagcaaaatttcacctgngcgagtcttgtaggctacaaatacgtccactagcgtaaaaaacccatnttgcttccttcttcactcctaaaccctcacccaacacccccaacctcctcatccaccatcatcgacctccgatgactgccacgagctgccattacttgccgcaagaccactgcatganaatgaacactttaatcgaagtgaaatcttcaaaactcaactcgaggaattggtagagaatggagcctncaatccttcctgtgc

SEQ ID NO: 50809 - DNA, 381 bp, Glycine max
  unsure (1)..(381): unsure at all n locations
gtgagagagtgtggaagagtcagtcttcctaactttatttgttgaccacagagtggtacctggagatatgtcgcggnggtcaggagaccttgtggacgtcaggtggggtgctattgcccaaaaccaagcttgatcaatcctgacccaacccgggcatagtcagtcagtgagaacctgtgacatacctaaacaggcgagctcctggcagtcaaccaataaaagaacaaagaccataaagcanagaggcttgtgtggtggctggccagctatggatcttgagtgatatctggaatatggcctctggtaattgattaccaagggtgtgtaatcgattacaaggcttaaaaatgaagacaggaagttaagatggtctctggtaat

SEQ ID NO: 50810 - DNA, 465 bp, Glycine max
  unsure (1)..(465): unsure at all n locations
ngaagagagacagtgtggaagagtcagacttcctacttatatttgttgaccacatagtgggacctggagatatgtcgtcggggtcaggagaccttgtggacgtcaggtggggtgctattgcccaaaaccaagcttgatcaatcctgacccaacccgggcatagtcagtcagtgagaacctgtgacatacctaaacaggcgagctcctggcagtctaccaagtaaagaacatagaccatatagctaagatgcttgtgtggtggctggccagctatggatcttgagtgatatctggaatatggcctctggtaattgattaccaagggtgtgtaatcgattacaaggcttaaaaatgaagacaggaagttaagatggtctctggtaatcgatttcaagggggtgtatcgataccacgcctaaaatggcacaggaagttagatgcctctggaatcgataccatgggtgt

SEQ ID NO: 50811 - DNA, 359 bp, Glycine max
  unsure (1)..(359): unsure at all n locations
atcctctgagtcacctgccgcatgcaagctgggttcgaggtacttacccgttgaagatcgattatcgatgaagaacgaatgaagaacggttgaaacctttgcgagattcctcacggaagacgttacggaaacgtttcggaagtgcctcggcttaaattatcttcacggaaacatattttccaagcatattcgaaggagagagaagtgcctaaggggctggacccctttcttcttcatttccttccctatntatagcaaaataggggaggtggttgccgcccagctcgcccaggcgagctcatctcgcccaggcgagcagggttgcttcctccagaagctaccgccttctggaggaatat

SEQ ID NO: 50812 - DNA, 480 bp, Glycine max
  unsure (1)..(480): unsure at all n locations
ggtagaatggctagacatgatacatgtcagggcttggtttgtttcaaggataanagggatgccccacattatttccatgacacaaatgcaaaaatgatgatttggaaacttcatgcaaaacttgtcatgcatgcatctatgcggacactcaaatgtcaaatttttatggtcatgtgatgctagggctcaagattcatttcctctatctttaatcaacccaatgtttccaaaatatgttcttttatcaatttgtgcattcatccgagtccatttcgggcgtccgggaaatttcacagcattcacccttcaggcgtagacacatttcccaaaaattggttatggtcaatgaattttttcaaagaaaagttggaaatcgtctcttttcaaaagcatgtctattttagctagacaaacatatttctnnttttctccttcttctttgtttttttatcactatcattnnggtatttctttttcttg

SEQ ID NO: 50813 - DNA, 165 bp, Glycine max
  unsure (1)..(165): unsure at all n locations
gcttctatccgaatggacttacatagatataattctttngatagccctactgagccttgtttccctgtccttgtgctgaagctcactacatgccttaaatgaataaacatgatatcaccatatccttaatgaattctggagctttggaattgatgtgggaataaa

SEQ ID NO: 50814 - DNA, 498 bp, Glycine max
  unsure (1)..(498): unsure at all n locations
actcagctnggactctcgctatttctttaacactagtcacttagataagttgtgatctttgaaagaatctctagaaataagtcacttgaagagatgtgactttcggaaatgtatttttcgaaatcagccattggtaatcgattaccattaacgtgtaatcgattacacatcacccgatgtgactcttcattataaatttagagcatcataacatttagaggctctcgtactcgagtacaagtattgtgtaatcgattacacaagattaaaatgatttaaaactgtttataaacaagctgcaactctcgaaatttgaaatcttaccgttctacgacactggtaatcgattaccagagagtagaactcgttggtaatgattttgctaaaacttcttgtgctactcaatgtcttggaagatcgcttagtacttatctagattgaagcttctcttgtttcttgatcttgagcgtagatcatgatcttgatattcttgatctt

SEQ ID NO: 50815 - DNA, 349 bp, Glycine max
ttatcaagtgggctactggaagaggctgtctaatctttgtataagcaaggtgacttcacggtgagccactaatggagcgtgtgccgaatggaactctgcgactctaatatagaagaaagtgcttgtgctatctgccttgaccatattgtgaatcacattactgctcacacacgtcatgtccttcccttggaagccctgtattctaataactcttgctttcgtgagaaccgcttgctaatgactatagatcttattaagggacccctgactccaccattgcatgcttaatgtcgtctcttccctacatgcatgattgaaaactatggtgaaactgcccatggctcgatcc

SEQ ID NO: 50816 - DNA, 428 bp, Glycine max
  unsure (1)..(428): unsure at all n locations
tggacagcatcaaccttggccattctaaaatctttcttnatcttatcagngccctctntaatgtatgcagctggttcagtaatatttgagtccatgccattgatgattaccccaacatggtttccttcagtgtctgagtcatctttgtaaccattcattgtgtcaaactcaactgcagagatgtggtttgactcattcccatcattggtggagttaacaaggccaagataatggccagtctcagccccaggatactgtgttgagggtgctatggtgaatgcaaggccaaagccaccataaccataacttgcggacacaattgagataacaaaaatggtgctgaaggaataagcatacggttggttcgtgttgataagcatctggaaaggtgtggcatacaatgcatggcgctacatattggttgatct

SEQ ID NO: 50817 - DNA, 351 bp, Glycine max
gcttgctttctcaatcaatctgtccactgactatcatttctaatcgtgatcctactttcttgttctttctcatctacatacatgctcattcaaagctcatgacttcaacacatgcttcaccctttcatgcaatcaattcacaacaccaatttcacaaaaaaataattatgtttgcactgcatactcagataatcaagtcagactgcttagtatgcttcaagacatgcatactactattcacaatcaaaagtaacccaatatcaccacaaaaaagataagtgtactaaagacataagtataataattataattgtcatcaaaacaaaagcacgaatttaaaattcctatgat

SEQ ID NO: 50818 - DNA, 450 bp, Glycine max
tctatataagctgaaccatcttatcaataaacacaagttatgttttattaagaaaattagagtgtatctcttttatcttagtgagagtgattctcctaaattcttgagtgattcaagaacaccttggctgtatcaaaggactctcacaacctttgtgtgttgtcctcgccggaaagagtgattttttccttcctttcatcttcaaccttgttctttcagaccataattccagaaaatccacttctgcccagaattatcttgtggccataactcccatttaacgcactcaaattaagtgattcttgagcctaaattgaatttaagacgagacctctcacctcgtttaggaatcacctcatttggagccctgtatcttgagttattgccatgtctatatttctgtcgagccactacttaaccatacgtttaccactccattaatccatttta

SEQ ID NO: 50819 - DNA, 362 bp, Glycine max
agcttctttcaacgaacgcgactggtaatgtttatattatcctataagcaacgtatgtatttggaaaagaacctaacctttttatatagctcaactattttaatggtgtgttaatttcatttgttagaacttctttcaataactctaattctgaaaacaaatcatgacaatcaatattataacggtcctcataactcaaaatcttgtcaagattgatgcaatatattgttcaattcattttcactcagagttctaaatctatttgaatcaaataaaaagtcaaacatcgtttcatattctataaattgttcaaatcgactctcaatagaagaaatatactattctaatacataccataaata

SEQ ID NO: 50820 - DNA, 442 bp, Glycine max
  unsure (1)..(442): unsure at all n locations
tgttattatgaaatagatgtgttattatgtcttgatcggagngcgngattcctgtgtattgtgattgatgattgaaaagtgtgattgatgaatgacaaagtgatgaaatagtgtgagatatgctaagtaaattgtatttggctactatatgttgcgttgtttctctctagtagttagaaatgtgataactcactcccggtttggtgtttgtgtttggatcctgtgatgatcttgaactntgtgttcgggggagcagacgactaggtgaattgccttaaggaacattatgctgaaggacatcgagacacaacactctgatagaatgtgacagtgngacatacatttttatattaggtgcatgatgttagtctattctattttatttcacttgattaataacatatctatgtaaatnttgatggccttattttgagccaaatat

SEQ ID NO: 50821 - DNA, 360 bp, Glycine max
  unsure (1)..(360): unsure at all n locations
tgctngngattcctcaatacatccttattaattgtttaattcttactanctaaatggacagtctatactctgtataagaaccttataattctaagtatatatactcgtagtatggtgttctgccttaaatgcataagtagtatggttgtatgtgacttcttgttcttagcgatgctaatactctatagttggatgactcatatcaagatatctttcgttacggatactctttgatcggacctttaatcctagtgcaacctattattttttggttgcgtgcttaagcaaataaattgattcacttgaaagcctaagataattactttttgtatgagactacctcaacaatcggatactgtg

SEQ ID NO: 50822 - DNA, 411 bp, Glycine max
  unsure (1)..(411): unsure at all n locations
tgcacttgngcatagaatcaggaagttgagggaactgatatataccatcgctccccacaaatccttttcgtagaacaaatttagcatcctgtgatttaacaagacaaaatgatgagtgaaactcaaaaaaacacattattatctttgcaaaactgactgacactaatgagattcttagtaaatagtaatacaaggagcaaataataaattaccaagagtaagagaaaactgaggattgaggggggaggaaaaggtggaaacacctgaggagttaatggtgaggccctgaccaatatccaatagtgatttggtcaggcccctcataaggtgtcacttgctgtatgttctgtgacattactagtcacatgatgggaagcaccagaatcatgataccaagtctgagtctgaatg

SEQ ID NO: 50823 - DNA, 354 bp, Glycine max
  unsure (1)..(354): unsure at all n locations
agctgatcaaaacaattatctaatcattccaattcactcaaatcatacaattgctcattcaaataattatcaaacactcatttcataccaaacaatccattgcatatcattntcaatcaattcattgttcaaacacgctgttggtacaagcaaacaactcaaagtgctgatatttaaaataactaaaatataaagccatactatatactaataaacctaaatgttcatgctttgcagaaattaaactaaacacaatttatacatcctgctcatcttgtggctgatcttcattatgatctagtgttggagctgctgatgaatactgataggctgctctggctccgtgactggcgt

SEQ ID NO: 50824 - DNA, 381 bp, Glycine max
  unsure (1)..(381): unsure at all n locations
cttgcatgtctagtgattctagagatagtgaggtccaagttcttgagagctntgagagattttattgtgtgaagatctgcagagaccagagcttgaagaggaagctgttctgagagcttgagatgagtttgtgagtggttgtgagatcctagacgtgaatgagacatcctcaccacttgtattattgcagactttcatcttgctcttctctttattgtaaaggaggcttcctggttatggaaagctaacatcctctgttggatcttccctgtcggtacttaatggaaatatctctctatctatntaatgatgttttatgtgctctctgtgctatctgcttctcattctaggatgccgttaccttgatcacgtagatgcatg

SEQ ID NO: 50825 - DNA, 266 bp, Glycine max
agctgtatatgattcttcataagctctaataatctgtgtatctctatgaccctctaaagagaggcacgaataaccagagggatgtttaatatacaagggaacaaagaaattatgtaatacattgacagacaagaagaagttgtgttgaacacataacctctctaatgcaagaataaagccccaggcatttggatggagttgggaatggaatattctaagaaaattccaaccctgattggatatcactaagggaacatctttaacat

SEQ ID NO: 50826 - DNA, 503 bp, Glycine max
  unsure (1)..(503): unsure at all n locations
ctattacgcacacttagaatctcagctttagccaatgaactacctgaatatattctttgtagctcctttgagccttgtgtccctttccttgttatgaagctcactataagccttaagtgaanaaccatgatatcaccatatccttaagaaattttggagctctggaattgtgttgggaataagtgtggggggttgttgtttcattggataacttgttttgttggctatgcttcatgatgtatattgggccatacttgatgtacactgcatattggttaaatgttggacatgctgaatgacatgttgtttctcacaggctatagagtagaataaaaacaatcgaaagaactagagaatacgattagcaataaagctgagtgaataagatcttatatggcacaagaatgatgagactcttggttatacctcttatgataaaatctatctttacttctttttatttcttaagttttctaatatgcactattcacattgtcctctat

SEQ ID NO: 50827 - DNA, 393 bp, Glycine max
  unsure (1)..(393): unsure at all n locations
agctntgcggatttggtctttgccagggaaaggatcgatgcgggtctgaacagaggcatatttaatcatcctgcttggacgaatgagaaaactggtgcaaatgaagagggtgaggatgaatgagaagcccgtgctgtgactgccattcctatacagccaagnttcccaccaacccaacaatgttcttactcaatcaattacaaacccttctcttacccaccgtccagttatccacaaaggccattcctaaaatcaaccacaaagactacctactgcatttgcaatgacaaacaccacctctagcatacaccaaaacaccaaccaagaaatgaattttgcagcgagaaaacctgtagaattcaccccattccagtgtctatgctgacttgctcc

SEQ ID NO: 50828 - DNA, 456 bp, Glycine max
  unsure (1)..(456): unsure at all n locations
ttcgattcattctatgtacccgtagtggtccacattgtgtttcgtgcattnttattctcgttttgtttactatntataccccctgttgacgtgcttaagccattttacttaagtcatttctcgcttaacttaaaaataaaataaatttccaccgaacgtttgaattgtgttatccattaacttcggttaaaataaattccgaccgttcggtcgtgccgtaaccacgttggaaatcaaaagaggtaaaaaaataatataataatcaaaaagacatcttttagtaaaataaagcggaaaatcaatcggacgttntctctttgggatttctcattcttaatcgaattgataataactaaagtgaaactaaggctaatatcaactcgcctagtcaagctcgtccacaanaataggctttgggaagttgtcattttcaattctcactaagtaaaatggatc

SEQ ID NO: 50829 - DNA, 354 bp, Glycine max
  unsure (1)..(354): unsure at all n locations
ctataagtcctagatgacatttcaaactatgaattactcactntaacctccatttaccactgaatcccgttttagccttccaactctcanagcctcactctttntctactcataacactacattctcactttctaaccctaggttaactctacccttcatccctagcaattntccatcagcaatttcagcacataaacatcacaagcatcatcataaaaaccctanacagaatgggtaagcttgactcacaccaaacatggcaagttcaacatgctttcaacaaatttcttcacaaataactatcatgaagcagaaacctagcanaactactcatcatatctcccaaacccata

SEQ ID NO: 50830 - DNA, 484 bp, Glycine max
  unsure (1)..(484): unsure at all n locations
tctaatttgaaactatagtcattntcattgtcatgtganaacacatacacacagcataacaatattatggaaattattttccagaaattactcctaccaaaaggattagtaccagcttattgatcatacaaaaacctatgttccaaatcacccaaaataaaggatggactatctttttttttctaatgaaagttgttgagaatcacgaatttaatgtataatgatatgataggatatgatatctgatttagaggaaactgaatatcctctaattatgtataaccaatactacctgtctatataaacaagcatctgttgtgtattctaacacactgttttagtctactatccctctatattntatactaatttacaaaagtanaccctttgaaacannatangagcagaaaaaaaaaacaagagattaacaatcccaaatggagtgcctcttcanacatttagaactaatattaaacaaacaatt

SEQ ID NO: 50831 - DNA, 443 bp, Glycine max
  unsure (1)..(443): unsure at all n locations
tggtccaatgaaggaggtgaagttnttcaatgtgaacgcatttggtaagtcgaatggctattgtcaaggtgagttatttgacccttttgctgctactacttgcaaggaagggatgaatggattctctttaattttaatctaattattcatttaaatttaatattaatttaattaaaatatgatgatatatcagatgacaagtggtcagcatacatgtcacacttaatctaacgtgatatcacaagtagtttgtcgacgtatcaaataaataaccacatcagcaattaatggatcctttntaacgacagagacctcatacaaaacttttaaattatagtgacccatctcaaaatgaacaatttatgaggaatcaaatgtcaaattcaagtatatatcanggatcaacaatatatctacacttatttttatatggagtaatgata

SEQ ID NO: 50832 - DNA, 329 bp, Glycine max
  unsure (1)..(329): unsure at all n locations
gtcacctgcngcatgcaagcttatgctgcaanatatacaatagacctcctcttcctcagtagcaaaatcaaccacagcagaacaattatgacctcttcagcaacagatacaaccctggatagaggaatcaccctaacctcaaatggtccagccctcagcaacaacaacagcagcctgctccttccttacaaaatgctgctggcccaagcagaccatacatttcttcaccaatccaacaacagcaacaacctcagaaacagccaacagttgaggcccctccacaaccttccctcgaagaacttgtgaggcagatgactatgcagatcatg

SEQ ID NO: 50833 - DNA, 440 bp, Glycine max
  unsure (1)..(440): unsure at all n locations
tgcatctcaaggactggcatttgtcttccatatgcagtaactaaaggaagttgactcatcaaaagacaaaagttgaagacatcacatcttccaaatgaagccgcacatactgaaagctcataagaatatgaatgttaaagaattcaaagatgtaaacaagttgagagttgaagcatggtccatgagaagatttgatcttcaacatcaaaatggaagactatagttgttatgcaatgtaaccttggacaaaacactaacataccaacaaatgttccttcaccaccattcatatgtgaagtagactacttcgcaatgctctgtgttacgaagatatgttaagcgtgatgaagttgtgatccctcagaaagccatatcacttgtacttcatcanaattatctactttagaatgggtcctttctcagctaacatcaaaatcacc

SEQ ID NO: 50834 - DNA, 334 bp, Glycine max
  unsure (1)..(334): unsure at all n locations
atctctaagcacctgcngctgcagctatgctganatattacaatagacccnctcaatctcagtagcaaaatcaaccacagcagaacaattatgacctctccagcaacagatacaaccctggatagaggaatcaccctaacctcagatggtccagccctcagcaacaacaacagcagcctgctccttccttccaaaatgctgctggcccaagcagaaccatatcattcctcaccaatccaacaacagcaacaaccccagaaacagccaacagttgaggcccctccacaaccttccctcgaagaacttgtgaggcanatgactatgcagaacatgc

SEQ ID NO: 50835 - DNA, 467 bp, Glycine max
  unsure (1)..(467): unsure at all n locations
ggcatctcaaggactggcatttgtcttccatatgcagtaactaaaggaagttgactcatcaaaagacaaaagttgaagacatcacatcttccaaatgaagccgcacatactgaaagctcataagaatatgaatgttaaagaattcaaagatgtaaacaagttgagagttgaagcatggtccatgagaagatttgatcttcaacatcaaaatggaagactatagttgttatgcaatgtaaccttggacaaaacactaacataccaacaaatgttccttcaccaccattcatatgtgaagtagactacttcgcaatgctttgtgttacgaagatatgttaagcgtgatgaagttgtgatccctcagaaagccatatcacttgtacttcatcaaaattatctactttagaatgggtccttttctcagctacatcanaatcacattttaatgtgtctttaaatgctatcat

SEQ ID NO: 50836 - DNA, 384 bp, Glycine max
  unsure (1)..(384): unsure at all n locations
tgcncaacatcngagtgatacaacattcaaacagcacaaactatcacagccaagaaaacagagcataggcagagaactctgccaaaacaccaaccaaaatcacagcttttctcacttaaagaccccagtaacaattccttcgttccaattcgttaaccgttggatcgactccaaatttttactggaagtctctagtacataagcctacattttgaccgttgggatctactagcaaacatccagaactcattctgcactgctctttccacaaccagcaaatgcctagtatttttctgcacttgtgcaaaatcctgctgcacaatttcacagcaaaaatctgcacaaaatgcagatttcgaaaaccacacttcctctcatccaatc

SEQ ID NO: 50837 - DNA, 308 bp, Glycine max
  unsure (1)..(308): unsure at all n locations
gcttcaaagatatggatccatctcccagctaccttgaatttcagccatcagctcactggaaatgtnggaaacggcaatcatcattaattcataaccctgcactctagataaagcatatgcaacaatgttntcttttcctttcttgtagcaaacttcatagtcataccccatgagntttgtaagccagctatgttgccctgcaaaagaaaatctctgttgcaacaagaactgaagactattatgatcaatcctaatcacaaaatgtttgccaaccaaatagtgatgccattctccaattgcatacatta

SEQ ID NO: 50838 - DNA, 439 bp, Glycine max
  unsure (1)..(439): unsure at all n locations
ggttacaaccaatattctntatcctaccaagccatggttggctctaacataaatcagaagatttgtttgtttgattgtcaatgactaacactcaatcatcttatagacagatagataatttcaacacttagtcttttctcttaagataatcaaagtgttttgagagcttttctaaactttacaagaatctatacataaatctttttacagaaaaaaatgaataatgagctcttcaattcatgcttcatgtcttccaagcttctgatatttataggcctctttcaatcaagtttatgttgtctctaaatgatcatagttcctctcttaagtttgtgtttgaagaatatggtcattggagcattaaatgtgtgcattaaatgcacttacttcttcatgataagaaatcactctttcatcgtggcatgtcaaacattacaat

SEQ ID NO: 50839 - DNA, 334 bp, Glycine max
  unsure (1)..(334): unsure at all n locations
agcttccttaagaagattcctaaagaagctagagcttanctacacatacgtctctaatagctaagctcacctccttgagatgagaagctacaacttagctacacatcctctataatagctaagctcacccccatgacaaaatacatgcaaatacaaaaaaaatccctactacaaagactactgcaaaatcctcanaatacaaggcttataccctatactactagaatggccaaaatacaaggcctaaacgatggaaaaacctattctaatatttacaaagataagcaggctcatacttagcccatgggctcgaaatctaccctaaggctcatga

SEQ ID NO: 50840 - DNA, 408 bp, Glycine max
  unsure (1)..(408): unsure at all n locations
tgtaatcgattacacacatactgtaatcgattaccagaggagaatttcagaanatattctcaattgtcacatcttttcatttggttcttgaatggctatcaaaggcctatatatatgtgacttgagacacgaatttgccaagattttttcagaacaaaaaggtcttatcctcttaaaaagcaaaatcgttttatcctcttacaaattccttggccaaaacacttgtgattcaataaggaattatttgagtgctcaaattgttcaatctatctctttcaagagagatttcttcttcttttcttctttattctgaanagggattaagagaccgagggtctcttggtgtgaaagaattataaacacaaaggaagggatgtcctgtgtgttagaacttganaaggaattaca

SEQ ID NO: 50841 - DNA, 345 bp, Glycine max
  unsure (1)..(345): unsure at all n locations
agcttcacagcanatgatagaatgtctatatttttatcatttgacaatttattggtattatatgacttatccttcatatatatagactctcttttttcatctttatcaactgtcgaattttacataattcataaattttatttgataccttgcatagcattgcatttagcaaatacagattaacatgcttggtttataagtattgacacaaaacaggcttattgaaataccttgtattgcatgttgctagggcttattaaaaatatcaaattattttacatgtgtctgtgatatcacacttattaatgatgcgataaattatgtaactatcatgtctctcgttga

SEQ ID NO: 50842 - DNA, 487 bp, Glycine max
  unsure (1)..(487): unsure at all n locations
ggagctnggttntagtanaacanacaagtntgattatatttaacgggttgagcttgaatagttgaggaatagctcaacccatttacgttctttaggataccattctcgtgttccaacttacaagactatcaactgtatatgcaaacaataattntacagattcttccaggattatttaaggaatttaaggagcagaacagatctgtggcacatcttcaatataaatattatcaatgccttgtccaaaccaaaattgagattgatggtttagctgacaaattcttcttctgtttaacctatgtttctgactaataaatgtgtatttggtgaagacctaattatgaagtttccaaatctatgccgatttatagattttcaatatattattatttatatcaagtgatattacgtgggtgaactagtcaagaactagagagaaataatcgagcatcgtgtggtctagtagcatttttcatataatatattt

SEQ ID NO: 50843 - DNA, 375 bp, Glycine max
  unsure (1)..(375): unsure at all n locations
cacacactttcttataatatctaaactcaccccatgccaaaatacatgataatacaaaagagtctctactacaaagactaatctaaatgccctgaaatacaaggctaaaaccctatactactagaattgtcaaaatactaggcctcaaagaaagatacacctattctaatattaataaataagaatggacctcacctcggcccatggattaataaactacactgatgttcatgagaaccctagggccttctttatcaactctagcccaatcctcttgaagtcttctattcatacccttggggggtaggagtgcattatatccttccccttggaaaggaattgacctcaanactcaaagtcctgatactctgtgct

SEQ ID NO: 50844 - DNA, 278 bp, Glycine max
attggtgaccacagagtggtacctggagatatgtcgcggaggtcaagagaccttgtggacgtcatgtggggtgctattgcccaaaaccaagcttgaccaatcccgacccaacccgtgcatattcggtcagtgagaacctgtgatgttcctaaacaagcgagcttctggctgcatcaaaatataggaacaaagaccacaaagccaggaggcttgtggtggctggccagctgtgaattatgtgtgatatgtggattatggcctctcggaatcgattacca

SEQ ID NO: 50845 - DNA, 430 bp, Glycine max
  unsure (1)..(430): unsure at all n locations
ngcataaagaaatgtcagaggatgaaatcgcatgtggctgtattagagcacattgaagagaaaggtgtcatgagaagaaaagaggggttgtttccctaattagtaactaactgcaaccaccaagtcacaaggtggtaaccttgctgttcgacaatggctcgcccactatccatcagactaatgcaactgttttaacaaattatttggctacatatttcaaaacatataacctaagtttagcttaattaanaatgaaccttaagaaagtgtttgaccccattgtactgcanaagaatgagtattctcattgaaatcttgtccaaatgaaggtgcactganacaagtacgaaatgaatggatttanaaagatatcataccttttgcctaatgaatagctagcagctctaataccagcanattcatcaactaa

SEQ ID NO: 50846 - DNA, 333 bp, Glycine max
agctttgttgttatcaatatgggaattattcttgttaatctacatagaagcttaggatggtaaatggaattgtggtccaccacacatggtaatgttattctactgactcatattttgaataaaagacactgaagttgtgtctcaaaacgcaatctcatctaatctctgcatttagattttgaatgttcttttcaattcaattttcttttcttctttcctctttcagctctcattgccctgccaatgtcatctaatgggcaatgaattctctcgtgattttctccttctctaaccctcgccttatattctctttctccaactctcattggaact

SEQ ID NO: 50847 - DNA, 444 bp, Glycine max
  unsure (1)..(444): unsure at all n locations
nganacactctcctccttacatttcataatgatgaatagtgcaattagagctagaagtggagaacattgtaatggtgatcaagctttcaaagaaaggtttatctcatctcttgaggttacatattgtcttttgcttaattttccagcttacgtggaccatactcttattaacatcgagtcttgttattggcactgctaatcggttgaaacatccaattccaaaacttggtttcaaaggaataaaggtgagcagtagcaggtcaagtgtttcccctgattatgacgtggggaagaataataagtgaacacaagcaattgtgtgtggtatataactagganagtgacagtgaaaggcctgcctcttatatttgagaaatgtcacattagtaccaataattacanaaatatcatgtnngtntgcttcatttttatacaatcttaaca

SEQ ID NO: 50848 - DNA, 148 bp, Glycine max
  unsure (1)..(148): unsure at all n locations
tgctacttatatgacgntgattccctatataaacaagaattatgactatggtctaaatatatggctattgactttctacctgattgctgcgatgagctaccgggctgaacatgtcttgaatattgctcatgatcgcgtatacaccatt

SEQ ID NO: 50849 - DNA, 310 bp, Glycine max
tatgttgctatgttacagcagcagagggcaatatgtgttgtatttgttgtgagtgtgacctgcattctttatgaagcatttttcaccacaacaagtgtggattcatgggatctgcatgcttattaacgaatgtgcttatgtcttatagagctataatagcttatggaggaaactcacgtccttgaaaatactatacactcccggttactgattgacggctgacaaactaggtatgtactaatgctaactaaattagttaagcattgttttctcttgcgaaagaatccaatatctatagcatacaaagaat

SEQ ID NO: 50850 - DNA, 330 bp, Glycine max
taatcgattaccatttattgtttctgaataaatcaaaagatgtaactcttcaaatggatttcgactttttcaaataggtcttaagtctttttaaaagttataactcttcaaaatggtcctcttgaccagacatggagagtctataaaagcaaggctgtgttttgcattttcaatcaatctttctatcaatccaatcaattcattacaatcctctacaagccttgaatctctttgaacttcttcttcttctttgtgccaaaagctttccaaagttttctggttttctaaaccttgaaaacttgtgctattcattcattgcatctcttctcc

SEQ ID NO: 50851 - DNA, 423 bp, Glycine max
  unsure (1)..(423): unsure at all n locations
atcaattgaggaagcctcgacaagttccccattgaaaaatgaaattctgataccaatgccagatgtcgtacaggatgtcacgacatcacgcttcagaacatgcagattatctctgagtgaatgaacagattaaacaagtaaataacacaagagaattgttaacccagttcggtgcaacctcacctacatctgggggctaccaagccagggaggaaatccactaaaatagtgtgagttcagggtctaacagccactgtttacaaccttctcacctaaccactacccgtgcgacctctacctaagagccactcttagatatgagaacccctctcactccctctcagacactctcccgtgtntacaattaaatcaaggacactccagagatggctctctgaacaaaagagatcaactctacacact

SEQ ID NO: 50852 - DNA, 499 bp, Glycine max
  unsure (1)..(499): unsure at all n locations
tgtcggtggtaccgatgtccatatatgttatggtattttctccttctgnnttgnttagtaatagtatacattatgtgcctgatttcttttccttcatttgatgataaaggaacaattaatgtgttatcatggcagggtccattttgctcgtctctctaaaaagtgttcacaggaaatgcttaattataatattggtcaatgggtattaataatatctaataaatactgataaaaaaagtatctaataaatttttaaatatattaaaagataaacaacaaattttatattttaataaatacattctattaatgtattcgttttgttaactaacactctaaagaaaatggtcataatactctcttgaaaaaatatattatgtttattgcattaatatatatcaactcatgtatttttttcatagtagtataaagggaaacaaataagagtaaatcatactttcttctcctaataaatacaagtattcaatgtaacatcatg

SEQ ID NO: 50853 - DNA, 245 bp, Glycine max
  unsure (1)..(245): unsure at all n locations
catactcttntcagactatgatggctatggacttgaacttctcttcgactactcgggctctttcaagctctgcctttagggcttggacctcatcactttcttacgaagctttaacctcatcgtccctcacagtctttagaattgggagccaatccaatccttgtgttcggactctcagccacttatgatagccgtcgatgagcccattactgcttgccctaagctctctgtgctttcttcacgcc

SEQ ID NO: 50854 - DNA, 314 bp, Glycine max
gtgcacactcaagctcttctctctcaatcatctgtctactgaataacaattcttattgcttgttctcatctattaaatgccatactggagtagctggaggaaaagtgtctaaaggcaggactagtatggtctggccctcatgtatctctaagacaggagtggaagagtctgctgcttactgaggtgaatatggatccactcccggaaatggggcattagctgatgctggcactggtctaggatggcatccttattatatctcgctctaatctctttgtcaaatcaacatctttgggatggcggctcattatgat

SEQ ID NO: 50855 - DNA, 548 bp, Glycine max
  unsure (1)..(548): unsure at all n locations
nttatttcgtgcactacgcgcactatcgaatactcaagctnggacatgacgcctctcatgagtgacatanagagagcaagctggatcatgttattggacgaataaaagagagagataagtggatcgaggctcttaatttataagagtttaatacatctctgcacttcttgtaaacatatgcattgattttatactatgaaaaaaaatgagatgcgttctacaaataacttacatagacatacctccaatgctaaaaaatgtcttgagaagattacacattgcttcactctcacttactgaatgacgtgtcaactacttcttaagcattgttatacaccaataagatttcatctcacccacatggaataccttatctcacctacttctgaagcgagcactttactacactctccacctaccatggtaatctctgtccatgtctaagatcctcaaggcgctactatgagaacacctcatgtctcttgtacttctatagcagactgngacacctggctatattcctatcttctatgattgtagcatagact

SEQ ID NO: 50856 - DNA, 348 bp, Glycine max
  unsure (1)..(348): unsure at all n locations
aaaactggggcaaatgaagagggtgagaatgagggagaaacccatgctgtgactgccattcctatacagccaagtttcccaccaacccaacaatgtcattactcagccaataacaaaccttctccttacccaccacccagttacccacaaaggccatccctaaatcaaccacaaaacctgtctaccgcacttccaatgacgaacaccacctttagcacaaacccaaacaccaaccaagaaatgaattttgcagtgaaaaagcctgtagaattcaccccgattccggtgtcctatgctgactngctcccatatctacttaatagttcaatgggagccataacccttact

SEQ ID NO: 50857 - DNA, 450 bp, Glycine max
  unsure (1)..(450): unsure at all n locations
ctctcacagtctgtagatattggagccaatccaatccttgtgttcgaactctcagccacttatgatagcagccgatgatcccattactgcttcccctaagctctctgtcctttcttcacgccgcatcacatgccttgcgaactccttggagtacctttgcattggggtcactgaaaccccgtgtaatgaaaggcgtgatgctttcatctaatggcgctcctctcatggggtagccaagctgtcttatggcgaggacaggattataatttatacaaccccttgttccgattaagggaacatttggaaatccttcgcatgaagatagaatcctgattcttccttccttctaacaagggaaccaattaacagacgcccctccatgctagccaagagttggtcccaattccnctttcctttttcgacgcacgagcggtgaccttgtagcggata

SEQ ID NO: 50858 - DNA, 173 bp, Glycine max
  unsure (1)..(173): unsure at all n locations
agcnttgaacaatatacttgccctttatnttactgtctctgggcttggcggccacgctcaacaaagtactttcgacacctattgtacgttgatttgaccaatgttgttatgggaatgttgcgacaatccttcaaaaccttattgatacattctgagaggttggttgtgatgtg

SEQ ID NO: 50859 - DNA, 467 bp, Glycine max
taagctgcactactatcaaatttgcccaatatttgatatttgtctaccctgctatgtttgtataacccttttggtacatcactattcatttcttcatcgctcccaagatcattatcataatcatgattattagtgtcaacttcattcatctttgtatcctcattccaattcatgcacacttcttaagtgtcagtttacatcttgaacaatgtaacaaaagatttgaatacattacaaatgtacttaacaagaataaaaaattaataataatagaaaatattaaataaacaccatatagtggacatgcatgatcaaacaaactctcgtagtgcctactcacgaaaataacccaactggatggacaagtatgtacaggtaatagatagatatggcatgcatagttgtcaataagtaaatgatatttcctatgactgcagacaaagaaagacaatatagctcctgcaatg

SEQ ID NO: 50860 - DNA, 288 bp, Glycine max
  unsure (1)..(288): unsure at all n locations
taagatggagccaaacccagtcaccgtcattaagaactagcttttttcttcctctattgcctttagttgaatacacctttgtttggctctctatttggttcttaaccctctcatgcaacttctttacaaactctgacctagattccctttctttatatataaaagaagtgtccagtgggaggggaatgaggtttaacggtgttaggggattgaacccatagacaacctcanaaggggattgcttggtggttttatgaaccctcctgtttgaggcaaattctacatgag

SEQ ID NO: 50861 - DNA, 504 bp, Glycine max
  unsure (1)..(504): unsure at all n locations
ctctctcttataatgtgttgtcgctggtattctataccgccacaatattattatcttgagtgatgatacctctagaaaacagccatgtgagatatggatcgttgggagtagttattagagacccctagatattatcatgtagtcctaaatgtcatgtacgactttgcttgtaattatttgtggatattgtcgtactatgtgcatccccgtgttatgcttttgcacgtctacatcatgtcatcacacacacgttgtatgttggtctcgtcttttgtcatgggaagccagaaggtccatatcaccttcttaactacacacatggggcattgcatccctgaatgcgcaagtaagaagagatatattttcgggctctcgtgtccgtaaatgcattcatatcatgcataacataagcatctcttcatggcatcataatgaacatatcattcctgcatttgtcccgtatcatattccagcatcacantttgcatgagtcattgcatcatc

SEQ ID NO: 50862 - DNA, 412 bp, Glycine max
agcttgtaatgaagatgaacataaacttatgatcacttatttctggtcagatttcactcattgctcaatccaactccttgcggcttggatttccaaccctgattactgccttgtgcaaggcccgaggagtcacctcagattctcttaccttcgagtcactcagcctagccattaatttggcctatattaagaagaattgttggaacctggatgacccttttgtcacttttccaaggacccaaaaatccagggctagaaaatctgaggacccatctctctctgctccccctacttctgctcttccttcaccaccagcagctccaattctttcaggtccctccacttggagctcagagcctttcatgtttatgctacagagcctgcaccagggccagctcctgattatgcatag

SEQ ID NO: 50863 - DNA, 499 bp, Glycine max
  unsure (1)..(499): unsure at all n locations
ctgatggtgtcgagaagaaatcacatgtntgtcatcaacatatagggggagaatgtgaatgtatgtatacatgattttgatgatgtcaaaaaaagaatcaaataaggctcattttgcttcaagattaatacaagattgtttcaacaaacaaagccttgattcaagatttcttcaagatcaagccttgcctcaaaatgtagagatttcaagtcatccaaggcacatgtaatcgattaccaatacatgcaatcgattaccaaggcacatgaaagtgtgtaatcgattacacatcatatgtaatcgattaccagagactctgaatgttgggaattcaaattttaaatgaagagtcacaactgttcaagaaaaacaactgtgtaatcgattacactaattntgtaatcgattactagagagggatttcaaggaatatcgccaacagtcacatcttatcatttggattttgaatggccatcanaggcctatatatatgtgtgac

SEQ ID NO: 50864 - DNA, 286 bp, Glycine max
acaaccttctggaggaaggatcttgaaggcctaagtgggccagattgctattcgtaccctccctttctgctaaatgcaccgtcatttatatttttggttattctttttctgtaacggtgcgaaactgttctaattttgttactattcttatcttcctcccgcagagtgccaatgtctacggatgctgtttttacttctttctggcttacgacgaagttactgaaactcaccgattgcgctagaacacctcttattgatttccgcgacatcaccgaatttcacggat

SEQ ID NO: 50865 - DNA, 316 bp, Glycine max
  unsure (1)..(316): unsure at all n locations
gggcactctcaacatactactgtccacacctacttgacggtgattctaccaatgatgttatgggaatgtcgagacgatccttcaaatccttattgatgcactctgagaggctggttgtgttgttttcaatatatgagacgagaaatcatttcttttttgggtagatcttgcgcacatgtgctagcgatcatttgtcctcttttctttatagtcttcatttaacatcatatatttaaactcaataagagttaaccaagacttgtatatgtactattgtatgtngatcactctttggcttattatacttaatattatg

SEQ ID NO: 50866 - DNA, 472 bp, Glycine max
  unsure (1)..(472): unsure at all n locations
tatgaactcgacgtggtttcttccaatatgttattgtattttacaactattgctcttacatttcttcaccccttatcattatttgtatgtgattgcttacatgatctagccacagggcatgtttaggtcgtgcatttccacttccaagtttcaacacaaaaatgctcagactgtggagcaaaagttaaataaaataacgatgcctttctggtctggattaaagtagtgtttccctgaggatttctacaaaatgtgtttataattttgtatatacattgctcacaaacaattaaatttntttggcaatccttcattttgaaattaaagggaaatgttaacctttgttgtgctggtatttcgtctttgtctatctccggtatgtaggattatatctggtatgactcttgtagctgtataaaactattgattatgtatgagaattatggtgcatcgctaatggggaatctaagta

SEQ ID NO: 50867 - DNA, 415 bp, Glycine max
  unsure (1)..(415): unsure at all n locations
agcttgagaattgtacgccaatgctttgcttcttccttacatgcttataaataagtcttgtttccttctaagcagtaacggcaaatcattagtagcattaagtcgaaaggacttagaacttgtttgttaaaacataaaaaaaaaataatgtaaagatatttaataattaaataatatttgaagttaaatgtataattttgattttattaattatttaattagcattataattatagtattatttatttaactattaaaataatcattatatatnttaaattattataaaaaaataatcacataattatataattaataatttcatatattatatataataataaaactatagatcaatgtataattatattattagtaattacgtacatgcataagccaggcagggagtgatata

SEQ ID NO: 50868 - DNA, 343 bp, Glycine max
gatctcctttttgttctctaacatgtgggaatgtgctcaaatatgtggggcaatcttggattgttttctcgcttgattgggatggattgggagattgtatgggatggccctaagcctataatgcattgtgaagcaatgggacatgccacattgtccccgttctcttgctgttgatacctaaacgcgcgcccaccaagtgttcggtgaaatgcctcaatggcattagcgtgtgacctttgcaatgaaacaacccatggcgcagtttggtttgcacatatttaccattttgtagggacatgcattcatcttcgaaatggctatagtgattgccccacatatatac

SEQ ID NO: 50869 - DNA, 218 bp, Glycine max
tattggggacgattcatcttgtgaaaaatatggacattgaaactcatttcaaacattccactcttctgtactggaatcgatacaacgaaatgggaatcgattaccatagagtaaaaactctgtgcgcaaggtttgggcacaactcatgtgctattctaagatttgaaaaacatcttaatacttatcttgattgagtcctttctttattcttgaatctt

SEQ ID NO: 50870 - DNA, 291 bp, Glycine max
agggagagaaagtgaactctgaagtgtgtctcacaagactctcattcatcaaagttacaacaagtgttacacatgcttctatttatagactatgcagctgccttgagaagccttccttaagaaaaccttcttgagaagcttctatgagaatacttccttgagaagctagaggttagctactcacacccatctaaaaaataagctcacctccttgagaagcttgcttgagaagctataacttagctacacacccctataatagctaagctcacccccactgacaaaaacact

SEQ ID NO: 50871 - DNA, 503 bp, Glycine max
  unsure (1)..(503): unsure at all n locations
agtcacctgaggcatgcaagcttatatgagatatgttgcttatgttaattgcttttgtagaacaccaacttcaaactgcttgatatgactaaggaagatttgttgaaatgaacatgaaataattcgtagcttaatttttgcatattgaaaagattaagataccaagatcctctcgtattagtaacaaacatgacaatctcatgttctaagagaaaaaaaacgtaaaacagttatagtaggagccaccattattttgtgtagggtccattaatttcatttgtctttctgactctaacatgaatttgtcatgtgagttactaacataagaggatctaaatccattttctaccaatctgaaagaacttgactntgtggactctattctaaaaaactggttctgtgtttaatgcaactgaagaggtgactctggtgtatgcacaaccctctctaattaagaaagagaaagaaaccanaagaatataccgatgaaaggtcaagattca

SEQ ID NO: 50872 - DNA, 410 bp, Glycine max
  unsure (1)..(410): unsure at all n locations
gagaggaggatgctgcctactcaattgcatgctagnctacctttacctgcatcaggcnagcaggttacaggttgcacacttagtggtggagctcatgagtcaggcttgtgtattcccactgaaggaacaactcatgaagttaattatatgggaaaccagcatagacagaaatttaatgcaagtggattttctagatatgaacatggccaaccttaccaacagcataatcaatggagaactcaccctggtgatcacttcaacaaagaccagggtggaccatctactaggccgctacagctacaagggcttggcatatatgagagaacaacaaagctggaagaaactcttgctcacgttatgcacgagtcattgtccaatcataagagcacagagtcagccataaaaaatct

SEQ ID NO: 50873 - DNA, 194 bp, Glycine max
catgcgagcttacaacttatatagagtctggcccgtttctttgtatattcatctcgaacggacggatgtgtggcgaaccttaatacggtgacactccgcgctcttgcgagtaactttgcacgtgtgtcgactctgcgctgaatagtgctatacatacgtcgcgtaatttgtatactggcaccgcattataagca

SEQ ID NO: 50874 - DNA, 575 bp, Glycine max
  unsure (1)..(575): unsure at all n locations
tgcactgnnnnnnnnnnnnnnnngtgacctttagcatgactntgctgacactcaagcnnggacaccagaggcgcaccactattagaggagagaccatctgtgctgtacttatgaacctcctgctctaaatcaccattattaaacggtgtntgcacatccattggctgcgactgaaggtgacaatgagaaacttatgccaagagtataccaagagaatcttgcttagatactggagaaagaagacgctttcgtacctaattccttccttgtgagttgatcccttagcaacaagtctggcctcgcatacctcaatgttgcctaatgaatcccttctggtgttaaagacgcatttacatccaatggactttgctctattatgcagccgtacgaggatgcaacattgttactctgcatagaatgcatctgatgcttcatggcgtcctaccataagttagactctatacaactcatggcttgagcaagaagttcaagatcattgttagctccaacatcatagtcagaatctcgcagatatatcatataatcactaggaatagctggttatcttactcttn

SEQ ID NO: 50875 - DNA, 441 bp, Glycine max
tcttgtagagacgtggtagatcgcatgctcaagagcctccagcttgaggactggcacatggaacccttttataatgacactttacatgattggcaacacgatctataacacggtctggtcagagatggcctatagcgaggcccacgggaggattaccaaaggtgacaagcctgtgttgatcgtgatcaagatctaccctagctgtagccatgttgagtgtcgaatgagcgaaccgatgcgacaaatgaccttaaaatactcgtaatcttttcaagtgcttccacatcgctgccataggaataccatcaacagggctattccaactctatgcgacagcgtcatcaaaacctggcagattggcacacaattgagaaacttaaaattctctttctgcagtggggactcctctgacccgtggcctacacgtgatcgtgcgtgact

SEQ ID NO: 50876 - DNA, 537 bp, Glycine max
  unsure (1)..(537): unsure at all n locations
cgatggnnnnnnnnnnnttgcctaggctgattgtcacnataagangacancgagngaagaacacgtttgagacttttctcttttatttcatgacgaaacccgacatggcgggacctaattgtggggacatcgcccgtggatcacattagacgaccatactgagaaggaattgctgattgtctcgtaacgattttgataaacatggggcgctcgataccagcttgccgatgatgtttgattattcttgcgccttcaacatatggtttgcaagactgctggcgaatgtgtcattgcttacgtgaatgcgatgaaagttggttttgcagtttattggctatttttcaataacttgccgatgctgagtcttatgagcgatagtgaccactttgtcttgtctctggagatggatggcttgaaacactgatggtgcttcaaagcttgtatatgaccaactggttactttcaatgatagttacctacagtctatcaatctctactgatgaattgacacagacaatcgccatatcgtgttttttt

SEQ ID NO: 50877 - DNA, 251 bp, Glycine max
atatgggctacgtgggagtacgcgagctcagttggaggtgggcaacaggggatggtgggtttatgcgcgcattgtggatgtggaaaaacttgttgtgcaccatcgcccgaccgccacctagtaccacatgtgatgggtaccccataatcctacaagcttgagatgaggaagtgttgaagggtgaaacttcctgcttttattgatgaccacagagtgggacctggagatatgtcgcggtggtcaggtgacct

SEQ ID NO: 50878 - DNA, 495 bp, Glycine max
  unsure (1)..(495): unsure at all n locations
tctganatgtgggctgagtgaggagagagagagttgctttttggtttaataggctctttctctcttctattattttattttaagttatgccacatgtctccatttgagtggagcaaaaggcccacttttctcttgatgtgactcatgctcagccacatgaagagaaaaatctgaccttttgaaatgccaaaatccctaccttcggtttgcgtggtcgtttctctggttcccgttcctcgcattcctctgcatccgtccgggccagttttcgaaagtaggcaatatatatatcaaaacgctcagaatgaaaccccgagcgtgtgtcaaaggttggtgttgttaaattttaagttacacgcacaacgatgatctttagactaattaattaagaattaacctataaccttccagttatggatgtctcttccttaattagcctaacccgcgtatcttgcccccactatttctacttctactaggaacatatatgcatat

SEQ ID NO: 50879 - DNA, 301 bp, Glycine max
aatatttggaacattgtaaattcagtttcaaaacattttcaaactcattttgctactggtaatcgattacaacaatatggtaatcgattaccagagagtaaaaactctgtggtaaaggttttgtcaaaactcatgtgctattcaaagttttgaaaaacattttaatacttatcttgattgagtcctttctttattcttgaatcttgagtcttgaatcttgatcttgaatcttgaatcttgattcttggttgtaggcttttttcttgagtcttgaattcttcttgattcttgaactcttgac

SEQ ID NO: 50880 - DNA, 491 bp, Glycine max
  unsure (1)..(491): unsure at all n locations
agaggatgcttcaatggagganaagacagagggagattaatatagaggggggagcacgcaaatgaaggaagataatgggagagaagttgaactttgagttgtgtctcacaagactctcattcatcaaagttacaacaagtgttacacatgcttctatttatagactaggtagcttccttgagaagctntcttaagaaaacttccttgagaagcttctttgagaaaacttccttgagaagctagagtttagctacacacacccatctaaaaaataagctcacctccttgagaagcttccttgagaagctataacttagctacacacccctataatagctaagctcacccccatgacaaanaaaacatgagaatacaaaaaaaaaatcctactacaaagactactcataatgccctgaaatacaaggataanaccctatactactagaatggccaaaatacaaggcccanaagaagaaaacaacctattctac

SEQ ID NO: 50881 - DNA, 259 bp, Glycine max
catagctagactatgaatttttgattgaaaattcttgtgctatcttttcatgattttagggtgttcctaacaaaatatcacctcatttcgatattgattgagtatagctgtacttctacccccttgttaggtgcttgatgagaaacacattatttgttgcatatagtgcatgactcggggcaatacaggtgatttacaaccctttgatcctgaaatatatagaacctttcatatattagttaggcctattgcgcatcct

SEQ ID NO: 50882 - DNA, 422 bp, Glycine max
  unsure (1)..(422): unsure at all n locations
cagacatnngcttcatttctttagtcgccattgacctacttcactctannatgggtcgnnnagcagctncatagcgcctagtgnnngactgggagcatggagattagaaattcatcagaaatgagaataattttccgatattgggttggcccaggaaaaaattatcactcgatatatgccaccannatctgtaacaataagaatgatgaaagaagaatgtgtgatggattaccaaaatccaaccaccataagttctatgtccttatagggcctaagatgtaatgggtctagttaagcgctgctacataagaaatatcatagaagatagttcacgaagatgacctgtgtcatacacatgattagcaccgagatgctcccnctnttcattgcatggttatcgaacttcggtgcacatgtctatt

SEQ ID NO: 50883 - DNA, 130 bp, Glycine max
ttggataataagcttggagaggatgctttattggtggaacagaaagagagaacggcggagcacgatattgaaggaataagagagggagagaagcggcattttgaagtgagacacataagactttcattca

SEQ ID NO: 50884 - DNA, 361 bp, Glycine max
  unsure (1)..(361): unsure at all n locations
agcttgtannggttaaagtctcatgatttgtttcgttctcgtgcaacaattggtagccgcgactatacgagacatcttgccaaacaaagtcaggttagccataactcgcttgtgctttttcttccttgctatatgtagcaaagtcattaatccagtcaagtttgatgagttggaaaatgaggccgcaaatatactgtgccagttggagatgtattttccccctactttctttgacatcatgattcacttgattgtgtatctggtcagagaaatcaaatgttgtggtcctgtttatctacgggggatgtacctggttgagtgatacatgaagatcttaataggtatacaaagaatctatatt

SEQ ID NO: 50885 - DNA, 509 bp, Glycine max
  unsure (1)..(509): unsure at all n locations
gcttatcgatggcangtctctagagaagagattggtatctgtgtttcttctggattgctcctctgtaactcactctatgaatctttcactcatcccattaatatcaaagatttcttctagataaacttatctagagcaatgtgtgtcacatgcaatttaagttcataaatggtgcagatcatttctatgttgctagtgtacgaaacaaggtgttcataaacacacatggcgaaataaaaggatatattttgtatttaaactatattataatcgaatgacatattaaaaggtgtacctattgatgagttcttgaagcataaaaattcttcaatagtgtaaagactctacgtgtatccacatcgatactgacctctattcgtcaacaactctgacaagttaaaaaataagaatagagaagtgaattttgtgatccattcaacgtacaacctaaggctctgtatatagcacgctaatgataccaaatttcttatcaaatcaagatcattatt

SEQ ID NO: 50886 - DNA, 334 bp, Glycine max
atcatttctaacttatcttgctcttgtttttgcaatgaataatttaatgtatggatttgatatttgatggctgacttgaagacataaataatgatcttccacatttacaagtccaaatactccttcttgttccccaattgtatgtacccatacgtccaagtcagaaggcaagtgatcattagatggttggctatcaactccacctttcttaaagtgaatgatgtaacaacccacattcgttacatgttcattttactaatacatatttaacactatcatataataatatgaaaatacctataattttgtcattgtcaatccataacaccatata

SEQ ID NO: 50887 - DNA, 428 bp, Glycine max
aaatgacatattgaaaggaattatccttttagcatccacctcttcctccacatccgagatgatagtgatcggagattctctctttatatacttcaatggaatttgtggttttgatttgcttaactcattgtctatatgctttttctttattagtaagtcttccttgtcttccactgcctttcaatgttcattttatgtgtcatccttttttgttcgcaggtttgcaattagtttttgatatcattcaagaactgatttatgttgtttaagcatatctacatgctcatctaattattcacttatgaatccaacactttcctccatccttggagaggtcgtggcttttgtcacaggtgaagaatatgttactattggtaaagctttttcgctttgcgtgctcaccataataaagatcatgaactatggat

SEQ ID NO: 50888 - DNA, 414 bp, Glycine max
  unsure (1)..(414): unsure at all n locations
agctatanacattanaaagaggtttataatttattacagatatccaaagatgggaataatacaggcacaataaccttttaattgtataccaaaaggattacccaccctgataagctggtgaacaaaacgagtaatatccttttcaacgataggaatcgatttgatgctactcccaataacatagccatgtgctacaggtacaacacgaatcgagttgcaatgtcttcatttaccggctcagcctgtgagactgttgccatgttcgacgattccccatgtcatatccattatatgtaagtcggaactatcccatcacagagaagatgagagcttatgtcctttactgattgtcgtctcccagttgcatagctgacacatggacaanaatatttcccccacagagatagagcatta

SEQ ID NO: 50889 - DNA, 496 bp, Glycine max
  unsure (1)..(496): unsure at all n locations
ccaagctnntgggtccacatgatgaacatctctactacacaccatangnttattcatnggattatacagtgtgtatgaaccaatggggttgtagccaataaagatcattacttcactcttgttgtctagcttcttccttttctgatcaggaatatgtttatagcataaagagccaaataccttaaagtgtttgatagaaggtttcaatccataccaggcttcttcaggtgccatcgaatctagcttcttagtaggacacctatttagcaaatagacagcaatagtagcagcttcaccccaaaaactgtgtggtagattctttgttttcaacatacttctcaccatattaagtatagttctgtttcttctctcaacaaccncattatgttggggtgtataaggtgcagtgacgtcatgcatgataccttgatcgttacagtacatgtcacactcacttgagttgaattctccacctgcatctcgtttgaggatcttc

SEQ ID NO: 50890 - DNA, 252 bp, Glycine max
agcttcaacattcaacttcgagcgtcacgttatattatatgactcaattagacatccgagtaaaaagttattgtcggttgaatttgctcaaagcttcaacattcaatttagagcgtctcgatatatgacgggactcaatcagacatccgagtaaaaagatattgtccgcttaaatggctcagagcttctacattcaatttcgagcgtctcgatatatgacgggactcaatcaggcattcgagtaaaaagtta

SEQ ID NO: 50891 - DNA, 433 bp, Glycine max
  unsure (1)..(433): unsure at all n locations
cttgggcaaattcaaacgaacaataacttttactcggatgtctgattgagtcccgtaatatatcgacacgctcgaaattgaatgtcgaagctctgaggaaattcaaacgacaataaatatttactcggatgtctgatagagtcccgtaacatatcgaggcgctcgaaattgaatgttgaagctctgagccaattcaaacgacaataactttttacacggatgtctgattgagtcccgtcatatatcgagacgctcgaaattgaatgttgaagctctgagccaattcaaacgacaataactttttactcggatgtctgagtgagtcccgtaatatatcgagacgctcgaaattgaatgttgaagctctgagccaattcaaacgacaataactttttactcggatgtctgattgagtctngtnatatatcgagac

SEQ ID NO: 50892 - DNA, 594 bp, Glycine max
  unsure (1)..(594): unsure at all n locations
ccgtccctccacacccctannatgtcgaacgactnntcctnctccctcantacccnnncccaacgcancnnnnnnnnnnnagtatgactgatacccctgcacaaccanannannnacanaannannnnnnangnnnncaagccacaaacactagaaagatgtgtatcatattcacacanacccaaacaagggaagaagacaggcacacaaacctcctaatcttataccaaaaggagtacccacccgcataagctggggaacaaaaagagaaacaccctccccaacaatacgaatcgaagggaagctactcccaataacacagccatccggaacaggtacaacacgaatacacgtccaacgcttncatataccggctcaccccgtgagaatggtgccatgcccgacgaccccccatgtcatatccattttacgcaagcgggaactaccccatcacagaccagaagagatcctatgtcctttactgcttgccgcccccacctgacaaccgacacaggcaaaaaatctccccccagagaagagctcaaatgagccaccgagaaaactcaacacatccagtatccacagcaaaaaccg

SEQ ID NO: 50893 - DNA, 402 bp, Glycine max
  unsure (1)..(402): unsure at all n locations
agcttgttgagaaattgtacaaacaagagtgtatttgataaggcatgctattactagaattgccacttcttatctaaccttagaaaggctccacaaagagaaaactaatattggaaagatgtttattttttatgaatggatcttaaacaagttatctaaggagcttaaggggaaagaagctgtaaaggtagtgctcatgccttctttntggaatagtgtggtttacactcttaaagtcatgggtccacttgtcaaagtgcttcgtcttgtggatgatgaaaggaaaccatccatgggttatatctatgaagcaatggacaaagcaaaagaaataattaacaagtctttcaacaaccacgaaagcaagtacaaagatgtgtttgcaatcattgattaaagatg

SEQ ID NO: 50894 - DNA, 387 bp, Glycine max
  unsure (1)..(387): unsure at all n locations
ctggcttgtttcnggtgctgttactctacacaaccnnaaatcatcagctatttggtattgtcagattttccttctggttctggagacttttatgtcctcccttctattttgaggatacattgtggcttttctgtgctnttatactttattgccaatagcgtcttatttttattttagacaattgacctgatttgaaaatgttgactcccaaatatcctggcgtttaacatggatttgagtctctgttgctgacactaggcattgctagcagaattataattttatggaggtcattttatggtaaaataggatcaactatggctgcccacgttagctctgtggagtcaatgtacgcattacataaattctgccacacacatattatat

SEQ ID NO: 50895 - DNA, 454 bp, Glycine max
  unsure (1)..(454): unsure at all n locations
agcttgtatggtcgctcagatcttgactagttataaactttctgaataaaatgagtttatcccacgttnttactccaaagatcagtgcgaataaaatcactcccgcattttatctctagcatgcataagcatctcttcatggcatcataatgaacatatcgtttctgcagttgtccgttatcatattccagcatcacattttgcatgagccattgcatcatcatgcatatgcgttcaacatactttntgttctacaaaatgcataccttttgttttcatgttcgctcatgcgtgatccttgcattttcctctacaaaacaaaaacaaaaagggaagcatgaaaattcatgatgcattcttggttgcatatattcggtaccatgagccaaccatgtcgggatcataaacccgtttcacttaanaacaaaatgagtaaacatggtacctaatgcat

SEQ ID NO: 50896 - DNA, 250 bp, Glycine max
agatatgtcgcggcggtcaagagaccttggggacgtcaggtggggtgctattgcccaaaaccaagcttgaccaatctcgacccaacccgggcatagtcagtcactgagaacctgtgatgtacctaaacaggcgaacctcctgtcagttaacatataacaggaacatagaccacaaagcacgggggcttgtggaggctggacagctgtgaaacttgatcgtatgcgagatatggacactggtaatccatca

SEQ ID NO: 50897 - DNA, 426 bp, Glycine max
  unsure (1)..(426): unsure at all n locations
agcttggagactcgatatgcatcttcattttatgactaccccacgggtgccttgtacaagctaacccaacatggttctgtcgatgactacctttccgagtttgaatcgctcgcgaatcatatcattggacttccacccccttttctcttgagttgctntatctctagcccgacccttcaaattcgtcaagaggttcaagtgctccagcctctgacattggttcaggtcggaggcttggctcgattgcccgaggagaagtctcaagacctttcacatttgtcttgtggaaagcctcttccttccactcttacattaccaccataccatgttcaagtctgtcatctcccttcgtatcaccacaggccaaatcgtcgttcgtccctttcaaacagctgtcccctgacgagttggcgacatgttgtgata

SEQ ID NO: 50898 - DNA, 357 bp, Glycine max
ctcacattgctcagatgccccccagcatgacttgtcagcttccataattacgcatcagcactgttctattcatccttctttcttgcgactcaatacacacaaataatacatgcaataagtatcaaagttggtgcgtatatgaacacttaaagtgtatgtttctactgttccctattggactttagaagtggcccacttatggattgccacgtgcagacatatagtttacacccttctgtcattaagcatctcagttaattcatattgtacaatgtgccatatgtacaatttgacttgacataaaggttgtgatttctgtcaattgactcaactatcttttacttagaattcaaatca

SEQ ID NO: 50899 - DNA, 445 bp, Glycine max
  unsure (1)..(445): unsure at all n locations
agcttgctagagctntcttacaagatgcctgttgttcagatatatctgctagctaagcagctagaatcattgacggagacacttagtaagctaccaacccaattacaagagacttaaccttcacattcagcagttttgcaagttggaggttgtagcatatatggaggagcgcatgagtctagttgctatataccctttgatgatgttgcaaaagaagtgaattatatgggaaatcagcacagaccaaggtttaatgcaggtggatttgtaggttaccaacatggtgtcaattntaatcaaaatcaagggcagtggaggtctcatcctggaaaccaattcaacaaagaccaaggtggaccatccaaaaggccttagaatcaagggcctagcctttatgagaggacaaccaagttggaggagactttggctcaattcatgcaacttt

SEQ ID NO: 50900 - DNA, 421 bp, Glycine max
  unsure (1)..(421): unsure at all n locations
ggtcggccgggaactcctccattcacaccnctgcttgtctaaggcatccatccagagggaggccgcccaagctccggctccaaccacgactcgcctgaccggcaattccaacgcaatgaggaaatttcccccggagccaattccagaattcaccccgctcccaatgacgtacgaagacctcttgtcgtcactgatcgccaaccaaatggccgtaataactcccgggaagatctaccaaacccctttcccaaagtggtatgatcctaacgcaacttgcacgtgccatgggaataccccggggcattccatcaaaaaatgcttggcccttgaatacaaggtccaacatctgatagatgctagatgggtgacatttcaagaggatcgaccctacgtgaaaaccaacccactcgccaatcatgga

SEQ ID NO: 50901 - DNA, 371 bp, Glycine max
  unsure (1)..(371): unsure at all n locations
ccccttacacgcctagaaagttcttcggattcattttgagtgttcattgctgtatgatatgatatgaaatgcanaggttgggacttgcgttagttgtttatgatggaatgagcctaaacacttgagcttgagtgaaacaatgactgtgaggttttggttgacgatcctctcttgatttgtgccatccttaatagcttatttcagttgtgactctaatgagtatgtttctatcttcgaaaagttgcatttttatgaaaagcaattgattgaagcattccatgatattcagttcatatggctgaatctctctatgaagcanacaccattttcagtgatcactatagtttgtcacttaaggacaagtgaactat

SEQ ID NO: 50902 - DNA, 496 bp, Glycine max
  unsure (1)..(496): unsure at all n locations
tgtagaatggctagacacgatacatgtcagggtttggtttggttcaaggataaaagggatgccccacattatttccatgacacaaatgcaaaaatgatgatttggaaattttatgcaaaactggtcatgcatgcacctatgtggacgctcaagtgtcaaatttttatggtcatgtgatgctagggctcaggaaatcatttctctnatttaaatcaacccaatgtttccaaaatatgttcttttatcaatttgtgcattcattcgagtccattttgggcgtctgggaaaatcttcacagcattcacccttcaggtgtatacacattttttcaaaaactagttatgatcagtgaattnttccaaagaaaagttggaagtcatctcttttcaaaagcatagttggttttcagcttgacaacttatttttcttttctccttcttttttttttatcattatcatttggttatatctntttcttggctggnnttttttcttc

SEQ ID NO: 50903 - DNA, 76 bp, Glycine max
ttttttttcacgggactgtgaagcagccgaaagcttgggagaaaccttccagttgtattatactactatagtgtga

SEQ ID NO: 50904 - DNA, 396 bp, Glycine max
aagcttgccgctggagctgacccatctactgttttatctcttttagactggtgatccctacgctcttgaccttgacttgatagaacctcttcttaagcgaaggtgtttgacttgatcccatgttttactaaagtaaaacaaaatcggtgtgaatcaaaactccgacatctatcatgggtggaatggatgaatgcatgaagaaatgcatatgatacagatgcaatttatgaataccgtagcccgagaaattgtctccttcttagatacaacatcttgaggtagcaaagtgcccgacgtatgtatttaagaaggtggcacgaaccctccgatggtttgccaaatagaggggatcaagacggaacccgtgcatgatgcatatgctatacgcacaacact

SEQ ID NO: 50905 - DNA, 417 bp, Glycine max
ggtcttcgccagtgaaaggatctatgtgtgtcctaaaagaggcaaatgtgatcatcctactaggacgactgagaaaactggggcaaatgaagagggtgagaaagagggagaaacccatgctgtgactgccattcctatacggccaagtgttccaccaaacccaacaatgtcattactcagtcaataacaaacctcctccttacccaccacccagttatccacaaaggccattcctaaatcaaccacaaagcctgtctaccgcacttccaatgactaataccacctttagcacacaccataaaatcaccaactaaaaggaactttgcagcaaaaagcctgtacggttcaccccaaaatccgttgtcatatgctaaacttgatcccatatccactcaataattcaatgctagccataac

SEQ ID NO: 50906 - DNA, 456 bp, Glycine max
agcttgtagaaaggctagactttatacatatcatggcttggcttgggtcaaggataaaagggatgccccacattatttccatgacacaaatgcaaaaatgatgatttggaaactttatgcaaaactggtcatgcatgcgcctatgcggacgctcaagtgtcaaatttttatggtcgggtgatgctagggttcacgattcatttcctctattttaaatcaacccaacgtttccaaaatatgttcttttatcaatttgtgcattcatccgagtccattttgggcgtctgggaaaatcttcacagcattcaccctttaggtgtatacacattttttcaaaaactagctatgatcagcgaatttttcttttaaagaaaagatggaaatcatctcttttcaaaagcatgtcgatttttagctagacaacttcattttctcttttccacctcttttcttact

SEQ ID NO: 50907 - DNA, 498 bp, Glycine max
  unsure (1)..(498): unsure at all n locations
aagctggccgaagcacggtctcttggtatataaatnttttattcttctagattcgctcatggaagaacttgatagttgcctttatcaggcaatatcaatacaatactaacatggctcctgacagaacccagctgcaaaatataagcaagagagagcatgagtcctttaaggagtacgcccaatggtggagggactnggcagcacaagtggcaccccctatggtggaaagagaaatgataactatgatagtggacacgttgccagtgttctactatcgaaaagtggtgggttacatggcctctagcttcacagatttgatattngcgggcaagaggattgaagtaggcctgaacaggggaaagtttgattatgtcgctcctgccagcatgagcaataagagattngaggaaagtggcgcaaagaagaaggaatgagatgccaacactgtgacttcagcttctacttggccgaaaccccaacaaacccctcacaaaacta

SEQ ID NO: 50908 - DNA, 484 bp, Glycine max
  unsure (1)..(484): unsure at all n locations
taagctctntcaactgcacaaggctcttaatatttgaagtttatccttgtggaaccttcacccgacgaagacactgacaaaaacttatcttctccttcttggacaaagtatggcaggctgggggcaagtaaattttcttcccatcaggccttggatgcaactgtgatcgtatacccatataagctagatcttgatgggtattcaagccatccttcgtcttgccttgaatgttaaggagcatcccaatcacactgtcacaaacatttttctccacatgcataacatcaatacaatgtttaacatcaagatcacaccagtacggaatatcaaagaaaatggacctcttcttccatatgcaactctgactnttatccttcttttgggtctttccaaatacagtattcaggtgttgaacccgctgataaacctgctcaccagtcaatggtatcggcacaatatcatgctcttgacttccattaaaagc

SEQ ID NO: 50909 - DNA, 220 bp, Glycine max
  unsure (1)..(220): unsure at all n locations
agaacgccgtcatatatttggcatgggctttacaaccgttttgagacctttttttacaacgtgattgcctccttgtgttattgtcgctggccagacctaccttggtgcatgctggaaaatgtatctctgactgacaacatgtattgatcttcaatacacaaaatgtcgaggtttgttttaactatcgtcccaaatgctggtatagcttcgttgctgcgcn

SEQ ID NO: 50910 - DNA, 56 bp, Glycine max
ctgatgccgagtcgctctaaggacccgggactatcttttttttcctaagcgagctg

SEQ ID NO: 50911 - DNA, 472 bp, Glycine max
  unsure (1)..(472): unsure at all n locations
agctntatagacctacaattctcacacctgtctatgttaccacacccgacatcgaataacactcatccgtgcttgtgggctngacaaactcatcaccttcctacttgtcaaggctactacctcaggcatcagacaatgtccttcaacactagaaaacctatttcgcccataagccgacttagagcttagggggattatgtactatctagggtccataaaatacacatggcatcctatgtgacactccgagtcatgtgtcaacccttcatgtcaaccttagcactggagcacgaatgtctgacccttagcagtcaggctccctaactgacaggttatctctaaccttttattatttgaatatattgcaacccttctatctctnggcaggtagttaattatctacaaagtcacacattatctataaggtaccaatatcctctagctnntatctntaagctacatattatctcta

SEQ ID NO: 50912 - DNA, 438 bp, Glycine max
  unsure (1)..(438): unsure at all n locations
ctgtaagaagaataacaatataggagaatgtctttggttgtttgattatgactagattntaatcataggttaaggagttgtacaactgatggagatatattacacttagttagggatgcttttgaaaatgagaatgagataaatgtttattttcatcatgaagtagatccaattttagaagaagtcccacagatgtngtacttggaatgtgatccaattccagaagctgttgagaatgaggatgatttagatgatgtacctgttgctggccatgaggaaactaagttttaattcatttgtacttggtccgacatggttactataattaattaatatgattaatttttacttgatcaccattgatgcagatgttggtgctggtgagcatgttggtgctggagagcagagagatggttgtgagcacagggatgctgatgc

SEQ ID NO: 50913 - DNA, 336 bp, Glycine max
aagctgtaacctcagtgtctgtcacagtctttaaattagggagccaatccaatccttgtgtatggactctcagccacttatgagagctctttgtactaagctctatgtactttcgtcacgccgcaatccatgccgtgcgaactacttggagtaccctcgcattgtggtcactgaaaccctgtgcgatgaaaggcatgatgctttagtctgacgacactcctctcatggggtagccaagctgtcttatggcgaggacgggattataattaagacaaccccgttgtcccatcaagggaacatttggacatgcttcgcatgaagatagaatcctgatac

SEQ ID NO: 50914 - DNA, 408 bp, Glycine max
catccttagtgagcaagtcgctcaatggtctggctatcttggagaagaccttgatgaatcttctatagaaacctgcgtgtccaagaaaacttctgatacccttggcatttactggtggtggtaacttcttaataacatcaattattgctttatgaatcttgatgccttgagctataattttgacgcccaagactatcgcttcttcaaccatgaagtgacacttctcccaattcagcatcatactggtcttaacatatctatatagtaccagctctagattcgtcaagcagtaatcaaaggaaggcccgaacactgagaagtcatgcatgaagacttctatgcatttctctaccatgtcagcgaagatggctagcatgcacctctggaaagtggcaggtgtgttcataa

SEQ ID NO: 50915 - DNA, 362 bp, Glycine max
  unsure (1)..(362): unsure at all n locations
ttaagtgagctgacgcatgcaagcttgaagagagttcttccacgccagtatttactattgcgtatgcagctcgctaagcgaggcagttgtctcttatgcgctaagcgcaagattggcactaagccaaatatcacttactcgcgctaagcacgagaatggtgctaagcgcgccttcaagttcagaaagccctttntaagcctgatttgcacagaaaaaaaaaaaaaagagtgtgataacgtgaaagaggtctgaattgactgcaaattgtgtgcagagaacagaggaaaagctgagcaaggaagaaaaggtcctaacttttaggcagattctaggtgatagagttattttctaggttcttaga

SEQ ID NO: 50916 - DNA, 427 bp, Glycine max
  unsure (1)..(427): unsure at all n locations
tctggtgggacatctngacttgctntccaatctgacattttccacttattctgccttcttctattttcagattgggaatgcctctaacagcacctntgtcaatgattttcttcatgcctcttaagtgcagatgtccaaatttatgatgccatattctgacttcatcttctctggagaatagacatgtggaggagtaactggtctcttgaggtgtccataggtaacagttgtcctttgatctgctgcccttcattaggacttcactcttctcatttgtcaccaagcattctgactttgtgaagttacattgtatccttcatcacacagctgactgatgctgatcaagtttgcagtcagttccttcaccagcagtactttgttcagactaggaagtccatcatggactatctatcccattcattgattt

SEQ ID NO: 50917 - DNA, 342 bp, Glycine max
  unsure (1)..(342): unsure at all n locations
cagctcgcccaggcgagcattgttgctttctccagaagcaacagccttctggggggatcttctggagggcccaagtgagcctggttgctatttgcacccctatttttactaaatacaccccctgcctttttttggtgattctttttttcgtaaagttacggaaacttacgaatttcgtaacgatacttgttttctttccgtaatgttacggaaccttgtggattacataatcatccncttctttgacttacggaatgttacggaacctcactatntgtgcaacgatgctttcttttgatttccggtgtgtcatggaaccttacggattgtgcaccaatattt

SEQ ID NO: 50918 - DNA, 378 bp, Glycine max
  unsure (1)..(378): unsure at all n locations
atctccttttggttctctacattgtgggagtgtgctcaaatatatggggcaattttgatctgttttcttgcttgattaggttgaattaggggttggtatgagatggccctacgcctataatgcatttggaaacaataggacatgccacattgtccccgttctcttgctattgatgcctaaacgcgcgcccaccaagtgttcggtgaaatgcctcaatggcattagcgtgtgacttttgtaaggagacaacccatggggtattttggtttggcatattttctatttttttggaatatgtattcattcccgaaaaaggctagagtaattgcctcacatatatcctagtcctagaaactgatattntatgcaaaaagagca

SEQ ID NO: 50919 - DNA, 385 bp, Glycine max
  unsure (1)..(385): unsure at all n locations
atgaagacgtggttcgtgatatcttttggtgtcaccctgattcagtgaagttagtcaatgcatgcaatttggtatttttgatagacaacacctacaaaacaaaccggcatagactctcattgcttgatttggttgggatgacaccgactgngatgacattctctgccggttttgcatatgtggagagtgaacgcgttaataatttggtatgggctttacaacgcttctgagacacttttttaaagcgtgatgccctccttggagttattgtcactgacagagaccanacattgatgaatgcagtgaaagatgtattccctgaatgcacaaatttgttatgtatctttcacataaacaagaatgtgaaggctaaatgtaaatcact

SEQ ID NO: 50920 - DNA, 133 bp, Glycine max
  unsure (1)..(133): unsure at all n locations
caaagnatgacctcccatattcagatattcaatattcaaattcgttatttaaataatatctaatgactatattctaaaataaaacacacaaatgttgtgactgaaccgaatgatcatacaataaaatgaaaat

SEQ ID NO: 50921 - DNA, 323 bp, Glycine max
aggaaaacttatagatgaatattctctcctacaacattagagggctgggcaatggccgtcacaacatacatatacagaagggcagtagatacaaatacaaaaacattcaacactgacaagtaacaagttttgagagccgaaatcacaggcagtactccaaagatatcagtccaataaaaaaaaggtcatgtagagaggcatcaagatatcaattccatgaaagaaatgtcatgtagagaggcataacaatacgtacaaatataccagtaatgcatacaacaacaatttcaaattagttttccaatgaaacatatatattcttg

SEQ ID NO: 50922 - DNA, 427 bp, Glycine max
  unsure (1)..(427): unsure at all n locations
agctatttgtctttgtggncacaatatacttatatagtgaccaaattcggacgatgaagctggcatatcaactcaatttcattcttgaactgcttgagttttttacgatgcttccatacattcggttgattgcaaccgtagactcggtgacaccattgtagcatgctaatgagtcatcaactcttacctcacatgctgcaattgatttatctcattcagactctaaactggcaccttttttagcttcattacatgtcaataactgaagcaagcatttctttctctccaatcttccctgctgtccatgttctctcccatgattaatttgtcattgccatcaagaatgcttactatctgtgtagtgcttggtcttatatttgggtcagaacgggtgcatgcagctcctaagcttaccaatctcattaac

SEQ ID NO: 50923 - DNA, 592 bp, Glycine max
  unsure (1)..(592): unsure at all n locations
actttaggcatacgtatttnanttcgtcaccnacttatacatcacaanngngnnnttttgtgtcgtgcgctgcagnacgngacacaannanacncaagctnaagcgccnncaacggcacaagactctgaagatttttatattattctagnggaacctacacccgacgaagacattgacaaaaacttatcatctccttcttggacaaagaatggcaggctggaggcaagttaattatcttactatcagaccttggatgcaactgtgctcttatacccatataaggtagatactgacggtgtttcaagccaatcttcgactcgccttgaatgttaggaagcggcccaatcacactgtaccatacatttgtgctccacatgcataatatttatactgtgtctaacgtctgatcactccactcccgtcgagcatggaaaatggccctcttgcttcagttccaattgctgcgtttattcatctatatgatttaccaaatcaatgtataggtttctactacgttaattctctgtaccattgaaggattatcacataatagggcttttgtcatgatactattttaaagatcgtgagttg

SEQ ID NO: 50924 - DNA, 333 bp, Glycine max
  unsure (1)..(333): unsure at all n locations
actggtaacgngtctactatcattgtgataatctctttctgtgatgttggggacgctacttgagctgccaagactctccatctttgggcatttcctttgaaagatccatgccctccttatgcacatgttttgtagttgcatcctatccgaaggcattatactgacactgcctaacgaaggcaaccactatgtccttccaagaatggactcgggaaggttccaagttagtgtaccaggtaacagctaccccagtaagactttcttggaaggaatgtatcagtaattcctcatcctatgcgtatgcctccatcttacgataatacatctttagat

SEQ ID NO: 50925 - DNA, 320 bp, Glycine max
tcggaagaaagtgatgaggtacaagccctaaatgctaagtcttttatagctcgggtagttaaagagaagttcaagtccatagccatcaaagtctgaatagagtataatgaactattggacgcctatatggccaccgttgaagccttgtaatgagaaacctacaatgcgctatatgaaaaacactaccttcaccaagttttgaggggctatatttggcagcaatagtgagctcaatctcctaagaggtgaaaggaatcatcactggtcaaatgcatgatcttgaagaacgagctaaaggcttgccttatgttcaaaagaaa

SEQ ID NO: 50926 - DNA, 456 bp, Glycine max
  unsure (1)..(456): unsure at all n locations
agcttagatggagaagaagacagcgagattgttattacagcgtgaaggagacgaaacatacctaggtatggtggcgaaggagaagaaccacagagttgtcacgatgctcgagtgcgacgaaaacgatgctcgagcttagacaaaacgattctcagatgaagaacagacaacttcaaggtaaatggacaacaaagagagcaagaaagcttagatggcgaagaagacagcgagaaggagaagacagcgtgaaggagacgaaacatacctaggtatggtggcgaaggagaagaagtagagacttatgacgatgctcgagtgcgacgaacacgatgctcagatgcagaacatagaccttcaaggtagacggagattataagaagaagaagagagcgcgaaagcttatatggagaagaagacagcgcgagcttcatagggctcancgatattttaaaatat

SEQ ID NO: 50927 - DNA, 394 bp, Glycine max
  unsure (1)..(394): unsure at all n locations
tacatgtgctatagtctcgagattatnttctgtcatgattatgtcgncaacataaacaagaatagctgttatatcattatcattatcagaatataataaaagcgagtgatcaactgaggattgacgaaatccctgtgagagaagaaatgacgaaagccgtgtgaaccatgggcgactggcttgtttgagcccatataaggaacgctgaatgcgacaaacaaagttgggattatccacaacaagtcctggagggagcttcatataaacctcttcattaagatccccatgaaggaaagcatggtttacatccagttgtcgaatgtgccagttatgaagagcatcaagggcaatgagtaaccggactagtggtagcttggccacaggggagaatgta

SEQ ID NO: 50928 - DNA, 357 bp, Glycine max
  unsure (1)..(357): unsure at all n locations
agctngcaaccattagaagagtaagaaaatttgattagtagtatgactganaatattagtcagtttgtctgattgattgtgaaagaatgcattaaccgtatcccggtgagagcgcgatccttataatttgagagaaacgactatcatttagtgttgatttttgcatgaatctttgaagtatggactgaatgcatgaaattgaggatgatgaaggccatgtttgattgtgatagccacttagccaaaaagttgaccacgtgcttgaatgatttatcccttgcacccagttttgagctgaatgattgattcattgattaaaccttgagcctatatnagtttatctcctactaccttgtc

SEQ ID NO: 50929 - DNA, 507 bp, Glycine max
  unsure (1)..(507): unsure at all n locations
ctaagcttaagccaggccagactcttgtgcatgtagaggcttctttaaganaaactccaaactccctttgcaaatatgatttcaggcttaaataagtggccttgttggtgctcgtgcgcttagcgcatgtatcgatcacttagcgcatgttagtgatntttggcttagcgtacttctctcacttagcggatgagctgaagcggtgcgcttgatgacctgtagcagtgcgctcagcgaacctgatagctcatcttcttctgaattcttcctcgcgcttagccattgagtggcacgcttagcgaatgctcgctaagctagcagcttggtttagcgaaagagtgaaaaacaacacttttgctaaagttcctatttaacctgaaattgagagatattgattattaaacgcataaaacaaaagtataaattatctattacctatatntaacaaaaagtacttatagtattacanaacaactataaattggagaagttggatacaatatacac

SEQ ID NO: 50930 - DNA, 371 bp, Glycine max
agcttagctaactctataggagacattctatttgagctatggatatggggccagtaccacgtactaagtctatggaaaactctatctctctctcacgtggcagatcagatatatcctcaggaaacacttcaagaaactctctaacaacagggaggtcacacatagaaacctttgtctctacttctaggctagacaagatcatgtacacttgagcatcttcctttaaagatgtcacaacttggttggcagagataaacatcatatccttactcactctagaatcatcaaacaccacactcttatcaaaacagttcaacaagacatgggtggaagataaccagtccataccaagaataacatcaatctgactc

SEQ ID NO: 50931 - DNA, 460 bp, Glycine max
  unsure (1)..(460): unsure at all n locations
nttcgattcattctatgtacccgtagtggtccacattgtgtnntcgtgcattttattctcgctttgtttactttttataccccctgttgacgtgcttaaaccattttacttaagtcattcctcgcttaacttaaaaataaaataaatttccaccgaacgtgtgaattgtattatccgttaacttcggttaaaatgaatttcgaccgttcggtcgtgccgtaaccacgttggaaatcaaaaaagaggtaaaaaataatataataatcaaaaaaacatcttttagtaaaataaagcggaaaatcaatcggacgttttctctttgggatttctcattcttaatcgaattgagtaataactaaagtgaaactaaggctaaaatcaactcgcctagtcaagctcgtccataaaaataggcttttgaagtttgtcatgtcatattctcactaagtaaaatggatca

SEQ ID NO: 50932 - DNA, 364 bp, Glycine max
  unsure (1)..(364): unsure at all n locations
catgtgacaatacctacaaattctctgtacttgcctgcgttaaaaagcatgcatctngcatatgtcaattntactacaagtgacaatgactgtgctgagccattatcatactgtctcgtcttgagtactttggtacttgaagatttttctttgcataatgatgcataagacctctgcatatttaatcatacccgttggatatcttataacaccctttcccatttgagaatacaacaacgactagatgtcaaacttgtgttgtctactctagatcttagagtgtgttccgataagaaatttaaaattctgaaaaattttaaatttgaagaatactaaatatttcaattgaaattttttatcttta

SEQ ID NO: 50933 - DNA, 458 bp, Glycine max
  unsure (1)..(458): unsure at all n locations
ctgcagctgagtatgtatttctaccaaaattagtctagtgggtagcattgggtagacatgtacaaattcacaagtccaagagcctgaaaatctactgtcctgtgacatctattttgcctaaaacacagcattttgacgaaacatacagtttatggctcatccattaccatgatgcaaatcaagtaacactgttgctactgaaactaggatgaacactcttgaaaataggactgatctagggtggagatacagagcatatattcagggcaatggcaaaaaaaagtcagaactatgaatgcttattatggtgatgctattaaattatgtttggatactatgaatctatgataggtttttttatgaagcanactcttatcagttcgcatatcaagtcaatggatgttgccagactataaaatagactcttatatacgactatagcatgaatttacatagac

SEQ ID NO: 50934 - DNA, 430 bp, Glycine max
  unsure (1)..(430): unsure at all n locations
gtcccttagcctgcacacaggcagcatgggtggtgacttcccattgcagccagtgggtgtcaacatagtatccccaaatntatgatttaagagatatcaacatctcaacaacatactgtatgtatctgttagccattattgggcatgggtcaggcaaaaatagaagctattcatcaaaatcataatataagttacatctagattntgccttatagaactgaataaagacattaaaaagcatacaagtctctagcatgcatctgatgtggatatatacctgaatgactgcggtatcttctcctgatttcaacttaaacacaaattctggatcttgcaacttttgcaaagaaaatcgcattacaataaacaatttcagaaacagtgcctggtcaacatcactatttgccctctgttaagcagcatgactaaa

SEQ ID NO: 50935 - DNA, 449 bp, Glycine max
  unsure (1)..(449): unsure at all n locations
agcttatgcgcatatttccttacgaacattcacttgcacaagacattctattaactaagaaaaatgcacccatatacaatcaaggcagcttcgttacctagattatttacatgtacttccaaggtgtatttgttacttacatcacacccatctccttggctaaatttacatacatgcatactcaaagcatnttggggtacaaaaaattgcacatgtgcacatcttggtatttctaatacctatacatacacaaacttcatgatgaatcttgactatctacacaataaggtgctacatttcatgctctnttcaagtttttgctacctaaagttgcatgcaaattcaagtatattttcctttgctgactaanattgtattcaaattaaaaggtatagttttttttggaatgtatttcctttacataacatgcaacatatgtatatatatat

SEQ ID NO: 50936 - DNA, 398 bp, Glycine max
  unsure (1)..(398): unsure at all n locations
gtgtgtgtctgtattatactgtaatatgtatgtgtggctcttgnggttgagttaggcccaaactcacattctaagagtggccatacaagacaagatatagaatggttgtttatgaggagagattggtgtaataccgattgaggaaaagatgacaaaaaacaattaaggtagttagcatatgtaccaagaagagtagtttgcaaggtttaatttttgggaatagaacgaggttaatgacattggaggaatttgtcaagagggatcttatggtatggtttaatttatggtaaattatatcactgaaactttggtctttagcagagttgaaaacttcataacaaatatccaattagtcaattggcctattgagatctaatttgacattcattacaacttaa

SEQ ID NO: 50937 - DNA, 156 bp, Glycine max
  unsure (1)..(156): unsure at all n locations
actattatagattaatctatcaggattatggccaattttaattcttgaaaggcatttcatggatatatctgngctagaattagacaaagacgcttcaacagtaccattattttgtccttgtcatatctatgacgaatcttcctagttgttttcttt

SEQ ID NO: 50938 - DNA, 245 bp, Glycine max
agctagctaccttctggttaattatagcctgatagtcactaactacagcaatattcctaattgcattcgattctttatctgactataatttgagtaaattttaaaatggttatctattatgttttcaggggtgaccattgtcagattagtgagggctggaaagcatcacgtctgatcgcacacctctcccttgagaaacgttgtttatttcatgaagacattgtgtcatttaaagttatgctaca

SEQ ID NO: 50939 - DNA, 358 bp, Glycine max
gaatgatttcaagattaaatccagatcatattcacgaatcaagagaaggttgatttcaagattcaagataagatgaattcatgctccaagagaagaaatccagatgacttcgcaatgggaagcattgacaagattttttaataaacagacatagcacaattttgttttgtaaaagagttttcacagaattttctatgttaccagagttgttactctctagtaatcgattaccagtttcctgtaatcgattactagtggcaaagattgatttcacaagctcttaactgaatttacaacgttccaattgattcaaaatggtgaatcgatacaagatattggaatcaatactagtgatctg

SEQ ID NO: 50940 - DNA, 412 bp, Glycine max
  unsure (1)..(412): unsure at all n locations
agcctgtcataccctaattntgttcagtgtctatcgttcgttgatcttttgatccttgctagttgacttacggtcttgaatgccagttacagtgcatagcaaggaaccattcagtgtttcgatcacgaatgcgaaaaataccaaaaaagaggggcaaaaaggtcttttcattgattttcctgcaccctagctcgcccaggctagcctctggctcacctgggccctcaaattacttcagggttaaggaaccagctctcctgagcgagccagttacttcaggagtaagcatcggctcgcctgggcaagctccagctcgcctgggcgagctgacattgccccaagtgcccattttcctataaataggcatgctacggaggctgaggagaggttccagcattgagtagtgaagaaa

SEQ ID NO: 50941 - DNA, 501 bp, Glycine max
  unsure (1)..(501): unsure at all n locations
ttctgagctcatgacngcagcgatctatgagncacccgccgctgcagctgtgtacaattcatgngactgcctattttgcattcacttaggcccatcccaaatgtaccctgagaggattaagcccatatatgtgaaacttcacttcatccaaaatgcgaataaatctgaaaatgtgaaagaggaaaatgtttccataaatgaaaacccggctgatatgttcacgaagtccctttctagtgtcagataaagcactgcttggacttgtaaattttgaagatgcctaaagcagaatggttgaagagcagtcctgaattgcaagaaaacactcgctgatttggagtcgagggaggagattgtgatgtgtgcctcacaatcacaaatggcacaagcgggaagactataagaggagtcgtactattgtattcgatatgaaatggaatcgcttggcacttagcatgctcaatgggtcttatatcttgtcatgtatgtaggggtgccact

SEQ ID NO: 50942 - DNA, 439 bp, Glycine max
  unsure (1)..(439): unsure at all n locations
agaaacatataaaccaatatacgtatctgcaaaattatcctcaagatgtgatcgctcattatcaattgttcgaccgtaattaaaattaacatgaatagacttatccattactaaagttcttgggttaaacaatctataagctttagatgtgtcagaataccctaagaagatccctttatccaccattgaatcaaactttgtgagtacatctatagtgctaacgatgaaacacttacatccaaatggatgaaagtatgaaataatgtgtcttcttgctttgcatagttcataaggagtcatttttatcatcggtcttatcaatattcagtgttgaacaaagcaagttgtgaaaagaatgtgcctagccttttcttgcnagttctattttactttaactaccctatttcttgaggggtctcgctaagacaagtatgaaaat

SEQ ID NO: 50943 - DNA, 280 bp, Glycine max
  unsure (1)..(280): unsure at all n locations
atatcatggaatacgctttattgcctccagcagaggttattatacctctactcttctagatgattcctaaaactccttctctgcctattacatttnttttgttggaaactgctcttatagggaatggaagaggaatatggtactgctgntagatagaaccgccagtataacattcacctgcgtacaaatcgttcagcgacttactctttacactgttctcatcatctttttctggagtaaagcgatggtgggcaggttcatttacggacgaagaagatgc

SEQ ID NO: 50944 - DNA, 454 bp, Glycine max
  unsure (1)..(454): unsure at all n locations
cccaccattntccatagtagaatactgttaatgtgtctactatcattgtcatcatttttttttcatcattgaggtgccacttgagctgccaggttctccacctttgggcgtattctttgaaagatccatgcccccctttntgcacatgttctattgttacatcctatccggaaccatatncaaaatgtactaatactgcctaacgaaggcaaccactaggtccttccaagaatggactcgggaaggttccaagttagtgtaccacgtaatagctaccccagtaagattttcttggaaggaatgcatcagcaattcctcatcttttgcgtatgcccccatcttccgataatacatctttagatggttcttgggtcaagtagtccccttgtactcgtcaaagtccaacaccttgaacttgtgaggggtgatgatattgggtactatgaacaactct

SEQ ID NO: 50945 - DNA, 414 bp, Glycine max
  unsure (1)..(414): unsure at all n locations
agcttaggtaacttagtcaaaaaattttttgtaaagttgcacgctaagccgagcctatctgggctaagcttatttctttgtggtagccattgggctaagcgagcctggctcgctaagctcccatacttagtgaattttcttaaattattggttcgctaagcaccactatgctgagcttagcgcatatcttttgcaacgttgattaggctaaagtgcatgctatttcgctaagccgatgtgttatatttctgagggcgcgctgagcaagttgtatcctgctaagtgcccatncgtaattntagcctttatttntgcttttaaatttngaataaattggtctaagggaatttgagttctttntagttacagatggcctcgagaaagagggccagagcatatgacatcccttcatca

SEQ ID NO: 50946 - DNA, 443 bp, Glycine max
  unsure (1)..(443): unsure at all n locations
ctaagcttacaagctntnntntatgattgagcttggcctttntatctaataagactntntaaaaagcttgagcttggcctttatagtaaacaagccaagccgagccgagccttacataggctgagccgaaggacctcgacaagctgctcggctcatttccacccctaattatagcattttgtttttggtcttagttgtcagtgatttgtttaaaatggtttattagcgaaatgtgtatactagtctttcgaggaaatttgatctccacatacaaagcaagtcgtgggatatttcacatattaatgctgatctcatttatctctttttttttccaataaatgttgcaaaatgaactttcaaagcaattntatttttcataaaaggaattagagtggctccaataaaaaaaaatattaaaaggaaacaatactttgaagatgaac

SEQ ID NO: 50947 - DNA, 423 bp, Glycine max
  unsure (1)..(423): unsure at all n locations
agcttgcatgatttacattctccctctttcttaatcaaaatcttaattcttcttgacatcatcaaaatcttcatgatttacatcaacttgcctaacaaaagccatttttcagtgattactaaacaaagacaacaccaaaacactaaactggcaccaaagatggggaaggtgtgtgaggattctcattgaatcggcaagatagcaaaagcgagggtttagacttgagagatattagaaggatggttcaagacaacaaggtcaatgtctgtgagagatggcgtaaatgaatagtagtgcagaactagatatgaatgagatgctatgacctgtgaagggctcgagcacatatgtgaaaggctngaatgagagatgggatntgttttgngaagcaaatatgcaattcttttctttttctattctaca

SEQ ID NO: 50948 - DNA, 454 bp, Glycine max
  unsure (1)..(454): unsure at all n locations
tactaagctatagttaaatntaacggcgattcaacgggtaacaaattcattattgtggttntagtgaaacaggtttaggtaaaaacttgaaatctcataatttcaacctaaatcaataaaagttgacataactcaacatccacatcaagcaaatcacacatggctaattcacacaataaattaactcatccaaattaatcaagtaatcaaataacacaagaaaaacatcaaacatctatttttaattatcaaaatttcacgatgttacaactactacaaaaaacaagttttaacgacgctcattcaatgaaaatnttatcaaaatcatcngtgttaaaattatggtgacatctttgtaaatataagtaacatttcaatgacgggtttcatgaaaacgtcattgaaattgcaaatcgacaacaacatttatgaagaaccatcgtgaaattgagta

SEQ ID NO: 50949 - DNA, 419 bp, Glycine max
agctgggtggtactatagctggactattttgttgctgtggtaatcaaatgcagatgtaatgcagtagaagggggtaaagacaatatattactacaattatatgaaattgagtaggtaatactaagaatagaatattagtagcatgaccgaaaataaaatagccgctgtgtcaaataacataacaattgtctcaaatacagggaaaaaaaatactccgacgccatcattagccgttttgacttattgctgtctttaaaaaaaatgtttcccatttctttcgaattgtggtgatgatgccgatgtccaacggtgtgtcattagcaaaccactgcaagtattcataattgtaagttagtactgcacatataaaaattcagttccgattgtactgaagtatatgcataccatggaccaatcac

SEQ ID NO: 50950 - DNA, 467 bp, Glycine max
  unsure (1)..(467): unsure at all n locations
agctntcctaaatgaccctccttgtacctncaagttcttaactcaatcacttttaaagtcgtactcattgagtacaaagtgacttgcaacagtttggtgaataattaaagacttttctctgtatgtcaaattttgatatcatatagttatctaatatgaatttcttttgcattttaggatgtgccgagtaccatgtactcatttatgaaagcgacaagattcactcatctgaacttggaagggatgaagtgtagaatagtttataatcatcctaggaagaccgccaaaattgaaaatggatggagggcttttgcacaaacacaaaatttgcttcctagataatttgagttcctaggtacaacttcgaactntgttntattctaacttcgtttgtaaataaaatacattgctactctaatatattatcaatttttgaacganaaagtgtgatctgaattattactaca

SEQ ID NO: 50951 - DNA, 289 bp, Glycine max
gcacagctcttgtatgtatttatcatatcacggaattcgctgtattgcctccagcagaggttattatacctctactcttctagatgagtccaacaactccttctctgcctattacatatttttcgttggcaactgctcttatagggaatggaagaggaatatggtactgctgtaagatagaaccgccagtataagattcacctgcgtacaaaccgttcagcaacttactctttacactgttctcatcgtctttttctggagtaaagcgatggtgggcaggttcacttac

SEQ ID NO: 50952 - DNA, 447 bp, Glycine max
  unsure (1)..(447): unsure at all n locations
ggaccttgaaactcagctgccantaaaaggcatngttatatcatattgctgattatcccaatgaaaggaagtggataaagttagaatagttctgattgttataggtttcacaactggggaaaatgtttctttgaaatcaaaaccaggctgttgatggaagccttttggtacaagacgtgccttgtacttactgacggacccatctgaattatgcttgactctaaaaacccacttgcaaccaattggtttcctattaggaggtttaggaaccaattcccatgtattgttttgagtagtgcaaccattttttcatccatagcatctttccacttaggatctttaagtgttgttttgacagctttatgaacaacatgagttagaagcaagggtggttggagtctaggcttgacaattccattttttgatctcagtgtcatatgatgaatg

SEQ ID NO: 50953 - DNA, 324 bp, Glycine max
agcttagttatggatcactctatggttttcttgaacctcagtgtatccacaatgcatagaacaaacgtgaagatcatcaacattacattcaaacatgggtcatggaatcacaatgagaagtgtacttgggaccttacctaaatcagtaagttgaattgatgttgtacaatatggatattatgtgaattattggtgcctaactaatgtttttcatattcaaggcacattagcaacttgttgttcggtgtccacgggacaatgttgttgattggttttgttctttgcgtaagaagcctgatgtaacatcaagactgtagtgaacat

SEQ ID NO: 50954 - DNA, 386 bp, Glycine max
tggagagggatgcttaatggaggagaagatagaggtagttataagagagaggggggagcacgaaattgaaggaagaataagggagagaagttgaactctgagttgtgtcttagaagactctcattcatcaaagttacaacaagtgttacacatgcttctatttatagactaggtagctttcttgagaagatttcttgagaaaatttttttgagaagattgtttgagaaaacttacttgagaagctagagcttagttacacacactactgtcataactaagtttaagtgcttgagaagctttcttaagaagattcctaaagatgcttgaggttagctacacatacctctctaatagataagattacatgcttgagatgagaagatag

SEQ ID NO: 50955 - DNA, 282 bp, Glycine max
aagagtccctattgcaacatggagtgtgagttcaaccacttaacacacttgatagaatttcgtctatcggcggaatgtgtgaactctctctctcatcttctaaaggaattggtgtgtgctttgaacttcttgtaaactgaatattggagtttcagcaagagttacattcattagacattacactgacagcttcaatgattcaatattaactttaggatacgaattactcttacctattcacttaattagtcgaaggaccctttgtgtccacatattaatatt

SEQ ID NO: 50956 - DNA, 597 bp, Glycine max
  unsure (1)..(597): unsure at all n locations
nattgtacgtaggatnttangtcngacactantacgaaaacntcanagccntngcanntgtctgtgtacattaccaatggtgagagccctgcaanacgttntagacttttatgcnttantatcgatatcagatngangtataagacacangacgtcagtcgtatctntttagttttgtattacgaagacaaggcttaaatatctagagttcaacttgtagactcatctacacccctgtttttagggtttgttaaaatatcccatttaccatcttctctcgagtgcactccagattcaaagctattcaagatgaaatgcacgctttgactgaaatcaggcaccgcagttttttttgtttaataaaaagtttagttatttcgtgtaaacgttgaagatctttgtgaacaattctcactaaaactcatgtgatatgtgtgtgattcggatctatacatgaataaactgtcattaatgagctacgggaagataatgtaacggttaggcaatattaggagaatatctgtaagattagatatagaaaacaatcgtgtatttttctaatcttgatagaaactatatcacttactatataacctn

SEQ ID NO: 50957 - DNA, 382 bp, Glycine max
  unsure (1)..(382): unsure at all n locations
gataaattactttaatgattntatcatctatgttttttgacatcctttagttnttttaataaggaacaatggtatgaacattgttatggtattcactaaattaatgcgcttccctttttctttgatgtatgggcattgaaataaccagaatgttgctacatatggatttgtatttgaaatacctttatgaaattctattttctatatttggggaagttcttgttaagttatatttttcagatattactatgaatattatttttctcccattacctagcttatcaatataaaatcacaatctacataagctcggataatagatatcttttttggtattaacttggccactaccctcataagtacagacctgatgtcacacctt

SEQ ID NO: 50958 - DNA, 461 bp, Glycine max
  unsure (1)..(461): unsure at all n locations
tctgttgaagattatatatcaatgtattgtgtattnggtttctgcaggtatggagaatagtgaaacagtcaaagaaaaggtggttttaaatggtattagacaaattgactgccatgtaagctttatgtaattttgttgatctattgtattcatgaacgctgtaattattaattttaacctttaaaattagaatgttaatatgaagctggttctctattgtgtcagttaggaaatgatgatggtcttattagagaaggacaatcagaggttgatgatgtcgatcttgatttgtgttacacctacgattgttggtatgcaaaattgaatagtataaactttgtcaataagtacttgtagcttcccatgagggagaatacttgtgcatggaggcatgtcactcggttttgaactcccttgagactcagtttgatcaccatggagggaattacctatgcacaaca

SEQ ID NO: 50959 - DNA, 290 bp, Glycine max
cacgagatcactacaatagtgagcttttttttttacaaggcacaggacagaatagagactgacgtactaaaagggcgggatacatgaaattcttgggctactcacatactgatagtatacgtaagttgaggatacgggacctgtgttatgtaagacataacactcgtgaggtgcggagtgagtatggttgttttctagagctcgtacatgaatgaggctgtgttacgtaagcatgaaagtagagcgttcaaagaaaaggaatcgtactatttaaaggctgaagtacctct

SEQ ID NO: 50960 - DNA, 547 bp, Glycine max
  unsure (1)..(547): unsure at all n locations
ttgttcgtgcactacgcgcactatnaanactcaagcttgacatgagagagtgaggcagagtcagactatctactatatttgtgaccacagaggggtacctgaagatatgtcgcgggggtcaggagaccttggggacgtacaagtgagggtgcatatcgtcatataagcaagaattgaacaatcacagacgacataccagggcatagcttagtacagtgatgaacggtgtgacatactataaaaaggcgaagctcatgcaagtcaaccaactattgaactctgaccatatagcaaagacgcttgtgcggtggctgaccagctatagatcttgagtgatatatggaatatggagtgtgttattagataaccaagggttagtatttctattcaaggcttgtaaatgaagacaagatgttaagatggactctgtggatcgagattcatggtggtgtcaacgacactacgcctgaagagagacgttggctttgtattgctgtgtgatcttcccgattggccacccccacactcctatctatggccgttagat

SEQ ID NO: 50961 - DNA, 423 bp, Glycine max
  unsure (1)..(423): unsure at all n locations
gcttcctcctttaccaccccactcttctcttctttgttgctctnttgatctgaacaccatttcatcttcccctctttaatgggtatctctttgtttcacaaaattccttgccttccatctgtttgatgttctgattatcgttgttagtttgctaaaaccctaaaaagtttgcatttttatgttgccggcgccattgngtattcaaaatttcaacctttttttttgttacacattgttggaaaataaatgtttaatatgggtgtacgcttactggtgctttnttatgctctgaagatgcatgcttgattgatgggatgatccatttccattttggagtggctgtttgcttagttntactgggtttttgcattgattgaatttgctcancattattacattctatgtttgatgcaatttaaagta

SEQ ID NO: 50962 - DNA, 384 bp, Glycine max
  unsure (1)..(384): unsure at all n locations
tagaaagtgtgctaactaatgttagaataaggatgtaggtgtataagtgggtctaacttatgtcttatatgtcatcaagaaaggaaactcttttccatcttttttgtgattgtatggatactaagttgatgtggcaattntttattcgagtataaggttcaatacaacatcaattctttcataaccaattgtcgcaacctacccttttgcgggtgtcgcaacatgcccttttgcgggcgagcgaaggcgaggctcacgggtgcgctttccaaaggaggaaagatgcgcggagtcgccaccaacgtttatttgtgggaaacgtcggaaaaaccgaaggaaaccggtcgaaatgaaaattctaagttcgggagttgtatttacgtt

SEQ ID NO: 50963 - DNA, 447 bp, Glycine max
  unsure (1)..(447): unsure at all n locations
agcaatatctctaagggctaccgtgtcaacaactagcaaactaagaaactcgtcattagtcgagatgttggagntgatgagtacgcttcttggaattgggataaagaanaagtggagaaaaacgttcttatacctgctcaactacctcaagaagaaactgaggaagaagacccaggtgaaccaccttcaccttcacctccaccacaacaacaagatcaagaactatcatcaccagagtctactccaagacgagtaagatctttggtggacatatattaaacttgtaattnggccatacttgaacctaatagcattgaagaagcgtcaaagcacgaagtatgggtcaaggcaatggaagaagagatacaaatgatcgagaaaaacaacatatgggagttagtatatcgtccccctggaaaagatatcattggcgttaagtgggtctat

SEQ ID NO: 50964 - DNA, 298 bp, Glycine max
cactaagctttagccaatggacctaccttgaattaattgccttgattttcctttttagcctctgatccctttccttgttctgaagctcactacaagccttaagtgaaaaaccatgatatcaccatatccttaaggaattttggagctttggaattgttttgggaataagtgtggggggtttttgtttcattggacaacttgatttggtgcctatgcttcatgatgtattttgggccatactagatgtacattgtatattggttaaatggtggacatgctgaatgaattgttgtttctc

SEQ ID NO: 50965 - DNA, 400 bp, Glycine max
  unsure (1)..(400): unsure at all n locations
gcttgtagaatggctagacatgatttatgtatggtttgggttggctcaaggataaaagggatgccccacattatttccatgacacaaatgcaaaaatgattatttggaaactttatgcacaactggtcatgcatgcacctatgtggacactcgagtgtcaaatttttatggtcatgtgatgctagggctcacgattcatttcctctattttagtcaacccaacgtttccaaaatatgttcttttatcaatttgtgcattcatccgagtccattttgggcgtctgggaaaatcttcacagcattcacccttcaggtgtatacacattntttcaaaaactagttatgatcagtgaattnttttcaaagaagagttggaagtcatctctcttcaaaagcatgt

SEQ ID NO: 50966 - DNA, 455 bp, Glycine max
  unsure (1)..(455): unsure at all n locations
agactgaagctatatggagtagatacatgggaccaactcatcttatttattttggaagtcatatctagtcaaggtctgagagaccatacaagtttcctaacgatttctaattatgtgggccattaagtctatcatatgctggcaatagccgagaagcccatgaatctcttcgggggcggagtaggtgtctgccatcgccctggccttggctaacaatcggtgaagttcttgactcccgttcaaggtaagagcaaaccgatccatccacatggttgcctcttggtgtaaagagtcgatcacccttcctctagcctctntttccgcgtatacttgggcatactcatccgcgattctatgctcgtgggccgtggctagacctaactcttcttggtacttggcgatgatagctaacatgttggtctctgtctcgcataaacgctgagacaagctttttt

SEQ ID NO: 50967 - DNA, 513 bp, Glycine max
  unsure (1)..(513): unsure at all n locations
cgtatgctcgatcaccngcgancnagngatanacccgagcgacggaggcatgttgctntgggcacgaaccatatatgttagatgtcttnagacacacgcaccccggactttatattctatgcattccgacagacatcaacaaggtgaggaaggctcccacgtatgaaccacgtgactgtggataggaggataaggggcattccatatctatgggtcgcagggcgaagaaatatatattgtgtcgaaggatactgttacgacatattattgcatgcacgctatcatcggatttgagcgagaagatgtgaggtcgaacactactttgttcgacatgttcaataacttaaggtcacagcctgacttattacccgtcataggctttctaggcttcattagacctatatgaaagccgggcttgcactggcaacccacctaaacttagatgacgatttcatttttgagtttcatctacggctacttcttgtacacgagacaccacatcgcagccatgat

SEQ ID NO: 50968 - DNA, 437 bp, Glycine max
  unsure (1)..(437): unsure at all n locations
gaaaagatggcctcatcaaattccttatttccagtangtaattctatcaatagacctccaatctttaatggagagggttaccactactggaaaacccgaatgcaaatttttatcgaggcaatagatctaaatatctgggaagccattgaaatagggccttatatacccaccacagtagaaagagtttcaatagatggtagttcaccaagtgaaagcataaccatagaaaaacctagagatagatggtctgaagaggatagaaaacgagtacaatacaacctaaaagccaaaaacataataacatctgccctaggaatggatgaatatttcagagtttcaaattgcaagagtgctaaggaaatgtgggacactcttcgataacacatgaaggaactacagatgttaaaagatctanggataatgcactaactcatgag

SEQ ID NO: 50969 - DNA, 395 bp, Glycine max
  unsure (1)..(395): unsure at all n locations
gcttgatatgtctaaagcctatgtctttgttttatangtgtttctggagagaattcttagctctatgggattntcaagtcattgggttgattttattatgaactatgcgcagactgtttcttttgcagctatggtgaatggttctccccatagagttttcacaccaaaagggctctcaggcaaggggatcccttatcactatatttattcattttatatgttgaagccctatcagctatggtgactagatcggtggagcaaggagcattacatgggattagtgtccccttcagcccttatgataactcatttattttttgtagatggcattatcattntttgcacagcaaccactgaagaagcaagccatttatctacaattnccaagctctatg

SEQ ID NO: 50970 - DNA, 505 bp, Glycine max
  unsure (1)..(505): unsure at all n locations
gtggttatgaaacctgtgtatgcatgttgatgctcataactttctaatgcagatgcaatattntatacagtaaataacataatgtaaaagaggaaggaaaaagaagattcagcatagagattgttactatttcacccaacctcgggctacatctagtctttacctaaactaatgagatttccattaacacaactagcaacatgttggacaaaccaactgttggattcttacaatttccatccacttgctggacttccaaactggattttcaccttgtcaaccaactattggacttttagtgtctcctcaccacactaggtcttggattagtgatcacccactcaaccacaacacccactttgtcatgggagaggcaatacaagtatttatttaacctctntaggctacataagtataatttcactctagcatctttgggctacgctcttnaagactctatctaagctactcaccttccataggttctctctattacttctttctc

SEQ ID NO: 50971 - DNA, 410 bp, Glycine max
  unsure (1)..(410): unsure at all n locations
ctgcagcttgttntctctgtcacaatgttctctatcttgccagccaagttntttttccttcctgcaagttcttgcattgtttgaatagctcatcaccgtccaacctggttcgtaataacttggccaacacacggccaacttatagttggtggttcgatctcatagcctcaacaagagcaatgatggcactagctaccttagagcgttccactctccagatagtgcaagcagtcaccttctattggcaacttcagcctccaaggatgccactttttttaacgcctcttagtgttgctgcccattttctttaagaattgctagacttcactaaaaaaagaccttggcagaatccatagcatgttggaacttgactgacctaataagatttttatcanaggccgatacaaagc

SEQ ID NO: 50972 - DNA, 483 bp, Glycine max
tagggtatcatcggatccgggttgtttctgaagacaccttcagtctaacttttggacttgtaatgggcactatggatttttggtgatgccttttgggctcactaatgcatcttctacctttcagtctgccatgaatattctccacccatttctaaggaaatatgtcctagttttttttttatgatatccttatttccagtaaaataatgactgaccgtttaactcacttacacctggtttttcagttagttgttgctaaccagttttatgccaaattcaataattgtgctcttgcgttgattcggttcaatatttgggcaatgttattactgctaaaggtgtatcctcagatttggataaaattacagccatcttactttggccggagccatgttctttacaacataaggggcttttctaaacatttaataagaaattctgagtctctggccgctcctctcatcgatttcttatgttccacta

SEQ ID NO: 50973 - DNA, 368 bp, Glycine max
gacatctaatttgactttcctatgctgtctctacatacataaaacagccccaccatcccaattttgcaaaatcatattcatatatcattggggcatttcaccgagcacttggtgggcgcacgtttggacataaattgcaagagaatgggggcaatgtggcatgccccattgcttcagaatacaacataggcctaaggccttctcattcaaatcctcaattcaaaaaaacaagcataaaaacaaaccaaaaatgccccacaaatacaagcacattctcacaatttggagcaccaaaagatgaagaaaatataccaatgggaagctaaaaacatcaaggattgaatattacttgtggagtgaatataata

SEQ ID NO: 50974 - DNA, 401 bp, Glycine max
taacttggttacccatctggccatgaattaaaaatgtgcacctgtcgccagactctgtgctttatgctcctctgccaaccaccacacagacctttgcccttctatgcagcaacttggagcaattgaatagcctgaagcttatgctgcaaacatctacaatagacctccgcaacctcagcaacaaaatcaaccacaacagaacaattatgacctctccagcaacaggtacaatcccgggtggaggaatcatcccaaccttagatggtcgagtccttcacaacagcaaccacaacaacaacagccttattttcagaatgtttctggcctaagtagaccatatgttcctccaccaatccaacagcaacaacaacagcagcagcaacaacaacaacccaaaaaca

SEQ ID NO: 50975 - DNA, 430 bp, Glycine max
gctactgcacatccgaccattattctgattccaccctgtggacatcaacaaggtcgggataactccctactaatgtacaacgcgactctggctaggaggatatgggggaacccataactatgggtcacaaagggcaagaaatatatgttgcttcaaaggaaactctcacaacatatgatctcaagcacactatcattggatgagagcgagaatatgtgaggtcgaacactacttcgtttgacatgttctataacttctgggcacaggctgacttattaccttgcataggcttcttacgcttcattagacctatatgaaagccgggcttgctctggcaacctacttaaacttagatgtcgatgtcatcctagacgttctatctccgtctcacttcttttctcactagacgacaacctcgctgcccattgat

SEQ ID NO: 50976 - DNA, 389 bp, Glycine max
  unsure (1)..(389): unsure at all n locations
ttctgttttcctaaccttgttcttcttctataacanaagtgtgttatatcttttcattttcttctctctttgccaaaaagaattcaacaaggactaatcacctgaattctttgtgtctctcttctcccttttccaaaagaacgaatgactaaccgcttaaattcttttgtgtctcccttctcccttttcaagagaattcaaaaggacacagtttgagaattcttttaattcttccctttccctctaaataaaagatttcaaaggactaaccgcttgagatatctcttgtttccccttacaaagattcaaaggactaaccgcctaagaattctttgtcttaacacattggagggtacatcctgtgtggtacaagtagagggtacatctac

SEQ ID NO: 50977 - DNA, 410 bp, Glycine max
  unsure (1)..(410): unsure at all n locations
attacactnccgactgtgagccttctttattgatgacggccatactacatacatgcttcatgagaacatcatggatcactgcttcttcattaatgcatgggagagactcacaacgacccttgcgatatgcgaggattatactcactgcgcacttaaagatacaagtttgactgctcaggatgctctatgacatgcgtactacttatacacgacagatgtgggagacacatgtatgtcctctcttcaaatccacaagggtactctcgagcattttatgttgctatcaagacacataaaccagagttataatgttggactagtctactctggcgtctgatctgatgtgtcctgttacaaatgtacaatgagtgctgaggagggttctcggcacgatgtgagccgttccttgt

SEQ ID NO: 50978 - DNA, 135 bp, Glycine max
gcatcatgagagtatcagctgattcagacagatgtaacgtggcctggaccatcacctttattgtaaaaaatatctattacactatatatactgatgactgtcaccataatgacgtggaattgcatcgatctagtc

SEQ ID NO: 50979 - DNA, 235 bp, Glycine max
  unsure (1)..(235): unsure at all n locations
tcattggattanaacgagacatggatgtgattcacaacacgttagaagggttgggctgaacctgaaagacaaacgcttgatcattgcgtgccatgagcctttgatagggcaaattggctagttgaagagcagactctgactgggaggcacttaggcgtacatgcacattgggctatataagatngatagtaccgacacgtgtgatgcgagaaaaactttactcgttctcatttag

SEQ ID NO: 50980 - DNA, 482 bp, Glycine max
  unsure (1)..(482): unsure at all n locations
ttaagtcacctgagctgcagctgctaaaagacaattacctatttgttgtgagttttaagcttggaaagaagccctgaaagcacttccgcctattggatcaagacagcaaaagtcacatattaattaagagatgggtgcctgatcacaaaatataaggctgacctactcacaaatcaagagttgaattgaaagcttttataatatgtctaatgatgctagcaatttttcctttgatatacattattatttactctgtgtaaaaaatgataggcatgcatgatgagatgctgccctggttaaattgtcaaatttaattcatgtcctatatatatgtattntatttaagcaaagttgtgtcttggaagcagaatanaggaaaaggaaaaggaacctgaaagaactggaagaacaagtcattgaaaagagagacaggaacatgganagcttcngcctgaacttgagatgccttctttatctcatct

SEQ ID NO: 50981 - DNA, 402 bp, Glycine max
tcagcgaagaagcatatccagcagatggtggtgaaatgttctaatgtattaaacctgcacgcaaatgtaaaaggttgcggaaagctgaagatactgaaagatatatgaatcagaaaaacaataaactttttgcttcaacagcaaactttctcaaaccatcttctgcctccaatcctgcacaatataagcatggccaaggtgattttagtttgctagtgcatcttttgttctgtctttataaaaatattttggatcatatctcgtatctttgaagtcaaattggaagtatatctatcaaagttctattctataacgatgtattacagaaaacgtaaggctatgctcgttcatttctactatttagggaaaaggaaatcaacacacaatgtgagagacttcatt

SEQ ID NO: 50982 - DNA, 316 bp, Glycine max
  unsure (1)..(316): unsure at all n locations
agtaacgcacttctcttgcaacatagcacgatcatgatccgaaacacgcgggtggacttgctcatctcagtcctagaaagaaagctcattaatatgggtacccatgatacataagaagtcaactaattcagagcatgtgttacgtaactcaactcacatacgtgttttgagacataaaatacatgttctacatatgatacattcacatcacgggcaatggatattgatgctctcctctggatgatacacccactcacggcatacacacgtaatgaggctgatanactttaacattatgtggtaactacatatgcac

SEQ ID NO: 50983 - DNA, 414 bp, Glycine max
  unsure (1)..(414): unsure at all n locations
actaagcttcttccacacccggctcagctctctgtaatagagtgttattactttatctaggccgaggtggtggcctatcacttttggatcttccctgatcttgtccattctcagttatctccttcctttccgattgcttctttgaggattctccatgcatttgctcattgaatgcagtcatcttttccatttgtatgaagccgacaaccctcacccttaattcgtctagcattgtggatgggttttttttttgcaaaggcagtccaagaaaggtcttgactttaagcctatgatcattgactacaggctacttctggacttagtcccctaatccaaaccaagaatgaaaagaatctctctatgaagttgtgaagagatttgttntcttcctaccaaatattggctagagctact

SEQ ID NO: 50984 - DNA, 479 bp, Glycine max
  unsure (1)..(479): unsure at all n locations
agctntannaattgaattaccatatatggttatctattacacagggcaaattntgaattcaaatattaatagctggttgtaaatcagttttggctactggtaatcgattacatcctctggtaatcgattaccagagagtaaatttcttgtaaaagactttctaacttaaaattcttggccaaaccttttgctacttcaattggaattcccttcctatttaatataccctttctaagactctatagactgtcttgatcatccatcttgaatatctttaattgctttgtcttgaataaagctttgagacgcatgtgatcttttggcatcatcaaaacatcggcttgatcctttgtctacacatccaccgtagataaacaggaccacaacatttgatttctctgaccagatgcacaatctagtgaatcatgatgtcaaagaaagcanggggaaaatacatctccaactgacacagtataatt

SEQ ID NO: 50985 - DNA, 423 bp, Glycine max
  unsure (1)..(423): unsure at all n locations
aagcttctaaggaggtgagcttagttatgagaggagtgtagcttatctctatcttcccaaggaagttntctcaaagaagcttctcaaggaagttntctcaagaaagcttctcaaggaagctacctagtctataaatagaagcatgtgtaacacttgttgtaactttgatgaatgagagtcttatgagacacaactcaaagttcaacttctctccctttttttcttccttcaatttcattctccccctctctctttctctccctctttcttttcctccattgaagcatcctctccaagcttcttatccaaggctcatcttggtggtgaagctctttcttccatggcttattccctagtggatggcgcctcctctcacctcttctcctttgtcttccgctgcatctncatggtggaaaatcacca

SEQ ID NO: 50986 - DNA, 330 bp, Glycine max
  unsure (1)..(330): unsure at all n locations
gtcactttacatgtgtcacactcttgagcacatagtgccaatatatagaccagatgtcatgcccagcaccatcgatcaatattggtattgctatattccttagggaattacgtctcgttgacaaatgggagtggttgaaaatattagtttttatcatggcatggaagtgcctcagtatgctcaataattcatgtcctagtgaggtttgatgtgagaagtaatgtctttagttagagatttgagttaatacgccccatgtaggtcaccgatatgagacatagagccttcattngacacctaagcaagaggaagagtatcgcgagcttctat

SEQ ID NO: 50987 - DNA, 371 bp, Glycine max
  unsure (1)..(371): unsure at all n locations
acatgcattacagtgaggctggcctgtatacttntctattctattacaaagaaaaggttctagaatgcttcattgaattacaaccaaattatttatttatgagattaattgtatgcattttctatgtgtgtgtgtgtgtgtgtgtgtgcgctcctggattttaaactacacatatatttgagtgccattatatattgatgattactgtacgcaatatataatttcataacttaaatgctagtgatagaaccctgtcatccctgaagaaaaagcccatgtatacatattgaaaaatcatacatgcttggctaaatattcctaaaccacacagatgaaatgtcaagcaacagatctttatatcattggttaag

SEQ ID NO: 50988 - DNA, 380 bp, Glycine max
tgtgatgatgtttgcgatgtttatatgctgaaattgctgatggaaatctgttagagacgaagggtggaactaacccaaggttagaaagtgagaatgtgatgttatgagtgaaaaaaaaagagtgagactttgagagttggaaggctaagtctgaattctgtggtaaatggaggttagagtgagttaatactagcttgaaatgtcatttagaacatgtgagaaaggttaggctgagctagagagaaaaacaaatgaccaaagtgaacaaagagccattgcttagggcaaattgggtgttgaagagtcaaattttgattcggtggacatttacgtgtaaatccagtttgggcaagtttagattgatgttatggacttgtgtg

SEQ ID NO: 50989 - DNA, 514 bp, Glycine max
  unsure (1)..(514): unsure at all n locations
cttgagccanaatcctgactcaccataaaccttgttccattgtgagaatgtcaattcttaccctcggaagcaaaaaaaaaggggagagggaaaatttccaatcaaagaggaagcaaaaaaggagagaaggaaaatttccaatcaaaggaaaaaaagagaggaaagggaattcccaatcaaagagtgggagaaagcataaagaaaagaaagaatattcccaatcaaagaatgggagaaagaaaaaagagaagaagaaagggaagaaagttcccgatcaaaaaaaaataatatgcagaaaggtctttggaccggacaatatctgaacaatacagaattgtcaccaaatgaataaaaagaaggaaagggaaccatgacctanaatggtcttccncctttagttgccaggcagaatcttgtgcgctagctaacctttttcgccccgcactataccagaacagaaaaggaaaaagcctgataaatcaatagccaaatacacacaaaagccgaaaaaaaa

SEQ ID NO: 50990 - DNA, 336 bp, Glycine max
agcttatgaattccttctttgcccatagtgtttcttcttatacatagcgacagatactacctcctcaggtgtcactttcccatcataatccctgccagaacatgactaagcattggaatgacatttatttccaacagttagtcgtaaagatttttaacggaaaagagataaacacctttatccatgtgtcagtgctaactagaatcttataaattctatatgaatcgaaaacttgggacggattcatttccaggaggagtaacggacacagagttctgcttctggttaatgacttaattcataagagagagaggatcccaagtcatggatgcaatt

SEQ ID NO: 50991 - DNA, 408 bp, Glycine max
  unsure (1)..(408): unsure at all n locations
ngagatgaggaagtgtagaagggtgaaacttcttgctnttattctttcaccacagagtggtacctggagatatgtcgcgggggtcaggagaccttgtggacgtcaggtggggtgctattgcccaaaaccaagcttgaccaatcccgacccaacccgggcatagtcagtcagtgagaacctgtgatgtacctaagcaagcgagctcctggcagtcaacagataaaaggaacaaagaccacaaagcaaggaggcttgtgtggtggctggccagttgtgaatcttgtgtgatatatgggttatggtctctcgtaatcgattaccaagggtgggtaatcgattacaacgcttgaaaatgaagacatgangctaagatagtctctggtaatcgattaccaggtgtcgcaacct

SEQ ID NO: 50992 - DNA, 378 bp, Glycine max
  unsure (1)..(378): unsure at all n locations
tggaattttgcaagaaataattatatagcgcctaactaaataggatattgagtttttttttttacatgcatttacttaacaagaaacttaaacattagtaagttttaaactatatagttggcaaaagaacaagttgaagagtgaaggtttccaaacaacaatccttgacaaaaaataaaaaaagctggttctagcaaataaatcaaatcaacactaagaatgagaaataataccagcatccctatccaaaaaatattcaaggatgagacgtgaaaaaggtcaggattttcatgctgctaatgatatatctaacataataatcttgttccttntataccttntagggttattatggagatggacgggagtggtatcgat

SEQ ID NO: 50993 - DNA, 417 bp, Glycine max
  unsure (1)..(417): unsure at all n locations
ttggtgacaactttattttcatccaaatgtnttttttgcatcagaaggttttaaacgggaaaaaaattaattttcatgagaaataacttttgaaaaaatatatgatgtacaactaacctcgttgaatattgtccaaaaattttcccaaattatttataaagtgatatgataatatttagaaattttgatgttaaaatacggttgtaggacaacaaagatacaataactatgaaaaatagattcttgtaatttgtttggcttgagaaaaatatgacatattattaaggttaaggaaattccctattaaagtttataaaattcagaggtgtgtaagtactttttctaaattaaaaatagcgtttaagaataatttcagtgttaacagttaaattggaagaaaagtttctataatgagtt

SEQ ID NO: 50994 - DNA, 81 bp, Glycine max
cgctaggtgcgccgaagaaacatacaactcattggatctagtacgaggaggccccaccgacgctcatatcagaaagtggcg

SEQ ID NO: 50995 - DNA, 491 bp, Glycine max
gtgacggtacttaccgcgtgccaaccgaatttcgattaatatcgtaagaacaagctctaataactgtctataacggctactatcttctataatgagcacgaagcagaatcgtttctgtaccatccttgcagcgataatatatgggaaagataatccaagcgcttgttgagacacagaatgaacagtggtgagaaccctttactactacacttcctccaatttcatgcctataccttggatgtggatactttcgggcaaaaaacatgcgagcacaggaactgtctcttctagaacaaaccctaatgatgaacatggtgactgtacctattaatgctggacgcattgtgaaaccacacttgatcttgatcaggctgccgatttcatcttcatgattgatgtatctatacgctctgtcacttacctataactaaccatacttgttgattgcaggaggaatcatgctttatattccagaaagctcctttattaat

SEQ ID NO: 50996 - DNA, 354 bp, Glycine max
tttgggcttgacgaccacgatcaacaaagtactttcgacacctactgtatgttgatttcaccaacgctgatatcggtatgttgcgacaatccttcaaaaccttatttatacattcagagaggctggctgtcatgtgaccatattgacgtccttctctatcataagccatggtctatttttcctttgaaatgcgatcaatacatgttgctatcgctggactcagttggcgaaattgttctaaattttgataaaaaaaatatgcttgcaaggagtgtagcctgcatgaaattatttaacaacaacaattttacgtatatgtcacacttatattaaggtgagcatgatcaacgaaat

SEQ ID NO: 50997 - DNA, 491 bp, Glycine max
  unsure (1)..(491): unsure at all n locations
nnttggagtagaaacatgggaccaactcattntatttcttaaaggaagtcgtatctagtcaaggtctgagagaccatacaagtttcctaacgatttctaattatgtgggccattaagtctatcatatgctgacaatagccgagaagcccatgaatctcttcgggggtggagtaggtgtctgccatcgccttgggcttggctaacaatcggggaagttcttgactcccgttcaaggtaagagcaaaccgatccatccacatggttgcctcttggtgtaaagagtcgatcacccttcctctagcctctntttccgcatatacttgagcatactcatccgcgattctatgctcgtgggccgtggctagacctaactcttcttcgtactnggcgatgatagctaacatgttggtctctgtctcgcataaacgctgagacaagcttccttttggactttgaacaagcaatcaactcctctttcagaaccatgctat

SEQ ID NO: 50998 - DNA, 521 bp, Glycine max
  unsure (1)..(521): unsure at all n locations
ntgggttgcatcgactgaccgccagcctatcagtgagctgcacgctgcatgctagcaagtacatctttgaccacagtttactttcttaacataggaaccgcatctaactcctcaggcgtctctgtcccagcataataccggcctgaacatgactacatatgggaacgacacttaattccctccgttagtgtcaacatttgtgacggaaaggagaaaaccaacccgtatccaacggntcagcgctatccagaatcttagaaattctatctgaatcgaaaactacggacgggatcactttccagaggaggaacggacacagaggtgtgctacatgttcatgacatgagctctactacagagatgatcccccgcactggtgctgcttggggtatgcccgaagcgctccgttcatagaatgacaccacatcccctcctcatctaagatgacagagacatacgatgggtgcaaacttgaggatagacatgtgatatactggatggccaacctactactcttactcn

SEQ ID NO: 50999 - DNA, 456 bp, Glycine max
  unsure (1)..(456): unsure at all n locations
ctggctaattgactntttcatttcatgagacatattgtattgaggaatngtccctttgattgagtatggtgtacattgatttgcttctttgaattaaattagacaattcaatctttaaaaaaataaaataatgaataatacgtttatgtcattatttcttttgtatagttttaacatatttattttgttgtagaattntntatttttttcatatctaattattttttattttaaactatttttgtgttattattttttatattgcatgatttgataatggagcgagataagatagaatattttatttattttacctattttcgatttacaaaaactttttaaatattaaaaaccaaaataaactaaaactcaaaaatcaaaacataaacctagtttatttttcaaaacttctaaattgttaaccaaaaatcacccacaatgagacctaagttattc

SEQ ID NO: 51000 - DNA, 176 bp, Glycine max
tgattagttaacacacaagaggaagaaactaagtatttattacctctacttaacagaaaatacttataacatttcataataaccctagattaggagagtttgatacaatttataccagttttatacacacaaagttgtcgctctcaccgactaacaggaaacacatttttttccac

SEQ ID NO: 51001 - DNA, 452 bp, Glycine max
  unsure (1)..(452): unsure at all n locations
aggctgctcaattgctccaggttgctgtatggaatggtttangtctgtatggggggcagcagaggagcacaaaccacaaacccttgcgacaggtacaaatttctgattcaaggccagctgggttaccaagttgaccaatgcatccagtttgccttcaagcttcttagtttcagatgatgcagatgggtgtgcagctacctcatgcactcctctaatgactatggcatcaattctggcactaaactgctgggagttggaggccatcttctcaattaaatttctggcttcagcaggagtcatgtctccaagggctccaccactggcagcatctatcatacttctctccatattactgagtccttcataaaaatattggagaagaggctgttctgaaatctgatggtggtggcaactggcacatagtttcttaaatctcttccagtactcataca

SEQ ID NO: 51002 - DNA, 491 bp, Glycine max
  unsure (1)..(491): unsure at all n locations
tatgtcttcatgaccgncgatcttagagtgaccgaagcattcagcctaagctgaatacaaccgatattaggttatttatcttaaccctgggtagcttaacggacccaaataacctcagatgcaggggtgggcccctaacgcgtgagactcacagcttaacgcatgaaccaaagatgcgcctaacgcaagggttgcgcttaacgaaatgactatttttttttagaaaatatttttctaaagttattttttcagtcctcttgttgctttgaaatngaaaaccccttatgttaaagcattcaaaagatggctgatatactcctatgtacaaactatatagaaagttccaatgattaaatgcatataaaaaaacaagataacgaatttaaactaggtgcctccagaaccttcttaacgcatagctgagctttactcactgggactatgtttggtctacttaacctctgactcttcatacctgaacagcatggtcg

SEQ ID NO: 51003 - DNA, 387 bp, Glycine max
  unsure (1)..(387): unsure at all n locations
gcttgcataccccaaggatccattaggaaatcacttgtgaattagagccatgtgggtgggcttatgggccactttgggatagacaagacccttgtcttactcaaagaaaagttttattggccccatatgaagaaagatgtccataagcattgcactatgtgtgtggcttgtttacaagccaagtctaaggtgatgcctcatgngctatacacacccttacccatcccatctgcaccttgggtagacattagtatggactttgtccttgggcttcctagaacccaaagaggtgtagactctgtctttgtggtggtagataggtttagcaagatggcacactttataccatgccacaaggtggatgatgcttcctacatctcaaaactc

SEQ ID NO: 51004 - DNA, 276 bp, Glycine max
  unsure (1)..(276): unsure at all n locations
ggacactcatcttgactttgctatgctgactctacatacataaaacagccccaccattccaactttgtaaaatcatatacatatatcattggggcatttcaccgagcactnggtgggcgcagcgttggacatacattgccagagaatgggggcaatgtggcatgccccattgcttcagaatacaacataggcctaaggccttctcattccaatcctcaattcagaagaacaagcataataacaaaccaaacatgccccacaaatacaagcacattc

SEQ ID NO: 51005 - DNA, 427 bp, Glycine max
  unsure (1)..(427): unsure at all n locations
gcttgtatggtaagaaaagagcatcactttgtcatctaataagcataaaaaaaactataagtataaaataaagtagatgtaccctagtggatgtacccttcactagaactgatccaaaagagatgtaccctctcttgttctcagtcaaacccaagtagatgtaccctctacttgtaccacaaaggatgtaccctccaatgtgttaagacaaagatctcaagcgattaaacctttgaaactntgtgaatggggatacaaaagaattctcaggcggctactcctttgaaatcttttgtataagggaaagggaagaatcaaaagaattctcagactgtgttgctttgaattcttcgacaagggagaagggagacacaaaagaactcaggcggttagtcctttgttctttggaaaagggagaagagagaca

SEQ ID NO: 51006 - DNA, 413 bp, Glycine max
  unsure (1)..(413): unsure at all n locations
gggaccacaatcaacaaagtactttctgcacctactatatgttgacttgaccaatgctgttattggaatgttgcggcaatctttcaacaccttattcacacattctgatagggttgttgtcatgtgaccatatcttcatccagatgtatcgtaagccatgcttcatttttcctttgaaatgcgatcaatccatgttgctatggctggactcaattgacgaaatttttctaagttttgatcaaacacatgcttgcaaggagtgtaccgctgcatcaaattgttaccatcaaaagttgtaggtagatatgaaactcatatntacttaatgtataaaataaaccttaagcaatttcttgaaacttctcttttttttcgcgtcgttgaatttgtgattgaaatagctcgctatgtgt

SEQ ID NO: 51007 - DNA, 248 bp, Glycine max
  unsure (1)..(248): unsure at all n locations
aattctatgcgaaactggttatgcatgcacctatgccgacactcaagtgtcaaatttttatggtcatgtgatgctatggctcangattcattntctctattttagtcaacccaacgtttccaaaatatgttcttttatcaatttgtgcattcatccgagtccattttgggcgtctgggaaaatcttcacagcattcacccttcaggtgtatacacactttttcaaanactagttatgatcaagtgaat

SEQ ID NO: 51008 - DNA, 583 bp, Glycine max
  unsure (1)..(583): unsure at all n locations
cggaatcgacctctngtattgtgttatcgatatcttttnnccannnnaaaagagagggcggggnnngtgtttgatgcgatcgtagnccggccacanannanacacacgcttatccttatggcctgccagcggactgcacacatcgngcctctttgtaangattaaaccaaacccctacaatggaagggccactcccaccttatgaagagtgtgccacggcaagacgatacgggaagagataccaaccttggaccactgctccaccaggaagacctatctccccatgacctacccaatctaacaaccgccgtcatattcttgtctcaacagctcaccccaacaataaaattaatcggagagagattcggacagattaagcgcttgaatatatgccacacacatcaaaggccttcctaatgatgccacattgaatactacacctatatcatggactaaataggtgccccacatacagacatacacacttcattttacggtgccgacttatgaagagcctatagcaggcccacatataaagacttaatcatatgtcaagatacggcgtcacttcgcatgagggcag

SEQ ID NO: 51009 - DNA, 446 bp, Glycine max
  unsure (1)..(446): unsure at all n locations
agctnggttacctcattcttcactacttatataatcaccgggttgagtcttctctgtggctgtcttattggtttagccccatcctctaaatttattcgatgcatacatgtggacgggctaataccaggattgcccgccaaggtccagcctatagccttcttatgcttcttgagaactgataacagcttcttctcttgctcatcagcaagggaggcatatataattattggaaaacttttgttatcatccaagtaagcatattttaaatttgatggcagaggcttcagttttggtgtgggcggctggataatggtagaaagagatggtttcttagcctgtacctcataaagaaagtaagaggtatgtgtacttcctgaaacatgtgtagttctatctgactctagaaaatcaatctcaagagggaaaacatcaccagacatgtaatc

SEQ ID NO: 51010 - DNA, 295 bp, Glycine max
  unsure (1)..(295): unsure at all n locations
cgcanaatggaagcaaagatgtatctctatgggtgtgatattaccctcagtaatacattcttaacaacattacccatttacttgttgtctctttctagaatcccaataaaagtggtgcaaaagatagttactattcagagaaattttctatggggaggtgatattgaggccaacaagatctcttgtgtctaattgggacacaattatgtcttttcttaataacaaaggggggttagggattaaagacttgatcaaatttaatgaggctttgcttggaaaataaggttgggagttg

SEQ ID NO: 51011 - DNA, 320 bp, Glycine max
cagccttctggaggaatcttctggagggaccaagtgggtctggttgctatttgcgcccccttttttactaaatgcacccccctttctatttttttggtaattcttttttcgtaacgttacgaaacttcatgaatttcgtaccgatgcttattttccttccgtagggtatgaatccttatggattatgtatttactcttttttagctttcgaagaagttacggaaacttacggattgcgcaaaaacacctctttttgatttccgccacattactggaattcacggattgtgcacgcctgcttccttttgatatttgacatg

SEQ ID NO: 51012 - DNA, 497 bp, Glycine max
  unsure (1)..(497): unsure at all n locations
tgtgttgattctttcttgtatcatcaaaaccttcatacttattcattcacaagactntggacgatagataaagtatcagtcattggacgatactgcttcagcatccagtcttgcaaagacaagtgctttaacacttggctcgtagtacaaaagcaatgtaacaattacttgatctactaaaaacaatcatttagaaagtaacatccataggttcagtaagaaactcgtgtcgcaacacacaaaagtgaagatttaaattgtcttgtcttgacattcttaattccttttgtcttatgcttttaacatttcttttgatttatatgttgaaagtcacctctaaacactagacgacactggcagaatgtacttctttaaagatatgtngcagaaagtgtttggtgtccctactccctttctctgcatagtaacggcctcgtgtccagcgccaaatctattagacaacaactacttgtgatctctcaacggatcaaagctct

SEQ ID NO: 51013 - DNA, 151 bp, Glycine max
gcaactgatacgtcactcacccgcgaatttaactcctcactctagctctatcttgaaagcgcacacgccatactacgagaatacattttatcgcacgtgacaactacacctaacacatgcgctggctatctagagtcatgagtgatattca

SEQ ID NO: 51014 - DNA, 432 bp, Glycine max
tcctagtcatctactctatctcatccgcttaaagtatatgtattggggaaaatatctctgctgattcaaggtgtcagtggcaatatatgaattctattacatattaaactaacagattcttaatatactgcaacttgtcatgaaactagagagggaaggattcggaaggtgctgacacttgtaacttggtactagccgtacttcataacacatgttgggacattttgtaacctaagtactagttctgtgaaggcaatcaaagaagccctatttgagagatgaacacatagttccacacaatagtgcctacttcatatccctggtaaaaaaaagatgatcaaaggcaaaggggtgagttctgtatataattcttggatattaattcaaactcttatcacacttatatgagctcgataacaatccatattttta

SEQ ID NO: 51015 - DNA, 448 bp, Glycine max
  unsure (1)..(448): unsure at all n locations
gatccttaagcgactgcagctgcagctgtaaatggtagacatgatcatgtttggtttggnttggntcaaggataaaaagggatgccccacattatttccatgacacaaatgcaaaaatgacgatttggaaattctatgcaaaactggttatgcatgcacctatgcggacactcaagtgtcaaatttttatggtcatgtgatgctagggctcaagattcattttctctattttagtcaacccaacgtttccaaaatatgttcttttatcaatttgtgcattcatccgagtccattttgggcgtctgggaaaatcttcacagcattcacccttcaggtgtatacacattttttcaaaaactagttatgaatcagtgaattttccaaagaaaagttggaagtcatctcttcttanaagcatgttggtttttcagcttgacaacttaatttt

SEQ ID NO: 51016 - DNA, 498 bp, Glycine max
  unsure (1)..(498): unsure at all n locations
ntagcttcttaaggaagttntctcaaagaagcttctcatggaagttttcttaagaaagcttctcaaggaagttacctagtctataaataaaagcatgtgtaacacttgttataactttgatgaatgagagtcttgtaagacacaactcaaagttcaacttctctccctttttcttccttcaatttcgtgctcccttctctcntttctttagcaaatgctcacccccccctctaaaatttaattggattgggcttctcccaattcaattaaatttattttcaaccacacacatcaaatattcacttaatgcatgccaaattagaaaactacccctaatacaaaaaactagtctaggtgccctaaaatacaagagatgaaaaatcttacatttctagggtaccttaactatattgtggagccctaaatacaaggcccaaaaataatgaaaccttaatctaatatgtacaaagataagcgggctcatacttagcctatggg

SEQ ID NO: 51017 - DNA, 115 bp, Glycine max
ccgcacttgccctgaagattaaagttgttgcattctttctggccagtcagaatttaatccgccggcaatatcttacacttccctgcatcaaaaggtaccacccaaataaaatatt

SEQ ID NO: 51018 - DNA, 384 bp, Glycine max
tatctgatggcaacttggaagtgtcaactgctgattctgtatcatatacagggaatgttttttctcctttggatgtgaatgtccatgttagtgttcgataacaaggttctggtattgtccagattatagaattgtaactttgtaaccccttctctccctatttatttctccgacggatggaaaataagaggaccatctggatgtggatgtaaattagtatcctttaggatgttggaactcggaagagtgatttaatgagcttctgatttcaaatattcattcttcttccaaatgaatgaaatattaacttatatatacgtgtgctgttaacatgtttatgtataactcgtgatgtaattacgacaaatgcaatgacaatgattc

SEQ ID NO: 51019 - DNA, 502 bp, Glycine max
  unsure (1)..(502): unsure at all n locations
cagggtnattagatcatctcgacccgngatctctgagtcacctgcggctgcatctttgcagattcctatcggaaacgttcttttatctttcngaagcgcctctgctacgatgttcttaacggaaacaattttccaagccaattcgaaagatagagaagtgcctaaggagctggacccccttcttcttcatttcctcccctatttataacaaaatgagggaggtgggtgccgcccagctcgcccaggcgaactcatctcgctcatgcgagcanggttgcttcctccagaagcaaccgccttctggaggaatcttctggaggggccaaatgggcctgggtgtatatgcaccccattttactaagacaccccctctgctgtttttgggattctctttctaaagtacgaaactcacaattcgtaacatactcgttttttcgaatgtactgaccttgtgatacatntcatccctctttacttcggaatgttctgacctcactaatag

SEQ ID NO: 51020 - DNA, 133 bp, Glycine max
  unsure (1)..(133): unsure at all n locations
aaacttcataatgtggtaattcaaaccttctaacaaccaattatattaccttcaagaattnttgaaagctattatagcatgaaccattcagcccaaatattttttaaaaaataagtttatgttttttataata

SEQ ID NO: 51021 - DNA, 517 bp, Glycine max
  unsure (1)..(517): unsure at all n locations
tttgtgcatcatctccgccatccttcanttacctgccgcgtggcagcttatcgtgacatcaacacgctatacaatggtctttctttgagctgattgatggtggtggagctcatcaacatgaaccagaatcttggtctgagcttattcctacacacacaatagtagtcacctgactctgtctgatgagaaatgaaccgttgacctcaatcctctactgcattgacatctggatattgtccaagctttccttggcaatttcctgggctcctgtttctgttctaaaacgttgatctgagaaaatatatcttggacttcatatggacagagacagggatgctgtagttgatactcagcatctgcgttctattatcagggtaatggaatcatcaagtctatcattggagagtgatgctgacctatcagctgtgtgagagatatcagttcaacgagttgcttctacatctggtatctttccatagataacactactttacatagctggtttaagatgacaacg

SEQ ID NO: 51022 - DNA, 71 bp, Glycine max
caatagtactacatgatgtttttctataaatcaaaagttcagttacacagctagtgtctcattacactaat

SEQ ID NO: 51023 - DNA, 763 bp, Glycine max
  unsure (1)..(763): unsure at all n locations
aggatgaatccagaanaaagatgattgtgtacacggttctctatgccgcaccgcttcatctctctaagcgcactacttcagttcatccgctaagcgagaaaggcgcgctaagccaaaaatcactaactgcgctaagcggccatacgtgcgctagcgcacgagcacgaacaaggcacctatttanccttgaatcacatctgtgagagagttggacttggatcaagcttgctgtctgggttctgagagaaaagtcaagtccagagttaagaatttgtggtagatctctaacacactgaacagactgttgaactgaatagttggatatgtaatctaagtatgaacactccctgatttcatctcattgctttttgtaaagctcgatgacgaaccgtgactctgcgccgagaattcatatagagtgggtcgctgatatcaactctacaacgtgagatcagacgtctactagcgtttgtcagggcaatattagtgtttcnnnncgcattaagcattacccttaattcctcntctcttttctccctctttcccctctccctctgttataatatattataattaataaatntcccggttncgcnnntnnncttcgttttcctttccttatctttttccccttttttctctcccctttctctttctcctctcttcctcttactcctatctctttatcgtctctgctctattctaccctcccnccccctncccccncccttccttgtttgtctcgtttctctgggtgttgtag

SEQ ID NO: 51024 - DNA, 253 bp, Glycine max
  unsure (1)..(253): unsure at all n locations
ctataatacacgcccgaagtaaatcctctagagcctgaatggttcgttcagtctgaccatctatttgaggatgataagctgaactaagctttagctttgtccccaaggcttcatgtagacttgtccaaaatcgcgaagtgaacctcggatccctgtccgatacaatacttgaaggaantnncatgcaccttacttactctttgatatacaactgtactaacttatccattctatacttcatattcaccggaat

SEQ ID NO: 51025 - DNA, 410 bp, Glycine max
  unsure (1)..(410): unsure at all n locations
ctacatgaagctgcctcggtagatacgctgcccaccctttgttaattggtggatcttctcgaaatatggttggcaacttcacaagacactttaccatgatttaaccggtgggatctttgagaaaatatctggagtgtgctagaagcttccgttcccgagagcatcttttatataagcanttcagcctttgttttcgtgttgcttaggaaaaacgtcatttcttcttctttctttcttccaaagccatttctaaagttccaagaactttctccatcacccacatccaccattagccacgacaaaccatcattgttctcaattgataacccacaccgagaggaacccttcaaccgaagcggaatcttccaacttggcttgcggttccggtagagaaccgaaaccctaatctg

SEQ ID NO: 51026 - DNA, 74 bp, Glycine max
gcaccacagtatgcaactgcagacgcaccaccgccacctccagagtccacctctgatcacctgcagaggttgga

SEQ ID NO: 51027 - DNA, 531 bp, Glycine max
  unsure (1)..(531): unsure at all n locations
tcccaccttatgaatcatctcgacccgngatctctaagtcacctgangcatgcagcttcttaaaaaattccanagaagcttaacttanctacacatacctctctaatngctaagctcacctccttgagatgagaagctagagcttagctacacacccnctataatagctaagctcacccccatgacaaagaacatgataataaaaaagaagtccttattacaaagacaactcagaatgccccgaatacaatgctaanaccctatactactagaatggcaaaatacaacgccttgacgaangacaaacctattctaatatttacaaagataagggggctcatacttagcccatgggctcgaaatctaccctaatgctcatgagaaccctanggcctntccttggatctctatcccaatctacttggagtcttctaaccaatgccgttgcngngtangattgcatcattcnnctcaccttttgaaggattngacctcanatcccgagggtcttcatactctgngcttcttccn

SEQ ID NO: 51028 - DNA, 968 bp, Glycine max
  unsure (1)..(968): unsure at all n locations
ntgagcaaatcaaatggataatatcttttactcgtatgtccgattgtgtcccgcagcatatcgagacgctcgagaatcagaacagaagctcttataaaaatcaatcgacaataactttttactcggttgtccgattgtgtcccgtagtatatcgagatgctcganattcacaatagaggctctgagcacaatcataccataataacttntttctctgatgttcgattgtgtcccgtttatattcagacaccttgaatttaaaaccaaacggtcagccaaatcaaaagacaatccttttcctcgtgtgccatcgttcccgtttattcgaacgccgaattcaataaagcttgagaatcatcgaataactttactggtgtcgatggcccgtgttatcaacgttaattaaataagcttgagaataacaaaactttactggtgcgatgtccgattttaacgccattcacaagctggaaaaaacgatacttcttgtgcatggtccgtttcgagtcatataaaagctagaacaaacaattttcggtcgtgccgtgttgcctataatagctgcatcaaattctttcttgtctttacgcctgccccgctnnnnnntaaatttaaagttataatgaaaaatatgtgggtgnnanncnnntctgtcggccgctcattgtgcgacatatttatatatagttataattatatagaggngggttatnnnnntnnntgnnngnngtaatggttatattattgttaattgtataaattgtctttatcatgtgttgttgctaggtctatcgttacttctatcttttctttagtactcaccgtatcttcttatcttctgatatggtctgtacgcctcttatcctctcttatacttacttntacctctatactcactctctcttctttcttttcncncttcccnnnnntctatcatatctttatcttcttatattctcattattttg

SEQ ID NO: 51029 - DNA, 207 bp, Glycine max
tcggacatccgagttaaaagttattgtcgtgtaacttttcctagagcttccgttttcaatttcgagcgtctagatatatgataaggctcaatcgaacattcgagttaaaagttattggtcgttgacttttctgagagcttccgctttcaatttcgagcgtctcgatgtattatagggctcaatcggacattcgagctaaaagatatt

SEQ ID NO: 51030 - DNA, 369 bp, Glycine max
  unsure (1)..(369): unsure at all n locations
gtaccacacttccttctaccttctctntgttcttttccttctcataactgccttctattgcgctgttcagacactgatnnnnnnnnnnnntnnttatattattttnnntnnnnnnnnnnnnnnnntnnntntnnnnnntnnnttccccngagccccnnnnnnnnnnnnnnnnnnntnnnnnnnnnnnnnnnnnnnnaaccccccatggcccatctttgtnnnntctacattcnnnnnnnnnnnnnnnnnnnnnnnntntnnnntntnnnncnnnnnnnnnnnnnnnnnnctatattactaccnnnnnnnnnnnnnnnnnnnnnnnnnnnnnnnnnnnnnnnnncaaaatagcccccccaaaanccccnt

SEQ ID NO: 51031 - DNA, 193 bp, Glycine max
atatttgttacatcacatctcatgatgatcttgaatgtatttaaatatgcaatagctcaaacaaactaagtgcaaaagtgtcaaactaatgcttatacatctctcttaacaaatggtaaaaataaaaacattaatatttaatagtggacgataattaaacttatcagatggttaccaagcttattacagaact

SEQ ID NO: 51032 - DNA, 943 bp, Glycine max
  unsure (1)..(943): unsure at all n locations
ntgaaccatgcttgactccgcagcatntacgngcactattaanactcacgcttagtattagtcataaactcctacttagctctgttcttcatcccctaatgagctataaaacatatataaggtgggctatttgaattatctcatctcaatggcggtattcatttggtccggatcaactatacaaactacatattttaaggtgggagntatcaagcgctaccttccaacttttttcgccnacattaccnaatttgatatataactatcatgacgtngatccgtcgtcacattgttgtagctatgaaaccctacatttctccttttgttngcatcaatctctcttctttgtaacgatttcttctcttttttatttttcattctcttatatatccttgtcattaacatgtgaggaggggccttcctagtaaaaggtgatatatacgatggagtgacggccacggttaaacaataaatggtgattatatttatagacccttgacagccactgtgacttgtggttcatatcatactgaagagatgcatgaagaaactgttttttattggttgttgcgaagtgctaacaatatcaaccctaatctttttattggttgatcccagcttatgaaatctattatcttcgtcttttcagggtcaattaaaataatttactttgggtacttccgcctctctttacgctatcaattatatatataattgcatttgtggatagtatttattattgtatatagtgtgttgcttcctcaccgccactttctggtccccgttatttatctccttcttttcctctaactcttatctttctgatcctttttcttctactcttcctcctaatcttgtatagactatcttccttcttcctctnactnnngggnnnnnnnnnnnnnnnnnnnnnnnnnnnctcgggtggaatcatcgcatccca

SEQ ID NO: 51033 - DNA, 731 bp, Glycine max
  unsure (1)..(731): unsure at all n locations
agtattcttgatgacgcccatnanaccagctgctgcgcggtgctctatgacccggtctttctcattttctattgagcgtttacaatactggccgtgttatcacgctactggaaacctgcgtcccacttattgctgcaccattcctttgcgctgggtattcaaatgccgtccttgcttccacactgccgctcatgcaaggcctatctgttgttctttcgtgggcggtttcaacgttggggccccaaatttcgtttacatatttatctgccgtcccccaaccgtaccattnattctttggaaaaactttcttttggtgtcgtgtttccggtctctattccatttaacgacctgtttatgtttgttttaaattctatacttgattacatagttttttgttatataatatttttgtaagttttgggttctttattcattcccatttaatttggttgttttttgtgcccgtttttnnttattggcgtgtgtgttaattttttcttnnnnnttttttttttttttttgacaaacgtagagcacccgttgtagagnnnnnnatntttnttttttttttatttttgttgtattaagtttttttgctattttttcttcctttttttatttttatcggtctctgatgttctcttttattctattttatcatttcttctcccttttattacacttcttcctcccctccccccccccgggcgggggagttgtatgttagtggg

SEQ ID NO: 51034 - DNA, 215 bp, Glycine max
tcctagactaataaagagacagtgatgacacacaacaccgatggaatagatatctaagaagaagacataacaaagttgaccattgcagaataattcaagaaactctatgatctcttcaatatgtagtgtgaatgaacttaaaaaaaaatttggtattttactttgaacttttttgtccaaccttatggcaccataaactatcaacaataaacact

SEQ ID NO: 51035 - DNA, 596 bp, Glycine max
  unsure (1)..(596): unsure at all n locations
tttagccaggactgaactactgtgatattccctctaaatctattttgcttcaactatgtaccctagaggcgcattttacgaacaaactgataaactctctatagcgcacactgtcttagtccatgcttgtgagagcatagagcattgagaacactatgcctcatgctgtatggagtgtgagtgcacctactgcgcactacttgtaagttaagctacgtgtaccataccttattaaatgtgggtcctttatcttacttgttcaacaaactattatggggactgatgaatgtgcggctatgacgcaactttttccgtttgccctctctggtgctcgctgtttcggaacaactaatattggggggtccgcctatgagttcgngaaaaacatatagaaggatgccccaattttttttttgggggngaccttcatcaattctgtttcnnnnnnnntntntttttttttttttatttatttttttttatctttgttgtcctctttttttttttttttctccttcctttttttttttctcctatctcctccttatccttcatccccctttcnnnncttcttttctttagggaggggggggagg

SEQ ID NO: 51036 - DNA, 746 bp, Glycine max
  unsure (1)..(746): unsure at all n locations
tgatctgattcggccttgatctcagctggcacttgagtcttgaacacgtctgagcgcttacttctactggcttgacaaaccctctttagttgaccactatggggcgactgtgggcgtagaaactcttacttcaccatactgagaataaagtggtgaataactgtaacaatatccgtctagcatgggaccattgttagcagctgacgtagatgtttcaaattactcttgctttgacaaaattgatgtgcatattggtggagatctgcaaagctaagtgaatcgtgttgaggattgtttaagggcatttaatcacgtcgctcgagctatacatgaaccctatctgttttgaatgatgaaacatgtgtgtagagtcttctccaggcactgagactactcacctctccttggataaaacaactctggtggaagtaagaattgtcatggagaatcttgtcggccacttaatctcttcttgacttgtcacctactcgttttaaggatcgtggtgagttgcattcgagtataatctggtnacnggtggcgttaacacgcttaaaaggcccaaaagcccccgactttataatttttttttctcctccccccccccccccccccccccccctccctcttcttttgttcctcctcattcttctttccctttatcttctctttcttcctttcttcccttcccgtcatcccttttctnnnnnnnnnnnnnnnnnnnncncncaggggttttagataaa

SEQ ID NO: 51037 - DNA, 210 bp, Glycine max
  unsure (1)..(210): unsure at all n locations
cttattccctatgcatattactagctccatcatatctttgacccgaaatagtttgaatgtngagattatgataagataatattgaacatatcatggttttaagagtggctgatgtagtatcttgcatgttggagtataagtataaggtgaagtcccacatcgggttaaaatggacaagttgagcaccatataagtgaggagaagacccat

SEQ ID NO: 51038 - DNA, 902 bp, Glycine max
  unsure (1)..(902): unsure at all n locations
ntgtgcttgcatacgaccatnaaactaagctgcaacaagtgttcatgttagtgaggagaatccctcttgctgtctcatgttaacctcttcctctagatgaccattaaggagataccgtcttcacatccatttgatgttactcagcagccgaatgagctactaatatcagaatctgatggaaggattgtagtcttaattctctgtacaagatgtctcgccgattggtttgttcacttcttactgaactcattcggaacgcttcttcgcctatgttttcattggtgctcgtagtcttttttggtttgaaacctttcctccaatgctttaccacttgcatggcgaaccatactggtagccctcaacctctattttatgctgccacacatatcttaactacgccggaacgccggcatactccctgttattatttgcttcacctatcttgacatgcttagtaaaacttaggccctactcagattataccgtgctgtgaagttatacctcaacaatgcatctctctcattgtgtaccgaaccggggggagcacccccaggtgttctttaaaattaagttccccttcgttcctctttgaatatttttaaatttatatagtataaagcagtcgaaagacaacnnnnntttagtttttatttttgcgggaaaaaaaccctcnnnnnnnnnnnnnnnnnnnnnnnaaaaagaaannnaaaaataaaaaatttaaattattttctcttatctcctcttctcnnnnnnnnnnncnnncnnccnnnnnnnnnnnnnnnnnnnnnnnnnnnnncaccccnnnaattttnnnccatggnnnnnnnnnnnnnnnnnnnnnnnnnnnnnnnnnnnnnnnnnnnnngggggnnngnnnngnncttctagcnnaattttna

SEQ ID NO: 51039 - DNA, 435 bp, Glycine max
  unsure (1)..(435): unsure at all n locations
tcgtacttgtacgactcgatttgtgcaagattggatgagacgcagtgcattctcaaaatctgcacttattcagaaatttgctgtcagatccgtgccacaggattttggctctgagcagacaaatgcttgtgtgtggttgcctgcggaaagtccaatgcacaatgagctctggatgtttgctaatatattccaacagacacgatggaggcttatgcactatatacttcctatagaatgttggagtcgacccaccggtcagtgaagtgtatcgaaggactcgttactgatcgccttaattgatacaagctgtgattctcggtggtgtgatgaccataatattctgcctatgctctgtattgctcggctgagatacttgtgctgttcgatgatgtcttcttggatgtcgcgcaaccgggtggttgaccggactcgccn

SEQ ID NO: 51040 - DNA, 281 bp, Glycine max
  unsure (1)..(281): unsure at all n locations
actggaaagcgggttctaatgactcctctgcggcctccacataaggcatagaggatggccagctcaccaagatgtcttcctcgcctgatacgatgaccagatgcccttccactacgaatttcaactnttggtggagtgtagagggaacaactcccactgagtggatccacggacgccccaacagacagctgtagggggggttaatatccattatttggaaggtaacttggcatgtgtgagggcctatctgtactggaagggcgatctcttccctaacctcc

SEQ ID NO: 51041 - DNA, 831 bp, Glycine max
  unsure (1)..(831): unsure at all n locations
ccacttattagtgcacaactccttcaagaatntagcatatcttggaattngctttattgcatccaatagaggtatgtttacctctactntgctaaatgtttccaagatctccttctctgcctcttccattnttttgttgaaaatttctcttggagggaatggaagagggatatgctgcttctgtaaatcagaattaccagtggaagattcacctgcatagaaattggtaggggaactactctntannattttgcatcatcttttctggaganaagggaatgggcaagtctattgcgataggaggagtgtggtgagtctgacctgtttcgacctatgatgacctacatttgatctgtaatgaaagattgcaaattggacgatgatacttaccatgccttatataccaatgagttgcttgtgactgtgttgtacatgctcatctaagagtgggactacttctttggttctttcttgtgagactgtctgcacttatagttgttcgggagactaggaacccgtgcttgagaaggggtttgaggtttnnnnnnntaaaataaattagaaaacaacccttggnnnntcnnnaaaaaccttaaaaatcccgaaaaattaacaataaaannnncnttntnnnnnnnnnnnnnnnnttgngtngttgtattgttatttatttactcctttttacggtttcattctctttccttttctttcctcatccctttttcctttttctattactctgctttatattttatcccgttctttctcttttcctcnctcnctttctctttcctccnncccncttcttcttctcattttgttttgtgtgtg

SEQ ID NO: 51042 - DNA, 971 bp, Glycine max
  unsure (1)..(971): unsure at all n locations
cgcgaatgtactgtgcgctcgtacacgtgaactataacactcagctctggctgctcaattgttcacgttgctgcatggacaggctaatgtctgtatgggggtcaccagaggaacacaaaccgcagaccctcgctacaggtacagaattttggttcaaggccaagttggttaccaaggtaaccaatgcatccagctntccttcaagcttcttantctcatatgatgcagctgaggtggtagctacctcatgcgctcctataatgactatagcataatttctggcgctgaactgctgagagtcgaagccatcttctaattgaattctggcttaacangagtcatgctcaaagctccccactggcacactatatactatctcatatactgagtctcataaatataagaaaactgtgcaatctatgtatgcactgccatgtgttaatttccatctatcngccttcatgatgtatactgattcttcttgcgtgctgacagaatttttaatctttagttcacttagcagacagatcacgcttgctctttatagagctttatatactgcttggtcagggcaatatctagtgcgttccgcgatgaaatacttactatctcgtgcatgganggcctactgggtcgttgattcaaagttttatgccactccatgaaatactcttagcggtctcctttccgattatgatataaataattttctatgttngccgctcccccccccccccccccnnncccccncctccctcttttctcccgtctttcctctccgcatccgcttattcatctgtctcttatcatcttttctccctcctctctctttccactcacnctnttttcctcnctaacttcctcactcatgttctctcctctctacctcttttctnnnnnnnntannnnnnnnnnnnnnnnnnnnnnnnnnnnnnnnnntgatatattgtattttccccggttcccncnca

SEQ ID NO: 51043 - DNA, 126 bp, Glycine max
ctcagcttaacatcagaccacttcgggggctggactacttacatggacttgatggggcctatgcagttgaagcctcggggaaagaggatgccatgtgcagggggatgctctaattacctggtcact

SEQ ID NO: 51044 - DNA, 590 bp, Glycine max
  unsure (1)..(590): unsure at all n locations
ccccgacctcctctcacttgttanctttataactcacttntctcctnactcccaatagccagtnnttgatgcttcacntctccaccangatacatcagncgactgcggcatcttgctagacaataatgcgcgttcgtctatctttaccactctcataacttggagacgagttatgttgccatcaatgcgaacagcgcgtaaggcaagcatgataaacatcttcttaagagtgagttcaaggggtaaacgagcaataggttacacatcgttacctaatgatctaaatgggaggagaacaaagagagcactgtctcattatcggccaacaagaagatcgaagcgacgtttacatctgatgcgcaaatacccatttatcatcacggagataacagaggcctctgtctatacgaatgggcaatgctacacgctcaaacactctacactgaaagtttggggtgcgaatgccgtagtggggaaaccgttgctagcgcaatatacaaagatgtggaatgctgacacaacgtgatatgacttgagcgacgactgtcctgtatcttgcttactccatacgtcgagacaatcgcttacan

SEQ ID NO: 51045 - DNA, 202 bp, Glycine max
gcttctcatataactaaatcaacatctgtacttcaacttcatcagaagttctctcattaacaattctccaaatactgatgttaacttatatataagctaattgtaactcacgagagtaactcaattcattttaacttcttattttcttctcatacaaacacttattgaaaagttatatccaatcactcagagccattatatg

SEQ ID NO: 51046 - DNA, 206 bp, Glycine max
actttccattcagcaacacaaatctggtttatttgtacgcttaaatttggtagattgcctattcaatttgaaatgtcaaatttctatcttacatcttttatttggacaatatgtaacaaaagatgcaacaaagaagtttactaaaccttatattagagatggacatcagctctttatatattgcttgtctggcgcaccacaaatta

SEQ ID NO: 51047 - DNA, 719 bp, Glycine max
  unsure (1)..(719): unsure at all n locations
ntgtacatgatnacggaccttnanactcagcttgacgagaacacgcatgggttgggatccagctactatttccaccttcacactcattgattaccatgcacataccgctggacttgtacgatgaggaccgacggtaatgtgatgagtctgattggcgctactgcgaacgttggggcggagtgctgagttcaattctccttttagaacctccattctttgctccaattcttaaaaactgtggggaatgcacctcactttgttcgggaattcggaccaacagcccactggggttttacgctcagaaactggattatctgcctctctggagtggctactctgtgcaagcgccagacaaacgtctttaatttctgatactgatcaatcctgtaccatagtttgaagctctctcataccggaacgtattgggctctgagctcaagaaaagtaagcacgcgatncttnaccttgaatatttgttttacctcttnntnnacgctccccgcccccgtctttttgtttcttccccnccccggggnngcntgttgttgttttttttttnttttttttttttttctctgccttgctttcttgtcgttattctgctctcttcctctctttctctcttcccacttttctttttttctttttctttctcttatttttcctttttcgtctactttcctcctccncttctcttctcccttcgtgctttttaggtg

SEQ ID NO: 51048 - DNA, 438 bp, Glycine max
tatctatttctaatgtggaaatgatcattccacaacatattctacatattattagaatagctctcccatcaatgtatttatattattttagaatatttgagcgaaacaaggcatgttaatacatactattgtgatatgcctgctaaatacttatggacaaactttttccacactttgctatattagttgtggaataccatatatgagaatgcgagtgtttcaaagagtctattctacatacatcattctgaaacactagttatatatatttctagagcatgcctatcatgtactgttgtatattctatcggaatacttgctctctgggatagagtgctacaaacttaatatggaatgcacttctatacgcatgtacatgttctgagaacatttatgttatgtctaatatcgtttaaataccatgcgaatcaacacacg

SEQ ID NO: 51049 - DNA, 1068 bp, Glycine max
  unsure (1)..(1068): unsure at all n locations
cacccgcgtccctccgncncnncacgtctcgnttntntagtngctgtnnnactcttcactctacatactacctacccctcnctcgcgcacgcagcgctttgaacatgcatctcgcgacacttagatancaagctntgcagctcgctaantacttgcgttgtctgcacactattttctatcatatacatctcaatagcttggctgtcacggtcaccttatcctatgatgtcataagatgantccttcnctattttattcatacagcctccactaatcatacatccttattatacctatcattattattattcaatacacatttctcgggcaaaacatctactcggagcttgtttaacacaatatctatgatatatcagttaaacatttgcagaattgtctgatggtacttacgtggacatatacatctaacttaagtattggatctatacctacagtgtctgaaatgctcgcacatgtctctgacgaacacatcatttagacgtgttgaatatcctcgttatctcaataccacctctaatagtactgngatattttatgcaaggtctacctgaaatacatatcactagccagctcccgcaattccgtgaatatctccagaaatcagtgcccagcctcttcgtaagttaaattagatcggttctatagataagacgatcaatatactcactctgttacatctatagttttctattaagtcctccacttctcgagaattggtgggtggcctggacacgtccgcccctacttgaaggtataggggtgcgtaccgctcctctnnnnnttagnngtatgtgtatttatgagagtgtataangaatggttgtatttgaatttgtcagttattgagtactcatgtgattaactaccacttatctgcgatcatctacagatgtctatctcaccctaccctcttctcgcttcagtactactgtaatcctccgatatcatcttactctctcctctcttcctctcttnnntcttctcntcnnnnnnnncnnnnnnnnnnnnccnnnncnctgttctgaagaaacttctttgaaactcnna

SEQ ID NO: 51050 - DNA, 145 bp, Glycine max
gctgtcggccttaactactgagaggtaccgtacaaccgtttgacatccttgtgacggcggagcaagttgttatgaaccgggaaatattttttttgcaggcaaggacaacactttaaacagctcttctaatgtggaggttcaaggg

SEQ ID NO: 51051 - DNA, 386 bp, Glycine max
  unsure (1)..(386): unsure at all n locations
gtaatcaagaaaaagaggaacaaataatggtcaagaataaagaattgaatgaccaacgataagaaaagtatgtagaaaaagatatagaaaatgaaaaaaatgattaagaagaaaaaaataagaagaatgctnagaagagtagaagtgacaaagctatgaatgaaggtgtggaagtaccatatcctgtggtaccttccaagaaagaaaaagatcgtcatctggcgagatttttagacattntcaggaaactagaaataaccatgccctttggagaagctntgcagcagatgctgtcgcaacctaccctattgcgggtgagcgaggcgaggcacacgggtgcgtcttccatatgaggaaaatgcgtggagtcgccactaacgtttatt

SEQ ID NO: 51052 - DNA, 1085 bp, Glycine max
  unsure (1)..(1085): unsure at all n locations
cgctttctcgttctcactnctactctaccgtttttcncgtccttttncncncgtttcttcttcttctttatcttctgcacnnanaagggcagngncgacggatgaatcgtgcgctagcgatcacgtgcactataaaacactgaagcnttnttcatgctagagattgcttgtgaaggattatctatattaatattagaatacaattgggcaagcgatgcaatggctctgtacctagatatacatacacagcaggtactatgtacttttacttcaagtatgttagctgcatgtactgggcggcacaagtgactcgaatttggaaacgtgaacatttattgatgcaccacatgcggccgctcctctttccttatataatttcacaggctcgtataaccaacactacctctttaattaacctggggatctttcgtgagccaaaactctggaccagcttgcgtgtgtcttctattgccttataagaaatatctgggaatctatctcgcgacctaactcctgggaacgtggtctaatcttctcgctcataactgtcccagatccgaaacgacattctagattttacctgataattagatatcatacggtgtcctataatatatttagaatggtctcacgttccaagagataaatcgttaatcctgcgttactgttctctccatgacaatatggaatcgtgccctaacnnnnnnnnnncctctaataaccnngnnaagaaaaaggggtctctctctcttggcggcggggcgcggggctcaatttttttgatatatacaaaacncnnnnnnnnnnnnnnnnnnnncnnnnnnnnnggnnnnnngatttgttttgtgtttattgtattttataaggcttatattattgaatcgagatatgatgcgataatatataagttcatacagctcctcctttgcatcgctactacacttctctcatccctatactatcactacatatctagtatctcctcccatctctcactcaactttcatttactgcacaccatcatcatctcgccttgccctctcctntctcntatcttttatcactcatatataaccgtgttatta

SEQ ID NO: 51053 - DNA, 407 bp, Glycine max
  unsure (1)..(407): unsure at all n locations
attttaggtccttatgctctttggataaccctctatcagttgaagcnttgtggaatattttgaggtttcactacgaagccaaaggttctaattacggtggttaaaaaaaaattaatgttgtcgttattttagagactaaaatgacatgttgaattattaaattaattgatgcttgtaatctgaagaactaatttgatgtattaccatgcttatctctttgtagttntgtaaatattcaatggtttgaaaacactaaagcaatacttgaatcgtgtttcgttttaatttaatattttgagaagaaaaacagtaaaacaagaaaaagaaaagaacataatagtcatttctgaactgatctgaatttttttattatattaattgtttgtgagttaaagaacaatgatcat

SEQ ID NO: 51054 - DNA, 114 bp, Glycine max
  unsure (1)..(114): unsure at all n locations
aaatttaaaatttcagacatgactttcttcttttnttctattccttctcatgccaaatgtgatactggaatatgataacggaccaatgcaggaacgatatgttcatcatgatgc

SEQ ID NO: 51055 - DNA, 825 bp, Glycine max
  unsure (1)..(825): unsure at all n locations
cccacaactccaccaaccctttagtatcctcacaccgttacctctctcnccnccacccgctgcctgccagtcctgcatcggacttaaaccacctgtcggaggctgctggataatacctttttgggcggcttaactccttatatacgttcttccattatacgtatttactactaacaagaaacatacctaatcacaataatttgggttagggcggtttacttacttcatgactggtaacttaccccaattgaaatcacctcaatatctaatcctctctttattattaacctaacaataccatgttcggatacttttaagagtattttcacatactaaatctttactaagggggacggtgggcgtccccccangangatatttaaaaaaanctcgttnnnnnggcctcttaacgttcttaaatttgtacacccattactacacccaaccaccgtgttaatgcgattgcccccaactttccccaaactaggttttttttattttttttagagttcgaacaaacttccgcggctccccattttctcgtatttccttattgaataggggagcatccgactttccctctaataaaattgggggtagtgacacatnnnnngnnnnnnnttttaggtgatattgttatgtatatgaacttcatgtttatcctcgtctttagctattcctctcttatctttctctctctactttctccacttctcatcctcctacgcttctctcttctccatctcttcctctcctctctcatctcntnncctnccnncnntctnnnnnnnnnnnnnnnncccttcttattatatgtttgatgat

SEQ ID NO: 51056 - DNA, 847 bp, Glycine max
  unsure (1)..(847): unsure at all n locations
tgtcgtgctacggccttaaaccagctttgcgcgtctgcatgacatccacctttttgtgggcaatacantgtcgacgtcataaagagtcaccagggggccgagtaagtggctatatttgtccaaacgatgctagacacttatgcgcgacttctcctctgcaattaccatcctgaagagcttaccatcacatcttatatattatttggcttgatacccttctagattcctatccctatactggtgtaatgcgccctgagatccgttgctcgatgcctccgcctcgggcgcctactttatggatcacctgtgataataccctgcttcaagtctttacatggggcccgactcattggtatgaatgtatcgcttaactgcacactctgccaccactatctgcgttcctgcttgaacttccagaatctccccagcggttggtggtctccatctaaaaattcttatactacctcacttattgtacaagagccggggctgctcnatttgctgcagnaaaanttgtgagaaaccctnatctgcgtgggcncnncntttttagcgctcttatcgggtctgcccacgccatcaacaaaaggccttgtggttaagaatctccgaaaaaaatatatacaaatatctattcccctccccctcnnttctccctttccccccctttccccctccctttcttcttgctcttctcctcctccacgtctttcttgttctctctccccctttcccctccgtttacctctctctctcgctctccncttccttccttgtctgttctctncctcnccnnccccnnnnnnnnnnnnnnnnnnnnccncntctcgtgcgttgaggtttgtta

SEQ ID NO: 51057 - DNA, 414 bp, Glycine max
  unsure (1)..(414): unsure at all n locations
atgccctattttcttaccttgacaggggagattataaccgtcaaggcagaccaaaagaaagcacaacagtgttatgcagaaagcctgaaggtagtaccatatcctcccaccagggagcttgccaagccttaccccacagtggctgaaggcactcaagtcatgagcatggacgaagggtctcaaatctgagccctgatcgtctaccaagcaagcctgtgagatgaattcgacatagatccacgagacgatacctctaatagaggcctgaaacccatcgaagagcttgcaacttggacctaaacccgggcaataaatgcggctcaagaaggacctcactagtcatgagaaccgacacatcactaatgtgctacacagaaatgcggatttatttgcctganaccatctgacatgctg

SEQ ID NO: 51058 - DNA, 1055 bp, Glycine max
  unsure (1)..(1055): unsure at all n locations
ctcagaatcaaggttcacagaatctagattcaagaacaatttagtgtcaagattcaagaacaatcaagtgtctagaatctagagtccagaaccatgaagatccagattctagaatcaagagaagacatcatccagataagtgctaaaaaagtgtttcataacatttgagagcacaagaatttttcaaaaagaaaaatcttttaccaaagaaggtttctctctgggtatcgattaccagaaaggtagtatcgattaacagttgcccacattggttttaaccagattacaaagttgaatcgataccatgagcatgaatcgataccatggtttaaaacgtaattcagagcacactagtgtaaacgtttcaatcttttaacttgtgatcgatacatatactgaatcgatacatagttctaacatttgatttcaaataacatgagagtcatctgtgttggatnataccttgaggatcgtacaggctgtttgaagaatacaagccatctaaggctgttgagatttaagcactagactgnttaacgcacttaggggttcgaagcactaggctgtagatcaagcactctgctagttaggcggcacacaaagcctagaaattnnntnnntnaaaaataatgtatgttctttataaaaaaatgggtccgcgcgcggaatacacaaacgatagaggcctcccgaggggcggacgggcncgnnnnnnnnnnnnnngnngngnnnnnnnnnnnnnnnnnnnnnnnnnnnnnnnnnnnnnnnnnnnnnnnnntnnntttnnnttttctctttttcnttatctgtttctacttcctcctcttctttgctttctctctctgttgtatttcttcgctctatccttgctcctctgtgttcttccttgcgtccctgtatatctttgtcatctacatactgtgttttggngncgctcgtgtgcatctgtgtgtttcgcgtgccttgtcgtcccncactcttcccttactctgtcctccatntcgcgcttcatctcttgcgactcggacgcatgtgaggggtggatggtgtgagga

SEQ ID NO: 51059 - DNA, 161 bp, Glycine max
atcgagacactcgtaattgaaacggaagctctgatgaaaatctaaagacaataacttttaactcgggtgtctgatcgagcccttgaatatatcaagacactcgtaattgaaaacagaagttctgagcatattcaaacgacaataacttttgatactgatgt

SEQ ID NO: 51060 - DNA, 299 bp, Glycine max
  unsure (1)..(299): unsure at all n locations
actcattttttctatgaagcatgtcaataagggaaacaaatcaaaacttcttttagacctaaggatgttgtttccatttctagaccgttacaattggttgcacctggacctattggaccaactagaacattgagtctaagaggaaagaaatatggttttttcatagttgatgttattcaagatatacatntggatacttccttacacataaacatgagcctttcaaggtctgtgagatattntataagagaattcanaatgaagaaggattnttcatctcttctatcagaagtgaccat

SEQ ID NO: 51061 - DNA, 998 bp, Glycine max
  unsure (1)..(998): unsure at all n locations
ngggatgtacgatgcattacgtgcactatnantactcaagctngctngtgagcttctatggaagctggatcttagagcttcaatgtagtctttaatggtgattttccaccatggagatgccgcggaagaccaaggagaaaaagtgagaggaggcgccctccactatggaataagccatggaagaaggagcttcaccaccaagatgagccttggataagaagcttggagaggatgcttctatggaggaaaagaaacagaagaaggnggagctcgataattgatggactataagaggggagagaantggacctttgaanggggtctataagacttctatcatcaaagtacaacaagcgtacacatgcttctattatagactaggtagcttccttggaagctntgttgagaaactttcttgagaagcttctgagaaaacttcatgagagctgagctagctcacacaccctctatactaactcatctctgagagcttctatgagatctangactaagctagtccaccatttatactactactctggaggagtgagtactccaccttatctactaccctcaatgtgatcaaatcttcaacttcatctcatcagtaccttctatgcatagcacagaacttattntangtctctgcatcagtgacagcttgtgcttgatcacngataacaatatatgccttacaaattcttgggggctcgccgcaaaaccactgnggaagcccttctggattgttttacannnnnnnnnnnnnnnnnnnnnnnnnnnntnnnntnnntnntnnnnttnntnntnnttttttntntnnttntctcctntttcttcctttttctttctctcctttttcttctcttttctttctcttttctcttttttcctttttctcctttttttctcttgtgtttgcttctctttttcttctctctcttttncttcttctctcttctctctctcctattcctttacttcatctattatctatttta

SEQ ID NO: 51062 - DNA, 376 bp, Glycine max
  unsure (1)..(376): unsure at all n locations
gtttcagtcagtttaaataaaagtctccacattatcatccttcctactttatctttgacttaattttcaatctttacatttccaacagataatctcttgcatttctacttcttcatttttcttttcttttctntttgaatttcattttaacttctttatttttattacgtttggtgtcatttaactgttattagtaatttattttctttgcactgtagaattccatttagtattttcgaagttacatcctaactttttttatataaaaaaaaatcaaattattgggtctttcacatttanagacatacggaataaatgttgaaatattagaagcggaaattgaacaactttataatgctaanataaaataaaataa

SEQ ID NO: 51063 - DNA, 163 bp, Glycine max
  unsure (1)..(163): unsure at all n locations
tctcaattggtagtctcatatttnttgttacaaaaataccttattttcagaaggaaaaagaaaatctatcttttgaacgactctaagccactagaacttcaacaacgttcaaggaccatatttntttatctattgaaaacaaataaaaaaaattgaagtatca

SEQ ID NO: 51064 - DNA, 333 bp, Glycine max
  unsure (1)..(333): unsure at all n locations
tcgggcgatggtgcactaacaagtttccacctccacaaatcgcgcataaacccaccatcccctattgcccacctccatctgagctcacgtactcccacgtagcccatatcctcgtttctctcaacacagggtcctcatcaatcctcccaagcttgcccaacatccaagtaactcaacattcatacaacacaaaccatcacagccaagataatatggcaaaggcaggaaactttgcccaaacaccaaccaaatcacagcnttttcactatagacccagaacaatgcttcttcaatcgtaaccgtgatcactcaaaattactgaagctcagacat

SEQ ID NO: 51065 - DNA, 174 bp, Glycine max
accactactggaaaacccgcatgcaaatcttcatagaggcaatagatttaaatatttgggaagccatagaacaaggaccttatgttccctctataatagccggaagtgcaacaatagaaaaacctagagcagattggactgagaaagaaagaagattagtacaatataatttaa

SEQ ID NO: 51066 - DNA, 703 bp, Glycine max
  unsure (1)..(703): unsure at all n locations
cgaatgtncctcattcgtaccttgaaactaagctgactgaatctttctttataatgccctaaatattttgtcctatagttggaattggcgctaaaaacacacgctacaccattgaacattactccttcactaccacccacgttgtagcataatacttactacagatatcttaatctaattttaaaaagaagcactgatcagtctttgatctgaaggggtggattacctacacacccaataagtttcttctccagagcgttaaaacaacaacacaaggcatgcctcccaatcactaccattttcttggaattgaaccatctcgattctcctactacacgatactctggcgtctacacctcgaccctttgtaaaaaaccagtcgactatatttttgcatgaaaagatctctataccgggagcgcaaagacatgattataacccctgcggagcttaacagagaggcgagggagagtntttnagaaaaattacaataattttttnttataaggggggggggnnnttcncattatttnnnnnnnnnnnnnnnnnnnnnnnnnnnnnnnnnnnnnnnnnnnnaaaaaaaaaattaatctgcttttttttnnnnnnnnnnnnnnnnnnnnnnnnnnnnnnnnnnnnnnnngnnnnnnntnnnnnnnnnnnnnnnnnnnnnnnnnnnnnnnnnnnnnnngnnnnnnnnnct

SEQ ID NO: 51067 - DNA, 1135 bp, Glycine max
  unsure (1)..(1135): unsure at all n locations
ccactttctaccctcactctccnttcancccgnnnttcgtgccgcntacncgnttttcacnccncactttttnnnanncncnnnnaacggggnnnnccgtgggttgtatcgatgcctacgcgcaccgcgacacacnnaanacngcnggttgagctcgtatggaggcggcatcanagagcatcttttgttgtctttatngatgaactctcatccatgaagattctntcgtactactccatgatagagatgtgagatcgacgcgtccatcctctcacggtataaactcgtcgggtgatcgctgcttccactcccagtatcacactttgcaattaacacattggtgagagacctactccggctgaatacttaaatatatggtgccactcttaattgagtgattatacaagggtcaaatatgaccctcaatggggtctgtaaactttcagcataaatgtntacaagtgtccacgtgctctattatacactttcaacttcttgtaatcatcgtagaaacttctttagagttgtgcacattcttgaacgtgacgtgatccacaccttattataagcatgcttacactgctagagatccagaactaatactctccatcattgctactctcttggcgaggtagtgctcccctctatatgttgccctgcatgagaaaacatcctttactctatactcaaagtaccttcaatgctaagcaaggatttattaaacgtgtcagcaactgtgacgcttgtctttnttattnggnttacactatgttcacaagaattgtctaggggctccctcgaaagatccaagtgtgttaaccttataatcaaactttatcttttnnnncnncnnnnnnnnnnnnnnnnnnnnntnntntnnnttttnttttatttttttaantnttcttttcgttattatctttactcactgtaaatcttcttaatatctgttcgatcattcatcttctgcttagtcttactcatcttcgtccttgtcttcttactacttcttccttcgttcttcttattcagttttagattatgctattctactttctgcgttcttcctctcctacttactccttctctcctctgactgtcctttcttatcttcatgctngttgcgatgttgttn

SEQ ID NO: 51068 - DNA, 410 bp, Glycine max
  unsure (1)..(410): unsure at all n locations
ttgaacgagtaccatcagccatggcaacgatgatgaaaacaccaatgttagtagctggtcttcgaggtccagcaacctcctcagagggaagagagataagagagagatagaggaaaggagtattatttcttcttattcttgcaaagcgctttcaaacattcatagtttgttacagaaggaacaaaactcaacggctacaacagaaagcctaactgctagttagttactctaacattattagcttctaacagttgtattcttctcgaagctgcttgcctatnttgtgtacatgcatggcttatctatcaagtacgtagtccttcatgtgcaagggagtattactttgccttntgggctnttgctatatgtaacttggttctgccagatgtatcatgtcttctatctgatca

SEQ ID NO: 51069 - DNA, 188 bp, Glycine max
gttctaagagaatttgctgtatgaagatctacagagacgagagcttgaggcggaagccattctgagagcttgagatgagtttgtgagtaattgtgagatcctagaggtgaaggagacatcctcaccacttgtatttttgcaatctttcatcttgttcttctatgtgttgacaggagggttctggacta

SEQ ID NO: 51070 - DNA, 207 bp, Glycine max
  unsure (1)..(207): unsure at all n locations
acaccggtttgnnttaaacatgaaatttatttttatctataattagctttgcttttgcttatcttaattagtgaaatttgttntgcttttgcttattttaattgttgaaatttgttttgcttatgaggtgtttgacaaaatgcttgaaatagaatcaaggtcttttttggttaactttttattccaactttttgatattgttccttt

SEQ ID NO: 51071 - DNA, 1125 bp, Glycine max
  unsure (1)..(1125): unsure at all n locations
atgatgtgcctagacnacggccttaaaactaagctttacccagaggattactttctggcactcgattaccatttactgtgatcgattaccagtagcggagtgtgtttcaaaagctttcaaactgaatatacaacgctcctattaatgtcacaatggagtgatcgattacaagattattggagtcgattaccagtgtcgttgaacgctgaaattgcaatactattgtgaagagtcacatccttccacaanaatgatatgcgttattgattaccatgatttgccactcgaataccagtgatgcagtgtgattataaactaaagatgtaacgtttcaatggtatcatgctttcacaaggtatactcttcaatggtttgttgaccgacatgagcatctatactagaagaccctgctcgccttgagatcattctacaatagtacatcctatacatctctgagctcttgacgtctcttctcttctccttgcacagctgttaaggttctgtatctaccttgaacaaaggagattcgcttatgtactctcgtcgcanacaatgcaagctacgctgatttttgtttgtttctttctaaacaagatactcagatcttgagtcttccttgacattacgcattgatgtagttctctatanatagattcagagtgtctcagtagacgcgacttcatagaattttanatatattgtggtgatagacgtattatagattaaacagacnctttacacnaaacaacctcttgctcttntctacaaataatatataataaataccaacaanatgtgagagannnnnnnnnnnnnnnnnnnnncatgtgatatgaaaaactgaaaattctagtgtcnnnnnnnnnnnnnnnnnnnnnnnnnnnnnnnnnnnnnnnnnnnnnnntnnnnnnnnnnnntnnntnnnnntntntnnnnttnntnntttntntnttttttttttttcntntncttttnttcttnntcttcncttctctccttcctctctttctctctccntctctnctnnnnnnnnnnnnnnnnnnnnnnnnnnnnnnnnnnnnnnnnnnnnnnnnnnnnnnnnnnnnnnnnnncctctcatatatgttgttgttatatagtatctaa

SEQ ID NO: 51072 - DNA, 121 bp, Glycine max
gatggactcagtccatggttgcctctgagaggaagcaaccacggctggatgaaccttccatacatgcatgttaaaaaaaaagtatttttagaggtttttatgcaaactatattagaaagat

SEQ ID NO: 51073 - DNA, 315 bp, Glycine max
  unsure (1)..(315): unsure at all n locations
cacaccatgtttgatgattcaccctgagcaacaaaacttggcggttgctccatataaacctctntctcaatatcgccatgtaggaaagctattcttttgtcaagctagaagagacgccaatgacagatgacagccattgacaaaagaagacgaacacaagccatntcggctactggagagaaagtatctatgtagtcctatccatagacctgagtgtaaccttttgccaccaaacgttccttgaaacaatcaatggttccatcagggccaattttaagagtatacaatcaccgacacctaacaacggattttcca

SEQ ID NO: 51074 - DNA, 177 bp, Glycine max
  unsure (1)..(177): unsure at all n locations
tcctcgctggttatgctgcaataaagcttcacgacatttacgtgccttatggagctcaaggcctgaacctccgcgtcaaactcctttgacttcccagcagcgaacttattcccaagcatgggagtgctgctccacgacgactntctcctggcggcgacatcggngttccaaatatgc

SEQ ID NO: 51075 - DNA, 252 bp, Glycine max
  unsure (1)..(252): unsure at all n locations
aatcacgtagtaacccaccatcccctggtgcccacctcctttttttntnnnntactcccancgaggccttatccacgttcctctcaacaccgggtccccatcaatcctgccaagctgtcacaacatccaagataatgaacatccaatcatgacaaactaacacagccaagataatagagcagaggcagagtactctgctcaaacacaaaccaatagtacagctggtcacaatcaaataccccaggaacattc

SEQ ID NO: 51076 - DNA, 389 bp, Glycine max
  unsure (1)..(389): unsure at all n locations
ggagtatgttggccaattcataaccaatcatatccaaaccattttaaatccattttaatgaattgattttacatccaaattcagtttttggaatacaatccaattatttggatattttatttgattttcaaattttatagcattcctttgtagaacaactttagttgaggttggtcgaanaacatgattggtcgatgtggcaaaggttttttttggacgatgttgttgatagttttttcaatcattgatagtgatgttttttgataggctatttttttggctgacattgtttatggttntttttgtaacatcttagattattgaaatcttgatggctctcactctataacatttcacatagtgacacttcactcaacttcctttgtggt

SEQ ID NO: 51077 - DNA, 820 bp, Glycine max
  unsure (1)..(820): unsure at all n locations
nnaatgtacgtgatgacgcgcacatagatactaaagctgaggttatggggacccatcacatgtggactatgtggctgtcgggcgatggtgcacacacaattttccacatccaccatgcgtgcataaacccaccatccccttgtgcgccacctcatctgagctcacggacctccacgtagcccatattctcgttctctcacaccgggtcccatcatacttccagcttcacacattcagcaaacaacatcaacagccagcttccagcancaaacaacaaagcgaacttgcaacacaacaatccagcttctactaagaccagaacatctcgtcatcgtaccgtgacaccaattatgagcatgctancttattgcgggatacacaatcaatattgtgtttccacaccccacatttgcagcaactggcattcagaatgcaggcataaaactcttcatgcatatccagcattgtattgacatactagcaacatggcactataggttggagataggatgaatctccacatatgagtcatcgatgtacacagnnntgttagatgtgataggataaaaacccctcctcttttttttaaacagggttatcaaacaagaggggggnnnnnnnnnnnnnnnnnnnnnnnnnnnnnnnnnnnnnnnnnnnnnnnnnnnnnnnnnnnnnnnnnnnnnnnnnnnnnnnnnnnnnnnnnnnnnnnnnnnnnnnnnnnnnnnnnnnnnnnnnnnnnnnnnnnnnnntnnnnnnnnnnnnnnnnnnnnnnnnnnnnnnnnnnnnnnnnnnnnnnnnnnnnnnnnnnnnnacggtgggg

SEQ ID NO: 51078 - DNA, 317 bp, Glycine max
gcgtctcgatatattacgggactcaatcggacatcagagataaaagttattggttgttgaattatctcagagcttctgcattccatttcgagcatctcgatatattacgggactcaatcagacatccgagtaaaaagttattgtagtttcaatttgctcagggcttcggtattccatatcgagcgtctcgatgtattacgggactcaatcagacatccgagtaaaaagtattgtcgttgaattgctagagctctacattcaattcagctttcgattatacggactcatcaacatccagtaaaagtattgcgttgatt

SEQ ID NO: 51079 - DNA, 1001 bp, Glycine max
  unsure (1)..(1001): unsure at all n locations
cccatgtttgatacatgctctactgaccttnanactcagcttgagaaattcaacgacatacttttactcgatgtctgttgagtcccgaatatatcgagtcgctcgaaattgataccgaagcgctgagcanattcaaacgacaataactntttactccgatgtctgattgagtcccgcaatatatcgaaaagctcgaacatgaatgttgaagctctaagcanattcaaacgacaaaaactntttactcggatgtctgattgagtcccgctatatatcgaanagctcgaatgtgaatgtagaacccttgacaaatcaaccaacataactnttactcggatgctgatgagtccgtatatatcagatgctcaatggatacgagctcgagcaatcaacgacatactttaccgatgctgatgagccgataatcgaagccgaatgatgtgagcttacaatcaacacatactttactcgagctgtgatccgaatatcaactnaatgtgtgacttgacatcataatacttactgtgtgtgagcgaaatagagtgatatcgaccgcatcaccaactactggtgtgcgtatgagcatgagactgatacatatacgggtgcgatgacagacgcgaaacaanttcgngccaaaggtaggtgaaaaattgggcgaggcgggggaaaactggggnagaggcaccttgggtgagaattgaagaatacataacggnnnnnnnnnnnnnnnnnnnnnnnnnnnnnnnnnnnnnnnnnnnnntnnnnnnnntnnnnnnnttnnnnnnnntntnntntccntnctntntnntttnnnttttttcnttnttnntttttttttctttctntcttccctctttccnntctcccctctctctttcctctctcttnctctctcttccctctccctctcttnctcccntcctctctccttcttcccctctcctctcccccccttcttcccntctttccttccctctcgataacgtcataaataggcg

SEQ ID NO: 51080 - DNA, 171 bp, Glycine max
accatcacgattatcgtctccttttacatcataggaggaccacttgggctgccagatacctccacctttgggtgtattctttgaaggattcatgctccttcttgcacatgttctgtagttgcatcctatccgaagccattatactgacatcgcctaacgaaggcaaccatt

SEQ ID NO: 51081 - DNA, 1032 bp, Glycine max
  unsure (1)..(1032): unsure at all n locations
ttgtattatgacttcgcgcactatnaanactcaagctttgcagcagatgccactctactctaaattgttatagatatggtatttttgaagcataaatatattcatcaggaaaacatcataatggaaggaaatngcagtgctgtgatccagaagatccttccacccgagcataaagatcctatgagaggaactattcctctgtcaattggagaagtcaatgaggaaaagctcttatcgacttgagagccagtatcatattgatgccactctncatgtgcagaagattgngagtggtggaaataatgccactcgattgacttacaatangtgatcgctccatacangccatatgcagaactgaaatgtgttgtcagagtatacatttatcttcccgcgacttgtggaatgatatcttgagatctgcantctgtagtatggaggcatcatgtgacgcagctctagtgtatggaagaaagctgactaggttgaaccaaatgattgattgtgtgnacagctgtcgaccatgtgctcagatggagagagagttgagagacaactaatccatgagaacgcgaatgctagatgtcagagaccgtatttgcttgtatgctaatgatggtacgatgagtacatatgacagtatctgagagaaaaacttaagcttncnccccctgttctctacgactcttatagtgggtattctctatcacctcgcttccgtctctctnnntnncncctctttncggtttttataattttatatttgtttatgatgttgttttctccccacnccccccccnnctncctctcntngttgttctctcgtcctccctctactcctttttcttcatctttatatatattcttcatcacttattctnnctnntctcctcnctccgattatattttaattattgttgtttattttcttctnnntnncnnnnnnnnnnnnnnnnnnnnnnnnnnnnnncnnnnnnnnnnnnnnnnnnnnnnnnnnnnnnnnggggggtggtagatgatacacagtcaaca

SEQ ID NO: 51082 - DNA, 679 bp, Glycine max
  unsure (1)..(679): unsure at all n locations
gcgctgatgccgatattctnctacncatcngngccgatttacaaccgatatgttcacttcatacatctgcttgatgcgatagaaaccagcccgaacccgcacacccgtaccgacccttgngcgnttnattaacttntatgttcgttcagtttacaggactggctcatggatcccgcaaacaagaagacagaagcnaactcttcaactgcctcttttcgaggtttaataacatatttcaaaacgaaccttctgtattataagaaccagggcgctgcttttctgaacagggaaattttatccccgggctacccaaaagcggttattagtatggggagaaacaaggacctctcgcnacttnnnannaaaaatatctcgttagcactaccctctcttcttttncncttcctcccactacaaccaccncttgctcttgtatatttcttaattattattttatatttattatatattntnntatttatttntnnnnnttttnnnnnnnnanctnnnnnnnnnnnnnnnnnnnnnnnnncctctccnnnnnnttgcccccnaattttncccaggttnnnnnnnnnnnnnnnnnnnnnnnnnnnnnnnnnnnnnnnnnnnnnnnnnnnnnnnnnnnnnnnnnnnnnnnnnnnnnnnnnaggggagggttctgcccacctgcccnncc

SEQ ID NO: 51083 - DNA, 457 bp, Glycine max
  unsure (1)..(457): unsure at all n locations
atcctctaagtcacctgctgcatgcaagcttgactcacaccaaacatgacatgtttatcatgctttcaacaaattccttcacgaataactaccataaggcataaacctagtaaaactacccatcatatctcccaaacacccaatacccacgaaattatgtgagaaagaagtctacccaaacctgaaatttatagtcccacaacgtagaggtgcactcacgactccgaaaatggctttctttcgcgatttggagcacaaatggtgagcacagggttggagcttgatagagcttcaatggtggaggagaaagggagaacaaagcaacgtgagggagagggaaaagcttatgaacttttggctgagtgaggagagagaacgtcggcttttagtttaaaaggcttcctcttctttttttaatanaaaaagggatgccacatgtctccttttgagtggagca

SEQ ID NO: 51084 - DNA, 112 bp, Glycine max
gagtcttatctacactaaataagagcatatacaaatcctgaattttacttatgacaaacatatataggtataagtattattttattttacttatgacaaacaattatatgta

SEQ ID NO: 51085 - DNA, 302 bp, Glycine max
  unsure (1)..(302): unsure at all n locations
agcagaaaaggcgcctgtagacagccgccaaattgcactaagcaacgttggagaaccacacgtcacagcaattacacactaagcagtggcgagagccacacagngggcgtgatcgtcaccgtgaagcgaagtaataacagaatcgacacccgngcagcggtgaagccagtggtgtaaacaaccacaacctatactacagcagctatgaagccgacgagtcatgatacaagtacagaaggcaagacctaccggagtgcgcctagcacaaagaggcacgtgacacagaggccgggtaagcaggt

SEQ ID NO: 51086 - DNA, 200 bp, Glycine max
  unsure (1)..(200): unsure at all n locations
tcacacattgcataaacactttatactttctcacttgtgatatacattattccttctctctaacacacacaatgcacacaaagaaatacacactctatggactctcaacatgagaaaacacataataatcaatccatcacttattctctttattntctcactcaacactctcatacattcattntttcaactctctcaac

SEQ ID NO: 51087 - DNA, 213 bp, Glycine max
  unsure (1)..(213): unsure at all n locations
cctcggatccctgtcagatacaatactagaaggaattccatgcaaccttactacttccttgatgtacaactccactagctttgccattctatacttcatccgagtgaaatgttatgaccattcgaacnnctcgagagccttcgctgttcgacttcgagcgtctcgatatattatgttcctgaatcgaacattcgagtgaaatgtatgacaatc

SEQ ID NO: 51088 - DNA, 162 bp, Glycine max
  unsure (1)..(162): unsure at all n locations
aaaatgcgaanaatgatgaccctatggctgcaaactcgtaaatcccgtgggtatggcttttgaaaggggggaaaagaagtttgtgaatgcaaaaacgtcccccctttcgtcatccttatattttggtgcaggggtggctcgcccaggcgagctaccctgcat

SEQ ID NO: 51089 - DNA, 127 bp, Glycine max
gttcttaactcaatcactcttatagacggactcattgagtacaaagcgacttgcaacagtttggtgaataattaaagacttttctctggatgtcacaatttgatatcatatagccatctaatatgaa

SEQ ID NO: 51090 - DNA, 1031 bp, Glycine max
  unsure (1)..(1031): unsure at all n locations
gggggatgtccgtgatagtacgctagcattacggacctatgaaactcagctatccaggatgacgtgccgcgtgagcatacaaagtggataacacaattnttcggagaccgctttttaagaccgctctggtgaagacatttttaagccgagtttgaagtaccgcgctttgcaaagctataaatatttacaaaagatgcatcactttatatattacaatcgggttcatatctccgacgtacaaatagagtacgagaacatgtctttcttagtagtgtataaaagccatccggcgtggatggaatctatacttacttcatttctaacattttccacagatatgagcaacgggcaagcggcactccattatacggtgctgttaacaactctcacgagagggtcacattgtgattatagagagtgaatattacccatgactcgcttctctctaattaggaagatatctacatctaagcaatagatgctaggtaggctgagtgtgttgacacagaaatgctagtaaggtatactgttagcttggagctaataggtctgcgtggatcgttctaatctcagaagaagattctattttctctactaactgaggaaaagctagaccccgactgtgtgctagtttgatgcattgttgcaatgcacaaactgcggatgcttttgcggtgtggagagacttttnccnnntggcggaaaagatttaagccacttgtgagggaacacccactgtggttggtgcccctcacgttgggagttaacaaaaaggtcagacccctacccnnnnnnnnnnnnnnnnnnnnnnncncnnncccccncccccccncccnnnccccccnnctcctctcctctcttctctcntctttgctctcttcgctcccttcgtttgtttccccctccttcgctgcctgctccggtgtctntctctctccgttttccgctcccgtntttcttggttgtcctctctcttctctctccctcctgtcctcncgtctgtcatccttcttaactatagtttaggtgcg

SEQ ID NO: 51091 - DNA, 200 bp, Glycine max
  unsure (1)..(200): unsure at all n locations
tcaattcaattaagaatgataaatcccaaagagaaaacgtccgattgatttttcgctctactttactaagagggatttttttgattattatattattattttacctctgttttgatttccaacgtggntaccgcacgaccgaacggtgggaattcattctaaccaaaattaacggatgatacaattcatacgatcagtgg

SEQ ID NO: 51092 - DNA, 162 bp, Glycine max
tgcctatgttgttgtggatgatttctctagatttacctgggtcaactctatcagataaaagtcagacacctttgaagtattcaaggagctgagtctaagacttcaaagagaaaaagactgtgtcatcaagagaatcatgagtgaccatggcagagagtttga

SEQ ID NO: 51093 - DNA, 164 bp, Glycine max
aatgagagaaagagagagggagagagagattgattgagagagagagagagaaagagaaagtggcatggaaaattgaaggaagaaagggagagaagttgaactttgaagcgtgtctcacaagactctcatttatcaaagttgtgacaagtgttacacatgtttct

SEQ ID NO: 51094 - DNA, 309 bp, Glycine max
  unsure (1)..(309): unsure at all n locations
atcacacatttatnagnggggggggggggcgggcggccttttcttcttttgtgttctattttcttcntcntnnnncnnnnnnnnncncncncnnccccccccccccccccccccccncccnnnccccccccccncncccccccctcctcctctctctcttacgttctactatctcatgcatgtcccgttttcttcnncctctctttctctcctcccnnccnntccnnntnccnttccnnttcnnnnnnnnnnnnnnnnnnnnannnnnnncccccncctttctccttatatatgtttgttatgttatga

SEQ ID NO: 51095 - DNA, 973 bp, Glycine max
  unsure (1)..(973): unsure at all n locations
ggggattgatgggtttgtcctgtactctcgctacctatgacactcagcttattgtatgtcttgataatngtaatgaagttattccatacatacttcaccatgacggcttagtgaaggaaagcaatccaataatgtcaaagaacacggtcttgaatgagcataacacacctttcctacattggttacggatacaatcttggttatgacatgcttctgatacgttataaagctagtagatgggcctaanagaaaatgtatcacttcgcagagactatgatttaaccacgattcctttttttccaaacgccagcaccgntacagtccattgcttatactgggcttctctaaggctgatctcacaattcctagtgacatgaagacatcctggtacttcatcttacttngtcataataattggacttaccatgcattatgatgttttcaatgagcggtgcatatatgtggcgacgagagatattatgtgtgtctanaatactctcatgacctctctgggacacaactgttattcaacctatagaaggtggtctctcgacatagtagtgaggtaccctatcttttctttccaccctctcaagaactaattcctctgtggaatatcggttctgaaatgttttaaaacccctccttganncnnncaactcttacttaaccccccccccaaatattgtgaacccgctgtttttttttcttttaagtattcgtttatattannnnnnnnnnntttatatatattttnnnnnnnnnnnnnnnnnnnnnnnnnannnnnnntgtattttgtgattgtttgtantcnnnnnnnnnnnnnnnnnnnnnnnnnnngtgtatattctttntttttcattgttngnnnnnnnnnnnaaccccnnnctggggnncaatgaggnnnnnnnnnnnnnnnnnnnnnnnnnnnnnnnnacatatnnnnnattctatttattcttatacaatgaaa

SEQ ID NO: 51096 - DNA, 218 bp, Glycine max
  unsure (1)..(218): unsure at all n locations
tctcactagccactttggtataatccacaatctcattagagacatcatcattgaagtagtcaattaatcttgaggcaagcacaacataaggatattcgtaatccaccacgcgacgactctttagcataatgtcttcaattaggagtacccaattcatgttgatacttgatttcaaaccataaacaatntgtagatcatcatttgttacctgagcatga

SEQ ID NO: 51097 - DNA, 145 bp, Glycine max
actcagcttgcagcgaatattatcatctcacagcatgggggtccgccggagcccaaaagacggctacaggacaaatgaaagagactgatctctggggcgacagtgagactgctgcatagagtgacagtacaaagcctttccctgc

SEQ ID NO: 51098 - DNA, 1255 bp, Glycine max
  unsure (1)..(1255): unsure at all n locations
ntgattgtacgctgcattacggacctataaaactcagctngagaaggctacaatggtgatggaggagcaagaagattacgtatgggaagaaggagaagaggctggaaatttctggaggaaagagagagaaggtcttgcttttaacatctttttttctttttctttttaattgcatttccacatgcaactttggtgaattggagcanaaaggggggcccacctttaatttagacttttgactcacgtgccttcagccattaagagaaagaaaaaatctaggacgctttntttnnngatgctgaagatctttgccttcgatgtngcgtggtcgtctctctcggttcccagttctttcacgtttctctgcacctgtcggggcccccgtttcaanggtngacannatatatatatatatatatatatatatatatatatatatatatatatatatatatatatatatcaaaacccttaaaatgaggccctgagcgtgttcagatgtgggtttgttattattattcacacaaacaataatttagataattattgcgaatatcataaccggcagtagggtactcttcttgttagttaccccgtttttcccactggcctttctccncgnattnttattattatttttttattttattgactgtattatttttattttatgtatttccaatcgggggagtngatgcggttgtttatatacatacagcttatggcgcgtaccttgtatangatgattgctctgtgctcatgngagacnntngnnnnnnnnaatatgagtattatatgtacatangaggcaatactcccccccctattatattatantttagantgtgtgagagagtaatattcaaggctctcttctctctctcacagagagcgtgtcccnnnnnnnnnnnntntntnnnntcctcccccccccccccnccnncccnccnncccncnccccncnncccnnctnccccccccctcnccccccncccntntcctcctctctttcttctccctgctctttctgtacttctcttagtattctatcgtacatctgtacttctctcttcattctcctccccccccttttccttcttcttttnctcnntcncnntnnnnnnnnnnnnnnnnnncncnnntcccnnncnnctnnnnnnncnnncncttttnnnnnnnnnnnnnnnnnnnnnnnnncnnnncnncncttcctactctttgtatagtgtagtttggtgtgtagtctgtgtntgtg

SEQ ID NO: 51099 - DNA, 147 bp, Glycine max
gccctcttcttcttttggttgcatacttactcccagcttatccaagcaatcttcttttgatctagcccacctccgcaaaggaatctccgctggagctttactaattcggcgaccactgattgaggtgtcctgtaacaagagaagaaa

SEQ ID NO: 51100 - DNA, 171 bp, Glycine max
  unsure (1)..(171): unsure at all n locations
gcttaagtcttggtatcttnttctttttatattctntnttctataaactatttgatgtttcttatgttacattagaccaaaaccaaccttcattcttttgaggctcaacaatactgaattactgattgttggtgacaaaaaattctgaanaacattgcttctttacaaata

SEQ ID NO: 51101 - DNA, 230 bp, Glycine max
aatgcgccgataccgttgactggtgggtaggtcttccaacgggttgaacacctgaatactgtattttggaaagacccaaaagaaggataaaagtaagacttgcatatgaaagaagaggtccattttctttgatcttccgtactggtctgatctagatgttagacattgtattgatgttatgcacgtggagaaatatgtatgtgacagtgtcattgggacgctccttaaca

SEQ ID NO: 51102 - DNA, 125 bp, Glycine max
tccatgtaggctcacaccttcctgactgttatgcctccaaacaagacgcgtttacaaaggcatctacatgaaatctgcttctttggtgaagctagccttgacataatcactgctacataaaatac

SEQ ID NO: 51103 - DNA, 929 bp, Glycine max
  unsure (1)..(929): unsure at all n locations
ttgtcctatgtatatcgcgcactataganactcaagcgtgcagngaagaccccaagaggcagngaacaatacttgtttctctttctatgttaaggaaccttgatagttgtcaagaattggatgtagtcttgggttgagacgaaccaaataatctttggtgtttcttttgcttaatgacaagggttggattatttgacttatatctttttgtttacaagaaaatgttttatcatcgtgactatgctagctctaatgtttaggctttctcattaacataacatgctatttttagaaaggtttaattatacacactatcaacccctcttggtattgtttaccattttagagatgtttgctgagatctatcaatataacaagttaatgctctaaacatctgcgctatgtgatgcaaatcaatctgtcaacaactgtgctgaaccacttgcttgttatgttataagatagactgtgttaataagcttgctcatacataagaaaactcttgttttcctacacgagtctacatgacttcagatctttctgcttttctctgtccgtgcatttgaacttattganatattattataccccgcctcaaacagggggagaggtttgggggtggagaaaaataaacaaaaaatacttctaaatatttannnnnngnnnnnnnnnnnnnnnnnnnnnnnnnnnnnnnnnnnnnnnnnnnnnnnnccncttcngacngccgcngctttcttctgctcctgtcttctcttcctcgtctttctcttctttcttcttctttcctctnctctttcctcccttttctcntctcttttcttctcgtctccgcttcctctctttttgctctctgctcgtcgtcttcttctctnccttgncctcttctcnctntctaatgagacttagacgtctgcccccatattgttgtg

SEQ ID NO: 51104 - DNA, 776 bp, Glycine max
  unsure (1)..(776): unsure at all n locations
gtgattgtgacctgcgcacgtgaaactcagcttgagggagaagcgtggaagagnccgnctttctacttctgtgtggttctcacccaatggtacctggagatattgtccgggggcaggagacctttggacgcaggtggagtgcttttccaaaacaagcttgccaatccgaccaccccgcatagcagcagtggacatgtgatgtcctaacagcgactctacagcaccataaaaaaaatccaagcaagagttggggcgtggcgttatttgggattaatgcctgatgtctagggacaacagctaagaaagagaagcttgatatcacggggacatccgtaaatgaaagtgagagctggatatcatgggatatccaaacagccgacattataggacatgcggatgtgtctggcaacggatatggctgatctctctgtctacaaatctgatcttgctcncgtgagtgtgctgtatttgaatcttctttgacagacactcgaggagtgaagaggnnnnaatttggtctttgttttttcttnttnnnnnnncnnataagtgtttttgttttttctttttttttttctctgatannnctnnnncccncccccccccgaccccgggccgcggcgcttccttttttcctctctttccatctcttttatcttcactccttctttttctttgtttcgctcttcacttctctttcctctctcgtgtccttttttgtcntccctcctnccnccgtactctcttctggtgttattttgtacttttatggttgg

SEQ ID NO: 51105 - DNA, 938 bp, Glycine max
  unsure (1)..(938): unsure at all n locations
nggggtatgtatgatntcttcgtgcacttagatactcagctngagctcanggacanggannagttngangaactntataatatgttnttgcttttacatgccctactcatttgagtggcattttgattgggtggtaactttgattggtgcatcttaacacatttgatatttggttcgcattgtgcatcatcatagtgtgtgtaaggaaattttctaagttagaaaactntcttcaaaggcaaaaactcnttgattaatcgatatagaagtgtcgaatcaatacacangctgctgagctngagagtaagctcgactgggtatctatacngagaantaacgatacatgtggtgaacatgatgattttcagagctctacttatgataccagagataatcatactctctctgtaagtgtcaaaggacagaacattatcatactggcatcatcatacatgctgagggttcaagtgacgccttatgatctctgaatnatctatattatatgacgttcatttttatacctggtctctctcgactngactctctcatcttactatgcatgcttgatagaaatctatccctacttgatctaaggtgaactacccgtgaggtcctttgaatattagtataattaccgaannnnnncnnnnnnnnnnnnnnnnnncnctcctnngnttngctttaatttattttcatttttttccnnngnggggnnncnnnncnnnnnnnnnntgtnnnncnttntttttcctggtcccacctacttntntcttattcntctatcctctttatgtcattttcctccttcctctctcctcattccctctctcctgctccccctctctctcttctccccttnttttcntcccttttnncncccnnnnnnnnannnnnnnnnnnnnnncccnnnncnnnttgataaatgttggttaggtgta

SEQ ID NO: 51106 - DNA, 89 bp, Glycine max
agtaatgaggtacctacctgcaagataaaccacaaggaccatgcagcgttagctgagagcatcaaaagagagcctctaatagtatcacc

SEQ ID NO: 51107 - DNA, 867 bp, Glycine max
  unsure (1)..(867): unsure at all n locations
ntggactgctacgctgcagacgngacacctcaaacgtcgggtgaacgagaccgacagcaagcgagacttgggctctgatacatagtgaagccaggaaagctgtctcggcggcacgagagcttggggacgacagagaagagcttactcaacgccggctagtccggtgccgagccttccaggccttaacagtgagcgcaacatgtgatatacctcaactggcgcactacaccagtcagggatacacgaatcaatccccttataaagactgttggtgcggacgactgatgtatatgtaagtattgatgtgcctggcgtttatcacaagttaagaaaatacacgtcacaaagagacgacggaaatgccgccggaagntaacccggcggtattatccggtctataagggaggtagagacgctcgcgcatacacgggaaaaaacaccgagagggtgggtgtagggtctccattattttcaaccagatatagatgttgtcttttactcaaaaaagggggttattatgagggtgtccccacaaaaaactgtttttcgggtggtttccctggcggtgggccggnnnnnttttttttttccctctcctatatcgcgtggtgttccggggggnaataaaaataaaatccttcctttctttctcaacacnnnnnnntnnccnnnntnnnnnntnnttgttgctttttcctctttgtttcgtgctctttgtcttcgacttctcctgctcccctcattctcgctcctttcgcttcctcccttttgcgtcccttcgttcccattcttgccttagctcgttctttccgcccggtcgtctctctcccttcanntacatactgagagagcccctctgaccgaggg

SEQ ID NO: 51108 - DNA, 208 bp, Glycine max
  unsure (1)..(208): unsure at all n locations
tgagcctatatatatatatatatatatatatatatatgtctgacttcgaaaagaatgagagaaattttcttagagaacttaattgtcgaatgctctctaaacaactatnggtcaaacacttgcaaatctattgagaattcttctaagatgttcaatctgtatcatctgttcaaaatgagagaaatctttttgttcatctcataaactc

SEQ ID NO: 51109 - DNA, 225 bp, Glycine max
ctgatctgtagctaaaatattctgatccgtaaaaaagaaagataacaggaataattagaccattgttaaaaaatgatgggtgcaccatcaatgatactaggagtacctaacaacactctcaactaattcaactaattcatactttatgctttattggactctcattacaattctctaattcattgatcatgtccagaactaaattaaattaatataataatactg

SEQ ID NO: 51110 - DNA, 145 bp, Glycine max
  unsure (1)..(145): unsure at all n locations
tatatatttgtatatcatcattcattttggtgtctttcctctgtgggcatggggatattgtcctaatttcttttagaatgcatctagattcatatatttacttgaggaaagtaatnnattagataatttaaatttctttaatcta

SEQ ID NO: 51111 - DNA, 114 bp, Glycine max
  unsure (1)..(114): unsure at all n locations
tggtcattgaccagtccctattctatgatntaacccaacggccaagcgaaggtgtaccatttgaaggtgcactgattgatgattggaagttttatttctctgtacatgatgccc

SEQ ID NO: 51112 - DNA, 255 bp, Glycine max
  unsure (1)..(255): unsure at all n locations
tgcagcngatgccactctactctaaattgttaaagatatgttaacaaggaagcataaatatattcatcatgaaaacatcataatggaaggaaatngcagtgctgtgatccagaagatccttccacccaagcataaagatcctaggagtgtaactattccttgttcaattggagaagtcaatgtaggaaaagctcttattgacttgagagccagtatcaacttgatgccactctccatgtgcagaagaatgggagt

SEQ ID NO: 51113 - DNA, 888 bp, Glycine max
  unsure (1)..(888): unsure at all n locations
cgggtgtctggcctcggacncttgatactaagctngagggatgctcaatggaggaaagaaagagggagataacatattttggtggagcncagaattgaacggacgaaatagggagagatgttgtacctttgagttgtgtctcacaagactctcattcatcaaaagttacaactagtgttacacatgcttctatttatagactaggtagcttcctttagaagccttctagaaaaacttccttgaaagctctttgaaaaagcttcttgagaagtagagctagctcacatacgccctgatacttagctacctcttggaggttcttagaagatcctatgaactaagcttactcacaccctcttaattctaagtcacctcttgaatgagagtgagcttctaccacccttatagctactaccctgacaaactgaatcaaaaaagttctcaagctccaatgccgatcggtaaccttctcgatgctatctgccacagaacttcattcaaaatgtcactcctgcaatactagtagactgcttaactacacttggtttccctggggtgtactccgagtgcacagtactgcctctacaatagtggtggtgagatgttgggccttgtcttgctattgctctcggtcttgctaagtgcttctacctaagttggttccctctggccgccttcgtttctcnncnnnntgtttngnttgtttttttngtgagccgcgcggttttttcctcggctgtctcgctttttgtttcccgttcccgccttgctgcactgtccgtctactcctccttctctttttttctgctcgntcctgtcccntctctagtcctctttcnncnncccctcnnccnntccccccccccccccccgagtggggggtttgtn

SEQ ID NO: 51114 - DNA, 72 bp, Glycine max
  unsure (1)..(72): unsure at all n locations
acttgtggcttatggtattactacccttctatgcagntgttgggacacatttttatatgaagttgacaaaat

SEQ ID NO: 51115 - DNA, 116 bp, Glycine max
  unsure (1)..(116): unsure at all n locations
gctcactacnnnccntaaatgaaaaaccatgatatcaccatatccttaaggaattntggagctttggaattgttttgggaataagtgtggnggggtttttgtttcatggaaacatg

SEQ ID NO: 51116 - DNA, 728 bp, Glycine max
  unsure (1)..(728): unsure at all n locations
ttgatgtacctcgcacccggaccataactctagctatgacaacaaggtacccaacctacattttttttatggaaanaagaattatgagattggtaactggatgtacaacgagaagggagatacaaagatatcgaagaatgagaagaatccgaagagagaagaataagtgaaaaatagagccaacccgtgggatgaaaaattgagttaaatgaggctcttatcttgaattgagactatgccacatgtagatgatcccatagcaattacagctcaattgactagaaaactgtatcttacttcaagtaaaaataaccaccttataaaaaatttctataaataaaacttggtgttacgcctttctttctgaattttaaactcaatacactcgatgtgcttagttatacttttgcttcagtcttcgagtgtctttttgcagggcatgtattgttacagcgaaataacagnntgagtttttttttttttttgctggnccctcgnnnnngggcnnnnannnntnnnnnnacaacgcnnntnnnnnnnnncnncncccncccccccccncccccncncccttcccctcccccccctctttctcctttgcctttccttttcctttccctctctcccttcctctcttgctattttcttttctcttctttctcttccccnccccctttcnccttncnnnnncnnnnnnnnnncncnccttttttgtttgttgttgttgg

SEQ ID NO: 51117 - DNA, 197 bp, Glycine max
attcagaaaattagaggttatctcttttatcttagtgagagtgattctcctaaattcttgagtgattcaagaacaccctggctgtatcaaaggacattcacaacctttgcgtgttgccctcgctggaaagagtgattctttccttcctttcatcttcacccttgttctttcaaccacaattccagaaaatacacctc

SEQ ID NO: 51118 - DNA, 177 bp, Glycine max
  unsure (1)..(177): unsure at all n locations
gctctgatccacttgttgacatgtggcctcagatatcttaagaaggggggttgaattaagattnacaaactgtttcccaataaaaattctacttgattctaatgcaagtccaagtcccttaagataattctaagatgatcaataacatctgatgtactgtaacaacaataataaaag

SEQ ID NO: 51119 - DNA, 76 bp, Glycine max
  unsure (1)..(76): unsure at all n locations
cgagtagtcgaagagaagntcaagttcatagccatcaaagtctgaaaagagtatgatgaactaagggacgtcaata

SEQ ID NO: 51120 - DNA, 191 bp, Glycine max
ccttgagaacaaagactaagtgttgagattgtatattcatctgtgagacaatttagagtaatcattttgcacactaacaacaatcttttgatatgtgagagccaacaatggttaggaaaacaaagaatattggtttaacaagcttagtctagagcttgtattgttgagccagaagtgacaatgattaatac

SEQ ID NO: 51121 - DNA, 976 bp, Glycine max
  unsure (1)..(976): unsure at all n locations
ngggctagngatagattacgctagctattccgngcactatagntactcaagcttagcctaaccgtcangcgacagattatantatgtctatgtatgatacgctcaccgccaagctataatccttacggtcataactgaggctcatgaagctaagtgtcagacatggcagataagctgaattccttgcagcaatgtgagcactaatcaagntcggatcatctaagcgcatgctcctctgagcttaagatgcatcatttaagctaagcccgtccacaactcgacttacngagagttatagcattcccgatcttgtaaaccctctaagcggacgcacatctaccttctcccgcgcgtcggcttaacttcaccatcctctcatttcttagtggcattgcgcccgtcccacgtgcatcttcctcacatttcactactatgagtctatgagatcccccatttccntattcacctgatgtggtcttccgccctccgcactatgcgtggtnnttntnnnnnagaaagtccggtnnnnntcaaggaacgtgactctnnnnnnnnnnntattgtcgctggtttctnnntaatggggnnnnnnnnnnntcctttttaatacttcttatttatnntantaatnnntttttgtttgtggggatctttttcggccccccaaagacgtgtgaatcattanatatgttctttctctctcnncncngcaggnncgcccannnnnttcctccttcttctnatttantnnnnnnntntnnntntttttttnnnnnnnnnnnnnnnnnnnnnnnnnnnnncccggtactgagcgttgannggggctggnnnnnnnnnnnnnncnnnccccnntcctcccccttncctcccattnctactctccctcccttcccngtcttttnnnnnnnnnnnnnnnnnnnnnnnnnnnnnntnnnnnnnggggggnnnnnnnnccncccaaagatccccagcccca

SEQ ID NO: 51122 - DNA, 494 bp, Glycine max
  unsure (1)..(494): unsure at all n locations
gtacncaatgtcttctgatccacgcgacatatctccaagtaccactctgcggtcaacaattaaaacgggaagttttacccttcaacacttgctcatctctaacaagctgaattatggggtacccgtcacatgcggtactaagtggcggacgggcgattgtgcacaacaatcctttccacatactacaatgtccagcatataacccaccattcctctgtctgcccaccttgcaactaaagcacactgtaatcccacttaccctcatctccatcgcttttctcaacaaccgggtcgccatcatatcttcttagctttcacaacatccaatcgaaacaactgttctatctgaccatgctatcactactcatgccaaacagagcaaatgcggatagacttgctcacacatctaccaagatccacgtatattccacgtgagacacaacgacaaattcttctatcaatcactaaacgccgatctactccaagttactgag

SEQ ID NO: 51123 - DNA, 398 bp, Glycine max
acacgctcatccaaactacaatgttgtacaatcaacagctcatattcattagaaattgtcagatcgatctttgtcttatggagagttattgactcactagtctgaaaacaagttggataaaagtaaacctcttcaaacacctactcatacctagaaatagtaacacgagaaaacgtatccttcctactcttcttaactctttgtcttccttcaagagaatttcatttgtgtctatgttttcatttttaaggacactctatttctcttcttactcactcagtcagtaatttgaatacaatcatcatcttcactattgccaacatcaagttcatcattatggacatctcaactcttacctgtctcaacattagcaacctcatcatttcctattaattctc

SEQ ID NO: 51124 - DNA, 316 bp, Glycine max
  unsure (1)..(316): unsure at all n locations
atgaatccgtggccacctcatggactcctataagaacaatagaatcatttcttgcactgaattgttgggagttggaagccatcttctcaatcaaatgtctagcctcagcacgggtcatatcaccaagagctccaccactggcagcatcaatcatactcctctccatgttgctaannccctcatagaaatattgaagaagaagttgctcagaaatctggtggtgagggcagcttgcacacaatttcttaaatctttcccagtactcatacaagctttctccactaagtttcctaattcctgaaatgtcttttatgat

SEQ ID NO: 51125 - DNA, 355 bp, Glycine max
  unsure (1)..(355): unsure at all n locations
gagagtattttagcacataaggctaaataatgtgaaatgtatcacagtgggagattcatgtgtctttcatttctctctctgggatcgtcagagaagaaatcaactagtggccctttagagtggagatatgatgcttgaaggatgggaagaaatcaaggatgatgtgacaaaccacttccagcaagtgttttcagaatcaaatctcatggcctggttaccacgtattgagtttaaataaattagccaggtggatagcacttttcttatcactccatctttggagctagagatcaatgaagcatgttggagtctngattgtgataaaagtcttggccctgatgggtttattttcaat

SEQ ID NO: 51126 - DNA, 342 bp, Glycine max
  unsure (1)..(342): unsure at all n locations
acagacaacaagggctngaatgagatgagagcttgaacgagacgtgaatgaggggtctccccaacccacttgggacgctccagcttccctatttcacacctacccaactgcgcttgcgcggtggtggtaaagtccgactacgccgtgtgaaccgaacagaggcgttctctatgaagccgagctgtagatgttgtggatatgtcgatggccgagatcaatgcatagaggttctgaagtggcgacaacagagccatgtgtgcctactgcatagagggacacacgccgtggcaagtgacaaccacgaatgcattgctatgcttcgcgcacaatctcgttcaccta

SEQ ID NO: 51127 - DNA, 453 bp, Glycine max
  unsure (1)..(453): unsure at all n locations
actaagcttggcctntcacgtctggaatatgaatgtggcatatagatccaaagacccttacgtgctttgttgatggcttcttctcgttccaagcttcactcggagtcttgtcttttacagacttagttggacatctggtgagtatgtaaacaacagtgtagactgctctagcccacaatgtgttaggtagtcccttcttctcgagcatacatctagccatttccataactgtgcgattctttctctcggacactccattttgttgaggagaatatgcgactggtagttgtcgctcaatgccttcatcctcacaatatctttcaaactcgcgagaggtgtactctttgtcatgacacttcttagtactattatccagttttcactttgatnttcagcaagggccatgaacatttagaatactccanagacttctgattgttctattagaaaata

SEQ ID NO: 51128 - DNA, 488 bp, Glycine max
  unsure (1)..(488): unsure at all n locations
tgatccttcagtcacctgcggcatgcaagctntgcgtgananaatgatcaacaattgaatctgacaaaaaataaaaagaaaatatttataatagcacanagaanaaggatggttgtgatgattagtaagttagtcttgtaatgtccatttgaagcaaaccatccaaaaaaatagcctattatttttccttccatggggatagtacaaaaatgaaatatgaaatcacatttagaaccaatgagaaaatacataaaacaaaaagaaagtgttagaagacaaaataaaaaatctaagaaaagatgcgtaaataaaggaaaaatatataaattatctgactttgacttgttacacttaaatacctgaatttcaaatttaatntgtcaccaaaacaatatgacttaagtgaaatattaaacatttatantgtaaaaataactctagaaaaaaataaactanaatataaaatgcctttgttctatataaaaatg

SEQ ID NO: 51129 - DNA, 433 bp, Glycine max
  unsure (1)..(433): unsure at all n locations
gacgaaggaatgtatctaccttcactcacccaaagatgaatntggctatcgggcttgggatccaatcaataagaaggttgtccgtagcagagatgttgtattcttcgaagaccaaacgatcgaagacattaaaaattcagagaagccaagattgagaagcagtaagaacactgaacttactccagttcgacgtgaggataatgacacaacagaaaatagtgatgctgaagatcatgagcctatgttagagcaaaacaatcaggagactcatgatgaaccaggtcaggaagatcctcaatctagctctctatcagtgccagagccaagacgatcctctagggaaagaaggccatccacttgatataacacagatgagtacgtgatgctcactgatgatggggagcctcaaagcttatagaagccatctatgata

SEQ ID NO: 51130 - DNA, 426 bp, Glycine max
  unsure (1)..(426): unsure at all n locations
ttcactgcctctaccttcaatcttaaccttgatttcatcagaaagaatagcaagagcaagaacaagaaggtgccttctgaattntctccaacaccctttagaggtgcttgtaaccccatcatgaacaaggtaatttattttttgtttctgctttctggtacttttttgttttcttttctattctatgaaggttgggaaacattatactatagaaatatgtatatgggcattattttctgaactcaaaatttgtgataaatgttgatagggaacattgttaattaagcgccccagagaaaaaaaaataaaagaggaggaaatcaaagaaaatattaaaatgggatttcattgatatgagaaaaatacaacataatgtgagtctgatcataatctatctagtatttatagatcttattgaattgacac

SEQ ID NO: 51131 - DNA, 471 bp, Glycine max
  unsure (1)..(471): unsure at all n locations
tcccggattcgaatatacataccccagaaaccccaaataaatcaatccctagaaagcaagctataaacatgcacaaaatctacaagctcagcaacacaaccctatctagctagcgctagcccctctcattggggcattgtttgctacattcaaaatctactacctcagcaacacaatacctgaaaccaagtcatggaaagatacctgaaacagagttgcccaaagtcgtgaaaggttgcagagatagagatatacaatcttgaagaagaaccttagatgaaaaagaggagagtgcgagcaaaatagggcttgcattctaatatttttaaaacataacatgattataaatatcatgtttcaaaaattccattntagaatacaaataagcttggtatgaaaatcttcttatgtatgcatnttgatatntctcatnttgagcgtagaaagatctaatgcagatgcattatatga

SEQ ID NO: 51132 - DNA, 345 bp, Glycine max
  unsure (1)..(345): unsure at all n locations
agcttctgaggaagcctctaatgaancttctatagacaactacatgaagctgcctcggtagaaacgctgcccagccttgttaattgttggatcttctcgacaattggtttgcaacttcacaagacactttaccatgaattaaccgctgcgatctttgagaaaatatctggagtgtgctagaagcttccgttcccgagagcatctcttaatttaagcatttcacccttctgtttcgtggtgcttaagagaaacgtcatttcttcttctttctttcttccaaagccatttctaaagttccaagaactttctccatcacccacatncaccattagccacgacaaacca

SEQ ID NO: 51133 - DNA, 403 bp, Glycine max
  unsure (1)..(403): unsure at all n locations
ctatccggcctcctattaacagggctntcattgagaagtactacatgcccaggcagacacagggccaggcaccacagtatgcaactgcagacgcaccaccgccacctccagagtccacctctgatcacctgcagaggttggaacgttgtatacaacatgtgactgaccagcaggcggccaaccataggggtcaggtatggctaaatgagagcntttatcagtacaccctacatcagcagagccaggatcccaaccctttcgcatggcctactcctgagcagttcgaagccgcagtggcatggcctggagattggcccaattttcagacaagggcagggcccgcagggaactctagagatggagacggagctcaagaagatgatgacatggctgatgtcatgga

SEQ ID NO: 51134 - DNA, 355 bp, Glycine max
agcttctccttaccttattggcattctacatcacatgtacattattctctccaatagaaacatttcttgttctgcttatatgcgaagcatagaacgttttataaaactctgaatattcacgtgtacagattagtacatatgccacattccatttttattttaaaaatataattacgatttaatatgaaatgtatataacattaatataaacttaaaattttaatctaattattaaaatattgattatactaatataacatttaaaataatttaataaatttatactactagtatttctaaaaataatgtattggatattaaattccgataagatgaatattgtagtacatcattt

SEQ ID NO: 51135 - DNA, 414 bp, Glycine max
taagctaggtagcctatggggtacccgtcatatgtggtactaggtggcgatcgggctatggtgcaaatgaactctcccacatccacaaatcaaacatgaacccaccatccccagttgcccaccttcaactgagctcacgtactccaacgtagcccttatactcgttcctctcagcaccgggtccccatcaaccctgtcaagcttccataatatccaagcaaatcaattccaactatctgaaactaccctcaaccaagaaaacagagtagaggcagaaaaatctgcccattacacattcacatattacagctttcctactcaaataccccagtaacaatctcttcgttccgactcgttcaccgttggatcgacttgaaaattatactggagtgtcctagtacataatcttacatt

SEQ ID NO: 51136 - DNA, 317 bp, Glycine max
  unsure (1)..(317): unsure at all n locations
agctagagatgaggaagtgntgattggtgcaacttcctgcttttattgntgaccacagagtgtgacctggagatatgtcgcacgggtcaagagaccttgtggacgtcacgtggggtgctattgccctaaaacaatcttgaccaatcccgaccccacccgggcatattcagtcattgagatcctgagatgtacctatgcatgcgagctcctgtctgtcaacatataataggaatacaagaccacaaagcaaggatgcttgtggtggctggccagctgtgaattttgtgtaatatgtggattgtggtctctggtaatca

SEQ ID NO: 51137 - DNA, 368 bp, Glycine max
atatgaccctgccatctcatacagacatatcaaacgtgacatgacagcgtttgtagctgtttgaatccctcacccactctagtgtatgacacaattatagcatttctcttatgaaacactctccgcttttaccactctaactccccttgagtcttgacgcatacaagagattatggccgcaacaaagaacaattcaccaatatgtgtgaggttacgctatacagacacggacaaggttaaccattataaacgctaacaatgcttctaggcacaaatgaatgacatataaatcataatttaggaattcaagttacaatccttcatgcacacaatatattatcctccagagatttatttctaattcttca

SEQ ID NO: 51138 - DNA, 397 bp, Glycine max
agcttctcctttcatggcttatcctctagtagatggcgcctcatctcacctcttatcctttatcttgcgctgcaactccatggccgagaatcaccattgaaggaccttattgaagctcaaagacccaaactccatagaagcttcacaagaaagcttgcatcaatattatacttagactatcctaacaaatgatagctctttcaattggaaacccaagattgctaaccagacctttaagtcagatcccatcctttattgcttctattagagcatgcattctacctttgtagtggataaaaccacaatgggctaaagagtttccttcatactatcaagagagttgccaatgatgaatgcgtaccttgtcatagttcttcttgcattcaaatctacagca

SEQ ID NO: 51139 - DNA, 401 bp, Glycine max
  unsure (1)..(401): unsure at all n locations
tagttccttgcttagcccataaaggtttccagataaggctaatgaacttagcatctctatctgacacaataatcctacgcaaaccatagagtctcataatttccccaaagaagagttttgagatgtgggaaacatcatcaaccttatgccatggtataaagtgtgccattnttctaaacctatccaccaccacaaagatagagtctacacgtctttaggttcaaggaagcccaagaacaaagtccatactaatgtctaccgagggtgcaaatgggatgagtaagggtgtgtatagcctatgaggtatcaccctagactagggcttgtaacaagccacacacctagtgcaatcactacaataaaaatgacctatacctacagacaaatactgtcactataag

SEQ ID NO: 51140 - DNA, 368 bp, Glycine max
  unsure (1)..(368): unsure at all n locations
agcttgtcaatgactntgtaattgcagccaanaatgccatggaagcgggtataataatacgatacatacatatgtaaatatttgatgttacttattttctttaaattcatatataaataaaaataactattttttactgttcaaaaaagttaattaaaattatttttaaaatactttttcaatatcaccgagaattacaattaaataaaagatatcttaaaaataatattaattagatttatttatatttgagtttaagatgtaaaagtattttttttgtttatatataaattcaaaatgaacatcaatgaacgatgtaggttttgatggaatatagatacatggagcaaacggatacctgctggatc

SEQ ID NO: 51141 - DNA, 171 bp, Glycine max
  unsure (1)..(171): unsure at all n locations
ttagatacatctacttattctctccaattgttaatctttttgtttctgcttatattcccaccgtanaacggttcaccaatgcacgcgcccttcccatatatgtgattctccctactcccctcacccttttgtgtgctggaatccttgtacgcatcactatgaaatgtatat

SEQ ID NO: 51142 - DNA, 468 bp, Glycine max
  unsure (1)..(468): unsure at all n locations
ccgggatacgtgggccaatgaatctgtttctcanactattagtacaaactgcatattctggcaggtcagtttcctactcggttgacttgaatactggtggttagttattttctattttcaaaattttattggcatggtcacttataacagtagatatatttgcagaattattcactttcttaaaaaaattgtatttattatcttgactcaatactcaaaatggcacttgtgacgttaagctttataagagtatactgtacctcaagtatttttacttactgtagtttggagtctttagtctgttagctctatcaactaactctggttagtngacagataggttatttgtgcagtactcactgcaactatataatctttctttgtactgtttcagttgggttgatattaacagntactcaatctcaatcttctctttctctctctctcacaactcttgaaatctaatat

SEQ ID NO: 51143 - DNA, 261 bp, Glycine max
aaaccctcattcatggctttctggcttgaaggtggaatttagaatgacgtaaattaggagcatactctcacctcacacatgattataacatcagttttaacatgctcaaactggatttacacctaaatttccaccgaatcaaaatttgactcctcaacacccaattttgccctagaaatggctcttgggtcactttggtcatttgtttttctctctagctcagcctaacctttctcacatgtcctaaatgacattctaagc

SEQ ID NO: 51144 - DNA, 370 bp, Glycine max
  unsure (1)..(370): unsure at all n locations
gtaatacaaagaatagactctctacgatcaatgtttctcttganaagtatgtcattgtgtttatcttataaatgcatgacttatcacttctctctacttgttcngcattttcttcgagtcctcgatgtcctctttatactgagaggcgtgtgaatagatagaggatcttcaacattgaaaatatgaccattgttgattttgattcttgcttcagctatcgacaattagtgtgtggtttataattatctcgaatcaatactccctaaatttgtctttatagctcaaaataactgctagatatatataaagaatgataaaatagacttacaaatcgacatagctccatgtggagcttgtaagtcttggatct

SEQ ID NO: 51145 - DNA, 383 bp, Glycine max
  unsure (1)..(383): unsure at all n locations
agtcacctgcggcatgcaagctgtcaattctcttggaagatcatcatttgttgtggtttcatcaacttatgaattctcattgcttccttttccttttcctttagaatcttgtccatgaatatgcatttgttataaagattctgcaatatcatttaaaatatcctttcttcgaggaatagcattagactcatcaaatgaaacatgaatagattcttccatgaatanggatttaagtattatggacttgtcttctttcttcctcacttcaatttccctaggattttctgttgttgtatttccagccaccatggtgggtacataagttcctatttctatggcttcccaaatatttaagtatattgcctcattgaagatttgcattc

SEQ ID NO: 51146 - DNA, 431 bp, Glycine max
  unsure (1)..(431): unsure at all n locations
acttcaatctcagctangaataagtgatcataattccaaacatagggggagtaaacgcacaatttatatatatacattgtttgcttgaatcttgatttcaggacttatattgtcatcatcaaaaagggggagattgtagaagcaaatgactntgatngtttgatgatgatcatgatgatttgatgcaaatgattcaagaatacaagccacaacatcaagatgatcactagtattttaggaagggaattcctaattgatttagcaaaatgtttggccaagtaatttgagttaaaaagtgtttttcaagagatntactctctggtaatcgattacgagaggatgtaatcgattaccagtggctaaaaatggtttgcaacagctactaaatatttgaattcaaattttagactgttgtatcgattacaccatat

SEQ ID NO: 51147 - DNA, 395 bp, Glycine max
  unsure (1)..(395): unsure at all n locations
tgatcctctcagtcacctgcggcatgcaagcttctctagtagagcttctaggagaaaaacttatccagaagctctattatgaaaagctcttgttagactagttaattaagtgtttggatgatacttatttaagtgcttcccttgaagagcttataaaagtagtgcttggataatttacaaaagtgctgttatattcttaaaattaataaaaaggtcataaaaattaaatgaaatatttaaactaaatacaattaaatgtaataattttttcccttttattaatgaaaatatttctatnttaactatttatttatttccttatatattntctttaattatnttggaaaagtattataattaanaaaggttcaattagattccataatttctaaaaa

SEQ ID NO: 51148 - DNA, 449 bp, Glycine max
  unsure (1)..(449): unsure at all n locations
tactaagcttgcgcctgggatcctcacaggttcacaaagcctcgacatagctctacaagcttgtcaaaactcagggcaaacacatcctcggtccaaggctcgacaaacctaaagttcacccttggtgagccctttttgtttctaagttccatcttcaaaggaactcgaggtacacaaggtttgtccttgacgatcttctttatntcctaattttatctgtctaggaatacgagtatatataaaacccaaggtctgcccttggtacagattcctccaaaacccaaggtccacccttggtacgtactcctgtaaaacccaaggcatccnctatgtccactcactcgcacaactatgacgaccacaatcaaaggtctaagttcaacaacacanactaccaccaaactatttggcaaggcctttcaatcaggtggaagtcatacttgctcctc

SEQ ID NO: 51149 - DNA, 107 bp, Glycine max
  unsure (1)..(107): unsure at all n locations
agcgtanggtataattggatcaacggtggaaggggagggcgtgcatggtggaagggattttgtactgctatgattatttggggaaaatcaaacggttcaatgttccg

SEQ ID NO: 51150 - DNA, 314 bp, Glycine max
  unsure (1)..(314): unsure at all n locations
ttaaaaatactgttaattaatatttgaatntntattcctttattaatatatatgtgaggggtagagggtgtcacattgtggtatcttccaatcaaaacttgttaattaactattntttatcaacaggcagctgtgtctccagcaaaacctccaaaaagcctggatcatgaagtcgatgatcccctgtatctgatgacattgaccattccacatctatttttgaaacctgtccatgttatgtgggatgtttccctattctgactgtttaattcaaacttccccttgtacataaagcatgaagatctatctgaaat

SEQ ID NO: 51151 - DNA, 388 bp, Glycine max
  unsure (1)..(388): unsure at all n locations
agcatgactaaacattaacatgttttgttggaactaaagacagtctagttgttgtcactatcctcccaatcctcctacctcctaattatgatatcccaaattttttcataatatctatagtaaatagagatttcatctccatcatcaaaattcatttcttcaagaaaatcgtaccatggttgcgtaccgagatttgtctcccgtgtgaatctcagcattaaagttggtataggaaacatcaattatgggctgagggaccacaataataaatgttagcaatcaaatacttttaatatatgtagctntgtgcagttggatgaagcccacatagtcactttgatgactgcaaattgtaataggctagatgtgtgttgtggtgttggctttg

SEQ ID NO: 51152 - DNA, 411 bp, Glycine max
  unsure (1)..(411): unsure at all n locations
gtaacaatgccttgagcatagaattcaatagctcaccacagtgcctatttcgggaaaagagctctggaggaagcaagaggagcagattttgcagagacacctaggttttgtaatttattattgttggggtttcttttgtaatggctggctaaacaccctagttggggatttctaatgaatagtagatgtacatacttaatatctaattgattatgttttctatgttcaatgcttcctacaatgcttaatgtttgtgtgcttttggtctgatgtctgatcatccatttgtgtgcatagttaggtgactntagcattgngaaatgaattgttgccttagaacttgattgaagcaagatcgaaacttagtcttacaagaggaatgntgcggattaagtnttttgtttaattatg

SEQ ID NO: 51153 - DNA, 369 bp, Glycine max
  unsure (1)..(369): unsure at all n locations
cacctgctgcatgcaagctagctctnaattacattgatgttngtatntatgggacgaggntatatgccattttttgctttaagagtaatgtcccactaaaactaactttccaaatgtttgccttcgcacgaatggcaccgaagaagcttgcctcanagacgtctatgaatgacaatgcggccgaatgaactaattccgccccggagtacgacagtcaccgctttaagagcgttgtacaccagcagcgtttcgaagccatcaagggatggtcgtttctccgggagcgacgcgtccagctcagggacgacgagtatactgatntccaggaagaaatatggcgccggcggtgggcaccactggttactccca

SEQ ID NO: 51154 - DNA, 478 bp, Glycine max
  unsure (1)..(478): unsure at all n locations
tgtccaanaagtggagaccataggtcacaggtctgagagtagtaaagagtcttgattccatgtccattgaagaactagttagaacattaaaggttcatgaattggaactaaaataggatgagggaatcaaaaaggaaaaatctatgtgtgcacaatagaccaaaacatcctcagcatccacctctagatcaatgcacaataatgcccctaatgcaaatccaacttagacaaagatgatcaactagccttcatatctaaaaagataaaagaaagatgtgaaggaagagaggcagatcaaactggaggggctcatccaagaagcaatcttgagatagaaaggacaaaaagaagagtttcataatttgttacgagtgtaagaagcctagacacttcaagtctgaatatccatactaggataggacgaaggactagaagaatcacttcaagtcgaaaggcaaaatggttctcatgagcacat

SEQ ID NO: 51155 - DNA, 174 bp, Glycine max
acatttcattgtctgttgcttctgcatatgtgaacaaccactctcactacaatgcaagctcttttcaaaagcccagctcatattatttggacactaccatacattaatataacaaaataataaatatggcatagaaaaattgaacccacgaacatatactataacataatacta

SEQ ID NO: 51156 - DNA, 400 bp, Glycine max
  unsure (1)..(400): unsure at all n locations
cgacaaaccagcatgtntaagtaataataataataataataactattattattattattaaataaaaaaacttctaaataatcaaatatttgaggtaatctaacattagttgatgagtaatctattacatagagattactacagttatatagcccaaacgtaatctattacaaagtttttaattttcaagacaaaatttcaacataaatttcgataccagatgtcaaacataataatgttaggaagtcatacatcgtcggtatcaactctcggagtgcagtttatatatctattgggtaatttcacttgatgttaattgatgttatgataaaatctaacatagtatcggagcctataactcatcttggttctcgcctgtactggtaagctctcttgatct

SEQ ID NO: 51157 - DNA, 413 bp, Glycine max
  unsure (1)..(413): unsure at all n locations
acactatcaatctcagctatgtnttcaatacgagcgtctcgaaatcctactggacacaattggacatccgagtgaaaagttattgtcgtttgaatatgtttagagcttctgttntcaattacgagcgtgtgaatatcctacgggacaaaatcggaaattcgagttaaaagttattgtcgttagaagtttctcattgcttccgttttcaattaaaagcatctcgatatcctaccggacacaatcgaaaatccgagtcaaaagttattgtctgtcgaatttgctaagagcttcagttttcaattacgagcgtctagatatattacaagactcaatcagacatccgagttaaaagttattgtcgtntgacttttctgagagcttccgttttgaatgtcgagcgtctcgatatatta

SEQ ID NO: 51158 - DNA, 367 bp, Glycine max
agcttcttccgcaattttctatatatagggggagaagtgaagtatataagggttcatccccttaggcactattctctctgtcaaaatagctgaggagaattagctccgtgaagaaaatcctagccgatgcgcttgcgtgacgtttccgtgagtaactacgcgaagattctcgaccgttcttcaagattcatcgtatgttcttcgttatcttcagtctgtaacggggtggtacctcacaccaagcatttcaattgattctatgtacccgtggcggcccacattttgtttcatgtattgttattctcagtttcatttacttcttatacaccctcttggcgtgcttaagccattatattaagcatttctc

SEQ ID NO: 51159 - DNA, 400 bp, Glycine max
tgagaagctagagcttagctacacacactcctctaatatctaagctcacctccttgagatgagaaactagagcttagctacacacaccctctataataactaagctcaccccatgctaaaatacatgaaaatacaaaaaagtccctattacaaagactactcaaaatgccctgaaatacaaggctaaaaccctatactattggaatggccaaaatactaggcccaaaagaaggaaaaacctattctaatatttgcaaagaagattggacccaaccttcgcccatgggctcagaaatctaccctgaggtttatgagaagcctatggccttctttagcagctctagcccaatcctcttggagtcttctatccaatacccttggggggtaggattgcatcaac

SEQ ID NO: 51160 - DNA, 367 bp, Glycine max
  unsure (1)..(367): unsure at all n locations
agcttatgcataagagacttccatatctttctagtcacttcanaaatttatatcctaagttaatatataaatacttgagagaanattattctaaacaatgtgagactttatcttttgaaatatttttcaagaatacaataaattcttccaaaaacattgtctcatatgcatattggagaagatttattagcacttcatctttcccaccttgaacttatgaaatagacctttgtcaattgtttctctaatcataccacatatttttgccacaatattaaanagaaaggagactaatggatcccctttccctcaagcctttagtcaccaactcacataaacttacttgggttctcatttactaccacct

SEQ ID NO: 51161 - DNA, 384 bp, Glycine max
  unsure (1)..(384): unsure at all n locations
tgagtctctctntttaattgatcacacttaaagctgggctacataacaaaccttgatttaacagtgttcctagtctccaatatgagactccatggtgatgttctcattgttgttcaataagactttctgatcctcttctgagcttatgtctagtaccatgaacaatttatttataacagaaagaagacaatattacaactttcactatgcttgacaattgctttgtgaattgctcgagagtatctctcagtcttttgatttatatttacatcactgcataattgaatcccaaccattcaaggattagatgaaccatttacagcaagtgtccagaatttcctaacctaaatatatagaagcaattagatcggaataacaatgaga

SEQ ID NO: 51162 - DNA, 420 bp, Glycine max
agcttgtggggcttatgtaccatacgttccgtatatctcaacacatacttaaatcatggcccgccctcatgctcaaatcgtcgtaaccctcaactaccacccacgaactcagccacaatgcttagaggggtagttcatgaatattgtgtgactcccacgacaaaagacgtgcatatatataccgagaggggagaccccacgggcattttcctgattctagtgagaggcgcataaacaccttagagtaccactgacttactcattggaatcccttttgtatgtaccttctcccatctcaacaccagagatcagatattccattgaaaagaagaggatgagacatctcaacgagaagatatataatatcagttttctttacaaaatatataaatacacttcttttacctaaatacctacact

SEQ ID NO: 51163 - DNA, 412 bp, Glycine max
  unsure (1)..(412): unsure at all n locations
tagtaactaataccaatctagtttcttctagctggaacacaagtntaaatccactaaatntagtcaaagtagaacgaggaagatcaaatattaatgtcacaaaaagaaaggattgatatgtaccaccaatttcaatgcccttatgaacaaaaggaacagaaccagtaacaatgatgaatatttttgtagttactattttttctaaagagccaactttcaccttttgaggaccctgcacagttgcacaaaaatatagaatatttattttcatttgatatgcacttataacaattgaataatcttgttgcaactcctctcctcatgcctattaatacaaaatatgtagacacctagttctgggaaagattttgcagaccatgttgttgagttgcacaaaaataatagtcaactc

SEQ ID NO: 51164 - DNA, 330 bp, Glycine max
  unsure (1)..(330): unsure at all n locations
agctntctgttggatttccnctgtagttactttttggtccactttttctttgtacaaatatgttcaaggaaaatctggtttgccggaaagtacatcggatcgtcaattatttaaaatttaaaatggatgaatccaagtatcgaactcagggaactagtctaagactgggttaaattcataaataaggcattgttgaaagaaacattgataattgatggtttaaacaaaattaaactaagtctatgataaaaacaataaaaatgcacgtaagtaaaaatgatagcagtaggtagaagtgttgggtctttctaacagaccagctgatgcata

SEQ ID NO: 51165 - DNA, 454 bp, Glycine max
  unsure (1)..(454): unsure at all n locations
tgtcttcaacanacaaatcaaaatcaaatttctgatcttcaaaacctagctccagcttcctctcccccatatcaactatgcagcttgcggtcaacatgaatggccttcccaatattacaaggatgtcagtatcttcagagatatccattaccacaaagtctgtcgggaagaataaaatgtttactctgaccaaaacatcttcaattactccatatggcctggtaatggagcagtaagctaattgtaaagtcattcgagtgggcattatttccaactcttccaatcttctgcacatggagagtggcatcaaattgatactggctcccaggccaataagagcttttcccacattgacttctccaattgaacaaggaatctgtacactcccaagatctttatgctagggtggaaggatcttctggatcacagcactgcaatntccttccactatgat

SEQ ID NO: 51166 - DNA, 383 bp, Glycine max
  unsure (1)..(383): unsure at all n locations
tcacctgccgcatgaagctanaccttgaatttgattaatcttgaacatcttgaactcattctttgattatcatgaattgacctttgagcnttttgtcatcacctttgttatcatcaaaacatctttgaatcaatcttgattcatcatgaagctttgcttctacaagagcgctacacaaaataagataactatacactattatgaacctttggcccactgggcccccggcaacgggcgccaaattggtcgaggtcgtacctgaatcaaataaacattaaaaatgcagtatctaggaagcgatcataggtcgtctcccaacgagcaatgtgtaaccaaacgttcataatagatagtaatataacagtaacgaattggaggggggg

SEQ ID NO: 51167 - DNA, 329 bp, Glycine max
  unsure (1)..(329): unsure at all n locations
acctacanaagattaaatatatatccaaagattctctaaagcttgagaaaacccttcaagatcaagtagatggttcactagacgaatttgctcaagcatgttaggcttgagaaactcttaaagaaaaagagtctaggttatgcactgagattgagagaaatgctagcgaaaaagctacctctgtaagaaccttcaggagttggaaaacacactgaaagaatcttcataggatctgaaggagctctatgaacctcacaatgataaaaagaaagaaggatatggtctctgccgagaatgtgaacaagcatctcaagactatgatgaactca

SEQ ID NO: 51168 - DNA, 314 bp, Glycine max
  unsure (1)..(314): unsure at all n locations
tacttcagtcacctgcggcatgcaagcttctagccaaatggacttaccttgaatcaattcctttgatatctccttttgagccttgtttccctttccttgttttgaagctcactacaagccttacgtgaaaaaccatgatatcaccatatccttaaggaattntggagctttggaattgttttgggaataagtgtggggggtttttgtttcaatggataacatgttatgctgggtatgctacatgatgaatttcgggccatacgtgatgtacattgtatattgattaaatgttggacatgctgaatgagatgcta

SEQ ID NO: 51169 - DNA, 439 bp, Glycine max
  unsure (1)..(439): unsure at all n locations
tggtctagatatagtacaatntctgtggagccttacaattctctgatttatggctcatcaatttggtctcacttaacattatcccatggctattgtaaccatggtctctcccaactctcatcctttgttattttccaaaaaggtgaagaaaataactcacctgactcaatgtttactcaacctatntgagttacatttattcttgcttgatccaaataacaccctaagctnntttaactggtggcatgatgtgaaagaggccttttccccaaaaggtattnttctcaaatagaacctgctgcttctaagactttgagcaaacttcagccttcgtctcatccaacttcaattttggctaaaaagaagaagatcaaatctggtggcattactatcaatcctccaacggcctctacaacaagttttctacaagtttccctac

SEQ ID NO: 51170 - DNA, 481 bp, Glycine max
  unsure (1)..(481): unsure at all n locations
cttgagaagttaacgctttaactaccaacactccttctaataactaaactcacctccttgaaaaaataaaacatggataaaataacacaacaaatataatcaaacatcaaatataattagtaataatatttcaaggtgtcacatagatagtgtagatatttatacaaatttattttctgatgttttgacatttatgactctgatcttggttcttttgactgtatatgtgacgattctgatgagtttattgttgtatgtagtatttgtgtgtaagttgtaatccttctgtttctctttcaccagccgtcaaccttcccttgccttcaaccattcagccaccatccaggcttgtaaggcaaccacaaacgatggtgaattctactcattctgatgtggtgaagaatgatgtgatgaagctactagctacaggggtcatctatcccatntcaaatagcacttgggtttcacctgtccaagtgat

SEQ ID NO: 51171 - DNA, 313 bp, Glycine max
  unsure (1)..(313): unsure at all n locations
tgccactaagcgagcatcttcgaaaaccaaacgtcgcttcgagaaaacaaaatggcttatgtgagtgtaattgcagttacactcacatttgttggaaactgctgaactgcctgcatcttctctctcgcactcattntactgcattttcgccttcttttgcatcaaagcatcaacgatacaagtaagttccttactcccttcattttttttttgttgaaccttagggtagaaaaccatagattntagttttcagtctttagggttttcataattntagagtaggtaaaaaattaggactgttcatatgattgtg

SEQ ID NO: 51172 - DNA, 416 bp, Glycine max
  unsure (1)..(416): unsure at all n locations
gactataccttcgaccgaacacggtcgtgtntctgtctatgcccggattcaaagcgggctgcagcaccggctccgcttccctaactgtactggaggcggttgccgtggctntatcctctatggttttctggaagtttaacatgacttccaagatggaagccatttgatcttttaaggccgatagatcggccttcatctgttcttgcacgcccttttcattatccatttctttggatcgagtgttataggggtgccttggtgttttcttagttatgatgaaattcctaaagaaataaacaacagtgagtatgccaccaaaacatgagtatgcaaatggatgatcggagcactcggatccaccccaagatttttagatgacgtaatgagtccagaacttctcatcttataaaaagaac

SEQ ID NO: 51173 - DNA, 354 bp, Glycine max
  unsure (1)..(354): unsure at all n locations
aacccaagctcttagcttcaatgcgagggaacatacttatggctaagatcctaaatnntggttgtggaagtatgaaggcatgaaaattangacttgcttgtgagagtttttacttgaatttgggctgccccatgaggggtactntgcacctaggtagcatggaaaatacttttcaatggtatgaaaatatgtgtgtaaatataggaggcatggaaaacacctattaatggtgcgtttatatgtgaacatatggcatgatattctctcgcaagtgtgaatgagtttcttactaaaagaagatctgtgtcgctttctatatgaatgtatgatggcatggaattccctttataaatg

SEQ ID NO: 51174 - DNA, 455 bp, Glycine max
  unsure (1)..(455): unsure at all n locations
cttgatgaatgagagtcttgtgagacacaactcatagttcaacttccctccctttntcttccttcaatttcgtgctcccccctctctctttctctccctctttattttcctccattgaagcatcctctccaagcttcttatccaaggctcatcttggtggtgaagctccttcttccatggcttattccctagtggatggtgcctcctctcacctcttctcctttgttttccgctgcatctccatggtggaaaatcaccattaaaggacctcattgaagctcaaagatctaacctccatagaagccccacaagcaagcttccatcactcangttgatcaccatggggggaagttgcctgcgcacgacaaggtgaccttgatactngcttcctagttttcctaagtgagagtgtcatgtggacacgcttangctatttcctgacgaatgataccata

SEQ ID NO: 51175 - DNA, 415 bp, Glycine max
  unsure (1)..(415): unsure at all n locations
agcttgttcgaagaagtcattgtatctagtcagctatgaattagctgaagaaacatgagtcacatctgacccttcagattcacaaaaatatctcttcatngccttctgtaacagcatggaaagcaatctatgtaatggaatgtgtacagatatatcttgggaactaacatcatanactatttgtggccaatcacgcaatgataaaagacgtggaccatctgattccaaggggaaatcttcttccatggcattatcatcaaaagtgggacgaatataggtactttctgaatcaattgcattatcttcagaacactgcttaccatgatcttcaattgaacttgtaagcctaccaaatgtatatctacccctttcaaacttagatattgttctcttaaatgctgataaattgcatcac

SEQ ID NO: 51176 - DNA, 517 bp, Glycine max
  unsure (1)..(517): unsure at all n locations
agagatgctttgacnctagaacacttcancntccgaannnnccnacnnangctnaactanacctaccatgagatgcatacagtattcactgntaaccaaagcttcgcgtaattctcatatgagaacgagaaataggttctccctcagcacttcaccatcactctactcatctagagtacccattaatcggcacacctaacctcggtactcattaacacaaacatgtccacacttggataaacgcaaatgacatgctagaattggctcacacatgactcccaaaagattaggatctcatctatgcaagtcgtctatttgccctaaatgacctgggctttgctccatctatcaacgattttcccgctcgccgtctcaactctacaatccatacaggagataacttactgctgaaaacgtcttgaacattgtaaaccactagatcatttttttcctccgtactacaactttcacatactttccatacaaaattgaatctcaatagtaatggcaccccacc

SEQ ID NO: 51177 - DNA, 263 bp, Glycine max
agcttttttctgtgtgctggaggattcagctttctcgatttggtcttgccataaccaatgggtcccagaacaagaataacctcaagctctcaagcacgttgggttacgttgccccggagtatcttttagatggtatgtatgccaactgaacttcacatataatttaatggcatatgcaatggtctaacaacgtgctaaatgtgtccttaaaaccagatccaagataatggtcttcttgaaccttgatgcattaattatataaa

SEQ ID NO: 51178 - DNA, 367 bp, Glycine max
  unsure (1)..(367): unsure at all n locations
catgcaagcttctactatattacgtacgctggacaacanatancatttaataaacgtaaggaacgccgcgcaccttattctcagtatgtgaaaacatgaataacgtgctcctgacttatctaataatttctctaagtattcgggacacaagtagtgtatgtatacactaattagaccaattaaaaatgtaaaaagaaaaatatcaagcattagagctttcacttcacctaaggaaaaatggtggtcttggcgtgagaccaacaagggaggccgacattgctatgttaaggaagcatgtttggacagttatcatagaccctatgaaacattgggctcaatttattaatgcactatatttgcacaataa

SEQ ID NO: 51179 - DNA, 354 bp, Glycine max
  unsure (1)..(354): unsure at all n locations
agctntgagccaaaatcctgacacaccatanacctttatccagggtgagaatgtcaattcttaccctcggaagcaaanaaaaaggggagagggaaaatttccaatcaaagaggaagcataaaaggagagaatgaaaatttccaatcaaaggaaaaaaagagaggaaagggaattcccaatcaaagagtgggagaaagcaaaaagaatagaaagaaaattcccaatcaaagaatgggagaaagaaataagagaagaagagagggaagaaagttcccgatcaaaaaaaaaaataatatgcagaaaggtctttggaccggacaatatctgaacaatacagaattgtcaccaaatgaa

SEQ ID NO: 51180 - DNA, 260 bp, Glycine max
  unsure (1)..(260): unsure at all n locations
ctggcttcagcaggagtcatgtctccaaaggcttcaccactggcaactattatgatacttctctccatattactgagtccttcataacattttcgtagaaaagctattctgaaatttgatggtgggggtcactggctcatatttgcttaaatttcttccagtctcatacaggctctcttcactgagtctgctaatacctgagatatccttccngatgagtgtggtccctgaagcatgaaatctttttctaagaatacttc

SEQ ID NO: 51181 - DNA, 340 bp, Glycine max
  unsure (1)..(340): unsure at all n locations
cgcttgaaattgaataacggatgctctctagaaatcagatggtcataactnttcactcgaatgccagatntaggaacaaaatatatagagacgctcgaaattgaacaacagatgctctctagaaatttaaatggtaaaaatttttcactcggatgttagattcaggcacataatatatcgagaacgttgaaattgaacactaaagctctggtccaattcaaacggccataactattaacatgggtgtatgattgaggcccatgatgtatcgagatgatagaaattgaataacggatgctctcatgacattcaaatggtcacaagtnttcactcgtatgtc

SEQ ID NO: 51182 - DNA, 268 bp, Glycine max
gtatctgtggtatcttagtgagagtgattctcctcaatccttgagtgatgcaagaacaccctggctgtatcaaaggactttcacaacctttgtgtgttgccctcgctggaaagagtgattctttccttgcaatcatcttcacccttattcttcaaaccaaattccagaaaatccacctctgcccaaaattatctcgtgaccataactcccatgttacacactcaaattaagtgattcttgagcctaaattgaatttcaaaacgagacc

SEQ ID NO: 51183 - DNA, 278 bp, Glycine max
agcttcatggcttggtggtcttggacgtggtcctttgtctttggcttctcaactcaaggaacaaagatttcttattgttgaccccaattgatgacacacagatagtgtttgttgtggggtctttgggtaagtgaacgagcaaaagaagtggtgacatcaccttttcttagaaaccctttgcaaccttctttatactattcttctctagaaactatctctgtggggacactcgattgtccattgagaagtccacttttgaagtgggggatgatgggaat

SEQ ID NO: 51184 - DNA, 303 bp, Glycine max
acaagccagttttgatttctaaggcatactactattagggccacgaaaagattgatgaaaatgaaccctcacacgctttgtaaatgtagactacgtagactatttaacataaacagtactttcaagtagagattggaagctttgcaaggtactcagacttggacctttttctagttggaacctgactaaaccacaagcaatgggtcatcacaagacatctccattataactatttatacaatctttggatcaccatcatctacttgtaatgagagaatttattgtggcttgaccaatttcatt

SEQ ID NO: 51185 - DNA, 335 bp, Glycine max
  unsure (1)..(335): unsure at all n locations
tgaaaaannacaacgttttntttttcaaaatatttccatttttatagatgaggcgttatttgatttcgaaatccgattattatattcctaacccgaagtgctccttggtgtattcataaaaagtaataatttttcttcgaatcttagcaattgatatcctttcgaaacaccaattttttcttcatttgaattgacagtgaattctttccgattcttattcgaattatgtattcttttttctaaattaaacaaggcaaggactaacttccgaactgcaagtaaaataaatgatagaatacaacatagatttatctattagctctatgacttgtaat

SEQ ID NO: 51186 - DNA, 207 bp, Glycine max
tcatcatttataaagtggtacacccaaaaatacagataattcgccagctttatgtgcaatttgtgtcccattcaaattatcttcaatacgagtctaaggaataaacccctgttctatggtcttcagataaacgattctctcataagttctggttcgagctcaaattcccctcttccttaacctctgttattattctgatggagtgaa

SEQ ID NO: 51187 - DNA, 412 bp, Glycine max
  unsure (1)..(412): unsure at all n locations
tcttcagtcacctgcggcatgcaagcttaganatcaagagatcataaattcanaaacatatggggagtatgggataagtgaacgttctatattgtatatattctatcttgtatcttgatttcacgaattaaattgtcatcataaaaaagggggagattatagaagcaaagacattttgatgttttgatgatgccaaaggatcatgcgcttctcaagtttaattcaagacaagaatccaagaaaatcaagatatatgatcaagataatctctagagatttaggaagggaattccaatttgaaacaacaagaggtttggccaatgaatntaagctaaaatgtttttacaagagattaactctctggtaattgattaccagtggccaaaatacttcctgaaatacttttanaatg

SEQ ID NO: 51188 - DNA, 382 bp, Glycine max
gtcttcagtcacgcagctgcagcttattcaacgctgagcggcgtttctgccgccgggtggattgttaccgatgcgggatgtttctcgcggtctgtgcttttggtgtgagttgaagcttctatttcttgacaccagaagagtcaccttagatcgctggtagttgtggatttctctggacggacatatcttcttgcgaggaaatagtgtgcctgctggtcgatgaaccaaagtgcctgtgtcgctgtagaattaagctgccttgtataccattctgtgtggctttgtatgcgcagttactgttggtcgaataggaagtgtgtcggctcgtctgagtcttcttatagcttgatggtcctgtctgcgcgaacttttttatatattt

SEQ ID NO: 51189 - DNA, 458 bp, Glycine max
  unsure (1)..(458): unsure at all n locations
agtctaaaagaaaaaagaatactcgttttataaactataaataacattnttacactctcatacttgatgaaagattcaagtaaaaaaaatgcttattgtaaagcattatagttaaattagacccatgaataatatttangaaaaattgcaattgcaatggcacttttaatttataaaaaacattcacctccttttgaataaattntttaagattatgattttttaaatgacgagtcagtaaaaaataattgtgtatgatttttaaaaaatttaaaaatcaacaaacttttattataattcgtaatttgatatcattgcatatactaatagacatttatatnttattatgaaaaaattattanaaacaatcaaataaatagtggttgattaaacaaaaacaatgaatttcttatncgtttatagtaatttttttctttttttctgtgtgataatattat

SEQ ID NO: 51190 - DNA, 382 bp, Glycine max
  unsure (1)..(382): unsure at all n locations
atcttcaaacttcatcttagcaagttgttgttgaataagatcaattgtacgttgcgtggagggctcttccttgttcataaaaaacttgtcacaaaaagaaacattgggttgtacttccctacctccatcagctggtggttcactacccgtgctctcgtgacctatagtacctacagagaaaactaaaacctatcggcaagccatagtctctttgaacataagttggttgtgtntgtttaagatgtctaagaaatactttagggaaagtaaatttacgaatatcactatcttagatttcataaattatcttcacttccttcttttatgtttacttcttcaatttaattttttcaattacataaaatctatttttttctacaga

SEQ ID NO: 51191 - DNA, 437 bp, Glycine max
  unsure (1)..(437): unsure at all n locations
cctcaatcatttccaaatatgcatgtgaattaggacacatcaacaagaatcaagccaaggctattgtgcaagcaatcaatggggcaaaacacaccaaatgattatgatgatggatggctcaaattctcacaaaggtaaactcatcactttcaaattgagctttcaaaactatcatgacatgtagagaagaatcaaggatttcaagtcacaaaatgtcaagaacttttatttataaaacaattacccatttcttgaacatatcctataattcaaagaaaaacatgcaaattcgtacgtgcacacaanaatgacccagaatattaaactgaaaatccgacgaaactaacaacattaacaaattaacacaactaacanattaacaaaaccaacaaaactagcataaccaaagaacacttcgccccatactaaaacacaca

SEQ ID NO: 51192 - DNA, 404 bp, Glycine max
  unsure (1)..(404): unsure at all n locations
ctaagctgaagcaactggatgcatggtaactaggtnacccagctggccttgaatcagaaatctgtacctgtcgcaagggtttgtggtttgtgctcctctgctgaccaccatacagacctttgcccttccatgcagcaacctggagcaattgagcagcctgaagcttatgctgcaaatatttacaatagacctcctcaacctcaacagcaaaatcaaccacagcagaacaattatgacctctccagcaacagatacaaccctggatggaggaatcaccctaatctcagatggtccagccctcagcaacaacagcagcagcctgttccttccttccaaaatgttgctggcccaagcagaccatacattcctccaccaatccaacaacagcaacaaccccagaaaca

SEQ ID NO: 51193 - DNA, 353 bp, Glycine max
agcttggatgaattgtctgagcatgaccaccattcataatttcatgcacccattcaccatgtgaagcaccttctggaagaattctgtctaaacttcgggaatcatccaaacctcctggacgaataggacgattattgatgcttcctctaacaaagtcctttccagaagtgcgcggtaatggcccatattctacagctcctgatgtcagatctgcttcatccacctaatacaacattataggcactaccgataaaggtgacataatcaattaatatcaactctaaactaaatttgttctgattggtaaccaaactttccaacacagatgtcgaatttgcatatcatttacgcac

SEQ ID NO: 51194 - DNA, 506 bp, Glycine max
  unsure (1)..(506): unsure at all n locations
tctacctatgcttaaacatgaatgaatataatccaagtggcgtgtntataatcaacgaatttgtgaaacaaaatacanaagggtaacttgtatgagggagttgacactcctattatatcaaacgaaaaanaaaagtgcagccaaaatttctgcatgtggcccgggcaacaaaaaaagtgaaaatcataaatctatctantttaaactcgaatcagtcttactttttgcaggaacaagaataaggagagtcacgttcgacctacccgttatcatgcctaagtgcatcttttgaggccagagtttgaatgatagacgaacaaattgataaagagcacacatctataaaatgaacataaaagatgtatgatgaggaagatagaggggtatgccaatttatntatgatttcctcgacgcatcttggaacagagaattaatatctgaatatctaagcagaaatcaatatnttagtgcgttgttaaatcaaatactattatgaattcataca

SEQ ID NO: 51195 - DNA, 211 bp, Glycine max
actgatctaacaaacattccttagagtctggcttcagcggcagaatttacactaccaatatatttagtgtgctgcagagatggaacccacaaaagactgtttatgaaacattggtatccgtgtgccaaagtattgtctgcagagttaacagcttggtaatgttatttaaacagacacttgacaattggatgcagttcttgggattttgatc

SEQ ID NO: 51196 - DNA, 453 bp, Glycine max
gtctcctgcaacgaaattaaaagggaagcgactaatgatatagaccttttcatacatgacaacgaatataaacctaccgcggtagtgttgacggtcatcaacgcgtgctattaaacacgcaaatcatgatcttccagcttaattattgttcttatatggctcatctcaaatgccaatatgaattcctcgtctggctttgaatttccatcgctgagcttggcctacttattcttctgctggttctagcctttctggatatgcatttcgatttgaagatatctgcgtttttaggattctcctttatatatgtacgggagtggtgacgaaaccattttaattgatgaatctgaattgtagcactcctcacaagattttagtttccctctctttgattgggatttcaaaacaaagtgcaagagcattcgaattcaactattatagttaagtcttacc

SEQ ID NO: 51197 - DNA, 426 bp, Glycine max
  unsure (1)..(426): unsure at all n locations
tacactcagctggcagtatatcgctctcactttccgtttntntgtactcccaacgtgtcctccatcgccgtgaccattcagatntcccccaatcaccaccgtccaatccctccgaatctcgaggcctcaccctctataaaaccgcactcatcatttcgtctcctcctcacactattccagatctttcgtttccgttccgttcaaacagtgccttttttctcacacacttactttgttcgtcaccgcagtttcaatctcagatccaacattgttcaatccaaattcaacgcattccatggcgaatcctgcatccgcaagattctccgctcttcttcttctcgtttctttgctagtcaacatcgccgccgaatcgccagctccggctccgactccgaagccagatatgcctccgtcgtcttcttctac

SEQ ID NO: 51198 - DNA, 377 bp, Glycine max
agagttgagttgtcgagtcagaagtatcaatgacaaatacttgtaactttgtgaagttagtggaacttggtggttagccaagaactagaagtagtcttagtggtagagatgaaccaatataaatctttgtgtcttatacactttctatttctcatctactttaaattgacctagggtttgaattttattttatttgaaaactcttattgttttgcaaaatttgtctctatcttctaatcttgcatttgcaaaaatcccttatctgtcttacaaagttatatattagacaatagtcttgttttcacaaataaggctttaaaaatatttaacatcacacatcaatcccccctccttgtgatatattcctttacattttg

SEQ ID NO: 51199 - DNA, 370 bp, Glycine max
  unsure (1)..(370): unsure at all n locations
cggacactatagatactcagcttctaagtttctggttntccaaccttgaaaacaaaagtgtgttattcatcttnttcattctcttctccctcttccagatagaattcgccaatgactaaccgcctgaatatcttttgtgtctctcttctcccttttccaaaagaacaaaggattaaccgcctgaattctgttgtatctcccttctcccttgtcaaagaattcaaaacgatgcagtctgagaattatttttattcttccctttcccataaacaaaagatctcaaaggactaaccgcctaagaattnnctttgttaccccatcacaaagtttcgaaggactaaccacctgagaatcttgtcttaacacattg

SEQ ID NO: 51200 - DNA, 334 bp, Glycine max
tcaagggaagtttctcaagatagcttctcaggaagctatctagtctataaatagaagcatgtgtcacacttgtggttaccttgatgaatgagagcctcgtgagacacatctcaaatgtcaacttctctccctctttcttccttcaatttcgtgctcccccctctctctttctctcccttcttctattcctccattgaagcatcccttctagcttcttatccaaagctcatctcggtggcgaagctcttttcttcatggcttattctctaatggatggtcgcctctcttacctcttcatctttgtcttccgctgcatctccatggtgaaaaatca

SEQ ID NO: 51201 - DNA, 449 bp, Glycine max
  unsure (1)..(449): unsure at all n locations
agcttagcagaagcatcctcccatcggacagtacttgttgttgaacgagtaccatcagccatggcaacgatgatgaatacaccaatgttagtagctggtcttcgaggtccagcaacctcctcagagggaagagagattagagagagatagaggacaggagtattatttcttcttattattgcaaagcgctttcaaacattcatagttcggtacaaaatgaacaaaactcagcggctacaacagaaagcctaactgctagttagttactctaacattattagcttctaacagatgtattcttctcgaagctgcttgcctattgtgtgtacatgcatggcttaactatcaagtacgtagtccttcaggtgcaagggagtattactctgccttttgggctttgctatttgtaactngcttctgccagatgtatcatgtcttctatctgatca

SEQ ID NO: 51202 - DNA, 398 bp, Glycine max
  unsure (1)..(398): unsure at all n locations
gttcaagagagttctganagatnttgctgtatgaagatctacanacaccacagcttgaggcggaagccattctgagagctngagatgagtntgtgagtaattgtgagatcctagaggtgaaggagacatcctcaccacttgtattttngcaatctttcatcttgttcttctatgtgttgtaaaggaggtttctggactatggaaagctaaatcctctgtttgatcttccctgtaggtacctgatgtaaatatatntctatctatgtaatgatgttttgtgtgttctctgtgctatctagctttcattctagtatgcctttaccttgatcacgtagatgcatgctttgttagggtcattcaacaatgganattggttgattctaaagtccttgatagta

SEQ ID NO: 51203 - DNA, 422 bp, Glycine max
  unsure (1)..(422): unsure at all n locations
agctngcactataataatctggaaaagatcaatcctgacaaatggagaaatctgcatattaagctggtccatgacacccgcaattacctgctccagttggaattaatgcatgttaaaatgcattanagtatatctgtatttattcctaatggcaactcaaaaccaagccacttatctacctcaaactgaaaatcttaggatatgaaaacataagaaaatntttgaatatagaaaatagataaggatagaataattgacatgccatggtgaaaaaagagctgaactgaatgattgcttaatttctttcttctttttaggaaaaaagagctccatgattgtattttaatggtgttctcatggaatgatagtaatgtgcacacctgtgtctaccttatatcaccaacattaaacatattcatact

SEQ ID NO: 51204 - DNA, 476 bp, Glycine max
  unsure (1)..(476): unsure at all n locations
tcttacaagagactaaganatntctgacgannaaatttgagatgaaatatcttggggaagcctctnttgtattaggaatcaagatactaagagatcactctcaaggcatcctaaggttgtcacaagagagttatatcgataaggtcctagatagattcggcatgaaagatagtaaaccagtagatacccagatagctaaaggaaacaaatttagtctcaaacaacaccccaataatgaccttgaaagaatagagatgcaaaatatttcttatgcattagcattagaaagtctaatgtacgcttaagtttgcactcgtctcgatatagcatttgtagtaggagttctgggtagatatntgagtaatcctggaatgcagganaatgtgttatgcgttacctaaagagaaaaaaatgatacatgctcacttatcaaaagtatgagaatcttgagatcattggatactcagactctgatt

SEQ ID NO: 51205 - DNA, 313 bp, Glycine max
  unsure (1)..(313): unsure at all n locations
gtccacggaggaaatgcttaccacctcanaagattggatagcggtttctaattactcctctgcggcttccacataaggcatagaggatgggcagctcaccaagatgtcttcctcgcctgatacgatgaccaaatgcccttccactacgaatatcaacttttggtggagtgttgagggaacaacttctactgagtggatccactggcgccccaacagatagctgtatggggggttaatatccattatttggaaggtaacttgacaggtgtgagggcctatctgtactgggagatcgatctcntccctaacctct

SEQ ID NO: 51206 - DNA, 528 bp, Glycine max
  unsure (1)..(528): unsure at all n locations
gtgacccctgaaccgtgatccttaagtcacctgcggctgcagcttattataaggcttcctcaagaagcttcctcatggattctntaagaagctntctcaagaggcttctttgagaagctagatccttatctacccacacccttctattaactaaattaacctccttgaaaataattacggataaaaataacacaacaaataatcaaacatcaaacataattactagtaatatatatatatatatatatatatatatatatatatatatatatatatatatatatatatatatatatatatcagggtgtgacagtactcactctgagagaatgatttgcttagagttgaagtgggggtggtagaaaaaggaaaggtggttcatggtggaggtagtgttgatggaatggtatttcttttctgtggctgaactggcacaaataaatgtgtttgaactgtggacattaatgtacctcaacattgacgaaatggtacataagacagaatgccgcgtgtggagccgtaaatgct

SEQ ID NO: 51207 - DNA, 376 bp, Glycine max
  unsure (1)..(376): unsure at all n locations
aacattacaatagacctcctcaacctcagcagctttattcaaccacagtagatcaattatgacgctctctagtaacagatacaatcccggatggaggaatcaccctaatctcagatggtctacccctcaacaacaacaacaacaacttgctccttccttccaaaatgctgttggtccaagtagaccatgcgttcctcctncagtgcaacaacaacaacaacaacagcaacaacaacatcaatagagacaacaatccactactgaggcccctcctcaaccttcattagaagaattagtgaggcaaatgacaatacagaacatgcagtttcagcaggagactagagccttgattcagagtttaacaaatcagatgggg

SEQ ID NO: 51208 - DNA, 348 bp, Glycine max
atcctctaagtcacctgcacgctgcagcttattcatgccttttattaagttggtttattaaatttgccttatttaatttaatttaatttgatttgaagagttgaaccatttgaggaaaactaaatttatgaatataaacttagtgtaatgtcataagtcagaattgtaacctgtttcataggtataatagtttttttaatgtttaaccagatagatgatggtataggctaacttacttgggcttatgttatctctatttgggctaacttacttggcttcatgtaattaaacaagtgtcgctcacactctttggacttgaaaatggaacctctatccttctttccttat

SEQ ID NO: 51209 - DNA, 470 bp, Glycine max
ctaagcttcggccacaagctcacttgcttgcacataaccaccctcctcagcctctccaaagactctgcaagaggcttctcaacctcaacctcaaccccagaatcacccttctcttcccccatcctatcctcctttctctcggttctctgtactaatcccaactggttccagatgccgcgccatttctgcaacttcttcgaacccttctgcctagtggccacatcagcaacgcccttggaatcagattccaccacacaatcaggttcaacaacatcactcgaagatctcacataactatccattaactccttctcagtaatcaacaacttggcaccataaaaggtggctggagatacctttggagacaccttcgcattcgcattcacatgtgcatgtgcatttgcatgtgacatcgatttcaactcatcaagctccgcaatcgaccgtctcctacgtgagtttgatctatc

SEQ ID NO: 51210 - DNA, 454 bp, Glycine max
  unsure (1)..(454): unsure at all n locations
tgatccttcagtcacctgcggcatgcaagcttatggtcttaggtcttaaccactagtaatcacataaaacgaagtattattgggttactgtattttttattagcacatgatatatatacctttagcggaacagttatacaatggccctggaagaccattaatagtgtaggcatcagacacatttggtcctccacctgtttgcaatgcctgtgttatgactgcctcaggatctgtattccaccattctcctganatatgtngttatatgcatgttaaagataggtcactcctaagtacattaaggtaaatataggaacactatggtatgatgtcacagtcactttcttattaccaaagatgacgggaactttcttgtaagggttggtaaaaggatatggagctccttgcttgggaagaatgatgatacgaccatagagaagtgatcttaaccatg

SEQ ID NO: 51211 - DNA, 92 bp, Glycine max
actggaacgatgacacgagtctcctatgaccggaacactctatgatatccaagatgaggaccacactagtactgcaatgaccttacgactgt

SEQ ID NO: 51212 - DNA, 366 bp, Glycine max
ataagtggacggagagggagagagagggggcacgaaatgtatgcctcaaatgaggtctgaactctgaagtctaatttttcatatgataaaagctgaaaaaatgcgcacacaaggtctctatttatagcctaagtgtcgcacaaaattggagggaaatgtgaatttctattcaaatgtcacttgaatctgaatttgaattagtggagccaacattggagtcaaaactgcactgattgtgaattcaactatggttcatcttactaatccaagatcaaggcctagattctccactaagtgtgcttatgtgtcatgaagcatgttaagcatgaagggtatgcattaagtgtgactatacaatgtgtcaat

SEQ ID NO: 51213 - DNA, 259 bp, Glycine max
  unsure (1)..(259): unsure at all n locations
aacgaatagctcaacgcgagcgtattgtgcactatgtggcacgaactagacatgagtgagggctcgtcttgactgggagatcgagttgttcctaacatatcggcgtntgctgcgttgcacgaaccaccattgactcctatttaatgtggagggatatatggcactccatcacatcgtctaggctctcgtttaaatgaacctttgcaatagcctttgttcgaatgtcataacttgccaccttcgaactctcatgaaattn

SEQ ID NO: 51214 - DNA, 254 bp, Glycine max
  unsure (1)..(254): unsure at all n locations
agctcgtatgattatggcgtatccatcacatgtggtactangtggcggaccggtgatggtgcaagacaattctccacatccacaaatcacacataaacccaccataccctgttgttcacctnctactgagctcctgtactcccacgtagcccttatcctcgttcctcttaacgccgggtccccaattatcctctcaagctgtcacaatatccaagtgattcaatatccaatcgtcatgaactaacacagccaag

SEQ ID NO: 51215 - DNA, 475 bp, Glycine max
ttcgaccttcgtgattcatgactgcatatgattgaagcgcatatccacatgttgttccaccgtgccatacctatcaccaactgaggattgaagaccatgaagcctgcccaaaatctttgaaaggagagatgaatgcttctcatcatgttcttcataaccaacaagtaagcaaccttcttcaaccaagagccatcatgctcgttttgagaaccaaatgatgctatgactgaagcgcctattatgaatgatctgttgattggaacatacggctcacaatcattagggagtgtacatctgtttaagataacggtaacccgatgacgattacgccattgagtactcaatcccaaggccctattgatgcgatatctaacaagatgagcccaatcagattggaacctgtatgaaaggcgcgcataccatcgaaatcttcttaatagcttgccaacggatgacgatatcggagctacaagtg

SEQ ID NO: 51216 - DNA, 502 bp, Glycine max
  unsure (1)..(502): unsure at all n locations
agatgttaattaattagcctagtgtgacgnanatcggaacnnaacacactcagctgctcgggagctacatagaggcgggcatctttaacttcaatggagtccgttaatggagaggttgcatcatggagatgccatgcccgacaaaagaaaatatgtgcgatgaggcgccctaccctatggtataagccgttgaagaagagagcgtaccacactgatgatccttctataagatactcaaaggatgcttccttggaggataagtgtgtggagagaacagacacggggtacgtgacttgaagaacaaattgggtgaagtgaacttgagagtgtcctcaagacttcatcatatattacacgcttgttcactcatctatcatgactacctgtacctagaacattctgtaaacgtcttgtaaaatctagaaaacttgtgaacctcaactgactctccccctttatactactcacttcttttacttctcgaacattctaacgcttagtg

SEQ ID NO: 51217 - DNA, 464 bp, Glycine max
  unsure (1)..(464): unsure at all n locations
agcttacacaaatattcattaatccaacacacactcaacaaataatcatcatccgtccatagttccaatcaatcatgctcagtatgatgcgtgcacctgacctcaactctcaaatgcaaatgtggtaccatccccaaggaaatagcctaagcgtgtccacatgatactttcacttatgaaaactaggcactaagtgtcaaggtcaccctgtcgtgcataagcaactcccccctccacggtgatcagcctgagtctcaagggagtntcaaaccgagtgacatgccctcaagtacaagtattttttctcatgaaaaactacgagtacttactgacaaagtntgtactattctcatgctatataaagtatgaaacatggacaccatcaatgcactgaccatggataattaaagattctaagccacccccctccagagatgcttaaaactcattaaccactcatattt

SEQ ID NO: 51218 - DNA, 533 bp, Glycine max
  unsure (1)..(533): unsure at all n locations
agacgacannnnggagactcgcanagtacganntctcgnannnncanccngaagcnnagcctatgttgtcaacatgttgctcatgttgctcaccttatccncaagagaatggcgtggcgtgaagaggattnatagactaatacaaatgtctgctttgggataggaccctaatgataagccacctacagattctattgatcatgaagtcgggcgattctatctaacctttaaccataacttgtttcacccaaaaaacctcctatcaacatggtatgcacatggtcatgggagttatatgttatgtctgattgcaccttctcctttgtggagacgctaccctgtctcaaattcttaatcacactccatgtggattctattattgagaagtgattgtaatgtgaagatcctatgttccaggttggcacgtattgatcctcacctccatgctattctgttcgctgagtgacttctttactgagaaacctgcgcagcttgaggatatgctttgtgggatgacgcaaaggtatgattgg

SEQ ID NO: 51219 - DNA, 355 bp, Glycine max
tcacatcttcaggaccaatgtctttcatatcataattactagacaatagagacttcacatcatgtatgaatagcatactactaccaaatatcagcatgtcgtgcacatacaagcataagatgacacattcactctcatcaggttgtttcgcacacactcatttagcaactatcattgatattgaaaagcatatgagagaacaacttgagctgacttttcgcgccattactttggagcttatttcatgaccatattaagatttaacaacctataatctataagtagtactatctagagaatatacaacagacacataatcaacagtttttggtccaacttttcttttcttattaat

SEQ ID NO: 51220 - DNA, 403 bp, Glycine max
  unsure (1)..(403): unsure at all n locations
catgcaagcttcttatccaaggctcatcttggtggtgaagctccttcttccatggcttattccctagtggatggcgcctcctctcacctcttctcctttgtcttccgctgcatctccatggtggaaaatcaccattaaaggacctcattgaagctcatagatccagcctccatagaagccccacaagcaagcttccatcaagtggtaatcagagcacaagagcttcacgtaggtgctccttaaacctccattaattnnttgcttcaccttctcttccattgttgtttcttcattnttttctccatgtatctcctcacatgtctggtgctaaatgtttntaacatgattctttagagtttccaccgattaaacttgctatagaagcttgattngatnttctatg

SEQ ID NO: 51221 - DNA, 447 bp, Glycine max
  unsure (1)..(447): unsure at all n locations
attcctttagtagggaatctatccttcctaagatggagccaaacccagccaccctcattaagaactagctcttttcttcctctattgcctgtagttgaatacacctttgtatggttctctatatggttcttaaccctctcatgcaacttctatacaaatattgacctagattccccttctntatgtataaaagaagtgtccagtgggaagggaatgaggtctaacggtgttaggggattgaacccatagacaacctcaaaaggggactgcttggtggttctatgaacccccctgttgtaggtaaattctacatgaggaagatactcatcccaagacttatggttgcctntcagaagagcccttaaaagggtggataaagacctattcactacctcatgttgcccatcacgttgtggatgacaagtgatagagaatagaagtttagtt

SEQ ID NO: 51222 - DNA, 543 bp, Glycine max
  unsure (1)..(543): unsure at all n locations
tganacattgaatcccctgttgtacccctgtagtaccgcgatactcagagcgacctgcngcatgcatacttctatataaaaagccttctntatccctcctttatncttaggttaggatgacttccatcccttatcttagctttctatcctataatatatttatgaagagcacaagctggaataccagatgtaccatcccctggatcggtatcctattgataacacattcatgtcaagacaacgagtgtttctttttctcatggacactcactcatttaaaataacagcccatttgctttttttgtagatggattatatcagcgtgcagatatcatgacagacgctatcttgatggaattagtgtttatagacacgtcatatgtggaaagccgacgtcatttgctaatcttcttctacttcttacccacaacagaggtcctacaagagggacttatgtncgctcatctccgattacagcattcaaacactcaaacacgcttttggaggcgtcgataactcagatagacaatatcgtcctctacg

SEQ ID NO: 51223 - DNA, 326 bp, Glycine max
ctcaactgcccccagttcgcaggtgagcatgttgcttcctccagaagcaacagccttctggaggaaggatctagaatgcccaagtgagccataatgctatctgcacccaccctatttactaaatgcaccccccttctatttttagtgtattctttattcgtactcatactaaacattacgaacttctgaacgatacttatattccttctccatggatacgaatccttacagattatgtatttactcttttttaactctcgaagaatttaaggaaacccacggattgcgctaaaacacctcttttcgacttccgccacattactgaa

SEQ ID NO: 51224 - DNA, 418 bp, Glycine max
  unsure (1)..(418): unsure at all n locations
ggatcttaagtcacctgcangctgcaagctgcatttaagaccatccccccaccccgaatgctgattctcaatccagcagtcccttaccaccttgtggtaatgcttgttattaagccatccatcanagaccttaanaggcttangaccccaatcaatgctcttagatttcatgaggatagggcagtgatcagagtagttcctttcaagggtgtgctgcgaactgtctggccacttaaaaagccaaccatcagagacaacagctctatccaatttgcttttacaggaaccattatgcctaacccatgtgaactgcttacccacactaggaatatcttccacctccatgatagcaagccaatcattgaaatctgacatgatgctggactctgaatttccatgattgcttcccattctctct

SEQ ID NO: 51225 - DNA, 663 bp, Glycine max
  unsure (1)..(663): unsure at all n locations
actttatccttctcttagactccangtaatacactctcttatntnnnctcncncggttggggtngttgacccattgatacgtttgatatacacacnctagccgacgaagccaaaatcatcaactgagacttgctacgttcagtgagagttttcttactgttctaactcttgtcagctagaatctatctacgacctttaacacgctacgctgtcatcatgtgtgttagcctgtagtagttttaaatacagggctttatatacatgtctatatcacatagtacatgtctattataacaatgtacgttactaatggtgcgttcacctctgcactgtgatnttgaacgacaacaatgtctatacatgcatagcacctagtaggacacttaccaagctttcaacttacacacaatctagatccagcttcaccgtgtagttgatataatgagtcatggtatgtgatgaacgttaagctccaaccatagtcgaaatacaactaaacttattaagctctttgttcatcaaagtatctcaatctactcgttggctcttagaagtgtaagatattcatgtgaaaggcagtgataggtgtatcacatcaagtctagcgtctattaatgactaagatgcacctagccacttagtcgtctcgttctcgatcagtcg

SEQ ID NO: 51226 - DNA, 425 bp, Glycine max
  unsure (1)..(425): unsure at all n locations
ngcttgcatgtgcactgtatatatgtagaatatagaattattaatcaatgcatcatttcttctattctatggtggttatagaatcatcaattaatgcaccatttcttctatttctatgttggttttaactctccactaaattgaactcgtttttccatgttccaggttgttttgtaacgatggcactaagcacatacttcaactttgacactctgtcaaagtccaacttagaaacaagaacttcccatgaatcgaagcttgaataagtagcagcaccaaacctccaacacctttttccctattcagatganagcttgttcctttcaaacacgctttttgagaactacattgacccaactggtggttttctctatcctacaaagatcaaccctcattatgatacattcactcatcgngatgacatt

SEQ ID NO: 51227 - DNA, 343 bp, Glycine max
ctatcccgcacagatgactatataatcaatgccttcacctcatcctcacaattaatctgcactgactccaactgggtaagaatagtatctaattcattaatatgatcagttatagagataccttctcctatcttgatgatgaacaaccgacacatcaagtatactttgttggcttccaacgacttctcgtacatatctgataatgccttcattaagcccgcagtagtcttctcatttacaatgttgaacttgacgttcttagctaatgtcaatctgatcacgccaagagcctatcgatctagcaatgttcattcttctttgcttatgccgctcgacttaaccc

SEQ ID NO: 51228 - DNA, 404 bp, Glycine max
  unsure (1)..(404): unsure at all n locations
agctngccatccagctcgcccaggcgagctaggttgcttcctccaaaaggcgatgccttctgaagaacttcctggaagggcctggttgctattcgcaccccaatgtttactaaatacacccccttgcctttttttgctgattctttnttcataacgttacagaaacttacgaattacgtaacgatactcattttctttccgtaatgttacggaaccttacggattgcgtaatcatcccttttttgccttccggaatgttacggaactttacagattgcgcactaacacttccttttaactttcggcatgtcacagaacttcaaagattgtgctacaatgctttcttttaacttctggcatgtctcggaacttcacgaattgcctaacgatgggtgccaagtacc

SEQ ID NO: 51229 - DNA, 336 bp, Glycine max
  unsure (1)..(336): unsure at all n locations
gaagaacaaaaatgttcaaccctcctggtatctgagattcactgagaattagttagaaaaattgtttccatgaagaaaatccaagccgaggcgcttccgtgacgtttccgtgggtgattttgcgaagattttcaaccattcttcgtcgttctttgttcgttcttcgtcgtcttcggtcttaaccggtaagttcccaaaattgaatctttcaattcattctatgtacacttagtggtcctcatcgattttgcgtgcttntattttcatttcatctactgtccataccccctgttgacgtgctttagtaatttatttaagtcatgttctcgccttatc

SEQ ID NO: 51230 - DNA, 313 bp, Glycine max
  unsure (1)..(313): unsure at all n locations
ggtagatcaaggagagtggacttcattcattgatgttntagcattgttggtgtttgggattgttctctttccaaatgtagacgggctagtggatttagcggtgatcgatgctnttcttgcttatcaccacagcaaggaaagcctggtcattgctgttttggccgatgcctatgacacactcgacctaagatgcgaaaagagcagcacgagaattgtccattgtacaccacctctntatgtatggttggtctcccacgtttttcgtcatgaaaatatacttgtttgtcccttacaaggtcgtcacatgtgtgtc

SEQ ID NO: 51231 - DNA, 463 bp, Glycine max
  unsure (1)..(463): unsure at all n locations
attctaatctagaaatccatgaaggtaccttaatgtctgaggtttatgggactaagatggtcattgaccagtccctattctatgatttaacccaattgccaagcgaaggtgtaccatttgaaggtgcactgattgatgattggaagttttatttctctgtacatgatgcccgccgattggtttgtaccaatcaagcagatatgaccggaaggcttcttgccagttcattggcttttgaaagccgcatcctccattaccttattgttcgcatcttgcttccgagatcttcaaaccttgctcatgtttctgaagaagatctcattgtcatgtgggcctttcataaaggtttacaaattgattgggcacatcttgttagatatcgcatgtataaggcattgcaattgaatgccccattgccttatcctcatcttgtatcctttncttaacactcaacatcctctga

SEQ ID NO: 51232 - DNA, 487 bp, Glycine max
  unsure (1)..(487): unsure at all n locations
attggcgagtctgacacagatnagtataattgcgacttgactttttggcgtagccgacctagaactgcgagagttgcgacagacgcctcccactcagaaaacatcttaccacagttctcactccattgacaatcttgtgggagcttcaatcaccttatagaaaggctctgtctcttctatcaactttcgatcgagtaaccactcatacaatggccctcccactaaagaattaacttatgaacgaaccgccataaactatacttaccttccttagtggtgtgaccatacttacaatgcgtcgccccgcatgtatttaatagaaggtccttctagcttatttcttactcaatctttaaaggcaaccactctctaggcgtgtgcctcattctgttgtaacgtaacccggcatcatatattgatcaactgacccgccttagtcatcacacttatattgaatatagccttctctatactcttaccacgcacc

SEQ ID NO: 51233 - DNA, 601 bp, Glycine max
  unsure (1)..(601): unsure at all n locations
taccctctatctactctcacctantctttantaatatnccnaaacannattcatatatgatggtgacccttganaccgtgttatccgcgatacantacccctacctgcttgcatgcaatccactgcatgtttacaaagttattaatagagaattgtnccagttcctccgagtcctcttagatgttgctctgtgaatatctgcatacactataactcgaatcggactctgatctgagagcttggattagttgtgatgtgattgtgagatcctataggtgaatgagacttcctcgccactcttattactgcaatgtctcatcttattctcctctatgtaagacaggaggttttcctactatggtaagcatgaacctctgtggcatatctcttataagtgcttgacgcactatgtatctatctacgctacgatgttgcgagcatactctgagctatctgatgatgcttcactatgcctttccttgagctgtccatgcttctttggtggctcatcacaagatactcgttgactctaacgttctgtaggacagagctacttgagtccattacgacgaactgcgtctgacccagtgcgatgtcgttn

SEQ ID NO: 51234 - DNA, 427 bp, Glycine max
  unsure (1)..(427): unsure at all n locations
cacccatataatgctaagctcaccctctgccaaaatacatgaaaatattaaaaaagtacctactacaaagactacttaaaatgccctgaaatacaatgctaaaatcctatactactagaatggccaaaatacaaggcccaaaagaaggaaaaacctattctaatgtttacaaagaaaagtggacccaaccttggcccatgggctcagaaatctatcctgaggttcatgaaaaccccanggccttctttagcaactctagcccaatcctcctggagtcttctatccaataccctnggggggtaggattgcatcatcctctccaccttggaaaggattttacctcaaatcccgaggttttcatactctcgactccttccctcaacacctgtaaaaagaataaaaacatangtattagtggtgttgggta

SEQ ID NO: 51235 - DNA, 310 bp, Glycine max
  unsure (1)..(310): unsure at all n locations
agctngctaaattcctttatagaatggtttcattgcagatcttgttgtccttctcattgcatgtatatagccaatactgctcactgtaccccttcataattgtgggaatcatccctttattgcggctctgaatactataaataatctgtttcaattatttctaaagcaagtcagtctggataagttctacagctgtgataattttcttagaactttgatttcctcttttagcactcacatttattaaggacctaaccctgtactgatggcaaaaggacctctttccctccacaaatgtgctagtcaattt

SEQ ID NO: 51236 - DNA, 474 bp, Glycine max
  unsure (1)..(474): unsure at all n locations
caagtggtaatcagagcacaagagcttcaagtaggtgctccttaaatctccattaattnttttttagctttaccttctcttccattgntgtttcttcattttttctccatgtatctcctcatatgtcttgtgctaaatgttgttaacttgattctttagagtttccattgattaaacttgctatagaagctacatttgattntctatggttcaaatttcttgttcttgttcttgaaccatgaatngtgttgagtttaggttcctttgaagtttgtcttgttattttttgtggctgaaacctaaatcataaaattcttaacaaaatataaaagtagaagaaaacctcaaaaatctagagtgaacttgtcacctgttgtagttttgtcatagaagtcatgtctagtcatcaaacttgtcacataagatntcttatngtgtgatgaattttattttcttggttctttgctaactcat

SEQ ID NO: 51237 - DNA, 582 bp, Glycine max
  unsure (1)..(582): unsure at all n locations
tacagaatctgtatccacactgatatctgaataagattggaatggtatcttctaatcnaatttgcatgngacctttgaacccttgttgacgcgttctatnactcnactgctgcatgcaactgcatatctaggagcattatgaatgacttggaagatttcttgaggcggctcatgggcccctttgtaatacaacaccctcgtcttactcaaagaagagatttattggcaccatataaagagagatgctcactagcatngcactacgcgtgtggcttgtgcacaaaccaagactagggtgatgcctcatgggctatacacacccttacccagttcatctgaccgttgggtagacattatgacggactttgagctatggcctgctacaacccaaagaggtgtagactctatcttagtggagtggatangttagcaagatgctcatcttttccacgcccaaggtggtgatgctcccacatcacaaactcttttcatgaagtggggactcctgttcgtcaggaccatgagcagaagaatgcatgttctaatcctttggaaacctaatggatagctgaacataatttt

SEQ ID NO: 51238 - DNA, 391 bp, Glycine max
  unsure (1)..(391): unsure at all n locations
agcttgcttctacacaaaggactaaccgcctgagatatctnttgtttccccttcacaaagtttcaaaggactaaccgcctgagaactttgtcttaacacattggaaggtacatcctttgtggtacaagtagagggtacatctacttgggttgttgtaactgagaacaagagaaggtacatctcttgtggatcagttcaagtggagggtacatccacttggttgttcaaagagaacaagggagggtacatcccttgtggatctttgcttgtaaaggattttacaaggttgaaaagaaatctcaaggactgtangtcgcttggggattggatgtacgcacgggtttgtgccgaaccaatataaattcttgtgtttgtcttctcttcctacact

SEQ ID NO: 51239 - DNA, 353 bp, Glycine max
  unsure (1)..(353): unsure at all n locations
tgaagctccttcttccttggcttattccctagaggatggagcctccgctctcctcttctcctttgccttccactgcatctccatggtataaaatcaccattaaaggacctcattgaagctcaaagatccagcctccatagaagctccacaagcaagcttccatcaagtggtatcagagcacaagagcttcaagtaggtgctccttaaacctccattaatattttgctttaccttctcttccattgttgtttcttcatttatctccatgtatctcctcacatgtcttgtgataaatgttgntaacatgattctttagagtttccaccgattaaacttgctatagaagctagatt

SEQ ID NO: 51240 - DNA, 216 bp, Glycine max
  unsure (1)..(216): unsure at all n locations
catgcaagctntaaatagttcanactaatagatttgagaattgcatcagacctccaatgttgcacttgacgagacttgaaacatacgagctaccggagaagtatccaatattatagaaaagtatataggttatgctgtagttgacacggcgaaggatttgatcggagtatatttgtagatctaccatggtggctganaacggttttgatggctaca

SEQ ID NO: 51241 - DNA, 356 bp, Glycine max
tcaaaattaaaaatacccaggaatcttgctcaaaacataatgttgtggcatcggatgactgaactccgagaagtaaagcggtagctgcaagggtgaaccgctggaaacagtttgaccgtgtgataagaagatcatgcggctgagaagccctatgattctgtaacttagttggcgaatggacatgattatgatgcttacactctgtgcgattctctgtagcaccttcaccaccatgtatgcgctcgttgaatcaagtccatgttgccttgtccaggattagaaggtttttgtgaatctacccttctttattcaaccaacccacgcaagcgtccaacctcacaattttggatttgatg

SEQ ID NO: 51242 - DNA, 307 bp, Glycine max
  unsure (1)..(307): unsure at all n locations
tgaaattacgaactntannaatagtagtatggatttatatatattacgggaatatcaaagtaaacccccgaaccaacttcatttttcatatagttgacaatatgttcaaattaattcatcatctcttctaaataaactgtanatctcgttctcgtaaacgagacttcggttacgtgtgaagaaataacaacatactcagggactntccagaacatttgtataacattactacctgcatctcaaaataagtatccgaattgaaaaaaatcatctcaaataagtatatattaactcatatactggatct

SEQ ID NO: 51243 - DNA, 503 bp, Glycine max
  unsure (1)..(503): unsure at all n locations
cttgatggtgttgagaaganatcacatgtttgtcatcatcaataagggggagaatgtgaatgtatgtatatatgnatttgatgatgtcaaagaagaatctaacaagcctgcttcaaatgataagcatntgcttcaagaataattcaagattgcttcaacaaacaaagtcatgtntcaagattcattaaagaccaagccttgccttataacaaagtgctttcaagacattcaaggctcttgtaatcgattaccaggaagtgtaatcgattaccagaagacagggttgaaaaatagctgttgaacaatgttttgannattgaatttcaacatgtaatcgattaccatatgtgcgtaatcgattaccagcaacgaaactttggaaattcaaattcaaaagttataacccttcaaattataactgtgttatcgagtacccacacattataatcgattaccagtggagagttgtcagatnatctgccaacagtcacgatctttcatta

SEQ ID NO: 51244 - DNA, 366 bp, Glycine max
  unsure (1)..(366): unsure at all n locations
cgctgcaagctatactattccataaattatagtgaggaataagccacgcataacacgacaagattaactatatatgaggtgggaagccaaaatctaagagagacattctaagaaatctccaatcaacttgatcatatgttttttcaagaatgagtttgaagataatatcccctttcttttattcttatggcaatgcatagagtgaaggacctctnggagtataatagcattattaaatgttccgctgcctagaacaaagctactctggagaggtccgataatgctatatgggaaagtccttagtctcccaacaattacttttgttataattttgtatataacattgcagaggctaatgagcctaag

SEQ ID NO: 51245 - DNA, 286 bp, Glycine max
  unsure (1)..(286): unsure at all n locations
acccggtgctgagaggaaggaggattatggctacgtgngggtacgtgagctcagttgaaggtgggcaactggggatggtgggttcatgtgtaatttgtggatgtgggagagttgatttgcaccatcgcccgatcacatatgacgggtaccccataatcctacaagcttgaagtgagaaagtgtggaagagtcaattttcccactcttatctgttgaccacagagtggtacctggagatatgtcgcgggggtcaagagaccttggggacgtcatgtggtgtgctatt

SEQ ID NO: 51246 - DNA, 417 bp, Glycine max
  unsure (1)..(417): unsure at all n locations
acctgcggcatgcaagcttctataagtcagaggttgataatgttactccacaaacctntgtacaaaaattggctaacatagcaccttgtggtgacaaggagactgttttcgagccaagtgacaatgttatccactctgttaaactccatcctacccatgggtttatatgggagagggaggaaattgatgcagtttcctctaaagatggggtcattccaccaactgggtggaatatatatgaagattaatatgcctgaggccactgcatgggccagaattacggcttatatggccganaatagactaaatacggccttggaggctgaatcacaacaaaatatggcagttgaagccaagatcgaagatcatgataacaaagaaacaaaggatcgaagactggactgcatttatgatgat

SEQ ID NO: 51247 - DNA, 451 bp, Glycine max
  unsure (1)..(451): unsure at all n locations
tgcacctttccataactaattgtcactgtttgtgacagagacttgaataatccaagtaactaagcaagtgtgtcgtaatctccagaaccagttcctccatcatggacgatcccattcatcaacaccaccagccctggagtgggactgggcccaagcattttagtgcggccgccgttgaggtatggcacgacggcggcaccagaattggaggtgcaatcgcagtggtgaagggagaaaaaggatcttatgaaagagaaaagtgtgaaaaggaaacatagcttatggtttcgagagagagaaagagggtactgagaagtgagctcgcgagggtcttatgtaaaaacctgaacatcggtttgttgtttgagctttacaacatncgattttaaaaaccaatgttagaatcatgttgttaacatcaatttttctacaactgatgttaacaatgaca

SEQ ID NO: 51248 - DNA, 432 bp, Glycine max
  unsure (1)..(432): unsure at all n locations
agcttgctntatagactcttcatgtctggccaagaggaccatttagaagagttataacttttagaaaaacttannaaacaattgaaaagtcaaaaaccttttgaagagttacatcttttgatttattcagaaacaatcattggtaatcgattaccaaatcagtgtaatttattacacaaggcttttatgtgaaaggatgtgactcttcacatttngaattgaatttcaatgttcaaaggcactggtaatcgattaccaaaacattgtaatcgattacaactttntgaaattaattggaacgttgtaaattcagtttgaaaactttttcanatccattgtgctactggtaatcgattacaataatctggtaatcgattaccagagagtaaaaactctttggtaaacatgttttgagnancatcatgtgctact

SEQ ID NO: 51249 - DNA, 394 bp, Glycine max
  unsure (1)..(394): unsure at all n locations
atgccttagtcaacctagtaactcagctggccataaataaaaaatctgcatctgcatctattactgttgcaagagtctgtggtctatgttcttttgttgatcaccatacagatctctgtccttctttgcagcaatttggagtcaatgagcaacctgaagcctatgctgcaaacatttataatagatcccctcagcagcaaaaccaacaatagtagaataattatgatctntcaagcaacagatacaatctaggttggaggaatcatccaaatctgagatgggcaaatcctccacagcaacaacagcctgtccctcccttccagaatactactggtccaagcaggccatatgttcctcctccaatgcagcagcaacaacaaagacaacaagcaac

SEQ ID NO: 51250 - DNA, 233 bp, Glycine max
agtatgtatgagaaaaagagttttagagaaaggaagaattttaagagtagatagagcatagggatgtagttgaaaaaacttaacagtagtgtataaaaatgatgtgtaagatgaatgtgtgagataaaaaaatagtggtaaaaagggtattatagtattgtgaaagaaaaataatgttatatatggtgttaaaaatatttttaaatttgaaatgatgatggaagtgatgagta

SEQ ID NO: 51251 - DNA, 274 bp, Glycine max
  unsure (1)..(274): unsure at all n locations
tcatgtatattatctcttcgctctaagtcattccgatgagtngttttaacggacaactttataatataatctatttgaagaacaagtgagtttttctttctaatttatgacaaacatatcagattatatatttgttaaacatgaattgctcatcttctcgtgaacatgccattngtaaactatatttcttcttaaaagtcttcagcctttctcttttatttttattgggtggcgaagacactctttgtctctaaaagagaataaaaagtagaaa

SEQ ID NO: 51252 - DNA, 331 bp, Glycine max
gatgcaacagtctttgttactttcgcgtgtcaaggatcccttgctcaaaaggatgggagcttctacatcggctcgttttgcggtagatgagaagatttgctatctatatctttctgtcactaattgcttgctattgttattttatgacccttatttctctggtgcatgacatatattgaacctttattaatcattagtcattcgcatattagagtagttgttttctagaacggattcctattctcgtaacaagcataatttcattatccttgtgctttacactagtgacatttagtcatgtagtattaatctcagcttattcttgaaatga

SEQ ID NO: 51253 - DNA, 381 bp, Glycine max
  unsure (1)..(381): unsure at all n locations
tttgtctcattanaaacaacatggcgcgctntctaaatactngaaacggatgggattcacttaactagtataaaagtggtttttttttatccttaaccgattcctcacgagaaataaatccggactaatcacgtgattttaacagcacatattattggaagacatatctcatcatattgtatatttattntacttgaataagtgtcgtatatatcaataatttaaacaaaaaaaaagaactaaactattttgttcaaagtcattaaactttactaaagagatctagctcaagtcaattaaatgagcaattaatatacataaattattataatgtctttattcttgagtttgactcctatacataaaaaaaaaaaaaatcac

SEQ ID NO: 51254 - DNA, 442 bp, Glycine max
  unsure (1)..(442): unsure at all n locations
tctaagcttcttggagttctttaatgtctaanaataattataatgttttaaatntaatcttcaattcttgtcttattgactctcaactgtcaagactctagttantttttgtcatctattttaacattggggagcgttaaatgtctaccttgttttgctaggatattttaagaaaatgtataatatatatatatatatatatatatatatatatatatatatatatataaacaattataaatgtctatttttatatctcttatgcattaaaatntattatgcatcaaatgttacaattgtcctccaatttttttatcaactatatatttgtgtcattcacattctttaacatatgaaagtcaatanactcactcttttggttatctctactattacacagactngaggtcccgaactttgtgtatacgccatttggcttata

SEQ ID NO: 51255 - DNA, 267 bp, Glycine max
  unsure (1)..(267): unsure at all n locations
agcttagtatcacaattgatgcttatgattaatatgtcgatttgcagaatntaggcctgtaatctgtaacatcctatctttcgtanaataaataacaagagttttatctaataataaatagagttttaacgaaaaaataattgtgtttctgtaatgaaataaatgatgggaaaatggttctattaattaaaataataaactttgaaataaataaaataaatttatgttttagaaaataaagagatatttcaatgggccatctattta

SEQ ID NO: 51256 - DNA, 475 bp, Glycine max
  unsure (1)..(475): unsure at all n locations
ttgacacaattcttaacaacttcactaattatgttattataatttactatctaccaactaacattactgcatactgcataattcctggaacttcctgcatcaagtaggttaattagttacaagggcacagaataacagatagatataccactatacatgcaggcagtaaaggagaatcaacttaagcatataaaagaaattaatagctaatgcttcataaatacaagggaaattcttgtacatcattatcctttatatcaaacccgataaaaaatataggaaaattgtaacgtgcaaatataagaatcctaataaaatagaatactctaaattattcggagcaccctgaatctaatactancaaacccagtccaatttgatgactgcaatcatngataacatntttcgaaatcagaaaccagttatgcttcacgtcgtgggccatcacaaccattagaacataatgtaaccacca

SEQ ID NO: 51257 - DNA, 385 bp, Glycine max
  unsure (1)..(385): unsure at all n locations
agctntacagcagaatttagtaatgacctactaacctagaattaaaataacttaatgccattaacctagggaattaaaaaaaacttaatggctgagtgtaactgaaattgtggcaaccaaaagtcaccctcaacagccaacaagtcagccaccatttggtctcccaaaaggctgatgcctaggttgccaattgggcccttattacaactngaactanacctactaaagcccttttagttgattaacccaaaacatatttttggtccgccaactctacaaggattgggccattatttagtcaaactaaacactctaaaattgagacaaagtggtgccatctagtcctcctccatttgggccatgatacaactcacaaccttggact

SEQ ID NO: 51258 - DNA, 74 bp, Glycine max
  unsure (1)..(74): unsure at all n locations
agcttctcgatatattatgtggctgaatcggacttccgctngaaaagctatgaccattcgaatttctcgtgagc

SEQ ID NO: 51259 - DNA, 372 bp, Glycine max
  unsure (1)..(372): unsure at all n locations
tctcgatatattatgcgcctgaatcagacttccgtgtcaaaagttatgaccatatgaatntctccactgtattccgtgtgacaagttatgaccatttgaatntctcgatagcattcgttgctcaatatcgagcgtctcgatatataatgcgcctgaatcggacttccgtgtgacaagttatgaccacttgaatttgtcgagagcatccggtgatagatttcgagcatttcgatatattatgcgcctgaatcggacatccgtgtgacaagatatggccatatgatattctcgagagcattcgttgctcaatttcgagcgtcccgatatatgctgcgcgctaatcggacttccgtgtgacaagatatgaccatt

SEQ ID NO: 51260 - DNA, 339 bp, Glycine max
  unsure (1)..(339): unsure at all n locations
agcttgaaccaattcaaacgacaataactntntactcggatgtctgattgaggcccgtaatatatcgagacgctcgtaattgaatgttgaagctctgagccaattcaaacgacaataactttttactcggatgtctgattgagtcccgtcatatatcgagacgctcgaaattgaatgttgaagctctgagccaattcaaacgacaatatatcttttactcggatgtctgattgaggcccgtcatatatcgagacgctcgaaattgaatgttgaagctttgagccaattcaaacgacaataactnnttactcggatgtctgatagagtctcgcatatatc

SEQ ID NO: 51261 - DNA, 384 bp, Glycine max
actcagcttcacattcaatttgagcgtctcgatatattactgggctcaatcagacatccgagtaaaaagttattgtcgtatgaattggctcaaagcttcaacattcaacttcgagcgtctcgatatattgcgagactcaatcagacatccgagttaaaagttatagccgcttgaatgggctcagagctacaacatttaattttgagcgtctcgatatttgacgggactcaatcagacatacgagttaaaagttattgtcgtttggattggctcagagcttcaacattcaatttcgagcgtgtcgatatatgactggactcaatcagacatccctgtcaaaagctattgtccgttgaattggctcagaagctcaacattcaattt

SEQ ID NO: 51262 - DNA, 394 bp, Glycine max
  unsure (1)..(394): unsure at all n locations
agctnttcctttanggcttgtacctcatcagtttcttccgaggctntaacctcattgtctctcacagtctttagaattgggagccaatccaatccttgtgtccggactctcagccacttatgatagccgccgatgatcctattactgcttcccctaagctctctgtcctttcttcacgccgcatcccatgccttgcgaaatccttggagtaccctcgcgttgtggtcactgaaaccccatgcgatgaaaggcgtgatgctntcgtctgatggcactcctctcatggngtagccaagctgtcttatggcgaggacgggattataattaatacaaccccttgttcccatcaaggggaacattggacattcttcgcatgaagacagaatcctgattc

SEQ ID NO: 51263 - DNA, 421 bp, Glycine max
  unsure (1)..(421): unsure at all n locations
catgggaccatactcatttatntcanattagaagtcgtatccagtcaaggtctgagagaccatacaagtttcttaacgatttctaattatgtgggccattaagtctatcatatgctgacaatagccgagaagcccatgagtctcttcgggggtggagtaggtgtctgccatcgccttggccttggctaacaagcggggaagttcttgactcccgttcaaggtaagagcaaaccggtccatccacatggttgcctcttggtgtaaagagtcgatcacccttcctctagcctctttttccgcatatacttgagcatactcatccgcgaatctatgctcgtgggccgtggctagacctaactcttcttggacttggcgatatagctagcatgttggtctccgtctcgcataaatgctgagacaa

SEQ ID NO: 51264 - DNA, 397 bp, Glycine max
  unsure (1)..(397): unsure at all n locations
atagctccttcaactgcacaaggctattaatattngaagagtatccttgnggaaccttcacccgacgaagacactgacaaaaacttatcttctccttcttggacaaagtatggcatgctgggggcaggtaaatattctttccatcagaccttggatgcaactatgatcgtatacccatatcagctagatcttgatgggtattcaagccatacttcgtcttgccttgaatgttaatgagcgtcccaatcacactgttgcaaacatttttctccacatgcataacatcaatacaatgtctaacgtcaagatgacaccagtacggaagatcaaagaaaatggacctgcttctccatatgcaactctgacttatatccttcttttgtgtcttcccaaatac

SEQ ID NO: 51265 - DNA, 364 bp, Glycine max
  unsure (1)..(364): unsure at all n locations
gctntctgtgtcttctntaataaagatctagtggtagaaacccctactagtggttctgtgttaacttcttatgtgtgtttgaattgtcctgtggagatatctggcacaacattcttgattgatttgatttgtttgcctttgaaccacattgatgttattcttgatatgacttggtcttttttagacgatgtactggtgaactgatttcatgaaagtgtggtggttcgatgattctggagtgagtaatgatatgtattctatctctgccaacccagttgtgacatcttttaaggaagatgctcaagtatacatgatcttgtctagccaggaagtacagacaaagggttctatgtgtgaacctcct

SEQ ID NO: 51266 - DNA, 422 bp, Glycine max
  unsure (1)..(422): unsure at all n locations
cagtcacctcacgcatgcaagcttcanattcttcttcaattccacagaatatgtcatgctaaagcttattttggagcgtangaacctacctctacatcaagggaccttcaattccatgtaagggtggacttctcctcacttgaaatctgagggtgttgggttcttgggagctataatgggtagttctactacgttattgcatttangtagttgtttgtgaaggaaattgttgtaaatcatgctaaaacttgatatgtttaatttaagcaaaactgccgatgttgattgatggttaaataatgatgtttngatgtatatgtatgcttaaaatgcagttagtaaactggtagagaagattggtagagttagcttatagttaaatgtgaggaaggtagtgttgtaggtggaaaagtgtgatattt

SEQ ID NO: 51267 - DNA, 414 bp, Glycine max
  unsure (1)..(414): unsure at all n locations
tagtatgacccactaacctagaattgatataacttaatgccattaacgtagggaattagaaaaaacttaatggctgagtgtaactgaaattgtggcaaccaaaagtcacccccaacagccaacaagtcagccaccatttggtctcccaaaaggctgatgcctaggttgccaattgggcccttattacaacttgaactaaacctaactaaagcccttntagttgattaacccaaaacatanttntggtcagccaactttacaaggattggtccattatttaaacaaactaaacactcgaaaatngagacaaattggtgccatttagtcctnctccatttgggccatgatacaactcacaaccttggacttttctccctgaaacttgcgcttgtattcaaatagtatggacaacac

SEQ ID NO: 51268 - DNA, 409 bp, Glycine max
  unsure (1)..(409): unsure at all n locations
tcacctgccgcatgcaagcttgcagatgagtttattgtaagattcanaagtggtggtaaaaaaatacttgtatcttttgttaaagatagtgaaaattttgtgaagtgtcaaaaactagacacaatctcgaaaagaaacaatataaattattggattttcttgttggctcttcttattatttntgtttatttgaaaaaacatgactttaagtcattaattattggttgtgccttaacattctntaaaatatcattgtcttacactacaaacacgacaaacaatagtgattnttatatcacaatttaactcttaaatcaattacgtttttttatttataaggttcaaacataaaatcttacttaagaattgagtctaatgtggatgttgttataagtacatatgttataat

SEQ ID NO: 51269 - DNA, 381 bp, Glycine max
atggtccagttggtgataattcaacttctggtaaagttcgttcaaacaatcactcagaaaggacatcggtttcatcagctggtgccaaaactagcacaaaagagttaggccttaaattaggttgtatgaagagtgataaaagaaaatgggccttggaggttcttgcgaggaaaacagctgccacaagcaggaacacagcaaatggaaatcaggaagacaatgcagtttttaaaggaaattatcctttgcttgtatgtaaatgatcttattatgtttgtataaaattggtttattttacctttgacattgtcagaaattgtatatggcaattcactggtacttctttctgttattgtgagtaggcccaattgccaattgata

SEQ ID NO: 51270 - DNA, 402 bp, Glycine max
  unsure (1)..(402): unsure at all n locations
gcgcgggtctgggagacgaaggtcaagtggtcgcgatatacgaagatgatgttccgagtacattggatttggtacgaccatgccctcctgatttccagctgggaaattggcgagtggaggaacgccccggcatttacgcaacgagcataatgtaaacctttacggttttaaaagctctatagttgggcctaggctttagagtnntttcctttgttaaggctttgtgtcttttgttttgaatntataatacaaggatctttcttcatctgttcctacgtctctacccattctcattcatttgcatgtttacttctttntctganaatggcagatccgatgacgagtcccccgaaggtactaatacctgggacccgcctatcaacttcgagcatgaaatgagtc

SEQ ID NO: 51271 - DNA, 281 bp, Glycine max
  unsure (1)..(281): unsure at all n locations
ccatatatgctcaggttgatggtctatgggcatatcaatgnattatatatgtagaaaacaataaaatgatnaatatattaattattgtaaccaacctccatcatccataaatattaaataacaaatacttattaaaaattgaatgtattacattaaatttcgaataattatttatttagagacaaatataaataaatgaaaattgataatatattgtgtaacattcaatatacatatttaaaataatgttcacaagttgtgccgcccgattttttgatgag

SEQ ID NO: 51272 - DNA, 438 bp, Glycine max
  unsure (1)..(438): unsure at all n locations
tcaactgagaatngtaaggactacttaatagcatgaaatacgtcttataaaggaggattttctaagacggctatgatgatgaaaccatcttaaaataactctcattctaagagggttatctaatcaaaatcatcgttgaaaaggactcattctaagctctctgtgcttttttttttttttttttcttatgtgttagacctagtaattgtcttataatgggagctattctaagatgatttcgttgtcatagtcgtcttatgtagcacccttattttctgtaaaataaattaaaacatctttttttaaaaataaataaggttcaagaaaataatgaggttcttgttattaaattaataacgaggaataattctattaatcatattatgggtttaacggtgatataataaatatatgctcttacaaaataaaaaatattta

SEQ ID NO: 51273 - DNA, 378 bp, Glycine max
  unsure (1)..(378): unsure at all n locations
atcctccgagtcacctgcggcatgcaagcttctggtgggacatctngacttgctttccaatctgacattcaccacagattctgccttcttctattntcagattgggaatgcctctaacagcacctttgtcaatgattttcttcatgcctcttaagtgcagatgtccaaatctatgatggccatatttgacttcatcttctntggaggatagacatgtggaggagtaactggttcttgacgggtcataggtaacagttgtcctttgatctgctgcccttcattagaacttcactcttctcatttgtcaccaagcattctgactnntgtgaagttacattgaatgcttcatcacacaactgactgatgctgatcaagttt

SEQ ID NO: 51274 - DNA, 403 bp, Glycine max
  unsure (1)..(403): unsure at all n locations
ctctgcgaattggtctntgccgacaaaaggatcgaagcgggtctgaaaagaggcaaattngatcatcctactntgatgagtgagaaagctggggcaaatgaagaggatgagaatgagggagaaaccctagctatgattgccattcctacacgatcaaatttcccatcagcccaacaatgtcattactcagccaataacagtccctctcacccaatcatccacaaagaccatccctaaatcaaccacaaagtctgtctactgcacttccaatgatgaacaccacctttagcacaaaccaaaacaccaaccaaaaagggaatttgcagcaaaaagcctgtaggattcaccccanattccggtgtcatatgctaacttgctcccatatctactcgataattcaatg

SEQ ID NO: 51275 - DNA, 516 bp, Glycine max
  unsure (1)..(516): unsure at all n locations
ngatgtcactgtatgctgacataccatacaagtccatattgttgtcttcccacgctgccacaagtaaccctgcattgaatacattgtgtcatacgctcggatctacagctgaagaacgcacttctgggatcatgtcctatgaagatgctgtatagcaccgactgtgtgcctgcttgcataggacatgacctgatcctgcgtgcttacttcgacctatgccaaatacgtggctcagtctctccgatacacgatcatgaatggtgacaggactcgaggcacattgcaagcttagcatggctggagagtgcaaatagcaataatatagactctatgcctacaatgttatattcaatgatcactgcatgtcaggtgagatatatgtctggcatcatctcactacatttataagatgcttaatgactaggtatggtagtctataccactatgtttcagacataagcctctaaaacgcatttgctgattagacgtgaaccatagagacttacctacatatag

SEQ ID NO: 51276 - DNA, 307 bp, Glycine max
aatcatatactgaaatagcgttttcataatatattttttaacatttcagaataagttcaagaagccattagataagtgcatgaagtgattgtccttaaataattgagcagacaagaatgatattaatatataatgataggctgagtatgctccgtgggcttaatgcataatatttccactcatatgccgctgcaattaaagttgcatcttagattgacccaatttgcaagatattctccagaggacaatagattctctcatgtgtgtatcacttcagtatattttatcttccttagaagaggatgct

SEQ ID NO: 51277 - DNA, 267 bp, Glycine max
gcccctgaaatcagaggtgatcttatataccgaccccaccacagacatctatgaaagagatgttgacctccaaatgacaagttggagacacaaatggtggaaccgctgtgcaaaaaaaataatattgtcccaaagtgctggtcaaccaaaaccaaaccctccactagcctcatggatggcaagtgacaaacgttcttgaagctgttccttaaaggtatactcatgaaggtcaagttgaatggagcttaagagctattgaatgaagag

SEQ ID NO: 51278 - DNA, 317 bp, Glycine max
agcttgtatgactctaccatatagatcattacaatactccttaatattcaatctcgtaatagtagttacttataatgaaaagtcgatcgaagttgggatctttttaaataacaataatgtgtttatacacataaatctagaataaattaagatgacgtgctaaaagatgtaaatacctttcgtagatcaacaattgatatgtatttgtctattggaatttgaagggatttttatataatactaattactactaggaacacattacgtcatattatcatgaaaaatattaggaatactcgaattaattatgattgatc

SEQ ID NO: 51279 - DNA, 391 bp, Glycine max
  unsure (1)..(391): unsure at all n locations
taagcttcggtatacttattctcttgatgtcctttatatagtgttactcgctggaatgtggtttctgtgggtttatatatgtacttgctccgaaaaatgattggtaaagattgtgaattaatggcttggtatattatggcttcccangttcttactgctagataataatagatgggctttttcaccagcacagctcaactgactatgcttatctagagctatcttgctttttnttttttgtaagaaaaaactttcattgacaaactgcagatattttctttaactngtataattgcttacaccatctggatattttctcatacacaacatctttagattgaacattaatggcatggtagggcttatggatgttatattngcacacctttgg

SEQ ID NO: 51280 - DNA, 361 bp, Glycine max
  unsure (1)..(361): unsure at all n locations
agcttangaacccaagctcttagcttcaatgcaatggaacatacttatggctaagaacctaaatnttggttttggaagtaggaaggcatganaattangacttgcttgtgagagtatttactcgaatttgggctgccccatgaggggtactttgcacctaggtagcatggaaaatacttttcaatggtatgtaaatatgtgtgtaaatataggtggcatggaaaacaccttctaatggcgtgtatatatgtgaacatatggcatgaaattctttgcaaagtgtgaatgagtatcttcctaaatgaatattgaggtcgcttcctaaatgaatgtatgatggcatggatttctttttaaatgc

SEQ ID NO: 51281 - DNA, 441 bp, Glycine max
  unsure (1)..(441): unsure at all n locations
tgtgtaacactagttgtaactntgatgaatgagagtcttgtgagacacaactcanagttcaacttccctccctttntcttccttcaatttcgtgctcccccctctctctttctctccctctttattttcctccattgaagcatcctctccaagcttcttatccaaggctcatcttggtggtgaagctccttcttccatggcttattccctagtggatggtgcctcctctcacctcttctcctttgttttccgctgcatctccatggtggaaaatcaccattaaaggacctcattgaagctcaaagatctaacctccatagaagccccacaagcaagcttccatcactcaggttgatcaccatggngggaagttgcctgcgcacgacaaggtgaccttgatactttgcttcctagtttcctaagngagagtggcatgtggac

SEQ ID NO: 51282 - DNA, 373 bp, Glycine max
  unsure (1)..(373): unsure at all n locations
agctngcctaattaacctgagattgagaganaatgattattatacacacaaaatgaaaatactaagtatgtattgactatacataacagaagattcttataacactacaaaataaccataagttgggagagttagatacaatttatacaagttttatacacaaaagttagtcgttgtcaccgactaacaataggctgaactcagtggacaagcacgtcagaaagattcattctaacaaaaagttgttgttctccaatgttaatcaacttcagaagactcttaatgacttctttgagagattctccactntgaggaatgggtttatgacaagaccataccttccttgatcctgaagttcttctatctagcatga

SEQ ID NO: 51283 - DNA, 366 bp, Glycine max
  unsure (1)..(366): unsure at all n locations
ctcagcttaacatcagaccacttccagggtgctggaactacttcacatggactngatggcgcctatgcaagttgaaagccttggaggaaagaagtatgcctatgttgttgcggatgatttctccagatttacctgtgtctactttatcagagaaaaatcagacacctttgaagtattcaaggagttgagtctaagactctcaagagaaaaagactgtgtcttcaagagaatcaggagtgaccatggcggagagtctgaaaacagcaagtgtactgaatactgcacatctgaatgcatcattcatgaattctctgcagccattactccacaacaatatggcatacttgaaaggaaaaacatgacttt

SEQ ID NO: 51284 - DNA, 441 bp, Glycine max
  unsure (1)..(441): unsure at all n locations
agcttctgtaatcgattataggctatctattcttgtgtaatcgaataccagaacactaaataggctctttcctcataaaaatatctatgtctatgctaaaaacatctaactatagcagtcatcaatactgatactcatttaattcaatcaaacaagaatcaatcacacaataacacaccaatcaaacacaattaaaatcttataatcaaatacaatcaatcaatcattaaccataaatatttcaatcaaccaatcaatccttatttatccaaatcactaatatctaagaggcctaattctcttctaatggaaaagaatgtntcttttgggagaggttgtgtgaagatatcaacaagttgattctttgtatcaacagaattctacacataatctcccttcagaacatgatctcttagaaaatggtgtctaatttctatatgc

SEQ ID NO: 51285 - DNA, 404 bp, Glycine max
  unsure (1)..(404): unsure at all n locations
ntggttgcacaacttgaatgtgttgtaaggaantacttattttgctatctctctggtgactaaataatgttatagtcatcaaccaatatttgcaatgtatgtcattacagcagtgtgctaggtaaaataactttagttaactgcatcctgcttataaatccaagacattgttgaaatgcacaaagcagtctatcaaagtatcttgagtcagacgtatgtagtgccgtgaaattcttggattctgtaaatcaactcgagctctttctggttagttagagactattgcatgttctaagctaacagtgagtgctagttaataaaatcattgtttgtaattcccccaaattgtttcttgttactgtaattgcttctatgtgaagntctctttccatatcaagcattac

SEQ ID NO: 51286 - DNA, 395 bp, Glycine max
  unsure (1)..(395): unsure at all n locations
ctgcagctanggctgaagtaccagctcgcctgtgctagctgctgtgcaacctccacccctcatttcctataaataggcgtgagggggctgaggtaaagggttcagcttcttacattaagagcattttagtgaaattagtgagaagaaggagaaagaagaagaanaaacgaggtcaagacacttccgaatcngctttgtgatcgattcctacaccgttcttcgttcgttgaccaattagttnttattntgaagctttgaattcaatctatgaacccttaggggtccttcttgttgcttttcacatcttcatctcattcttctacatcagngatctcatttctttgtgtgaagcgattttatgccgattggttgtgtcgtaatctcacataatcatc

SEQ ID NO: 51287 - DNA, 344 bp, Glycine max
agtctcgcgattgtcacgtgctcatgcaacatttgttagctgtggctatacgagacatcttgccaaacaaagtcaggttagccataactcgcctgtgctttttcttccatgctatatgtagcaaagtcattgatcctgtcaagtttgatgagctggaaaatgaggccgcaattatactgtgaaagttggagatgtatattccccctgctttctttgacatcatgattcacttgattgtgcatctggtcagagaaatcaaatgatgtggtcctgtttatctacggtggatgtacctggttgagcaatacatgaagatcttaaatgggtatacaaagaatctatat

SEQ ID NO: 51288 - DNA, 67 bp, Glycine max
gcgagtgcaaaaacatttgtgctgtgctacacaaagcctgcttttcttagatgtgaggctatggaat

SEQ ID NO: 51289 - DNA, 425 bp, Glycine max
  unsure (1)..(425): unsure at all n locations
gcttccaacaactganacatatganatattcttcatatgttcccactcacaatcatttgttgggcactaactcaaatcgagtttgtcacccttcataatggaagctacactnggtgaacaatctttcatgttaaatatttctaaaactatattaatataagtctcttgagacaaacccaaaatgcctcgagactcttctctatggatcttaatgccaatgacataagctgtctctcccatatccttcatatcaaagttcttcgagagagattgtttcagctcatatagcatattcttatcattagttgcaagcaaaatattagccacgtataacactcgaaaacanatcttactcccactgaccttttggtatatacattgatccatgatgttttcttcaaaaccgaatgaagtgatgacctcat

SEQ ID NO: 51290 - DNA, 329 bp, Glycine max
  unsure (1)..(329): unsure at all n locations
agacttcctacntttattcgttgactacagagtgttacctggagatatgtncgcggggtcaggagaccttgtggacgtcatgtggtgtgctattgcccagaaccaagcttgaccaatctcgacccaacccgggcatagtcagtcagtgagaacctgtgacgtacctaaacaggcgagctcttgacagtcaaccgataaaagaacaaataccacaaagcaaggaggcttgtgtggtggctggccagctatggatcttgagtaatatttggagtatggcctctggtaatcgattatcaagggtgggtaatcgattacagagcttaaaaatg

SEQ ID NO: 51291 - DNA, 290 bp, Glycine max
tacaccatgaacctcaactaaagttcaaatagaagttagagagccttcgatgcgaaaataagatggatcatcagatgaacacagcggaaagatattaccattccaagagaacaaagaacagaaagccaacaataacatattggggtttgcttgaaaataagcccctccggttcagggctgggggttctttcaataatccatacaacaaaaccattgtagacaatgatgaacaatattagaatccacatgcgctctgtgaaagggttcatgaatagccacgttctatcacc

SEQ ID NO: 51292 - DNA, 367 bp, Glycine max
  unsure (1)..(367): unsure at all n locations
gcttctcccaatttctataatagggggagaagtgaagtgataaatggttcagcctcttatgcacttctctctctttcgaatatgcttggaaaaattgttttcgtgaagaaaatgtaagccgaggcgcttccgaaacgttngcgtaaggaattttgcaaaggtttcgaccgttcttcgacgttcttcattcgttcttcatcgttcttcgatcttcaacgggtaagtacctcgaaccaagcttttcgattcattctatgtacccgtggtggtccacattgtgtttcgtgtatttttattctcgtttcatttactttatatacccccttttgacgtgcttaagccattttatttaagatcattctcgctt

SEQ ID NO: 51293 - DNA, 326 bp, Glycine max
  unsure (1)..(326): unsure at all n locations
tgcaagctcgcacttnttcgctgtcctcaagaactttatcttctctcncacttaggccttntagcttcaggaacaaagttatcccttgtgtcctatacctcaaccacttgtgatagccgccaatgatgccattgctacttcccctaagctccttatctttcctttccactgtattccacgctctacgaattctctgaagtatcctcatattggcttcactgaaacctcgcgcaacagaaggcgcgatgatctcctccgacgatgcacctctcatatggtagcctagttgtcttatggccagcatgggattattaataatacaaccc

SEQ ID NO: 51294 - DNA, 407 bp, Glycine max
  unsure (1)..(407): unsure at all n locations
actagatgccttggttaaccaggtaacctagctggccttgaatcagaaatctgtacctctcgcaagagtctgtggtttatgctcttctgtcgaccatcgtacagaccttttcccttctatgcaacaaccaggagcaattgagcagcctgaagcttatgctgcaaacatttacaatagacctcctcaacctcaacagcaaaatcaaccacagcagaacaattatgacctctccagcaatagatacaatcccggatggaggaatcatcccaaccttagatggtcgagtccttcacaacagcagcaacaacaacaacagccttattntcataatgctgctggcccaagcagaccatacattcctccaccaatccagcaacaacaacaacaacaacaaccccagaaacaac

SEQ ID NO: 51295 - DNA, 345 bp, Glycine max
  unsure (1)..(345): unsure at all n locations
agcttctatagaagaatcattcctaatttctctacaattgcttcacctctcaatgagctggtgaagaagaatgtggcatttacctggggtgaaaaacaagagcaagcctttgctttgctcaaagaaaagcttactaggcacctgttctagctcttcctgacttttctaaaaattttgagctagaatgtgatgcctctggagtgggagttagagctatcttgttacaaggtgggcaccctatngattattttagagaaaaatttcatggtgccaccctcaactaccccacctatgataaagagctntatgatttaataagagccttccgaacttgggaacattatc

SEQ ID NO: 51296 - DNA, 439 bp, Glycine max
  unsure (1)..(439): unsure at all n locations
acttggttacttattccaaccgtcatcctcgttgccactgtagagggtgactgaccaccacatccacttaattctacaagtcgcatcaatgagcgtgcgtccttatctgtacccccattaccagaagtaggaaattgagcttcaggtggaatcaatgttgcaaaaggggcttattagtccgagtacaagtcatttctcgtcactagtgctgctcatcangaaacatgatgactcttggcgattttgcgtggactatagagcactcaatgtggtgactgtctgtgactgggttcctatcctcaccatcgatgagcttctcgatgaattgngcaaagcttgttggatttcgaaattggatttattgcaaggctaccaccatattcggatgcattcaccgaacattgccaaaacagcatttcggacgcaccatgggcactat

SEQ ID NO: 51297 - DNA, 388 bp, Glycine max
  unsure (1)..(388): unsure at all n locations
atgcttgataatgtcaagtatatatcacatgtttgtcatcatcaaaaggaggagaatgtgaatgtatgtatacatgattctgatgatgtcaaagaataatctaagacggttgcttcaaatgatatgcattntcttcaagaataattcaagattgcttcaacaaaccaatccttgtttcaagattcactaaagaccaagtcttgccttaaaacaaagtgctttcaagacatgcaaggctctggtaatcgattactaagaagtgtaatcgattaccagaagacagggttgaacaatagctgctgaaaaagattttgaatttgaatcttccacatgtaatcgagtaccatatgtctcgaatcgaataccagcaacccaatttctgaaattc

SEQ ID NO: 51298 - DNA, 443 bp, Glycine max
tcgataaagatgttgctatcacttctagactacccacgtgagcccgctaagaggtaagtggtgaatttatcacaattgaagttagaatgaacatttgtagggatctttagaggatcaaatttaggtttatttttggatgtttattgtattgtaattcttcctatatgattatgtgaaattgttgaggggtgttactcctcatgttgttagaagcactattgtataatttgtttgtgttttggataagatttactagattagcatgataaattgttatattgtgatcatgaaattatgattgaaattctttataagtaataaattgaatatgtgatgaattgtgagataacatgtctctatgagattataacatcgttattgagatcgagtataagtgccaagctgaacatgtgttaatttgcgagatatacatcatcatgtga

SEQ ID NO: 51299 - DNA, 294 bp, Glycine max
gatgtaccctccactagaacttatacacaagagatgttccctctcttgttctcagtcacaacaaccctagtagatgtaccctctacttataccacataggatgtacccttctatgtgataacaccaagttctcaggcggatagtccttcgaaactctgtgagaggtgagacaaaagaattctcacgcgtttactcctttaaatcttttgttatgggaaagggaagaatcaaatgaattcccacactgtgtcgttttgaaatcttgacgagggagaacggagacacaaacaaatt

SEQ ID NO: 51300 - DNA, 322 bp, Glycine max
atctgaagtacatctgctctaatcttggtaagacgatcatcaagaccatctaagaaggtgtagactctgtcttcttgcaaaattaaattatatctctgaatatcagcatcacacaacatatgatttggtcgacgaagatcgatctctctccatagtccttgtaggttgttataatacgtttcaatagatctgtcaccttgcatgagtctggtcactcttcttttgagatcatatacttgtgatgtatcaccgctatcaaagtatgttgtagcaatactatcccaaacaaccttagccgtcagaaatctatataaagttctca

SEQ ID NO: 51301 - DNA, 267 bp, Glycine max
  unsure (1)..(267): unsure at all n locations
caagtatagagntactattatacactaaagctccattaaaaactgaaccatgagtacataatatactacattgctactgcattaaacatgttattggtattaaccaactccaggacctacaggaccctttcccttatttgtgagaaaactagcgtaatataatctagttctataattaactaaagagttaagataagctatcccaaanacgcaatatctccttcttatgtctcgtcaacaagttgaatttggattaactaagtgata

SEQ ID NO: 51302 - DNA, 126 bp, Glycine max
accacagagtggtacctggagatatgtcgcgggggtcaagagaccatgtggacgtcaagtggggtgctattgcccaaaaccaagcttgaccaataccgacccaacccgggcataatcagtcagtga

SEQ ID NO: 51303 - DNA, 197 bp, Glycine max
  unsure (1)..(197): unsure at all n locations
tatgttgaattgcatacaagataacagacggaatgtgattcttgtgattaaccctgcttgccaagaacacagggcgaaatgcaggtgagcagtgtattttcttacaatgacgtcggcggaacaacctgcatgtaccaggacaaatattatggattctactctatatatcaaacgttaagcacanagcagattaaatc

SEQ ID NO: 51304 - DNA, 170 bp, Glycine max
  unsure (1)..(170): unsure at all n locations
actctgcacatatatcatactntctatatagaacaatatattcatgctgatacgctcgttggcgtatctgactacgacacgtctactcgctcgtatatcaaccttattccataatagacttattataagtagactctggtgacatatctaactattaaacatctcagact

SEQ ID NO: 51305 - DNA, 372 bp, Glycine max
cgagctggagcttgcccaggcgagccagttacttatggctgtatgaattagctcgctcaagcgagctggagcttgcccaagcgagctggagcttgcccaagcgagctggttgcttaggcctaaaggcatttcatggctcaggcgagtcatatgctagcctgtgcgagcttgggtctagagaagtccacaaaatgacccatttgccctctttcccttgtgtcgttttgttctcttgatcaaaacctggagtgttccctagctgtgcattgcaaccagtgccaaacatcgtaattcgattggcaatgatcaagacatcgtaggtgaatgatataacatcatatccgaatgaaattagggttggacaatactcat

SEQ ID NO: 51306 - DNA, 477 bp, Glycine max
  unsure (1)..(477): unsure at all n locations
cttgagtcccgcgatctctgagtcacctgcgggcatgcaagcttgcaatgaaattaacataacaatgtatttatatatgtgngacaaaataatacaaanatgatatataattcttaatatagaattgacattcatttggtccaagttaaatgcattttggtagttattatatgaggcaaggcttatgntttcatcttcctaacatgtaaaattaacatcattttttaacattccttttgataaaattgtatatagtcatttgtgtacaaattatttgcatttatgtttcaaatttgtacttaggcatggatcgtaagattacaaatctattctttcatactcgaaacgttctttcaatagtgcaccttaaacttatactggagtgataataattaaaaatttcattattatctgcaaactcagatctatgtctaanattaggatggtggtaacgttacatatgtacggacaacatat

SEQ ID NO: 51307 - DNA, 511 bp, Glycine max
  unsure (1)..(511): unsure at all n locations
gatgctggttggtgagtggccatgacagcaagatttgagtgattntaccatgaatacaatctatggtaaaaacaattnttatgcattggggttatattctatttgctgcaagacattaatccttttcgaaatatatatatatttgaagagagttttatcttttacaataaagtacttttatacacccatggtcagcatgtttaaagaattcatttattntgtattatatattaaaaaaaatcttaatagaataattntaatattaacttaattntttaattgactatgtttcatatacatttacttatgtaaccaaaanaacacatactnttgttaagattaggtagcaaagtaaaatatcgttctttcatcttttcatccaactactnntgccaagtgaattctggtntgtctggctttaattaatcttcttaaacagtggtacattggtgtaaacccagatgaatgatgaatgaanntatatannatccacgccttcatctagtaacta

SEQ ID NO: 51308 - DNA, 299 bp, Glycine max
  unsure (1)..(299): unsure at all n locations
gagaagacttaatcaagataagnatgagaaggttntttcaaaaactgagtagcacatggatatttctcanaacatgtttaccaaagattttttactctctggtaatcgattaccagtagcaaaatggatttgaaaaagttttcaactgaatntaaaacgttccaattgatttcaaaaaactgtaatcgattacaatatnttggtaatcgattactagtgcctttgaacgttgaaattcaaatttaaatgtgaagagtcacatcctttcacataaaagctttgtgtaatcgattatactg

SEQ ID NO: 51309 - DNA, 438 bp, Glycine max
  unsure (1)..(438): unsure at all n locations
agactngcttattcatttagtgctaatntttctaccttcatagtttagtcagtttaagatctcagtcagaaggagaaatggtcttttaatgagctcatttcatactgtgtgcaagaagaagaaaggctgaagcaagaaaggactgaaagtgctcatgttttgagtacctccaaagataagggcaaaagagaaagaaatgaggagcccaagaatgaagctgtgctgctaagggtctagcacaaaagaaacataatcaaggtgacaactgtttcttttgcagtaggcctaaacatgtaaagaagaaatgtaccaaatatcatgcttgtagtgcaaagaaaggtatgtttcttactttgatctgttatgaggtcaattgagctntagtacctagaaacacttggtggtagattctggtgcactactaacatcagtgttaat

SEQ ID NO: 51310 - DNA, 282 bp, Glycine max
  unsure (1)..(282): unsure at all n locations
gacacttgatcttgaatagactacaaggagcactctccttggctgcttatccacgatagattatcctctaactgccgnacgagacagccctcgagtaggaaaactacaagatgcctcataagatcgagggtcttctcctggagttgctgctgcttctaaagccctgcaaaaaaatataaatctctttgtgtttcgcctcctagaagtagcgttaatctccaaagctatgggaatgaaatcaccagcgacaaaattcccttacatacaaaacaagcagaacaa

SEQ ID NO: 51311 - DNA, 374 bp, Glycine max
  unsure (1)..(374): unsure at all n locations
aagcttccttgataagctagaggggtgctactcacatctctccaatagctaagttcaccccgatgccaaaatacatgaaaaatacaaaaagtctcttctacaaagactactcaaaatgccctaaaatacaaggctaaaaccctattgtactagggtacccttaacttgaaaggtagggtgcccttaattnttagcataccctataaacctaaaaattgccaaaatacaaggccccaaagaaggaaaccctattctaatatttacaaagaangtgggctcatacttagcccatgggcccaaattctaccataaggctcatgagaaccctaaggtcttctactgcatatctggcccaatattcttggagtcttcta

SEQ ID NO: 51312 - DNA, 413 bp, Glycine max
  unsure (1)..(413): unsure at all n locations
agcttggttggctttatcactcctaggactataattgcaactattaagaanagtttgattgatcccatgggcaatctgaggaactggaattcgggtgacctgtgcatggcaaactggacaggggtttggcgctctgatagggaggaggctgatggttacttccatgtccaaaagctntatgcattacttatccttctacntttcttttttgttctcaatttcaatttcttttatttagatattatagagtgttgttcaagggatttctatattctaaatattttctgttaccccacttttaatgaagctacttaatgactatgaatctctcgggaaagttagcaccccagcttggtcagctatctcatcttaagatactgtgagttgtgtaatgtcataaattgtgtctggaa

SEQ ID NO: 51313 - DNA, 355 bp, Glycine max
  unsure (1)..(355): unsure at all n locations
gactactaagcctaatactataaggattcatatgaagaaacataatgaataagaaataccccctaactaagattgcttcttcacttagatgattaattcattgatcccagagtatattcctaagatattataaatatattatggagatatgataagatattctaaaatactcgagatatttagagatattctaacaaagttaaaggtgaataatgaccatgtatatatatttttttcttttgcattgtgtggnggcctagggattaaaaataaaattagtaagtaaaaagaaatggngacaaggacatgaaattcttttagaaattagaacaagcaataaacaagcataacaaat

SEQ ID NO: 51314 - DNA, 245 bp, Glycine max
atagagaacatcaaatgtaagacataggctcatctgattcactttcttcattgcctatatactgatgatggcaataattctgtcaatcttaaatcacacattatgcatacttatgcgcaatcaataatgcaactagtcttcttttgatagcccagatagtcaacgttcttacactaacgatgacgatcacatccattagcttcaccacagaaattccgatccatatgcctattataatatatgga

SEQ ID NO: 51315 - DNA, 486 bp, Glycine max
  unsure (1)..(486): unsure at all n locations
tactaagcttanagcgatgacgttcatgtcaatgcagctaatagcactatctttcttgataatgatgaggctggtgaaggttcatcatcaaagaatgcttatgacaaaaatgaagttgtactcccaatggaatatttctcttcaaaccctagctcanagtctaagtgccaggacatgtcagaaatgaaaagggatttagccagagaagatgatgataaggaggatgaggacatcagcaaccagtggaagaagctgagaaggttgatacccggaggagaagagatgtgtgatgatgaacaaatggtttcagagctagagagttacataatgctgttgcatatgcangtgaacgctcttcagtttctgtgccacacacgccgtagttaatttctatgtcttgcatctncacaattaattgagccataaactatgttaaattcaagatnaatagttattgaagaactatatggatattatttttctgtc

SEQ ID NO: 51316 - DNA, 358 bp, Glycine max
agcatgcttctacattattagctatctaccattggcatataccaaattataaccaacatatagtactatattgccattcaatatcaataaacagatcacataacaaaggatattgggtatttgttgtctactgttaaaaaattaacaaaacaatatttataacagttgacaatattatatgagtcaaaatatatccgtgcatgtattcaaaacataaatcaaggatgaagtcttggtttgatagctagaacaaaatagcatgagacacagaaaacctatgtatgaactgacaaatatggtgcatagggtttaagctgggattataatggtcaaagtaatttgagaaagaagcgagtaa

SEQ ID NO: 51317 - DNA, 434 bp, Glycine max
ttcacggagaacatgatagcactgacattttctactattttgcctataattgaaagcaagatgaccaaaatatatgccacagacatattcaatgactcatatgtcatatgtgctttactatggaagactttcaaatctcccattaatcacattttgttatatagcatgggtcaatggggacaggacatgtattcctattgtcctcttctctcatcacccaaaagatattttaaattatgattgtaaaacaaatataatagtagtcatttagtaatatgctataatgtttatcggcgtgacacctttgtgccattattgaatactatgattacaagagtgtaaagcctctaaacactcactttttgttcttgccatatcttatataccagcgatccaccaccagaattatctcagtccaaaatctttcgattcac

SEQ ID NO: 51318 - DNA, 417 bp, Glycine max
  unsure (1)..(417): unsure at all n locations
agctttganatcaaactttatctatggtaatcaattacagacaactggtaattgattaccagagagtaaatactctggtaacttagataatattgagaaaacttttcttgtacaacaaaactgtgctatgtttggttctcgaaaaatattattcaatacttcccttgtgaagacttgacttggtgcttcttggtttcttctcttgaatctttaattcatcttctcttgaatcttgattcttcttgatgtcttttctttaatcttgatcttgaacttgttgactcaatcttgacatcattcttttgggttttttgtcatcatcaaaactacttgaatcatactttgaaataagttatttaattatgagagttcttgtttaatccctattntctctcccccttggctatcacaaaagcc

SEQ ID NO: 51319 - DNA, 391 bp, Glycine max
  unsure (1)..(391): unsure at all n locations
tacccatcacatgtggtactatgtggttgtcgggcgatggtgcacaacaagttttccacatccacaatgcgcgcataaacccaccatcccctgttgcccacctccatctgagctcacgtactcccacgtagcccatatcctcgtttctctcaacaccgggtccccatcaatcctcccaagcttccacaaaatccaagcaaaacaacattcaaacagcacaagctatcacagccaagcaaaatagggcaaaggcagaaaactctgccaaaacaccaaccaaatcacagcttttctcacttaaagaccccagtaacaattccttcgatccaagttcgtaaccgctggatcaactccagaattntactggaagtctatagtacataatcctaca

SEQ ID NO: 51320 - DNA, 485 bp, Glycine max
  unsure (1)..(485): unsure at all n locations
gcttccataagtggtatcagagcacaagagcttctttangtgctccttatacctccattaagttttttctttaccttctcttccattgttgtttcttcattatttctccatgtatctcctcacatgtcttgtgctaaatgtttttaacatgattctttatagtttccaccgattaaacttgctatagaagctagatttgattctctatggttcaaatttcttgttcttgttcttgaaccatgaattgtgttgagtttaggttcctttgagttttgtctcgttattttttgtggctaatacctatatcataaaattcttactaaaatattacaggagaagaaaacctcataaatctagagtgacttgttcacctatcgtagttntgtcatagaagtcatgtctagtcatgaaacttgtcacataagaattcttatgtngtgctgaatttaatttcttggttctttgtctaactcactctgtcatga

SEQ ID NO: 51321 - DNA, 276 bp, Glycine max
acccttcacttgcaagaaccacttctcataactacaacacacactcttctgctagtgtccacaacagtctccttagtccaaaaaacaaatcataatactgttgtatctagctcttttaaactatggcatcaaatactacgccatcctaacaaggatgcactagcaattgtactacataaatgtaatataccttttatcaataacactagcagtgattttcgaattcttggttatagccaaatctacaaactaccctctttattgttatactgccct

SEQ ID NO: 51322 - DNA, 426 bp, Glycine max
  unsure (1)..(426): unsure at all n locations
gctatgctgatatattacaatagacctcctcaacctcagcagctaaatcaaccacaacagaacaattatgacctctccagcaacagatacaaccctggatggaggaatcaccctaacctcagatggtccagccctcaacaacaacaacagcagcctgctccttccttccaaaatgctgctggcccaagcagaccatacattcctccaccaatccaacaacagcaacaaccccagaaacaaccaacagttgaggcccctccacaaccttccctcgaagaacttgtgaggcaaatgactatgcaaaacatgtagtttcagcaagagaccagagcctncattcagagcttaaccaatcagatgggacgaatggctacccaattgaatcaacaacagtccccagaatcttgacagctaccttctcaagct

SEQ ID NO: 51323 - DNA, 407 bp, Glycine max
  unsure (1)..(407): unsure at all n locations
tctacttatgtggcagggcgggcttccttcactttctcgtcttcaacgctagtcttgaccaccgctcttccttcccgcgatgcttctcttcatatccgcctgagtgggcttatagcctaaaccatacttcccacgatttcctttggcatttatcaggctagttatgccgtcgttgtctttgcctaaacccattccgggttcgtaaccgttccccaacataacttgggccatcattactggtgcatcagacagganaggctgcccagagaaggagtccacggaggaaatgctgaccacctcataagactggaaagcggtttctaacgattcttctgcggcttcaacataaggcatagaggatgggcagctcaccaagatgtcttcctcgcctgacacgatgaccaaat

SEQ ID NO: 51324 - DNA, 347 bp, Glycine max
gaccacagagtggtacctggagatatgtcgcggaggtcacgagaccttgtggacgttaggtggggtgctattgcccaaaaccaatcttgaccaatcccgacccaacccaggcatagtcagtcagagagaacctgtgatgtacctaaacaggcgagctcctgtcagtcaacagataaaaggagcaaagactacaaagcacggaggcttgtgtggtggctggccagctatgaactctgattgatatatgggatatggcctctggtaattgattaccaagggttgggaattgattacaatgcttataaatgaagacaggagactaaaatagtctctggtaatcgattacc

SEQ ID NO: 51325 - DNA, 395 bp, Glycine max
  unsure (1)..(395): unsure at all n locations
ctgaagtgtgagagctctgggcagatatatctgcctaatctggaagtggngctaaagtagaagatgcatggatgccaactattggtgcaaaggaagagggaacattagatgctctgagcttggtcttccttgcctctggaaaattaactgtttggtcattcatattccaatagttccttatgatataagctaagtcaatgaccagccttaggttctcataggaggtaagagcatcagatccaactcccctcgatctacacaaggctgtgattaaagctgggaagcctaagcgagaagagttagactgagccatcatagtcatttgtccagagatcaaactaccaatgttcatgtccatccttgtgattaagccatagaccaacctagctctatct

SEQ ID NO: 51326 - DNA, 337 bp, Glycine max
  unsure (1)..(337): unsure at all n locations
tagcattaccacacgtatgcaactattgncaatctcatatcattcaattggaaaagatccgacaaagtggatgggaagttaaagtagacaggttgatgtctactgaaacatgagataattaatagagcattacacaggcgtattatgataagtttgtgttattagtaagagcctcaaagatatacgtcacgatgatctgtaaatgaattccaagccaagaggacaatgcctttatgcaccaaagaagttatgcgtccaagaggaccaaagagggattaattgaatgagcacagcctcgaggatgaatggatagagcataatatcatcattcataata

SEQ ID NO: 51327 - DNA, 461 bp, Glycine max
  unsure (1)..(461): unsure at all n locations
gcttgaggtctttttatatgtttcctcggaatgcttatgcatattgtttcatatgatgaggcaacaaaatctgctttctcaaatggaaagttttcttccggcatgaaaatagtttgtagatactacaaagtattttaaaccttggtgtgagttagactaatatagatacactatagtatttgatgatacactgcaagtgaaatggtcatccatttattgttctattaatgcactcacaatgtctttacatgattagctgaagattnttctatatgatttgttcttctagactacgccttgtcactgttatatcctcanagatatctgtgatactctttcaatccacttttaagacttgatgatcacttctttctcttcagaaggtaatgatgaggaggatcaccatgagcactggaatggatctatgagtagaagtcagtcaaaacattctaatcaacaag

SEQ ID NO: 51328 - DNA, 262 bp, Glycine max
  unsure (1)..(262): unsure at all n locations
caccattggtaactgcctcacaatagatctgctggcatgaacacaaaaaagagcactgtatttactaggataacctccgcatgcactgcagcattctataaaaaaacttcgtacagacgtatggtattaagtgtatatatctcacattgagcattccctgactatatgaatgtccaaagagaataacataggccaaaggggggatatcattttactcacttcatgtntgcctgtggcaatgccagtgcaagaagctagaaag

SEQ ID NO: 51329 - DNA, 328 bp, Glycine max
  unsure (1)..(328): unsure at all n locations
attgtataatttatattcttcatttatatatnttggtactttataaaaatattctattaatctttctattatcaatattataaaaaataaaataataagattagtatcaagttattttcttattctttttctttatttaaaaaatacattatcttatggggagatttttttattacacatacaaataaaagaaaatccttgtgagagcaatggcccttgcaaaattatacatgcatcgccaatgatcattgtgcatgaaatacttgaatagttattaatcttgattgtctcaatanaataattaattaaaatttanagaatcatttat

SEQ ID NO: 51330 - DNA, 340 bp, Glycine max
aattctcatggctgaatgcagtgcaactggattcatactgtcattggagtttggaccaatgaccaatctaattactaaggttttacctcaattttgtggattcagttttgaccattgctatttacactacttaccaaacatacccctatccttgtttgaaatttttatttccaaaaacaccttttatataactattctctacactacatttctacataaacttcccatgttgtcttttctaatctttcactctgcaacaatattctaaggttaattattaattaattatctcactaatggcgtgatcattatgatcgaggatattttatttatgccatga

SEQ ID NO: 51331 - DNA, 291 bp, Glycine max
  unsure (1)..(291): unsure at all n locations
agcttaacanactnaaatatcaagtgatcatgtattcctaacaatagggggagttaacggatgcacattntatctatatacaaccgtttgctgcttgcttgaatctcgatntcacgtattgcatcgtcatcatcaaacagggggagattgtagatgcaattggctctgatgctctgatgatgatcatgacgatgtgctgcaaatgggcttttcaagattaaaattcaagacaatacttcaagactacaagtcacaacatcaagatgatcactacaatattaagaagggaat

SEQ ID NO: 51332 - DNA, 414 bp, Glycine max
  unsure (1)..(414): unsure at all n locations
ttattttcttcctccatctcccaatagcaaactttatagcagacatgagattattccataaaataaaaatatgatacaaacttacaagtgtctatatggcttcatagtcatctgctgcaggggctgngggagcatcagctagagcagataacacaacaaaggcaccaaataagattgtgataatggcagtgaagttgacaagcaaagcctcagaaccatatttgtccaatcctgagttctcaaggaaagtgagcttctccagatacccaagagcagcagtgcccacagccaagacatatacaaacagcccatatagcgcgtgccaaggaagtgaggcgcgtctaatgtctggagtcccaccagngaagaataagatcacaaacccatatatccacttcagggaaccaacacaat

SEQ ID NO: 51333 - DNA, 295 bp, Glycine max
  unsure (1)..(295): unsure at all n locations
agcttgtactccaatactatgcacttcactttttgtttanaagagggttaaataatattgtggcagatcccttttcgtttctggtatattcaagctttccctttcgtggcgataatgtgattgagaagccgaaaattggaacattgtagcctatgttattgagggatgacagataaattccaaatcacactcttttaaagatacttacatttttgtaattcatcatgcctaacgggagtctagaattagaccctgtcagataatgggcataaacgatgtttacattcaagttaaa

SEQ ID NO: 51334 - DNA, 328 bp, Glycine max
  unsure (1)..(328): unsure at all n locations
atatatatgatggataacttctacattgtcctacacttgtacacccccttagaattcccacttttaagagcactaacaatttattaataaaaaaaccaaccaaatatcaggttggtaacttctaacatcctcatctcaggtgtcttatatttttctcgtcatacccgcaaaactcctccttttaagagcaatgatgaattatcagccacataattgaagttttagtggttaataaccagaaatgaaagcttaggtattaactaatntgtgtgcaacttgaaaatattactctcttttgtttatacatagagtattcacaactgctaca

SEQ ID NO: 51335 - DNA, 274 bp, Glycine max
atcccgcccatagatagtaaggatcgagccttgcgcaaatggtccccaaatcgtgatggaccgtttataatacttcagatctattctagcggcgcttatgagttagaggagctaacccctcggagacgtactctgagcataaatggtaagtatttgaaaaaatataatccaacactgctcgaagttaaaataagcatacactgagagaaatactggatacataaacatggcgataacagaaagatgccacaaaagggcctgtgtcagtattaca

SEQ ID NO: 51336 - DNA, 341 bp, Glycine max
  unsure (1)..(341): unsure at all n locations
agcttatgaaccagtagatagcatggctatacctctactgngtatatgatgaccaattgtgttggtataaatacatttccaaagcagtcaaattaacatcatgtgtagttaactgcagggttattaacaaatgcgcaatgtgtaatagcttcatgacatctactttttgtacaatttgatacataacaaaattcacctcagcttcatcctgctaaccttgcaacatgagttctttagatgtgatttatttattatagctttagtttaagactacatgtatttcttagttactgtgtgcaaaatttgattgaaagttgtactcatttaataaatacttgact

SEQ ID NO: 51337 - DNA, 397 bp, Glycine max
  unsure (1)..(397): unsure at all n locations
tagttcctagcttagcccataaggttttcgagatatgtctattgaacttagcatctctatctaacacaatggtcctaggcaaaccatggagtctcacaacttccctgaagaagagttntgagatgtgagaagcatcatcaaccttgtggcatggtataaagtatgccatcttgctaaacctaccaaccaccattaagatagagtctacacctctttgggttctaggaagcccaaggacaaagtatatactaatgtctatccagtgtgcagatggcatgggtaagggtgtgtatagcctatgaggcatcaccctagacttggcttgaaataagccacacctagtgcaatgcttatggacatctttcttcatatgggaccaatagaacttttctatgag

SEQ ID NO: 51338 - DNA, 333 bp, Glycine max
  unsure (1)..(333): unsure at all n locations
agcttgcttgtgcgaatanggttccattatcccgaaactattttacaacattctagagcacaccacaatgcctattncaggaaaatagctctggaggcagcaagaggagcagcgtttgcagagatacctaagtctaacacaatagtcactctgtgtgggggatttcgaaagaacaaccgatgtaattactttaatatgcaatcgattgtgttcttgtgtcaatgcttcttaaatgcttaattctagatgctcttggccatcacccattgtgtgcatatttatgtgctttgcattattgctgctttgaacttaatgaacagaattgaactactc

SEQ ID NO: 51339 - DNA, 271 bp, Glycine max
  unsure (1)..(271): unsure at all n locations
tatcgtaatcgattagataattattttttagactatgactgtttnttcaggagtctctactntaatcaattaccaggtgatgtaatcgattacttctctcttaanagtgtttctgaagtgatcaataacactttatcgattatatcaagaatctaattgattacattgttcttgaaagttttccagattttgggaagaatactntaatcgattgaaatgataatataatcgattacttctttgaaataattgattacattggtatattaat

SEQ ID NO: 51340 - DNA, 364 bp, Glycine max
  unsure (1)..(364): unsure at all n locations
tacgtgcttctactcctattgaaaatgtgttgctagtataaggtttgaaacatagtttattaagcgttagtcaattatgagataaaggatataaagtatctcttgattctgaaaaatgtgttattaagcatgagcatgacaaacatattgaacatacaggttttagagaatataatgtctacatgattgatctacaacacaaatctataaatgataaatgctctntaagtaaagattgtgatccatggttatggcataagagaattgctcatattaacatggatcatctaaatagggtaatttcacaagatctagttattggactgcctatattaatatttgaacaagataagttatgtgatgc

SEQ ID NO: 51341 - DNA, 468 bp, Glycine max
  unsure (1)..(468): unsure at all n locations
tgaattcattctatgcacncttaggngtccattattgctttgtatgttttcatcttcattcttctactttcggtattctttntcttcgttttaagcgagttttgaccgatcgtttaagccataacttcacttaattaatgtttaaatgaatttcaactaatcgtttgtgttgtaatctcgtttaatcacctttaaaataaaattcaaccgatcgttcatgccgtaaccttggttaaataaaaaataataataaaataagtgttaatcagacattttactttgaaagtcctctataatgagtngagaaataaccaagtgaaactaaggctaagatcaactcacaaatcaagcattntccctcagaaaggtcatttgaaatcgtttcaaggtccaacgccttaacggtctctttntacttttatcggtgataacaaaaccgttataagtctaaaatcgacaccccacata

SEQ ID NO: 51342 - DNA, 368 bp, Glycine max
  unsure (1)..(368): unsure at all n locations
aatcacttattgggaggacattttgctatgacattaaatntaattgccattcttgttgcatatttctaaccatgcttttgaatttgttgagctaaaaagttgaatgtgggcaccaccatacttagttgattgaagcacatgaacaaaaaaattgttgaatgaaggggaatgcaagaagagtgtgtatgtaacttgtctttgtgtatacttagtctttagttntaaattttcttttgtttttgagtccttactntttttaagtagttttaactgttttagtagttttagttagtcttgcttgaggacaagcaaggttctaagtttggagtgttgataaatgtcaaatttaccggattctatagtttaac

SEQ ID NO: 51343 - DNA, 439 bp, Glycine max
  unsure (1)..(439): unsure at all n locations
tcactcctggcatttatctctagcatgcattctntctttctttacccactcctcacgtttggttntttagggaaaaataccataactaaacgcgccacaaggcatccctatcgcaccagatccaaatctagaacgatgggtgatcaagaggagacacaggaacagatgaaagccgacatgccggctctgaaagaacagatggcttccatgatggaggccatgttaggaatgaggcagctcatggagaaaaacgtggccaccgctgccgctgtcagttcggctgccgaagcagacccaactctcttggcaaccgcgcaccatcctccctcanacatagtaggacggggaagggacacactgnggcacgatggcaaccctcatctgggatacagccgagcggcttacccttatggatggccgcccaactactcaccacccg

SEQ ID NO: 51344 - DNA, 384 bp, Glycine max
  unsure (1)..(384): unsure at all n locations
acgtatgcaactattgcatttctatatcattcaattggataagatttgacaaagtggattggaggtaatagttgacaggctgatgtctactgaaacaagagacaagtagaagagcaaaacacaggcgtattttgataagcttgagttattagtaaagccacataagagatacgtcaggatatattttaaaggaatttcaagccaagaggactatgccttgatgcaccanagaagtaatgcatataagatgaccaaagagggattaaatgaatgaccaaagcctcagtgataatagatagagcatattatcatcattcataatattacaccgtaatattaatggtttcaaatgaccatcagattcacatgattatcttacacaat

SEQ ID NO: 51345 - DNA, 480 bp, Glycine max
cttgaggtctatttatatgtttcctcggaatgcatttgcattatgttttatatgatgttgcaacaaaatctgctttttcaaatggaaagttttcttccggcatgaaaatagtttgtagatactacaaagtattttaaaccttggtgtgagttagactaatatagatacactatagtatttgatgatacactgcaagtgaaatggtcatccatttattgttctattaatgcactcacaatgtctttacatgattagctgaagatttttctatatgatttgttcttctagactacgccttgtcactgttatatcctcaaagatatctttgatactctttcaatccacttttaagacttgatgatcacttctttctcttcagaaggtaatgatgaggaggatcaccatgagcactggaatggatctatgagtagaagtcagtcaaaacatcctaatcaacaagcttcaccacttccgactaaa

SEQ ID NO: 51346 - DNA, 363 bp, Glycine max
ttatggctagcctccggacttcactccccgtgccactccgaaagatttaagccaagcccctacttttgaggggcaactcccgccttgtgacgactatcccgggcaagacgatgaggaaggagatacccatctcggccccctgctccaccttaatgatccgtccccacatgaactaccccaaccgaacatagtccgccatatcccggcctcacccacacccgtaaaagaatctgttcccttcgcggaagataaaggaaagatagaggcgcttgaagagaggttaagagcagtcgagggccttggcaattacccgttctcggattgatgcggattatgtctcgtgcccaatatctgcattcctcc

SEQ ID NO: 51347 - DNA, 384 bp, Glycine max
  unsure (1)..(384): unsure at all n locations
caccttctggtcctactcatagntgacgcatgagagaacatgcactactcatatctaccactacaagtaggcctctggagcattctttcctatacatggaggaacgttgagttcaataccatcaattcggatttgtctaggaacaccatcattccctcttctcctcctttcttcttcattatgatctctatactccatttgatccaacctctcatggagcgcatcatctcgtggtttcattaacctctccaaatgttgcatcaaagctcgcatttggaattgcgaacgccccactccatcattatgattagtacctgacatctcaaacaaacaaatcatacgtaacaagacaattatagttgctgttggaatacctcacccact

SEQ ID NO: 51348 - DNA, 229 bp, Glycine max
  unsure (1)..(229): unsure at all n locations
gcttctttttagacctcgatcggtcatctttcctggccgacgccgactgtcattntttcaatcaatatcggagaataatatttctttgccgaggggggctaatgtttatctggctgaataaatgagaacatgccattttcggccgaaacgaaacatcgggtgagctcgcacgataaaacctagccgacctacattgttagttgtttatgcaacaccgaaacaagaaaac

SEQ ID NO: 51349 - DNA, 273 bp, Glycine max
  unsure (1)..(273): unsure at all n locations
agctagtggtcaatctaatgagtggtgtctttctgctgcanagtgatggttcctgagcggataattctcatttggttaagcatgatattctgcaacatttgcaaagcagattcaaattaattgaagttatgtacgagcactggagcttatacaaaaataagcactgcagcttatttaaggcacaaattctgcagcatctgcaatatgtgggtgtgctacactgtgtgtgtgcgtgattctgcgtgcgtgagtgtgtctgagtgtgattctctg

SEQ ID NO: 51350 - DNA, 317 bp, Glycine max
  unsure (1)..(317): unsure at all n locations
gaggggaacttgctggaggtgttgccatgggtcctatccaatattaatataagaatcatgaaacacagagtaatcacaacaacatgtaagtatcaaattgtaaataagtacaattgcataatgtaaaataggtatatttttgagttaaacattatttgggtatataccaccgttaaatagtcgtattctcccataaaccttcatcatgatcgttacgatttgcatgtacattattgtcttcattttcagcatttatggaaggcatctgtggggaaaaatggggcatgtcattaacatcaagtgangatgtataaata

SEQ ID NO: 51351 - DNA, 238 bp, Glycine max
tatggctcgcaccactatcaatcaataccaatagaggcacattatgtatctgtccttcagccctcatagggagagactcgcccatgcgtcacggtacccccatcagcattacgttccactgccacttcttcgtatatttccaccttcacatccatcatgcgtacaatctccgcttcctctgtcatgggttcaccttctcctaggattagaaccctaagagctcgttctagacatttat

SEQ ID NO: 51352 - DNA, 331 bp, Glycine max
  unsure (1)..(331): unsure at all n locations
agagttgatgttttctgtatggatgggaactcangcggatgaagctttttctgaggcttggcattcagatgcatcagaggctagtggtgaaaacattgctcacactcgttccaaggtatatatttctcctaagctttggtatcttagaattaatgtgattcaagcccaggatttgttgctaacaaacaagagtggcaataataactcggaaattttcatccaaggtggtttggggaacttggctctgaggagccgttctataaagtgtagtacaagcccctcgtggaatgaggatatgatgttcgttgtggcagaaccctttgatgattgc

SEQ ID NO: 51353 - DNA, 330 bp, Glycine max
  unsure (1)..(330): unsure at all n locations
agctngcctaattaaccttatatagagagatattgattattaaacatacaaaatggaagtactaagtatttattacctatacttaacatgaaatacttataacactacatagtaaccataaactggaagagtttgatacaatttatacaagttttacacacaaaagttagtcattttcaccgactaacaacttctacaaatatacagntttgcttgtcctcaagcaaaaagagaacaactcacttgtcctcaagtgacaatgacatgcagtgactatgtacaaaggtgtatgcaacaaaagttactggttgcatgataagagaatggagt

SEQ ID NO: 51354 - DNA, 344 bp, Glycine max
  unsure (1)..(344): unsure at all n locations
tgagaaaaatgagatgacattaactntttactcggatgtcttattgaatcccgtaatatatcgtcacactcgtatttgataacataggctctgagcaaaatcaaacgacaataactttcaacacggatgtccgaatgaatcctgtaatatatcgagacgctcgtatttgaaaacggaagctctgagcaaattcaaccgacgataacattttactcggatgtctgattgtgtcccgtagtatatcgagacgcttgaaatttataatagaagctctgagcagtatcaaacgacaataactntttactcggatgtccgattgtatcccgtagtgtatcgagaagctc

SEQ ID NO: 51355 - DNA, 279 bp, Glycine max
  unsure (1)..(279): unsure at all n locations
agctagtcagtattcttgtagtattatatatttgancatgcaacaactaaaggaaattctgcattatttttaactaattggtccatattccatgataatcaaatcatttcatggctctgtagtggggataaacggcacgtacacaacatcactcgttcatgtggacatattttacttcacttgatagcgctacgcatagcttaatggcaaactcttaatagtattgtatatcttgttggccaagcgtagttaatgtaacaagaagaaatttccatctcc

SEQ ID NO: 51356 - DNA, 459 bp, Glycine max
  unsure (1)..(459): unsure at all n locations
atgtaagttcaactagatatggctccatgccatgtttgttaatataaanaattacttanattaaggatgataaaaagacggttagaattcagtaaaacaaattattaaatatattattttattggcttaaatatataattgatttttcaattattaaagagttaaattagatccttcaattgcttaaaaatattttaatttgattccttaattntaaaaagttgaattacatcattcaattatttaaaaacactatcgtacttttttgtcaactctaattatttgattgataaaaataaataattttacatcaattntcaatataattgacataaacaagaattttttactgtgcttatcaatacaatccatgtgaaaacaaagtacttattaagatctttcatcgatgtgaatagatatattttntacatcaataatcaatacaattgatataaaaat

SEQ ID NO: 51357 - DNA, 359 bp, Glycine max
  unsure (1)..(359): unsure at all n locations
agctatanaatcactgtataggtagcaataaatcaaggttcaaatatataatctttaataactcatactgtctaataatttccttaatgttagtctatctatcttaaaccaaaaataaaacaaagagggagtagtgcaattagttaaacagctctgtactaatccaaaaaagtgatacctctattgattttagattcatgtgacttcactttcagatttgtgacatggcggacatatataatgttgtcatgtctaaccatgttttctgtcaaaaacaagacggccagcaatgttttctgtacctctctctaatgaatttgtcttttgtatgaggagcccctcaatccctnttctactat

SEQ ID NO: 51358 - DNA, 367 bp, Glycine max
  unsure (1)..(367): unsure at all n locations
agtcatcaagagattataaatatgtgaccatggcatgagttctaaacataattatcattatctctttcaatcaatctttcaatatctttcatctctttcaacagaactttctggtttcatttctcttcatctttctaaaagttntttatcaacactttctcttccaagaaaagttctttattcaaaaactggtgctattcatctttttcattctcttctctcttttccaaaaagaattcaagaaggactaatcgcctaaattctttntgtgtctctcttctcccttttccaaaagaacaaaggactaaccgccagaattctttggtgtctcccttttccctttccaagagaattcanaaggacatag

SEQ ID NO: 51359 - DNA, 388 bp, Glycine max
  unsure (1)..(388): unsure at all n locations
agctatgaacattatgaatcagatgtgaacttgtttagctcagacgatgatgaattgcaaacaatatgacagggggaatataagaatatatcaacatactccactanaattgcattgacttgtcaatcgttaccgaaagatcacaaaaatttgtataagttgtgaaattatatattttgttccatacccatcccatctaatgttcaagcgaaacctcttctgcgtatttttctctccttgtgggctctcttacattatcatctttaggctatgtttagatatctaatgctgagtggaatgaaatgaattgagatggaatgcgaataaagtattatcttatcgtttgagatatatgttgatgaaataaaaagaaaagaactagtccacc

SEQ ID NO: 51360 - DNA, 194 bp, Glycine max
gttaagatacaaaattacaacaaactaattgctaagggtgtggcattgtttaaaccaagcattcccccatgacaggactagattgatactccataactactggaactgaccttcactgagctggtttaaagtcagagatgaaccgacaatgaaggaatgatgtctccactacaaactgtccattcacatgtcat

SEQ ID NO: 51361 - DNA, 392 bp, Glycine max
ctattccaagttcattaaccatacctttgttctagatttcttccttcactccttcagctagggccatgtattctgcttcagttgttgaaagagcaacaactgattgttgtaccaaacaaagtaaacacatatcctgttaaggatttccttgtgtctacatttcctgcaaaatctgcatctacatagcttgtgattgttgcctcttgtgctgtcttcttgtaccttaatccaacttgcaaagatccatttagataccttagtgtccacttcatagcttcccagtgtgcactgccaggatctcccatgaatctgcttattatgcttacagcatgagccaagtcaggtctgctgcataccattccatacattatgcttccaacaccactggcata

SEQ ID NO: 51362 - DNA, 369 bp, Glycine max
acctgcggcatgcaagtcctctcaaggcgaggacgtgtagtcctcttacggtgagggtaactagtacccaaggtgagggcgtgtagccctctcaaggcgaggacatgtagtcctctggaggtaagggcgtgcagccctctgatggtgaggacgtgtagtcctctcaaggcgaggacgtgtagtcctatgacggtgagggtaactagtacccaaggtgagggcgtgtagccctctcaaggcgaggacatgtagtcctctggaggtgagggcatgcagccctctgatggtgaggacgtgtagtcctctcaaggcgaggacgtgtagtcctctcaacggtgagggtaactagtacccaaggtgagggcgtgt

SEQ ID NO: 51363 - DNA, 419 bp, Glycine max
  unsure (1)..(419): unsure at all n locations
caatatnnattttngacttgaattcctaaatagttaattctacttaaaaataattnttgcatattcttattaaaattaatccgttaaatatattttattacaaaataattttaaattatttacttaatataaaaataaattaaattagttttatttttcatgatagagaccacaacactactgcaaaaacgacattcctcgacgtttataatgtacattcaaagacaattntgaaccgtctttgaagccaatgtcgtcgaaagtttagccttttgatgacggttccataaataaccgtcttagaaaaaaggtatgcttctaagacggttcttagcttagaaccttcttagaaggtcttagaaagatacttttctaagacgatctcacatgtagaatttatttattttattatttttatc

SEQ ID NO: 51364 - DNA, 463 bp, Glycine max
  unsure (1)..(463): unsure at all n locations
ctgcagctgcagcttgaggctttttatatgtcctctatatgtttgcatatgtttcatatgatgaggcaacaaaatctgctttttcaaatggaaagtcttcttccggcatgaaaatagtttgtagatactacaaagtattttaaaccttggtgtgagttagactaatatagatacactatagtatttgatgatacactgcaagtgacatggtcatccatttattgttctattaatgcactcacaatgtctttacatgattagctgaagaattttctatatgatttgttcttctagactacgccttgtcactgttatatcctcaaagatatctntgatactctctcaatccacttttaagactngatgatcacttctttctcttcagaaggtaatgatgaggaggatcaccatgagcactgggatggatctatgagtagaagtcagtcanaacattctaaataac

SEQ ID NO: 51365 - DNA, 159 bp, Glycine max
aaaagctctcaaaacatcttgaatactctaagacaaaaaactaaatgcttagatttcacatttgtttgtaagatgattaagatttaatcagttagcaaatcaaacaacatatcttctgatttgtatagaaccaacagtggcttggtaggacaaagaata

SEQ ID NO: 51366 - DNA, 395 bp, Glycine max
gctttagttatataggtctcatcttcaagtatttgatgtttctcaacggataaaacttcacttgatctttatctgataagaaaagaatgtcattgggtgcatttaatgcacgtactttcctcatggaaagacccctctcttcaatgcttgcatgtaagaaaattgcaacaggtagtcatatctttgtgtcaaagcaagtcctgcataagatagcttttctttgtgaatctggcataccaaatcatgacttcatttattcttcataggatttgacatatcctagaaaagtgtttttgcaaacagaatcccatacacaaagtaataaatgaagttttaaataccatcacacatgttgtatcaaatcatgactgtatctgcctatcatctgaaaacat

SEQ ID NO: 51367 - DNA, 420 bp, Glycine max
  unsure (1)..(420): unsure at all n locations
gctgcttctacatctgttngctntaattgcagagtgtatagttgcaacatgtggacaaattcgaaatacatcaatttattggattcagtcaatgttctcacatcaagttgagtatgaaaactgctagtcccaaatgtgattattacttgatgatccacattccccttgctgcaatctttgtaaaaagacaaatccctacacataagtcaggcacatgtcggatattgtacctacacaacccattnttgaagatttccatgagttggaatggagcagacaagatctttctgaacttccttaaatatatttaccanattggaagggactttgaccccttcaggaactgagaatgaaggccctattgcttggccaggcccatgataagggttctatgttagacaagtgtgctcagatatctta

SEQ ID NO: 51368 - DNA, 299 bp, Glycine max
atacaaacaagaatctagctgatggagagactgagaacatgcacgtcagtcataacggaagaggagtcgtagccacttgatggagagaaaggaaagagccctcgtccaaccaaggcgagtcataaacaccattgtcgaatgtttcgttggtggagaagccatctgctctggcgataaaggcacgtactacaagtttggtctgtcaataatgtctcccgacattgagtacccaacttgtcacccataacctttatgtcagacgacttcaacgcagtcgacttattgcatgacgaccccat

SEQ ID NO: 51369 - DNA, 218 bp, Glycine max
  unsure (1)..(218): unsure at all n locations
tcgtcccggatcttaagcacctgctgctgcagcttanctacagacgttattctcaagatgacactgtgtttagagaaagaacacttacatgacttatacaaaggtttgaatgctcgcaaacaattgaacattcttgtctctgactttatcactgccaaacttcacgtatatatagacttgtaggaacactaatcattggctctaaatgaccctcttcc

SEQ ID NO: 51370 - DNA, 400 bp, Glycine max
  unsure (1)..(400): unsure at all n locations
cggaaaggactggctcacgggttgggggtgtcatggttggccgaggatgagaggggggctggtgtttaggtgtggtaagggaacaacgcgtgcggaaagatatatatcatggatacacttattgataatggaatacgtggacatccaatgagagacggtcatagtaacgcttacaaataattttctgatatatgtcatggcttggatggtgtgagataattatggattcatgggaggccggatcaaatgtagctaccatnttctgcctacaaaagagaatgatggtcagaaagtgtggatatgtgatgaaaactcatatgggaatgaacgtgtatagtgagtcctgtgttgtacgtgaatggtgtataagagtgatgagtgaatattataagctgcactc

SEQ ID NO: 51371 - DNA, 143 bp, Glycine max
ctctattcttcttccttgtgcagcatcatttgatacaatacgatcattgggcttcactggagtattcgcttgcgttgccacgagatgtcacacactgatgttgctatccaaattgcactatcaacgtctgaaccccatcaacc

SEQ ID NO: 51372 - DNA, 290 bp, Glycine max
  unsure (1)..(290): unsure at all n locations
cttaatattttactgganaaggtacgagggtatgtgtgtctgtctgnnttttcgataatagaatgtaacacttataaaaatgtgatgtgtgtcagctcggactagatctatctcctattcattcgtaaactataagtgggttatctttctttaactcgatttctactntaactttaagtatatctggcaacattagagtttaattaagataacactctaagcaagattaaattaacctaatttcagacatttaatcgataagataatgatatagacaaatatcatcaatc

SEQ ID NO: 51373 - DNA, 147 bp, Glycine max
  unsure (1)..(147): unsure at all n locations
acctaacaaaagaactgacaaaaaagatgtgaacttccagaaccatctaacaaaataactgacaaaaagaaatgatatcccagagaatatcaaacccacgaaagcaaaaacgaaagcaactgcaacagccanaacaactggaaaaaa

SEQ ID NO: 51374 - DNA, 348 bp, Glycine max
  unsure (1)..(348): unsure at all n locations
gaggagattggagataaaatatgattcatgtggtagtagacaatggacgtaactataaaatggcgggtaagaattcaatcattcttaataaaattttaaaatttatagctataacttttaattgttattttactcatcaaagtttattgattctagtctatttaggtaaaatcttagaagtaacaagaaaaaaaaaatattttggactccatgtgttgcttattgccttgacttgatgttagaggatattatacagatcccaaacggtaataagttatacaaaaaggtatcacatattatggctacatttacaaccacacattgtctntgaacactatgaggaaattc

SEQ ID NO: 51375 - DNA, 426 bp, Glycine max
  unsure (1)..(426): unsure at all n locations
agctntgtatgtgtataaggtgtaggacacccctatgttggttagagcccggagaatgactcgccttatgaccagaagtggtacagcaaaccactgagaaagttaagttaattcaggaaaggataagaactgctcagagtaggctgaaaagntatcatgataagaggaggaaagatcacgaattcgaggttggtgatcatgtattcttgagagtcactctgtggactgnngttggtcgagcattgaaatcccgaaaactcacatctcgctttattggtcctttccaaattcttaagagagttggccctgtggcatgccataatgcactacccccgtctctttctaatcttcacaatgtctttcatgtgtctcaactccgtaagtgtatctgtgatccatcccatgtgattgaattggatgatgtac

SEQ ID NO: 51376 - DNA, 507 bp, Glycine max
  unsure (1)..(507): unsure at all n locations
tctanactntgtacaagaatgaagctctgataccacttgttagacaagtggcctcagatatcttaagaagggggggttgaattaagatattccaaactgtttcccctaattaaaaatctatttcactgtttactcaagttatgaattcccttaatgaaaatcttcttaaatattaatttaaatgaaacaatttgaatatgaatataaagcaataataaataaaggagattaagggaagagaaaatgcaaactcagttntatactggttcggccacacccttgtgcctacgtccagtccccaagcaacccgcttgagagttccactatcttgtaaattccttttacaagttctaaacacacaaggacaatccttcctttgtgtttagagatcctntacaacaagagactcacagtctcttaatcccttagagaatgagaagaagaagaagaacanatctctctagaaagagatggattttacagatngagcactcanataattcctta

SEQ ID NO: 51377 - DNA, 389 bp, Glycine max
  unsure (1)..(389): unsure at all n locations
agncttaggaaagggctatttcaccttctcgctaagccaatctacaggcttagcgagcatccactaagcgcaacactcctgngctaagagtgaggaagaatccataagcagatgagttgtataggttcgataagtgcaccgcttcatctctctaagcgcaccgctntagttcatctgctaagcgagaaagacgcgctaagccaaaaatcactaacgtgcactaagcggtccatacgtgcgcaaagcgcacgagcacaaacaaggccacctatttaagcctganatcaaattttgagaagggagtttggactgggattcatagctntgcatgtctagggtttctagagagaganagggccaagttccagagagttttgagagattctact

SEQ ID NO: 51378 - DNA, 458 bp, Glycine max
  unsure (1)..(458): unsure at all n locations
tctatgcaggcatcccanatgatgtgtttatgactgacactttagctatcatccaaagcctttctactcatgctntntgcttgtatatcatagagatagataaacctgcagcttaagcatganaggttaacacataaaatttatactttgttgatatcaaaaccttatggatttaattgtttggtacagtctattgcaacctacccttcggcgggagggcgacgtgaggctcacgagtgtgtcttccaagaaaggaaaatgcacggagtcgccaccgacgtttatttgaggaaaacattgaaaaaactagaanaggtgtggtctacgaactntaagtgtgagaggttcgggagttatttttacgcacggngaaggtattagtaccccacgtgtctgtcacaagggatgacaacctttagtcaagtgtgcaaatatgacttcaaaanggtttatctttc

SEQ ID NO: 51379 - DNA, 419 bp, Glycine max
  unsure (1)..(419): unsure at all n locations
gcttcctgtttgctttacagntgatgctataattcatcattagaatatgccttttctttntattntaaagatgaaatctcatacaattgtctaatttccatcagaaggcaatgaatatgccaatcactgtggaaggaaatgagctgagtagatttattgacccgccaggagatgcctacttggatgatttatttcatccattggataaacaacctgtggaggttgtagcagaggcgtccacttctacatccacttcacatatgactaaaggtaatgcatctgcaattgatggtgtgaaaaatgacttggctaaagagttgagagctaccattgctcgaaagcaatgggagaaggatagtgaaatnggacatgccaacaatggcgggaatcttttgaccgagtgatgataggcgtctaaa

SEQ ID NO: 51380 - DNA, 454 bp, Glycine max
  unsure (1)..(454): unsure at all n locations
gtacatgaagcatggattaaaagttaatctctaccattgggatgctgcacaaattcaaaaacacttggaagatggattaaaatgaactagtaatgatggtcatgccctagtaatctttttcttttttttgtttcttatttgggacatgatgaaggtcgttatttaagatgattgtaagtacataacgataaagaaatagggttggatttagtgctgctcgggaaatactaaataatggagttcatgttgaatgtgttggttggttattccggaattggattagcgaatgaatattaattnttctcgtangtgtgaactagaagatagccaggatntttcctagaatggttgtgcttattattattcgctcttntaatggataataattagttcccaacttcctataattctatctagtttgagtaacattattcgtttttgagacaagagtcat

SEQ ID NO: 51381 - DNA, 410 bp, Glycine max
  unsure (1)..(410): unsure at all n locations
aatatctttttatctatntaatgatngtttgtgtgttcactgtgctatcagaacttcattctaccatgctnttgccttgatcgcgtagatgcatgtgtttntaggatcattcaacagtggaaactggtctaattcttagaacttgataggatagggctagtttttcatatattcatgaggaatcgaggtacagtaacctagttgttatatgtttgtcttaatgcggtcctggccgagtttagtccaacaagaggaatctgcggacgatgcttgatcaggattangctagactatcatgaggaatcgaggtttagcatttcaggagacaccatagaacgcatgagcattgtaagtagagaaatccttctacatcaggacctatangaagacacatatcgctacttgtttac

SEQ ID NO: 51382 - DNA, 425 bp, Glycine max
tttagctcagggtcaaacactcaacttatcaatgtatgttcagtcaaaattatgattgcacaatcactcacaaactcatgcaaaccttgtgtcgacatattcaaaatttaaaacttttagaatttgacaaaaaaaaaaaacaacaaatgaactctgaaggaaaatttgacagaccatttcaaaaatgagaagagtatgatagtatcaacacccaaaggaggggtgagtgaacaaaaataaaactaacccctccatcaaagtaatagtatgttctagtacatatggcacaagatgaagatatcaaatactacagccttgccagcacaagtgaaagaagatgctccagcagtatttatacggcgtatcgaccctttggtgctcctttggttctagaatcatcctttagtatctagagatttaagaat

SEQ ID NO: 51383 - DNA, 352 bp, Glycine max
tgcttaacaaatagattccaatttctatcttaattctcaaattgttatttatgtgttctaattccctttccgttattatttccaatatttttgacaatgttgttctttgtctctaaaacttgtagaaaagaaattggtgaagatcaatggacaatcgtgcttcatttcagagtcataactatttaagaatagtatttattttctattacagtttaatggttatccttattgtgtcaagtttttgggagtaaagatgataataaacgtactgtggtgttgtgcttatatagggtaagcattggcaaaacagcgagctacgttgcaaaactcaagagtattacataaatttgcg

SEQ ID NO: 51384 - DNA, 367 bp, Glycine max
  unsure (1)..(367): unsure at all n locations
gtaatcaagtgattaactgtgtaagtgatcatcaattccaaaacataggggagtatgaaatgagtgaacgcaatatatcttgcatatacattgcttgtatcttgatttcangaattaaattgtcatcatcaaaaaggaggagattgtaaaagcaaagactctgccttngatgttttgatgatgccatatgatcgtaatgttttgatgccttatgaaaaatgtgcttgtcaagtttaattcaagtgattaagtggtggttaagtgatcatcaattccaaaacatagggggagtatgaaatgagtgaacgcaatatatcttgcatatacattgcttgtatcttgatttcaggaattaaatngtcatcat

SEQ ID NO: 51385 - DNA, 451 bp, Glycine max
  unsure (1)..(451): unsure at all n locations
ctacctctggcatgtctgtcatcctcaaactttgaatccatgatacagtcttacgttgatgtcaggatcaacanacatagttggtgaaggctgaattgatgaccttgaaggaagaatccattntgttgctcgttattgatatggcctcattaaacatcttttaagtctgatgaagaagtttgtaagtctgatgggccccttagtatgctgaaatatcttcctttgctccagacttgcaatcatagcctcatagataaacactttagtactccatatgcttcctccattcttctaagtttgaattcatgcatgacattaggctgtgcaacatcgatcatttgttcatcaactntaaacactagctttggataagaacantttgcactangatctggttcaacaatatcatcttcttggtctctaaggtatgcttcaataacatatttgagca

SEQ ID NO: 51386 - DNA, 310 bp, Glycine max
  unsure (1)..(310): unsure at all n locations
cagcacctatgctctagtttgtggacgctctctctcctttatcgaatatagatgtaggctgctctnccnncccccagncatttattttgttctggcacacngaacatacgcntcttccgcttctattgactaatggaagactaggtctccagcgtctgtttctcttgaggactaagcacaactctctttgaggttctattattactattaaattctgatccagtgttcctcttcaccaattactctgtattttgtgctattaatccatgcatgcttagtgcttgattaagcgtctatgcgcttaattaca

SEQ ID NO: 51387 - DNA, 329 bp, Glycine max
  unsure (1)..(329): unsure at all n locations
atcatcctgctttgatgaatgcgaaanatggggaaaatgaagaggatgagaataatggagaaacccttgctatgactgccattcctacacggtcaaatttcccatcagcctaacaatgtcattactcagccaataacagtccctctcacccaatcatgcacaaaagtcatgctcaaatcagccacaaggcctgcctgcttaccgcacgctcaatgcccaaacaccacctttagcgcataccataaaggaactttgcagaatacagcctataggattcaccccgaattccggtgtcatatgctaacttgctctcatatctacttgataat

SEQ ID NO: 51388 - DNA, 375 bp, Glycine max
  unsure (1)..(375): unsure at all n locations
agctataacctcatcgtctctcatagtctttatatntgagagccaatgatcccattactgcttcccctaagctctctgtcctttcttcatgccgcatcccatgccttgcgaactccttggagtaccctcgcgttgtggtcattgaaaccccgtgcggtgaaaggcgtgatgctttcgtctgatggcactcctctcatggngtagccaagctgtcttatggcgaggacgggattataattaatacaaccccttgttccatcaagggaacatttggacatccttcgcatgaagatagaatcctgattcttccttccttctagcgagggaaccaattaacagacgcccctccatgttagccaagagttggtcccaatt

SEQ ID NO: 51389 - DNA, 313 bp, Glycine max
  unsure (1)..(313): unsure at all n locations
atttaccacagaatccagatntaaccttccaactctcaaagcctcactctttttccactcataacactacattctactttctaccctaggtaactctatccttcatttctaacagttttccataagcaatttcagcacataaacatcacaagcatcatcataaaaaacctaaaactgaatgggaagcttaactcatccaacatggcangtcaacatgctntaacaagtgtcttcacaataactatcatgaagcagaanactagcaaaactacccatcatatctcccanaaccccatacccacaaaaatcaaga

SEQ ID NO: 51390 - DNA, 487 bp, Glycine max
  unsure (1)..(487): unsure at all n locations
atctctaagcacctgcatgctgcaagcttaacatcagaccacttncagtgtgctgtaactacttcacatggatntgatggggcctatgcatgntgaaagccttggaggaaagaggtatgcctatgttgttgtggatgatttctccagatttacctgggtcaactntatcagagagaaatcagaaacctttgaagtattcaaagagttgagtctaagacttcaaagagaaaaggactgtgtcatcaagagaatcaggagtgaccatggcagagagtttgaaaacagcaggttcactgaattctgcacatctgaaggcatcactcatgagttctctgcagccattacaccacaacagaatggcatagntgaaaggaaaaacaggactttgcaagaggctgctatggtcatgcttcatgccaaagaacttccctantatctctggggctgggccatgaacacagcatgctacatnncacacagagtcaca

SEQ ID NO: 51391 - DNA, 305 bp, Glycine max
  unsure (1)..(305): unsure at all n locations
gctagtagtccctactgctgcaatatatttttcatagagaatgatacctctagaaaccatcanaagagatatgactanccttggggttatcactaaatgcctagttagttctctcccttataggtcccttaaataagggcacggagcaaacacgctgcgtgccatttttacactgccatgcataagtatcatatnaccctttgcttatgttcagtgaatattatcatactgtgtacattcccgcattgtgtcttttgcataggcatcgcatatgggttctgtcttgatcccttctgtatacaaac

SEQ ID NO: 51392 - DNA, 437 bp, Glycine max
  unsure (1)..(437): unsure at all n locations
agnctatgtgggtgcaatttctatacaacattctctctggtcctattccttccacannaaatttccgaagtatggctgtaagcagctttattggtggtaacaatggcctctgtggtgcacctctcggtgactgcagtgatccaacttctcgctctgatactcgggggaaaaattttgattctcctcatgctaaagtagtcatgatcattgcagcttctggtggaggtgtttcactcattctcattgtagttattttacattntatgagacgtcctcnggagtcaattgattcctttgaaagcactgaacctcccttcccagaatcagatatctatttccctgcagaggaaaggttcgctctccatgatctagttgaagccacaaaaggacttcatgatagctattgttattgtaagggagcatgtggaactggttat

SEQ ID NO: 51393 - DNA, 295 bp, Glycine max
  unsure (1)..(295): unsure at all n locations
atatgtatgtgtgtntaggaagcgaacataccttagatatgcatgtatgtaacttaggtatttttaataacctcacaccacatatatgtgtgtgtctacgtagagaaaataccttatatatgcatgtatatagcanaaatacctcacaaaacatatatattgatggttaggtagcaagatacctcgcatactcatgtatataacaaacattcctcacagaaatgtacacatgttgaggtagcaacacacctcgtgatataataacgaacactaacctgaacagagaatgtatctt

SEQ ID NO: 51394 - DNA, 383 bp, Glycine max
  unsure (1)..(383): unsure at all n locations
accaagaaatgctactcttaaaacgaatatggcatacaacctcctccaataaacacaaacattaatgtatatntatagcaaactcatgcacatacttgcttacgaacattcactcgcacaagatattcttctaactaagagaaatgcacccacgcacaatcaaggcaccttcgttacctagatcacttatatacacttccaaggtgtatttgctacctacatcacatgcatttcctttgctaaatttacatacatgcatactcagagcactatggctatcagaaatngcatacgtgcacattctggtatctctaatacctatacatacacaaacttcatgatgaatcttggctacctacacaataaggcactatatttcatgc

SEQ ID NO: 51395 - DNA, 324 bp, Glycine max
  unsure (1)..(324): unsure at all n locations
agctncangtattgttntctctgattattttgtctcgcgngaaactccatatgcatcactggctcatattcaccaagccatggtggctgatgcatatgcgtagccatttcacagtaatggtcttggagctggaggcgtaagatcgagatcgtatatagagctttctgctcaataagcctgcttgacatgaattggagtcttgcatccataatttcaaaaggatttgttattatatcgcccaacaatcgaaattatcttatggcagatgctatgacacgttgtgtatgatgtcaactccatgatgctatacgataccacatagtg

SEQ ID NO: 51396 - DNA, 406 bp, Glycine max
  unsure (1)..(406): unsure at all n locations
tctagagaaagagatanagatgaccttttccctcttggtgtttggagaatacgattcaaagatccttaattctctttctctanaattatttacatgtgggctgaatgtccaaagacgcccaatgcttctgaaagcttcattcttgtatgtcttatgctactctcttattcttctatcttgatccattgcagatccaattctctttgttttatataccgcaagaacattattatatgaataaactcatcatccttattaaattgcactggataagaacagatactgcatgttactctaatattctaattatcattatcttaagggcaaggtgtgctataattcacattaatcagcttaaactcttttacgacaatagaaaaaagaatagcttaaactctaatattct

SEQ ID NO: 51397 - DNA, 532 bp, Glycine max
  unsure (1)..(532): unsure at all n locations
ggaccttgaaactaagcttaaggagctctcanaccgagtgtatttaccccgaggacctatattctaaagagtctgtcagggcctctccctcttgattcaggtccaaccccgaaaaccatttaatgcaaaaactgtatatatgaattatacaaaacacataactcctcaattattctcaaaataattttaacttgccgcacctcanagtaattcaacttgtcaggctcccacagtggaccctatcacaatactcggcgtgcattaactttntgcccttagagggtcttacagtcgtntgattgtatggtttatagctcataactcaatgcacacaacatctcaatatatgtatgagtctcataattaacacatactcaacttatcacatacactcaatctcaatcacaatgttataatcccaaagaacacgttatcacacctcatgaatcatatacaccacatagtattaatatatacatggcacagacacanactntacctatgaactatacaatacacacaaccactcaat

SEQ ID NO: 51398 - DNA, 415 bp, Glycine max
  unsure (1)..(415): unsure at all n locations
ttgatgcgtgatctctgagtcacctgcggcatgcaagcttgtagtatactagatngcaggtagtaatttacaacatgcattatgcgtctaattaagtagggtttagggtttagaaacacaattaattaaggtttaaggacaaattacaatacaaaagagatataagattgattntttcatgattggaaaaggggaagggaggtgagagagattacatttataacaaaactaaaaaattaatatttatcagatgaaaaaaaattacaattcaagtgcatacaacaaccacgagccaatacttacttttggttntcttaaaatagaatgatgaaaacaaaataacaatacacaaggtgtgtccctcgtattcatctctttgacatgcctgctctgcagctccactcgtanaataatt

SEQ ID NO: 51399 - DNA, 274 bp, Glycine max
  unsure (1)..(274): unsure at all n locations
gacacatctcttcanaccatnntgaaaaggcactaagcacctatatatatgtgtgtctgactntgaaaatcaagagagagatattctaagaaaacttcatttgccaatactctctcaataactcttaagaaaacacttgccaatctattgagaagtcttctaggaatttcaaattggattatcatctctaaaagagagaaattcctctaggaacttcangttgtatcatccactctaaaggagagaaatctttctattcatcttagaaattcag

SEQ ID NO: 51400 - DNA, 438 bp, Glycine max
  unsure (1)..(438): unsure at all n locations
cacctgcggcatgcaagcttgaagccattgnctccacaccgcatctattgatgaagntccttaccttgataggagagactgtgactgtcaaattagatcanaagcaagcacgacaatgctacacataaagcttaaaggtggcaccttatcctcccaccaaggagcctaccaaacctcactccacaacgaatggtaccactcaagtcatgagcatggacgaaggatctccagtccaagccttgactatcttccaagtaagcctggatgatgaattcgatgtagatccgcgtgatgacactnttgacagaagtcccaaacctattgaagcttgtcaagctacagcttaaatccaatcttgagcaatctatgcaactcagtagggacctcaccaaccataagcacagacacatatgtgatgcctacacatgacacggacct

SEQ ID NO: 51401 - DNA, 527 bp, Glycine max
  unsure (1)..(527): unsure at all n locations
tgttccttagtaacatgagatntactntgttgagtnttacaccctaccccaacatgcatataaatgaaaaaaaaacataaaatgcggaatctaattaaagtcaatttcattcaataaaattgtaagtaaatccacatggataaaaggtccacattcgcttcactgttaccaaataaaacttattaaaaacatctccggctcanaacaaggtcgtccaagtttacaaaagaactaaagttaagcagcggaataaaataaagtaaaataacatgttgagaacaccatgcaattgaaacagaaactcataccccaatgtcacgtcctattagagcattgtgtcccatcgtcctctagcacgaggttctttaaagtcatccacctagtcatcggctcccatgaacacaanngtcgagaatatcataggatccanacacaaacaacactcgaagagtgagtcatcacattccttaacanatatagataaatggaacatacatgtatgatataatataccatagcataatata

SEQ ID NO: 51402 - DNA, 490 bp, Glycine max
  unsure (1)..(490): unsure at all n locations
gcttcatgatgaatcaagattgattcanagatgtttgatgatatcttagatgatgacaaanaactcanaagtcaagaacacttcatgataacaaagatgatgatctcaagaatcatagaatgagttcaagattgaatcaagtacacttcaaggatcaagagganagttgaattcaagaatcaagaatcaagtttcaagattcaagttccaagaatcaagatcaagattcaagattcacgattcaagaatcaagaatcaagagaagacttaatcaagataagtattataaagttttttcaaaaactgagtagcacatgaatntttctcaaaactttataccaaagagttnttactctctggtaatcacataccagtatgttgaatcgataccagtagcaaatggtttcaaaatcctcactcgattacaacgtcaattgtttcaaatgtgaattgatcaatgattggtatcgataccatggttgacgtggaa

SEQ ID NO: 51403 - DNA, 444 bp, Glycine max
  unsure (1)..(444): unsure at all n locations
ctaccgtcataggaagtcatggataagagctngaagataggatataataagtggagggagagggagagagaggnggcacgaaatgtatgcctcanatgaggtctgaactttgaagtctaattnttcaaatgataaaagttgaaaaaatgcgcacacaaggtctctatttatagcctaagtgtcacacaaaattggaggggaaattgaatttctattcaaatttcacttgaatttgaatntgaatttgtggagccaaatttggagtcaaaattgcactaattgtgaatttcaactatggttcagcttactaatccaagatcaagtccaagattctccactaagtgtgcttaggtgtcatgaggcatgtaaagcatgaagggtatgcattaagtgtgactatacgatgtggcaatgggttgtagcaagcaaatttctcacctcccc

SEQ ID NO: 51404 - DNA, 364 bp, Glycine max
  unsure (1)..(364): unsure at all n locations
cgattcatcaatcatcttctttcgaagccctttcgtgaacaaaaaatatcgacaccctgtntgttcataaaatcaaattgccctattcacaaatcaagcacttacgaccatttcaccgaccataatcttgatcttaacgccatcctctgtctttcctcacgttttctaggtataattctcaattctctttctttctcaaactctcttctctaaaataaaagtgatcttgcttaattccaaatcaccctgtgaaagacgttcaacgccatgattattgaatccaagaaacataattccatgttttttnttgtagctaacgaattggattatatcccctttatacaaactccatacttctggtatt

SEQ ID NO: 51405 - DNA, 397 bp, Glycine max
  unsure (1)..(397): unsure at all n locations
cctcatctgatgctccgggaggcatttgatagtgatgtcatcttttatcagtgtaatctttcaacatcagacgggcagccctggtttcatcatggagtccactagaggcaacataccctcgagaagtacaatatgctctcaaaagttcagacgctaaaggagggcgcgattgggactcatatgacttaggtttaggaagccttatcttataaatctcctcgatgacatgtcttgngactctatcagctacaacttggacagattctctgtgttcagacaacctatcaataggtaacaccccacaagcaatcatctcatatcttgagcttgagaaggatggaaaaactaatccaggacaatcacagaggatcagctcatccgagataattaatgtctg

SEQ ID NO: 51406 - DNA, 392 bp, Glycine max
  unsure (1)..(392): unsure at all n locations
taacaagattagacataaatacattcatcgnttaaagctgtccaaaatatgggagttttacaaaatacatagtgtcattcatagcaaaggtgtccacagtggtggcttcaaccacatgtatacaatcatcaaattcctatacaacaggtctacccatacaaaaacaaaagagtaaacctaacagtcagtcctagatacacccaccctcaaaaagtatataaaactagtccatggaactgtccactatgatgaagagcctncactgatcgtcatctctccaggaccactatcctccatagagtctgcctcagatgccgacatgacgtcctcgggagaatacacctcagggagtgggtcctcatcaccctctagaaagcaagaagcatcacagc

SEQ ID NO: 51407 - DNA, 394 bp, Glycine max
  unsure (1)..(394): unsure at all n locations
tctgcctactgctagttntgagctgatccaagcaaggtgtacccctactgctatatcttttagtagccgacgaagccattagctcaaccctcatacaaaaggaagggaaacaccaactcaatatctattntaccaactgtatacttcatgccaccaagaagtgctaccaaatgatagaaaaggtggtgctagcactcattacgttggcccaacgacctangccctacttccagagtcatctagtggtagtcaaagcgaacaaccccatcaagaaggttctgcgaagcctgaactcgcatgaaggatggtggctcggtctgtagaacttttagagttngacatccagtacaaaccttcagaccccatgaagacacaattcatggcttactttcta

SEQ ID NO: 51408 - DNA, 361 bp, Glycine max
  unsure (1)..(361): unsure at all n locations
agctatgagatggtctctgtgttcaagatctttttctcanagagccaatttggagccataggccagtctggngactggtgcacctctgctgctgcatacctcaattgtgatctgctccagcttccttnttgctatttaagaattccaattggtgtcaacccgaggagaacagcggtctgggatccgattataaggaagtttgaggctaaattaagcaaatggaatcagaacaatatttctatggctggtagaatcacccttatcaatgctgtcttaacagcattacctttgttcttcttgtcctttntcacggcccnctcggctgtgatcaatagattatctaccatccacagacattttc

SEQ ID NO: 51409 - DNA, 419 bp, Glycine max
  unsure (1)..(419): unsure at all n locations
tggggtacccatcacatgtggttctaggtgtttgtcgggcgatggngcacaacangctntccacatncacaatgcgcgcataaacccaccatccnctggtgcccacctncaactgagctcacgtactcccacgtagcccatatcctcgtttctctcaacaccgggtccccatcaatcctctcaagcttccacaacatccaagcaaaacaacattcaaacagcacaagctatcacagccaagcaaaacagagcataggcagaatactctgctcaacacatcaaccaaaatcacagctnttctcacgtaaagaccacagtaacaattccttcgatccaattcgttacccgttggatcgaactccaaaatttactggaagtctatagtgtataagcctacatnttgaccgtggtgatctact

SEQ ID NO: 51410 - DNA, 217 bp, Glycine max
  unsure (1)..(217): unsure at all n locations
ctctcacaaacacgcagggaaatgctcatactacaaacttcgcggatactaattaaagtctattacagggtataatatcctgagagaatatccatgattactaatgacacaagtgctgccttgctttcattctttacttattgaaaacattggcgtataatatgggggagaccaagcctacaggagaactatngatgaacatgtgtatcatttctca

SEQ ID NO: 51411 - DNA, 387 bp, Glycine max
  unsure (1)..(387): unsure at all n locations
agcttcgtgttgaacacatctgacctcactcttatttcattgccattgtgtttgaacaagcttcgttggtttccttgcaggcattccattacacgataagtaatcttggttgtgttggactcgcaatcacaaggtaagtttttcttacctcaccctcacagtcttcgccattctattaacttcccttagttataagttcccttaaactgagcttttaacttcccttagttggtcgcaacctgcatttgatctatttaggaaagttgttggtttgactgtttgaaggttcanataccctgagactaggttcaggcccttttgattgactatatcagaaagtgagtagcctattggcagctacccctttggtcttagtcattattattt

SEQ ID NO: 51412 - DNA, 485 bp, Glycine max
  unsure (1)..(485): unsure at all n locations
ngagaagatgtttctctcaattgttatcctcattgttccacttagcccctctgtaaccacattgaacaagaaaggagcangtaggtccctttgtcanagacctctntgaactatngaatttgaagtcaaactccagttcaccaacaccaaattgagttaacattagagatgctntaatccatcccactcatctttcaccanagcccaacctcctaaacatacgaaggaggaattcccaattgatggagttgtagtctttttcataatcaactttgaaaaanaagtcatttcttcttnntttttttttgcttccttaataatggtttcatttgcaatcaaagtgctatgtaaaatatatctattacccaagaaggcacttagactntggtcaattactccatgcaacactnntttttaatctaattgcatgcaattnggataggatcttgtacatgcattccaccaacgagatagttctaaactct

SEQ ID NO: 51413 - DNA, 376 bp, Glycine max
  unsure (1)..(376): unsure at all n locations
agcttggcctcttacgtctggaaatgaatgttctttccaagacccttangtgctttgctgatggcttcttcccgttccaagcttcaataggagtctcgtcttttacagacttagctggacatctgttgattatgtaaacagcactgtagactgcttcagcccatattgtgttatgtaggcccttctccttgagcattgatctagccatttccataactgtgcgattctttctctcgaacactccattttgttgaggagaatatgcgactgtaagttgtcactcaatgcctttatcctcacaaaatctttcaaactcgcgagaagtgtactctttgccgcgatcacttcttagtactattatctggttctcactttg

SEQ ID NO: 51414 - DNA, 400 bp, Glycine max
  unsure (1)..(400): unsure at all n locations
aaacatactcaaacaaacgtatccaaaatttatccaactgtttgcccagtgactatatattatggacttgtaatttttttcattctttttacctccatttattatttctcttcatttaaaaaaaactatatatgttgatgaccggactcattatttggtttatattagtaggcccaatcaataacatatantaatttttttatatctttatatatgttgaacaatacaaattatccacaaatataaaaataaaaattatgtcatttaattctacacaatgaatgatttttaaacttatttgaaattaacttgtttatctcattatatatacaactgacggtggaccttccgatgtgtctcgttacttcgaagaaccaaacataaaattaggaccctaaca

SEQ ID NO: 51415 - DNA, 396 bp, Glycine max
  unsure (1)..(396): unsure at all n locations
gaccttccacaatagaatgctatgtctgcnaatttatattccatctacagtgatatcattacaaaaccttccacatatggtacctatgctatataatatatatgctctcactatgtgtgttcttctaacttctattatatatgcaaccattatgttcaaggaattaaatattggttgcgctcatattaagtgtcatcatatatttgctgatatcgtgataaaccgtagataagtacgatttatgtgatccaaattacaatcatggacagttaaaaatatcttaatattgcagaccagttaatcacgattgcaaactgcgtgttctctttaattatgttctttatagcgctagagactntaaattaatgatattcgcgcatcatacatgcgatgtgc

SEQ ID NO: 51416 - DNA, 370 bp, Glycine max
  unsure (1)..(370): unsure at all n locations
agcttgaaacttactactagtaattttaacttatgcananctatctcttcatatctatggcggtaatgaactcgtgaaacttttctacattggacacagattatttggaaacagtccacagccaaaccactttaatgagaacttgtatgacctaataagatactgtgaatacctattgaacggcaactgggactgcacggcctttggctttagcaataacaatgacgccattatagttgccacaagctaccatggcagaatacttcacaacttgtcctccctagatcaagagattcaaacgctactacgaacatacacaaaagacaagatggaaagcatagcacgaagcacagatttatgaaataccttt

SEQ ID NO: 51417 - DNA, 426 bp, Glycine max
  unsure (1)..(426): unsure at all n locations
cgctaacagtagtcaactgacacattatgtttgctatanatttaactgacatatattatgtaggtactattcattcaagcatgctaacagtggacaactgaacatatattctgaacatacttgggttcatggatgcagtggctcgtgatgatttgggtaaagatgttattgacaaagaagtggtggagaaggtcagccaagagtttttgtgagatcaactctggttgtctccaaatgaattgctatatgatttgatttattgctctaacaattgtcaattgacaatgcatggtaccatgatacgtatcccagaattgctagttattcacccactgggcacaatttccatcttagagcttgttcttctagttctaaactggtgtcggtggatactatatactgatcacacaaatttatatttctgat

SEQ ID NO: 51418 - DNA, 268 bp, Glycine max
  unsure (1)..(268): unsure at all n locations
agcttcgcagttctttgactaccatgtggatcctataccatgaacaccttacnggtcgcctcttttacatggagggcccgactntgtgctggcaccaatggatagtgagaaataggttcctcacatattggacaggcatgcacgaagctcttgagtcgcactttgccccatcatattacgatgatccttccggcactcttgttaaacttatccaacaatgctacatccatgattatcatacaacgctcaaacgccctgcctatagaat

SEQ ID NO: 51419 - DNA, 445 bp, Glycine max
  unsure (1)..(445): unsure at all n locations
gcgtgtgagtgtatcttannaacatttgtgtagttngaaacgatcattgtttttccttattntttctgtgcttagaatgtgccaaaagagaatggtgtacattacttttgtggaacttcatgttaagcaagaaatgtggtattgtagtggtggtgatgaacttattataaacacataataaacgagattaattaagagctaaacatttagtggtagaaagtttattagttctcttgcagcttgatgcgctntaagaatttgattaacatgtacacaattacgtacactacccttntacttgngggaaggggaagaagaaacaccttaatcagcatctttgactaatgctntatcttttcaccaataatggtactatagagaagttgcttgtctgtcttaatgatttattattganagagcaagactggtggaaatacttaataac

SEQ ID NO: 51420 - DNA, 408 bp, Glycine max
  unsure (1)..(408): unsure at all n locations
gctttgcgaaattggtcttcgtcggagaaagtatcgaaacgggtctgaatagatggcaaattgatcatctttctttgatgaatgagaaaactgggacaaatgaagaggatgataatgaggaaggaactcatgttgtggctgccattcctacatggccaaacttcccaccagcccaacaatgtcatcgctcaaccaatatcggcccttctcattacccatcacccaatcatccacaaaagccatccncaaatcagcaacaaggcatgcctgcttaccacacgcccaatgcccaaacaccacctatagcgcaaaccaaataggaattttgcagcacaaaagcctgaggattcatgccannatccggngccatatgctaacttgctttcatatctacttgataatgcaatg

SEQ ID NO: 51421 - DNA, 495 bp, Glycine max
  unsure (1)..(495): unsure at all n locations
tgtcgctggagctgacccatcaactgccctaactctnttagtctggtgattcctaggctcttgaccttgacttgatagaacctctttntaagtgaaggcgcctaactcgaccccatgttntactaaagtgaaacaaaacccagtgcgaatcaaaactccgacatctatcatgggtggaatggatgaatgcatgaagaaatacatatgacacagatgcaatttatgaatacgagagcccgggaaattgtccccttcttatatacaatgtttgggcagcatggcacccgacgtatgtatttaaaaaggcgacacggaccctccatcggtttgacaaagtgaggggatcaagacggaacccatgcatgatgcatatgcgaaaggcacaacacggtgatgtatatagtacggcaatatccacatacaaatataagcanaggggtacatgacatttangactacatgcatggcagtgtaaaaaaatggcacgtaacgtgt

SEQ ID NO: 51422 - DNA, 421 bp, Glycine max
  unsure (1)..(421): unsure at all n locations
ctgatcagagcttcacataattactatatctctaacaatatacatcanataggtaactagatcttgttatactttctttctggaggcagatgtgtgctatgacttggggcaagtgccttctctaccttataaattattgtggaatatgcattattggtccactaaatatttntaatttcccactaatcaatatgttatataaacatggaaaaaaaataaaatttcttacctgtaaactacaagataaaaaattattattatttgaaccccagacctaagaaacgcccttactcttttgtctattttgctcttggtatgtgagagtcattgcctatgcataaaattttaataagaaatcagntgcagatagtaacttcttgattcccctgtaaatattcacatctcatataactacatagta

SEQ ID NO: 51423 - DNA, 412 bp, Glycine max
  unsure (1)..(412): unsure at all n locations
gcttcagcctatcgtgcctattggtaaggtcctcaacgattctcgcgtatcacacaacatctcagtcgagggttttgaaggcattgttaatcacataactactaataactatctcgcgtttgtggaagaagagattccagttgaggggagagggcacaacatagctctacatgtgtctgtcagatgcatggaccatgtcgtcgctaaggtactcatcgataatggttcaagtttaaatgtgatgccaaagaccaccttggagaaacttccttttaatgcgtcacgtctaaaaccaagttcgatggtagtatgagctntcgacggtagtcggcgggaggtgatggtggaaatngacatccccattcagataggcccncacacttgcaatgtggttttccaagtgatggacata

SEQ ID NO: 51424 - DNA, 428 bp, Glycine max
  unsure (1)..(428): unsure at all n locations
gcatcttaagcgactgcagctgcagctgctgcacggagttccactatctcttgtgtggggtcaagcttctaaggagagagctgaaatgaagagccattggttgatacatggacggagatgatatagatcatgaggaagcggtatgtgccggctagttactcaagggacttgaaattcaagctccaaaaactaacccaaggccacaaggcggttgaggagtatttcaaggaaatggatgtgctcatgattcatgcatatattgaagaagatgaggaggtaactatggctcgatttcttaatgtgtcgactaatgatatccgtgatatttgtgagctgcaggagtttgttgaaatggatgatttgcttcacanagcaatccaagtggagcaacaataaataaggaaaggagtggctaagaggagtctacc

SEQ ID NO: 51425 - DNA, 395 bp, Glycine max
  unsure (1)..(395): unsure at all n locations
taatgacccactaacctagaattattataacttattgccattaacctagggaattaaaacaaacttaatggctgagtggtaactgaaatggtggcaaccaaaagtcaccctcaacagccaacaagtcagccaccatttggtctcccaaaaggctgatgcctaagttgccaattgggcccttattacaacttgaactaaagcccttttagttgattaacccagaacatatttttggtcagccaactctacaaggattgggccattatttagacaaactaaacactctanaattgaaataaagtggtgtcatttagtcctccatttgggccatgatacaactcacaaccttggacttttcttcttgaaactngngcttgtattcaaatagtatggac

SEQ ID NO: 51426 - DNA, 232 bp, Glycine max
aatttcaagaataaaagaaaagaggatttaattagattgtataaagtaaaagaaatcataatttatgggtgcttcccagttttcatccatgattgggatgggtgctccaagaagtacaactttttctacaagttcagctgtcaataatatgcaggacagatattagaagtatgggaacctttcattcaacggataaacatgaaaagagtatgcagggacattaaattatatg

SEQ ID NO: 51427 - DNA, 441 bp, Glycine max
  unsure (1)..(441): unsure at all n locations
tcaatggagcctacatcatgtggtatcaagagcatcttcatctaggagtatgttctttgcttcctctatctttntgttcggtgaattctctntaattccttgttcttcatcttattctccttgtatatcctccattgtcttgtggtttggttctgtttagagtatattcaaaaaaataaaccgattaaatcttagatctacactngttcttgcatttctatggttcagattttgtagatctactcttgaatcatgtttttcgtgttgattttaggttctatcacttttcattcataatattcttgtgttgaacctttagatctaaatattcttccaaaatattgattagaaaagaaacacacaaatctaagtgtaaatcacttaatccactgtgtcttagagtcatgtttagtcatagtaattgtcacattatgttctaag

SEQ ID NO: 51428 - DNA, 422 bp, Glycine max
  unsure (1)..(422): unsure at all n locations
agctatangagatatccataaaactattgttgttcctaaacaaaaatcaattgaagaaacttcgacatgataccccattgatattattttattcacacctttcaaagttagtgagaaggctgaaagaaaaattaaggaacttagaaaaacgaaatccttaattgaaggcgcacgcgacaaccatagtgaattactaaacaagattggtagttgacttaaagtcattcccgatacccgccaagcctcggaaaatacttccaaaatgagaacaagaagtacctncaaattaatcaatgtattaatgaagataggaccaaactcaatacacactgatattgacagtgcagaaagatataatccattattccacactgaagacccttcaatatatataacgccactgcctgacttctataagaaga

SEQ ID NO: 51429 - DNA, 483 bp, Glycine max
  unsure (1)..(483): unsure at all n locations
tctcggggccatatcctgcgaaggtcaaacatttggaaattatttataccaaggaatgctactcttaaaacataaatggcatacaacctcctccaataaatacaaacatcaatgtaaatttagagcaagcttatgcgcatacttcttttacgaacgttcacttgcacaagacattcttataactaagaaaaatgcacccatgtacaatcaaggcaccttcgttacctagattatatatatgtgcttccaaggtgtatttgttacctacatctcatgcacttccttggctaaatntacatacatgcgtactcaaagcattnggggtaccaaaaattgcacatgtgcacattccagtatttctaatacttatgcatatacaaactntgtgatgaatacttggtatctacacaacaaggtgatacatttcatgctttactcaagtttttgctacctagagccgcatgcaaaatcaagtatattttc

SEQ ID NO: 51430 - DNA, 443 bp, Glycine max
  unsure (1)..(443): unsure at all n locations
agcttcaattgctagacaacaacttatnttgtgccaacaaggcatcttgagatgaaagctctaataaactctctttggtaggaatatgaactctatcatgcanaattgcatggtcactggcaaccatattatcaattaagtccatggcttcttcaagtgtcttcacggccataacccattaatgaagatgttcaactatataggctctgacaaagctacagtgggagttttctgtagcaagctatagaatctttcttatgcctcactcacagattcatcgagaaactgatggaatgaagaaatacaactcttccctctacaatttagactctgggagaatttnttagaaacttctcacaacttcatctangtctttaactggttcccttgatgaatgcacgatctcttgtctcccagataagaaatgaaaccgctaacctata

SEQ ID NO: 51431 - DNA, 415 bp, Glycine max
  unsure (1)..(415): unsure at all n locations
tgcatgtctaggttntctagagagagaaaggttcatgttctctagagttntgagagattatgctgtgtgaagagttgcagagaccaaagcttgaagcatgagtcggtttgagagcttgagatgagtttgtgagtgattgtgagatcctataggtgaaggagacatgctcaccacttgtanttttgcaatctttcatcttgttcttctctctgttgtaaagaacgcttcctggtatggaaagctaaatcctttgttggatcttctctgtaggtacctgatgtaaatatatttttatctatctaataattctttgtgtgttctctgtgctatctgctgttcactccagtatgcctctaccttgatcacgtagatgcatgctatgttanggtcattcaacagtggaaactggtctaac

SEQ ID NO: 51432 - DNA, 429 bp, Glycine max
  unsure (1)..(429): unsure at all n locations
agctatangatctaactcttttctctnnttttctctcaactgctcttcattcttcttcctctattcacttttggtcttcccttttcttgcacacatttcatgtctcttccaccaatgatgatcatggaatgctaaaaactcaatcaatcctagaatccattccgagcaaggctaaatttgagctttggtttagtatttcagctctgagcgaatgttcatctttttcttaatcctatnttttattctcatgattatgttggcttagaatcgaaaatgaattatgttagggattccttccctaatttcaaccttatacatagattgtatggatgatattccatcctactctgtgatcttaatgaatttaaggattaatctgattaaactaacactactgacattgattgaacattcataacatgatcattc

SEQ ID NO: 51433 - DNA, 363 bp, Glycine max
tcttgagaaaacttcattgagaagctagagcttagctacacacacccctctaataactaagctcacctccttgagatgcttccttaagaagattcctatagaagctagagcttagctacacacacctctctaatagctaagctcacctccttgagatgagaagctagagcatagctatacaccccctataataggtaagctcacccccattccaaaaatacatgaaaatacaaaaaaaagtccctactacaaagactactcaaaatgccctacaatacaaggctaacaccctatactactagaatgaccaaaatacaaggcctaaaagagagaagaacctattctaagacttacacagaagag

SEQ ID NO: 51434 - DNA, 320 bp, Glycine max
  unsure (1)..(320): unsure at all n locations
agcttatatntaccntatgttctatgtaatcttatttcttggagaacacaatcattcagatattggtctcattctcttctcatataagagcttatggagaagccttcccaatctaggtggaagagtctgattttactctattcttatatccattctgaaattaatgttgggcgggtcagctggatacttagaatcttgcaagctacaaatgagatgcgtctttagccgaatccttcatactatgttaggttgattatttggactgaactgagtgttgagatgctattatgtcgcctacggttgccctaaagagataacaa

SEQ ID NO: 51435 - DNA, 492 bp, Glycine max
  unsure (1)..(492): unsure at all n locations
tgaataatcttgagtcaatggatctacgctctttatggcatcttagacatggacattntaatttcacattaaggaagcgaagtgcgcacatatcataaatccaatgatgagaagttgaaaagttgatgtgagttgaggtgaggttgaggttgaaggagctactggaatattgccaaatactgtgggataggagggtgcagatgcaggcaatgacgaacttggaccaggtgctgtatccatagtttctattattccttcaccaacagatatatgtaagctttgatttttttggcaatggccaggctcaccactagtgaagaagaattggcccttngatgtaatgttaaacaaagagatgccattgntcatgtacaatatcgggtctttaatgttgcacctcttgtangattcctctgtaacttgaatcactgaatcttgactttgtgngtatagaaatactgcgtaatacgcatatacaatgatcaacatatg

SEQ ID NO: 51436 - DNA, 407 bp, Glycine max
  unsure (1)..(407): unsure at all n locations
ggaccttaagcactgagctgcagcttgagggccatccaccattttatataagnccgaaatggttaccatacatatcgctcctctcattttggggaccacctggcgcagatccctccctttgggcggtctttgaagaccgtcccttttgacatgtccgagtgcatctaccaaaccatataaattgattgtactgtctacaacggaccatttgtcttcctgaatgactgggaagattcagtagtgaccaggaacagtgtctaaagactttgagaaaagatagcagtttctctttggatgccccactacgaagacatttaaaggtctgagcagagcccctgtcctgcaaagcgacttgaactgatgactgttggttagacactttagttgaaggaatctactctcaggct

SEQ ID NO: 51437 - DNA, 379 bp, Glycine max
tccatcatgagggggtatcgggctcttgtgaagctacatctcttggtgaaatatatcaccaatggtttaggccttccaaaacttctctcatccgcggactgcatacatatatgctgctcttgcctcccctcatcgtcgacttccattcggccttgatctatcattcgttgcaacaattcctccactgctaaacatgattccatgttatgtagctcatcgggatgcaacaaacaagaatcctctttatgcccaccgtggggaatcacacttcccttttgtagggcctcaaagataaacctcctatgggtcgccacgtcctttaaaggcttagacctgtgcggtctatatgactcaatggcattaaccgctccccctccat

SEQ ID NO: 51438 - DNA, 453 bp, Glycine max
  unsure (1)..(453): unsure at all n locations
ctctagagacacccgcggcatgcaagcttgccacaagattctccttgcctggcacttcanaaccttctggataggtcatatagatgtcttcctttanatccccatgctagattgttgttttaacatctaactgctccaagtgaagattctctacaactattatacttagaataactctgatggtagtcatctttacaactggagagaagatctctgtgagatcaattccttggttatgctgagaccctttcaccataagtctcgccttgtatcttcttctaccgacagattcttcctttagcctatagacccacctattatgtaacgctttctttccttctggcaatntaattaaagaccacgtncttatcttctgaagggatgtcatctcatctttcatcgctaagctccactcantagtggcattccctagtgagcctcacaaaaacattc

SEQ ID NO: 51439 - DNA, 446 bp, Glycine max
  unsure (1)..(446): unsure at all n locations
tcctcgggccattcctgcgaaggctaacatatggaangttagttntaccagtgggacattactctntaaagcaaaaatggcatataacctcctcccatatatacgaccatcaatgtaaatttagagcangcttatgtgcatatttccttacaaacgttctcttgcacaagacattctattaaccgaanaaaatgcacccatatacaatcaaggcagcttcgttacctagattatttacacgtacttccaaggtgtatatgttactcacatcacacacatctccttggctaaattcatatacatgcgtactcaaagcatattgnggtaccanaaattgcacatgtgcacatcttggtattcctaatacctatacatacacaaacttcatgatgaatcttgactatctacacaatagggcgctacatttcatgctcttttcaaaagtt

SEQ ID NO: 51440 - DNA, 461 bp, Glycine max
  unsure (1)..(461): unsure at all n locations
agcttaccatataacaactaaccncatcgcactaccannaaattatttttntaaagatagaatgatntccttctataacttagaaaagttatttataaagaattaaagagataacgatggcgtgttgcgacgttgatgaaaacagtttttttttttttttttgacacaagtgatgacaaacgggaagtaagagccgaaagaactntagttgttaaaattaaccgcgccaagtgatgtctatatatgattgtgggcacaagtgaataaatttactttattaaaatagagattcttttattgagtattatacatattgtaatagagcagctatattctctaagtaaatatttgaacatataaattgtcgttccttaataatgaattaaattattatataaataaacgttattattccttagaagataaaaaatattagcactactataatattattaatattt

SEQ ID NO: 51441 - DNA, 455 bp, Glycine max
  unsure (1)..(455): unsure at all n locations
tctcanatctcaattactaagttntctttgtttaatttatgtttttgaagcttctcaattntgtaacaacttgatttcgggtagttnttttttatcccgcacgactggttgtatatttaaaagatcgtgatgagatattatgatcttatgatttgatggcatttttgcgccactgtattttttgacattggaatggaatacttatcccctatatttatttattntatggttaaattgcaaaatcggaaaaatatcgtcgttagattcgttttctctcccattcgataaaaagagcatctaatagtggaatntggacagtagtgaaaggatatcaatcattatgtacgtcaaaaagagaatgatatggntcacantaaatctnctttatttcctttttttnntattactacaaaaactcgaagtacttcactggctgannaacaagacatcatgat

SEQ ID NO: 51442 - DNA, 468 bp, Glycine max
  unsure (1)..(468): unsure at all n locations
agcttggtcgtggtacttacccgttgaagatcgaagaacgatgaagaacgaatgaagaacgtcgaagaacggttgaaacctttgcaagattcctcacggaaaacgttacggaaacgtttcggaagcgcctcggcttatattttcttcacggaaacaatttttccaagcaaattcgatagagagagaagtgcctaaggggctgaaccctttccttcttcacttcctcccctatttatagcanaataggggaggtgggtgccgctcagctcgcccaggcgagccaagttgcttcctccagaagcaacagccttctggaggaatattctggagggcccaagtgggcctggggctatttgcccccattttactaagacacgccccctgctggttttgtgatctctttcgaaggaccgaactacaattcgaacgaacttgttcttcgtatgtacgacctgggatactatcttc

SEQ ID NO: 51443 - DNA, 394 bp, Glycine max
  unsure (1)..(394): unsure at all n locations
tgtagaatggctagacatgatacatgtcagggtttggtttgtttcaaggataaaagggatgccccacattatttccatgacacatatgcaaaaatgatgagttggaaactntatgcaaaactggtcatgcatgcacctatgcggacactcaagtgtcaaatttttatggtcatgtgatgctagggctcaggattcatttcctctattntaatcaacccaatgtttccaaaatatgttcttttatcaatttgtgcattcatccgagtccatttcgggcgtccggngaaatttcacagcattcacccttcaggtgtagacacattttcccgaaattggttatgatcaatgaactntatcaaagaaaagttggaaatcgtctcttttcaaaagcatg

SEQ ID NO: 51444 - DNA, 566 bp, Glycine max
  unsure (1)..(566): unsure at all n locations
tctgtcggtgtgagtangttatagttaatatgtttgagagcgtgtgtatgtaagactcgaaagaggcgggttgggcgtgtaggcgaccgngatgctctanagtcgcgctgcaggcatgcaatgcttcccgaatgagctgacaacattattttatatcttttgacatacccatcttgaaaagatgattctaagagtggagtcacaataggcatgcttcctcacgttattttgctagaggcgccaacaaatactagtatggatgcatcaagtgctgcttctattactggcactgcagagtaatgattgcctattacgagttacccggaaagatatataatccacctattgcaagattttacggtgcagtcttctctaatacctttggaaaaattgaggaacaattttgttcttgtcagctcagtgaagaaatggaattctggacaatatatttatcaaatcgggggtacatcgtagagacaatgtatctggattttattttagccattgctgatactagtataaaactggctcacccctaacttttcgttttatacggcataaccccn

SEQ ID NO: 51445 - DNA, 331 bp, Glycine max
  unsure (1)..(331): unsure at all n locations
caagcttttaacgtatcatacttttcattaaaatggtaatttcatttcctcatttctttaattggagaattccactcacaattttgaaaaaaaaattataacagctcaaatctgagtaaaatatagattgaagaaacaaataccaaaccttatgcggataaatctgaacaaaatctcaacanacacagctcaacaagaacatgcttaaaaagaaaatataacttcgaaattacatacctgattaagatatatagattgaagaagcacaaaggaaaactgcagctcanatctgagtacatacctcacaatttnttcaaattaaaatctgagt

SEQ ID NO: 51446 - DNA, 273 bp, Glycine max
  unsure (1)..(273): unsure at all n locations
tatctattatcgctttcaataatactttattgttgaacttatttgatcacattaaaggattccttttaaaaaaattatcaataaagctcaaagatgatactttatttaatggattggaattcactcgagatcatgttttgtcatatactctatacttatatantgttaattagtttaaaaattccatctaatctaataattgtcaacttttaatttatttgcactttattttttattgaaaaattattattttagattactcgggataattgt

SEQ ID NO: 51447 - DNA, 575 bp, Glycine max
  unsure (1)..(575): unsure at all n locations
acttgatgtatcaagangtgtgtaattgatgtgtgcgattatttgtgtagngantaacgttttnnnnggaggttgctgcctgcngtaccacngctccgctagagncgacctgcaagcgtgcaagctgctctcatgaacagaagcactatgcttatttttcgccttttggacgcggaaagtggcagacactgtgccatttgagccatcaacccattgctaactctgatttatgtcaataggcgatggtgtccatctttgtgatttcagcaagataatcacctatttatactattccaatgatatgcttgtggaaatgtagaggttcatgataattcaattgtggggagacaatgcctaatcctcccagggtctgttgtaaaaaagaatgttaatctatgagcactttcatgtgctccaatgaattctatcactcatgagggtagcgtgtatatctgatctcaaacccgtattgctaccaagaactcgttggatcattttatgatatgattgatgagatggacatggagtacaaaaagtattggcaacatggctgcaattttagcagcactactatn

SEQ ID NO: 51448 - DNA, 448 bp, Glycine max
  unsure (1)..(448): unsure at all n locations
gatcaaagaagaatcactcgagactagtatatatacagcatcatcttccagggctcaacatcgcatggcaccaggcaagttcagcatacaaaatatgctgcaaacaccctgatctccacatgaatngaatgttagaacacatatcattgtgtacgagtccagggaacttagcaattctatactaggtatctctatccctgtgttgnacatgatctttaaacaagtcctgtggggggtcgtagatgatcatacctgggaatatctctaagaagtctgcctctgttatattctctctgaataccggatagggaatgagctcttttaatatcacgcgaaaaggcagtgaaaggagaggctcacgagactgctcatatcttcatatatgtacattgcctctgaggcaattccttatctagaaatgctctatgatatcttcgacggatgctga

SEQ ID NO: 51449 - DNA, 315 bp, Glycine max
tgttatgattaccacaatagactttgctctacataattaggaccatgtatcattcataatggataactgttgacatgtgtatacacttatttttctttgtatacgcgtagtatattatgaactatatgaactatgtttcagttgtcaaacattaaacaaatacgttgtcttaaaatattaatttgtggtaagaggaaccaattcgttgtaggtggaaccaattcgtaacctatttgcaggtctctttctctcaagtatgggaatgatcatacatgtttacttccttgtatattgggtgtacctctcctattaaat

SEQ ID NO: 51450 - DNA, 489 bp, Glycine max
  unsure (1)..(489): unsure at all n locations
acatagaaactaagcttcaatntatgttcagttatgtagtatgttaatatagaattatttacctaactagataattatgttgaaccctaaaccaaattaataaatcactcaaccttaaatacgtaattcgttagaactaaaaccctaaaccgaataaccctcagtaaacaagcatgttacaaaaaaattaccgacactttttctaatatgattaaaacatgtttagttatcacaatacacaacaatgctataagtgtttcacaactatgtaccttataaatattggcttaacagtgagtgaatgttcaatcttactctaaatcaacaaagtctatttgcaacctcatcaaatttgtatattattgcatgctaatatatggtgtatgccatagctttgtctgataatgacaatgtgtagatcataacagagctgttggcgattatggacaagcgtctcgtaagaatgcctagtatgttgggacatacaca

SEQ ID NO: 51451 - DNA, 441 bp, Glycine max
  unsure (1)..(441): unsure at all n locations
ggagctgacccatcaactatttctatctcctttagactggtgatccctaggctcttaaccttgacttgatagaatctctttctaagcgattgtatttgacttgatcccatgttttactaaagcgaacaaaattcggcgcgaatcaaaactccaccatctttcatgngtgatggttaaaggcctgaggaaatgcatatgacacgaatgcaatttatgaacacgggagcccgggaaattgtctccttcttagatacaacatcttggggtagcaaagtgcccgacgtatgtattaaagaaggtgacacggaccgtccgttggttttccaatgtgcgtgatgaatatgcgaaaggcgcaacgcgggaatgtatagtatgacaatattcacaaaatataagcaaaagggtacgtgacacttatgcatggcagtgtgaaaaatggca

SEQ ID NO: 51452 - DNA, 486 bp, Glycine max
  unsure (1)..(486): unsure at all n locations
aagctgccgttatgaaataccgtgtngagacatcaagacaaacaatattctcatgataacaagggtgtttttccaaacatcagtcacttggaggatatttctagtgcaatcaaatacggtcaaaagtcacaacaacaataatctctcaaccaaaacatcaagataaaacaataggataatgcataataattttaagataaaagcttctcataaactagatacttaagtcaagagtggatcccgtcatgcagtatgtagtaaattccaattaacactaggtggatttattaaacatcatcatacattctgtttaaaagccacctaagtactgtcttccagaagttgagtcttcaaagttggcaatcctactgggacaataaagacaaaacgatgcctcanaaggacatatctattaatatccacctcctactaacatatgaagaggggaaggangaataatgaanatgcacaagctaggtattcatg

SEQ ID NO: 51453 - DNA, 396 bp, Glycine max
  unsure (1)..(396): unsure at all n locations
tgttttcttcttcttcttctttttttcagtgggggtagtggtgactactgattgtgaaaaatacttctggaaatttggtttttaaccaaactcaaacggtatcatgtaattcatgtatttgacatcaccttctggtgtaaaattatcatttttgttgttggggagtgactatttggttgatttggtaatgttntgttttgtaattttgttcactggtccttgtctttggtggattctgttgaacttgtaatcacttctttcttttacttaagctgtgatttatattggtaaaatggtgttgatttcttatcaagtaattctgatatgtaacacaattgccatggaatggatattccaagttcaatgatatctttaatgnctgcctgttttacttct

SEQ ID NO: 51454 - DNA, 430 bp, Glycine max
  unsure (1)..(430): unsure at all n locations
tagttataaattctgtctaatttgaaactgaacatgtccatnttttagtcttggcattatgctcttgtatatttccatttcctttcttatgattcaaacattggttatttgacactgcattatgtgtttttttggttgccgacaccagggtgctagaagtcaatcagtacactcctgactcgcgttggaagaggaacactattagttgaaagatctcgagaggagggaatgagcagatggttttatggaggatcagaaagataagagtgagactgagattccatttgaaagcatntggcttctaagtctggactaatagattaaatttcactaacatatgtcagactgtattttattacattgcagagcaggtctctgcttagagaaaagggttagatctatcttcacaatgaccgtgagtcctattctt

SEQ ID NO: 51455 - DNA, 354 bp, Glycine max
ctaaactatgttttatatacgaacaaaacaatttggattgtaatagagcactaatttgttgtctctattttaaagattgattttttctctataagatgaaaaatacaggttctttgaatgagtaaaatcaaacgagtcttaagaaagaatcgctgcactaaataaaagagagtcatcaagtttgtaaaaaaaaaaaacatattgttgagatgttattgtaaacattaataagaagcgtccaactaaatctgaattcttccattattttttcatggtgttagtgctctactactatatcgcgagaaagagatttatctccccaacaattatgagatacgatttcattaaataagc

SEQ ID NO: 51456 - DNA, 512 bp, Glycine max
  unsure (1)..(512): unsure at all n locations
ggacactatgaaactaagctnnttgtcaagcaatcaacactaaaataacaggaatntaaatgactgaaatntaaataactgaaacataaagcagactaaataactaataactaaattgttcatgatttacagaaattaaaacaaaacaaaatttaaacatcctgctcatcctgtggttgatcttcatttaaatccaaaactggagcagctggtgcatcctgaagaatgggttgctctggctccatggctggtactgatggcatagtgtcctcagatataggtgtaggggatggctctggcatggaatctggtgaagataccccctcttgagctatagatgtatccacagcaactaaaaagggctcaagaggagtgagctcatcctctgctaaaactagctcctctattgcctgctcangctcttgggctgcggaggtcccaccccctccagaaggagaagggtggactcctggccaagccacctgagtcaggaactcatatgtgctcataat

SEQ ID NO: 51457 - DNA, 375 bp, Glycine max
agcttcgctgacaatgttcttcttgcacttaatccaaatgcaaaagaatgtaccaatgcgatgagttcattagcaattcttaatagaaacttcataacttgaacataatgtattgagagaacatactgtgaatttggttaatattaaatatgaagtaaaatcataatcatatttataacaaacatgtgaacatttttctaaaatcatgttcactggtatttgaatttaactttggattatccaacatgaattcaaacactcacataatgtatatcagaagcaaaataaagtgtcactcaaattatcaaagtaaacaaacctattgcacaagcttgacgcacaaagagaaggatacaaaggccgcttcaattttct

SEQ ID NO: 51458 - DNA, 434 bp, Glycine max
  unsure (1)..(434): unsure at all n locations
ntaatgaaggcagcatcgatgttgccattgtgaaagaattctacacaaacttgtatgacccanaagatagatcacccaagcaggtgcgggtcaggggttatctaattaaatttgatgatgatactttgaatactttttttgaagaccccagtgattgtagaagaggtggagaatttatgtgcttattcgagatttgcactcctgaggcctgatcctcaggagttagctgctaagctctgtatcccagggaggggatttgagctgaatgctgatggtctccccttgaagatcttaaggaagaacatgactactctcgcttagacatggagtgttctttcttattgtaacttggtcctgacctcctacacttctaacatcacattggaaacggccaagttaatctatggcatcatcatgaagatggatatgaatgt

SEQ ID NO: 51459 - DNA, 102 bp, Glycine max
tctacaaccaaggcacccaggaggattaaattcctactcatcttatcagaataacctcaaatagaggttgctgtgcttctctcatcaaattcttttcttgac

SEQ ID NO: 51460 - DNA, 476 bp, Glycine max
  unsure (1)..(476): unsure at all n locations
ngtcgagcctttcttggaggcaaaaggcgtagatcccactatggttgtttctgtaagggtggtcactacattgcattctgtcagccatgtcatggtcctcacctgtgctaactcctcctcctttcatcgctggaaaccctaaaaaatttgaaatgtatgggttattgtgacagaatcaaagaaaagagggagtcaaagagtgagaaaatagtaaagggatagacattaaaaacacactcacttctaatgacaaccttttaagatgatttttgcaaaaccatcatggaatggtagtttccaagacggtttttgtaaaatcatcttcattgaaaaacctcgtatttacaaaattgtcaccgcctgaatttctaagatggtttttggggattgtcgtcaaaggtgcatcctataaaactatntttttagtagtgattttgtcttgtgttgcgaagtagcattccattgacccaatgaga

SEQ ID NO: 51461 - DNA, 409 bp, Glycine max
agcttctcgtatattatgcacctgaatagactttctttttgtaagttatgaccatttgaattcctcgagagctttcgttgttcaatttcgagcgtcttaatatattatgcacctgaatcggacttccgtgtgataaggtatgaccatttgaatttctcgagagcattcgttggtcaatttcaagcctctcgatatattgtgcacctgaatcggacttccgtgtgaagagttatgaccttttgaatgtctcgagagcttccgttgttcaatttcaagcgtctcgatatattttgcaccttaatcggactttcgtgtgacacgttatgaccatttgtatttctcgagagctttcgtagttcaatttcgagcttctcgatatattatgcacctgaatcggactttcgtgtga

SEQ ID NO: 51462 - DNA, 332 bp, Glycine max
aagctagaattgtttcccaatcttcacatcaatttgcttctttggtacaaaccagtggtcactacttatttactaatctatgagtgaatcgtttatgatagttttcttattctcactgctaacacagtaattattaaggagaatggaccataaagatgcgctgcgatagaggatgaaaagatgtgattgcttcccatacttgtgaatcagtacacaaaattcaacaaaatatagaattatgtcaagtccattttataaggtgggattcttgatttagttcacaatctctttaatattgatttgtcaagaaaaaatttctttattaaaattta

SEQ ID NO: 51463 - DNA, 428 bp, Glycine max
  unsure (1)..(428): unsure at all n locations
ttataggttatagtatgcgagaganaatncatcaatgggaattgaggatgctactgcggacataattatatctgttgaccataatttcttctagccaaattgtctttctcttttgcttagaatatttcagatgcttttagtgaaagatatttactttattgtattcttaagcttcaattattatactattttttcgaaggacttctttntctgtataactttaacccttggttatctttttgttatacaactttctacattttagatttggcagtgttgatgtttgttcatatgcataaatagtacatgcataaaatagggttttgcatagttatcccatcataaaataccatgtttgataataaataaaaattaacttctatattaatcatcttaatagtcatccaacagtgattgtaattattaat

SEQ ID NO: 51464 - DNA, 165 bp, Glycine max
tgtgaatacctcacccactcaagtgtatcacacaagtaatggcttttcttaatgaaacacttgcctttaccactcaattcccgttgagttcttaagcaattcaagagattatggccacaacaaagaacaattcaccaatatgtgtaatggaatgcttgagagaca

SEQ ID NO: 51465 - DNA, 387 bp, Glycine max
  unsure (1)..(387): unsure at all n locations
gcgtctcgatatattacggggactcattcatacatgagagtaaaaagttattgtcgtttgaatntgcaacgaccatcaacattcaatttttagcgtgtggatatattacgcgactcaatcagacatccgagtaaaaagttattgtgatttgaattggctgagagcttcaacattcaatttcgagtgtttcgatatattctgggactcaatcggacatccaagtaaatagttattggtgtttgaatttgcttagagctttggtattcaattttgaacgtctcgatatattacgggactcaatcaaacatccgagttaaaagttattgtcgtttgaatttgctcagagcatcaacattcaatntcgagcgtgtcgatatattacgggac

SEQ ID NO: 51466 - DNA, 482 bp, Glycine max
  unsure (1)..(482): unsure at all n locations
tgagtagcgatacgcggnttaattgtagttagtatggtaacgtgtatgtgagtgagggaganggnangttctgacctgtacncncgngtccttaagacacctgcgctgctgctcagttggctgaactgtttaatcttcttgcgaggcaataactgtacatcagaaaacatgtgcgggaattgagagcttcgctttactgctggtatatgctgggcacaaaaagaaagtctcgggtgacttaaaaaaaaggctgctgcgtgtgaaacctgaacaaaacggatatatcctaattgaacgtaggagtaatgtgcgcctacattagaaacatatgggtctttctgcaaggaggctgttttggtctataggtaagatttggaaatggaattaatgtacaacttgtctgggccacaaagatagaaggagtttatagtcctgacccttaaaaaaagtgggagcaaatacgtcgctattaatcaggaccg

SEQ ID NO: 51467 - DNA, 313 bp, Glycine max
gtttcagatgatgcagatgggtttgtagctaccttatgttctcctctaatgactatggcatcatttctggcgctaaactgctgggagttggaggccatcttctcaattaaatttctggcttcagcaggagtcatgtctccaagggctccaccactggcagcatctatcatacttctctccatattactgagtccttcataaaaatgttggagaagaagctgttctgaaatctgatggtgagggcaactggcacatagtatcttaaatcgctcccagtactcatacatgactctctcactgagatgtctaatac

SEQ ID NO: 51468 - DNA, 475 bp, Glycine max
  unsure (1)..(475): unsure at all n locations
agcagagctaactaccacacccatctttaactaagctcacctncttgacaaaattcatgaaaatacaaaaaaagtccctactacaaagactacccaaaatgccctcaaatacaaggctaaaaccctatactacaagaatggtcaaaatacaaggcccaaaagaaggaaaaacctattctaatatntacatagataagcgggctcatacttagcccatgggcccaaaatctaccctaaggctcatgagaaccctagggccttcccttggatctctggcccaatttacttggagtcttctatccaatgcccttacgaggtaggattgcatcattccctccaccttggaaaggatttgacctcaaatcccgaggttctgcatactctgggctccttccctcgacacctataaaaaaaacaaaacactttgtattagtggtgtctggtatgttgaagtaacgtaaggtctgacaaccta

SEQ ID NO: 51469 - DNA, 401 bp, Glycine max
ttgatattctctcgcgttggcacacagcataccatccggttcttaatattgtaaagcttgggtgtgccactaacgatgtgtagcttaccttatagtataatgctctttagctctcttgccgtctttcttgtcgggctatttatgtgatgcctgcttgattaatgaatcggacatcgcgatactccttttatgatacaacatctattccttgcagaatcttgtttggtaatgttataatgatttgaaattattgggttgcattagcttatctcacgaatcttcatattgtttcaacggatgaaataactcttaatattaacatcatctcgggggctgcatattgccatattgcattgactgtaatacgtttcaaccatatttgttgttgatgcttcaatttg

SEQ ID NO: 51470 - DNA, 90 bp, Glycine max
ttattgttgtataactattttaagttctatcatgtctatttacttttgtttaatccttcatttgtattacattttcatcttgctgtgtct

SEQ ID NO: 51471 - DNA, 418 bp, Glycine max
cacacaccactataagattcgggaggagaccatatgattcactgagctatatcgagacccgataattattgaccacaacggaggtagaccaagtgacgagagatatgctccccaactctacagggaacagggtactaaattcgcaacctactatcaatggaagataagagcgactctcaacaagttatttcgacgcatgctgacctaaatgcagaggaccatgactaacatgcctgacatgcaaccatccatgcatagccatatagaactcatatgctatgacacggcaccctgtgcggggcgtacataaagatcaaggagataggagtgccgcacagcaacaagatgctaccacctgatgtgggacacttattataaggtagacaaaccacacactgtcaatgtataaagcgaacag

SEQ ID NO: 51472 - DNA, 474 bp, Glycine max
  unsure (1)..(474): unsure at all n locations
aaactaattaacttaaataatgtatacccgtacgtactaattaagaaaatagaaaaataaaagtaatctaaaattaatgtaaacccgtacgtactaattatgcccaccaccaaaagtttcctaggcacttgcaaatgcaatatctatgaaacaattaatgtatatgcgtacgctgagaaacaattaacttatcaccatttgtcaaatctcttttttattttattttttttcaaaaaaagaagagaagccttaagattttgaaatgtgtacataagggaccaagctacaactaatgtgttaaaaataaaaatagttatcaaactatntgacagtaagaaaaagttaaaaataaaaaggagtcaattaatgggctgctntagccagctgggtccatcaactaagaagtaaaatatacaaaaataattaataaaaacactgggcctggtttctaaaatacgtatactatntaaagat

SEQ ID NO: 51473 - DNA, 480 bp, Glycine max
  unsure (1)..(480): unsure at all n locations
tagatcaaccacgaccaactgtccacatcaacccttctactggtagaggatctggccctcataaagaaaaatttcatagttaccttggggtagtggcacgggagaaaatccctatcgttcatacaacttggaaggatgtcccagaaactctaaaagttcttgtatgggatgacatnttggtaagtacgctaaactagtaactagatatttattattagagtaacttattcagcagtatttagaagtaacatgtaactagatantttgaactcttctcttaattaatatgattatagaaaagtgatgtaattgagtctatgcaattcgaggcatccaacttcattgatatgtgaaaatgagaacgaattagatttgcacatggagaggaattacttctttttaaatgcatatcaacattatgatcatatggtgttaaatatgatacacaaatgagaacgagtctcccctcctgtgacaata

SEQ ID NO: 51474 - DNA, 371 bp, Glycine max
  unsure (1)..(371): unsure at all n locations
atagatactcagcttagatgtggcatttctaagaaatccatggctcttctctatttttattcaagcaattccttgtacctaaccttttcttattaagcatccatgtgatgactgagaacaaactcatctagatgttnttcttttatccctctactaacttgattaattcattttattgttccatcatgttaagtgacatccaccggttgcgttgaaaatgataatgcttgaaacagcgtgattattgaaagtatgtctggtttgtgtatttttattaagaagttatgtcttttggtgtatttgtataattataagataatctgattacgtgcatgggggggtgtatgtgtaaaacagtgatatctcatgct

SEQ ID NO: 51475 - DNA, 384 bp, Glycine max
gcttctaaagtctaacctaataatagctttatcatcttcaaggtcatctaactcagaagcatccaactcatatctttctggtttagtaacaggcatacacaacgtttccacacatactaagccttctttgttgacgacatatttgttgagtttgattaaaacctcattacaatctttaagcacatattcaacctttttataaaatattctgatagtgccaaaaagaagttagccaagcactctataggatacaacatcaatttcttgcaaaatcttgtctgcagaaagtaaaaatgaaatgaaaataatggcaaaacaatagcatatatcacgaatctcaaaatgatttcacagaagaataaactcttaaaataactatcattt

SEQ ID NO: 51476 - DNA, 486 bp, Glycine max
  unsure (1)..(486): unsure at all n locations
tgcacaccttccatctacatcttagtatcactctatcacctgcaatattcctaccacatgaaatctacattataaagtgcatcatctcctcttgttctcaccaaataggttattagacccagaggtctaagactgactttgtccacactntataattattttttatcgtgtttgaatcttttttgtgtatgctagatccatgagccaaggaacaaaaccccattcatggacctccattgcagatctactcagatggaattcgttgaccatgtctcatatttctttgccctctcttttatgctntgccgtatcgtttgttctaaccatggccaataaacatcttcaagctgcaacgaccatgatttctttgattaactatataaggtaaaatttctacctcttttgttattgtaaattaactcatttattaataacaattacatgattaatttgtatcatcactaanagacatggtgaatacccaca

SEQ ID NO: 51477 - DNA, 336 bp, Glycine max
ctatcatgattaggataactaagtatttctttttacataatctatggattgaatgtgacaattacaaataaactttaaaattcttgaatgataagcttgaatatgaatgaagctctcaaagggaaacctgaggatgttgttaaacttcatcataagattggctctttgaaagaaacttatctatatttgtttgaggcactaaaatttctaaacaaattggtgagatatagtatatgcccatttgatagatttggacatggatatataggagaaccttatgttcatgatgaagaaattattgtatgctatgtctatgagaagattgggcacatgaca

SEQ ID NO: 51478 - DNA, 485 bp, Glycine max
  unsure (1)..(485): unsure at all n locations
ngcttctacanaatgaagactcatgttggttcctaagtttttgtttntttcttgttaggggtttgaaaacaaaaggtaaaagaaactatggttgaaactagccaaaataaacgctaaaagaggtgtgaaagataaggaaaaaactaattagtaaaaggcaagctatctaggcggtttgacaatggaaggtaaaggaaaaaagttatgaaagtaagaaagaaatgtaaactaggcgaatcctaagagtgtttggatgaccacatttaaggttcccaacaaaacactcactatcctaagggaaaattgcctaaaattattacacacaaatggaagtanggtggcctattggaggcttccaacttacttcaaatgaaaggcctttntgttacaaaatntgaaagcaattaaagtaagtaaattgtcaattacaaaattacaaaaaggtcctcaattttggtggtggttctctctttggtgattcactc

SEQ ID NO: 51479 - DNA, 248 bp, Glycine max
  unsure (1)..(248): unsure at all n locations
accacagagagagacctggagatatgtcgcggagggcaggagaccaatatatacatcaggnggggngctattgcccaaaaccaagctagaccacccccgacccaaccgcaggcatatgtcggtcaattgagaccctgagaagtacctaagcaggcgagctcctggcagtcaacagataaaaggaacacagaccacaaagcaaggaggcttgtggtggctggccacctgcgaaactcgaatgatatgcg

SEQ ID NO: 51480 - DNA, 500 bp, Glycine max
  unsure (1)..(500): unsure at all n locations
gaccttagaaactcagctaagatcccctaagcaagattttacctggatacttatcaaagactgcttaccaacgaagctgaacctaagagggagacaagtggagataactgacccaatgtgtccgctttgtaataattccgaggaggatgcagcacacctcttcttcagctgcagcaaggtcctccccttgtggtgggagtcactttcatgggttaagtcagtgagtgctttccccaaagaacccaaataccattttatgcagcatactatatcgaacgctacacgatcaaaggatatgagatggagctgctggtggatagccctcacaaggaccatatggcaacacagaaacaagctgttatttgataatcaaacttttaacgcaaccaagctgatggatgaagcacttcttcttttatggtcttggcttaaagcaatggaaaaagatnttgatacacattncaatcagtggttctctaatcntgcagatgcctttatgt

SEQ ID NO: 51481 - DNA, 474 bp, Glycine max
  unsure (1)..(474): unsure at all n locations
actcagcttctgagatggcctttggtaatctcactagatgctntgtgtaaatgcactatctcaatagatacattgacattgaagtagtcaatcaatcttgaggctagcacgacataaggaaattcattgtccactaaccacgactcttcaacataatgtcttcaatcaaaagtacccaagatagcatatttcataccatatatagtctagagatcatcattagttacctgagcatgattacttgacctcagactaagaatgtaggtaatgaggtacacaagcattttttcctctggtgacataccacctactcctaggtgattcctcaaattccttggtgggtcaagaagcattcccccattggtctgcatcttgggtgtacccatagttgtttcttcgaattcacagactccacccatgtccagtccggctacttccttccatacttcagtgtcaataaccatntctactcca

SEQ ID NO: 51482 - DNA, 377 bp, Glycine max
agcttatacgaatataagaaacatcttcttctaccttggtgattcttgacttcatctcatctaatcacatgtccacttgttactccaaagtatcaaacctttcacctacaataggttgaagaccatccaacctatccaaaatcttttgaagaagaggagatatctttccaccattccttcttcatcaacaggtcgagcaccctttttcacccaaaagccatcattgcttttttgataaccaaaggatgcagtgacagtcgcgcctattagaaaggatctcttgattggaacataatgttcataatcaagaaggatgttgaagtgtcgaaagaagagggtgactatgcgtggatatgagcatggagcatttaatcgca

SEQ ID NO: 51483 - DNA, 415 bp, Glycine max
  unsure (1)..(415): unsure at all n locations
ngagatgaggaagtgttgaagggtgaaacttcctgcttttattgttgaccacagagtggtacctggagatatatcgcgggggtcaggagaccttggggacgtcaggtggggtgctattgcccaaaaccaagcttgaccaatcctgactcaacccgggcatagtcggtcagtgagaacctgtgatgtacctaatcaggcgagctcctggcagtcaacagataaaaggaacaaagaccacaaagcaaggaggcttgtggtggctggccagctgtgaactntgattgatatgtgggttatggcctctggtaatcgattaccaaggatgggtaatcgattacaaggcttaaaaatgaagacaggaggctaagatggtctctggtaatcgattaccacggggtgtaatcgattaccaggc

SEQ ID NO: 51484 - DNA, 524 bp, Glycine max
  unsure (1)..(524): unsure at all n locations
tacgtgatntgggaattaagtggtattatatatgatatttatggggtattttctttacccagtcttaagcactgagctcagctaaatcaaatcatattttattcaatgggatgatggaangaaagacgtaatatctgcgtatattctatcgtgggatctcgattttatgaattaaatcggcatcattctaagaatgggagaattgttgaagcgaagactttacacttgatgctatgatatgcaagaaatcatctcttgttaagttgaatgcaaggcatataatccaagaactgcaagatacgtcatcaagaaaatctcgttgtgatttaggataggaattcctaatttagactgcaagaggtttgaccaatgagttttagcgacaagtgttctacaagagatttactctctggtaatcgattaccagaggaggttagcaattaccatgggccaaacacttcccggaacggttcaataataatatgaaaaattttggaggcttgtatgcgatacatgaggattcn

SEQ ID NO: 51485 - DNA, 345 bp, Glycine max
  unsure (1)..(345): unsure at all n locations
tttattcgtagttttttttatggctgatcttattttgctttaaatctattttaagattaattggctctccttattattcaaaaaataaataaattagatcctctcattnttcaaaatgtttcaattagattttttttagaaagttaattattgtccttattttttcaaataaaaatcattttgtccaatataaaatcaaattttatcttatttttcaaaattttgggacaaatacaagaaaaatgagatcaccacanacaataaattatattgaaaaaaatatattttatatgtacctcagttcagccaaatattatgaaaaaaaatcaaattanacctaatttt

SEQ ID NO: 51486 - DNA, 460 bp, Glycine max
  unsure (1)..(460): unsure at all n locations
accttatttttggatcaataaaaccaaaatgtctatattgtaaaattgttcanatcgtgtcttaatagaaataattgattgatctaatatgtntaaaaaatactcaatacgaaaagattcttcaggtgaatgtgtaatctcattactaatattttcatcaaaatgagattttctatgaattttaccgttttcacgaaattttggctctatatccatttcgatagccattttttctgtggatactaatgccaatgcaaacccgttttccctataatgttttaaataagtgataagaccttntaaatgatctatagcaacatctatatgcatatctnttgattgtagaatcttgataacagaattgacagcaaacanaatatcatacaaaatattcattcctaataaaaattcaaaatcttcaagttcatgagttgctaaagacatgacatcactttttaat

SEQ ID NO: 51487 - DNA, 416 bp, Glycine max
gctgccagagtcatcacgcatacatgaactattgcactgctctctactcaagccatatactccatcaaccaccccgccagaggtccctcttagtctaccagcttcgtcggaagaacactagccactcatttctcccctagttatcctggacactaagtggactcagtcagagaaggatagtgaattaacttgtcctcgtgcaatgggctggtctactccctgaagacacatcatatgaaccttgggcacaactgaaagtggattataaccttgaggacgggttattttggaagtgcaaggggatgttgagaacaaactcacacaacatgagaatgcatcatgggagcaataaaatgcagaaacaacacagcatacaacaagggcatggctagagaatacagaaacagagaatggag

SEQ ID NO: 51488 - DNA, 459 bp, Glycine max
  unsure (1)..(459): unsure at all n locations
ttaatggctgcatagtcaatgtaatcaattatctttgatcccactaagtatgatctaaatttctctagagcatagacaattacaagcatttaacaattcatttgtgatgcaatcctccctgtgaatggaccagtcactatagccatgagcaagaggctccgaggagaatgtgcttnagctgttgaagaaagccctatggttctcatgaacttcatggtagatttctgagcccatgggctcaagttgggtctaattctctttgtacatatttgactaggatgtcattatatttggtgctcgtatttagggctccatattataggtatggtaccctataaatataggatttttcagcccttgtatattatggcacctagactaagtttngtattatgggtagctttgaatctcacatgcactaagtgaattattgatgttgctggttggaaataaatgtaa

SEQ ID NO: 51489 - DNA, 481 bp, Glycine max
  unsure (1)..(481): unsure at all n locations
atcattagctcgtatatatatatataatgtagatttacatatatagactctacaatatatatagtatcacatgtttaagaaatatttttatttgaatattattacttagtattaaactattttcttaagcattaaattgataaacttaaaaaataattttaaaaaaagttcacaaattaaaaatataattaagttataaatgagttaaataagaaaatctcaaactttatttttgtatacaaatcaaacccaaacttttaatgacgttcatttaaataaataagtcaaataagtcaagtttgaatcacttattntttttttcttaattcaaattcaaatttctagtgctgaactcgttttggctcatttatacccatatttataatatacggggtgttcaaattattaccctntggatttaatccaagactaataattgggttcttacnttgatctccattcaacttctggtaccctggag

SEQ ID NO: 51490 - DNA, 346 bp, Glycine max
  unsure (1)..(346): unsure at all n locations
tgggcactcctcctccttttgcctctgttgccccgattcttttggcattcgcgttggtggaggaaacgtaatcaaactttcctcttttcaatccaacctcgattctttccttgcaaacaccagatccgcaagctggatggcatgtaacctactatcttctcatagtagaacactggcagagtgtccaccatcatggtgatcatctctctctcaaccatgggaggagctacttgtgccgccaaatccctccatcgctgcgcatattctttaaaggtntcaccctctnttntgaacatattctgcagttgagtacggtcaggagccatatcagaattgtactgatact

SEQ ID NO: 51491 - DNA, 416 bp, Glycine max
tcttttttgtttattttcagtccatgtatgctagtgatgtttccattttagtgcccaccatactttttgttcattgtagtccttataagaatgcatttttttaattttggtccctgtaagtgaaaatttatatgactaaaaatgaaaaaattgattaaaacttagagggactagaattgaaaaggagacaacttacaatgatgaaaaatgaactaaaatatattacaaagaccatgactgaaaaatagcaaatttaccgaaactaaaaatgcacaacataattggcagagactaaaattgtaaaaaatattaacttacatagactgataacatatttataaccacattaaatcaggatatatttatatttcaatattgtcaaattcactttatctaataagaaagatagatatatt

SEQ ID NO: 51492 - DNA, 402 bp, Glycine max
  unsure (1)..(402): unsure at all n locations
agtaatccagagagagtatctcttattaatctcctgcaccaaagcaagaagatcattgactgcatctgatgctaaattatttgacacaaatcacattattcaaagtagtaaaacacaaaacacttggacttatgcacccaaatttactgagatagccatgatctttggcagtaaaaaaagaattggtagacacatgatttcaaatgcttcaaagaattaatgtgaactactcgttggaggcataaaagaggaaaatctgtaaaactaaaaagtgggctaggggtggtaattanttacactcaccaaagaatgttgtctgttgactgtgcatgctattaataattaataatatactaaaaaagaatcaaaagatggcaccacccttctcatgaatagcacatg

SEQ ID NO: 51493 - DNA, 490 bp, Glycine max
  unsure (1)..(490): unsure at all n locations
ntgaatnngaaacgagatgcatatttgaggtccatcttgcttaggtgtatacaaaagaaatctttcaaaagtttcaatctgaggttgagggcatgtactcttgcttcaacacaagacaggtaagtgtcaatggatctataatcacatacgttgtgaaagaaagagttgaagttgaggggaatgagaagggagttaaaagttttgaagtcttatacgagactacagaattggatattcgttgcatttgcagtttgttcaactacaaaggatatttgtgcaggcatgcattgaatgttctcaattacaacggcattgaggaaatcccatctcggtacatcctgcaccgctggaggagggatttcaagcaaatgtttaatcaattccatgtctatgataatgtngattcccacaaccctgtgcccttgtatactcgtctgtntaacagtgctcttncagctgtagaagtangggcacagtcactggagcatta

SEQ ID NO: 51494 - DNA, 485 bp, Glycine max
  unsure (1)..(485): unsure at all n locations
cttgaatgcactattcaatggagttgacaagaacatctttatactgatcaacacttgcacagtggccaaagatgcatgggagatcctgaaaatcactcatgaaggaacctccaaagtgaagatttccagattgcaactcttggctacaaaattcgaaaatctgaagatgaaggaggaagagtgtattcatgacttccacatgaacattcttgaaattgccaatgcctgcactgccttgggagagaggataacagatgaaaagctggtgagaaagatcctcagatccttgcctaagagatttgacatgaaagtcactgcaatagaggaggcccaagacatttgcaacatgagagtagatgaactcattggttctcttcaaacctttgagctangactctcggatagggctgaaaagaagagcangaatctggctttcgtgtccaatgatgaaggagaagaagatgagtatgacctggatactgatg

SEQ ID NO: 51495 - DNA, 206 bp, Glycine max
tttgacaaaaacttttttttaatgaatagaccaagaatcaagaatcgattatatacatgtggcgatgcttctctttaatatacaacgagtataactgattatgcgtaggcactaatgattatgtacctctacagaagtccattggtatttcattcttgagaacgcgcactttatttattttattcttatcacaattaaattattag

SEQ ID NO: 51496 - DNA, 213 bp, Glycine max
ctttctaaaatgtggctgcactttctcttgcaagaaaagatctgtgataaaaaacttatgctattcatctttttcattctcttctcccttttccaaaagaacgaagttctaaccgcctgaatgctttggtgtctctcttctcccttacaaaagattcagaggactaaccgcctgagaatgtgtgtgatgcttcccttcccccgaagcaaaaga

SEQ ID NO: 51497 - DNA, 308 bp, Glycine max
ctgctttttgtttatttccagaccatgtatgctattgatgcttccatagtagtgcccgccacactagacgtacattgcagccctcattagaccgcatctctgtagattcggcccctgtaagctgcaactcttcggacggaagatgaaaagactgatgagaactaacatggactctaactgaacacgacacaactcacggcggtgataaatgaacaaaaatatatgacaaagaccatggctgttaaatcacagatttagcggaactaacaatgctcaacgaactatggagggactgaaatctgcaaagg

SEQ ID NO: 51498 - DNA, 387 bp, Glycine max
agcttgtaaatgtctctaatctacttctgtgaaaagaaagaaagcagaatggcgtgataaaaatactgatattatgttgaaagtgtgcatagaagatgtgaatgctggaaataaacctcacaaccacttcactaagcttggttgggcaaatattgcagaaaagttcaataagcaacatatttgagatatgaatataagcaattcagaaataggcgggattctttgaaaaaggaatggcaattatgggctcagcttattgggaaggacacaggtcttagctgggatggggagaagataaccattgcagctagtgatgaatggtgggaagcccaaattcaagtatgtgttattcaacgaaaaccattgcaaccttcttttgttcttttg

SEQ ID NO: 51499 - DNA, 472 bp, Glycine max
tgttgagcatgcgaggctagtagccttggctggcattgtattttaagacaatccagataatgtcgtttggaatctctgaaggctctgtttgctgaggaagtgatgtagaaaaatgttgaagacgccaccatgatggaagtagatagtgagtttatgcttgaggatgtacttttggagtttgtgaacgctcaattagaagatgagcagataaaggttgagcttgagaagacagaagggcaatctacaatagagcatgaagttgaactcatgtctctggatgttgcggaaaagcaagttgagctgcaatatggaattgttgatgacaacatgaacccttataagagggaaacattggaagaggcaatgctttagttctccatttaaacatctcttaaagaagaagaacaatgtctgaagctggcgaacatattattggtgttgctttgtctgatgcaatagacgaggaatgact

SEQ ID NO: 51500 - DNA, 485 bp, Glycine max
  unsure (1)..(485): unsure at all n locations
cactgcagngatcttcaacaccacatatgttctcattntctgccaggaatngccaatacaatacggtcatttccagtagacaatgcttcacttgctggaggaatcgtgcagctctggaatgcagttccattcactttgaacacattgtgttctccaacagcataattgaatactacaaataacanaacgaattcgggtttattatgaagcactttactctattatcaataatatgacataagagtttaaatntaatcgaaccattgaaggtaagagnttaatttggatatattatcagtataaaaatttaatcaataatattataatacatgatcatctatgattagatgcatganactatttaaaactttacatttaaattcttgaacgagattagcagaagcgagccaactataaataatttgatgagttgaactaccaagtcatcctcacttgaaggtctatctgcagccaagctgcatatt

SEQ ID NO: 51501 - DNA, 476 bp, Glycine max
  unsure (1)..(476): unsure at all n locations
acaatggttcatcacttntctgatggaagctcaatatatttgtcttagcctggtttcttttttcctcttggaagaaacagtctaaaaacttgtttccaatgtcactccaagtgataaggctctgagatggatgagtattgagtcacttcaaggcattatctcctatgacggaaaaatggaaaaccatcatatagagattctcctcttcagtttgggtcacccctgttgtaccacattgatcataaaatgtggccagatggttgtatgggtcttcattagctaagctaggaaatgcatgttgggcaaggaaagtgattaggcctaactntagcctttgttgtgtggttgttgctccttggtctagcaatgttgaagtatactcgtgaaccattatcagtgtcatggtccgcaagagttctcctaacaagtgatgcttcttctacttcctcatatgtactagaagaatattctgaagt

SEQ ID NO: 51502 - DNA, 462 bp, Glycine max
  unsure (1)..(462): unsure at all n locations
agatggaccattcaagtgctgaaaattaatgttaatgcttacaaagnngagctgcccggtgagtataatgttagttcaaccttcaatgtctntgacttatctctttttgatgcagatggagaatccgatttgaggacgaatcattctcaagagggagagaatgatgaggacatgaccaatagcaatggccaggatccacttggaggacctatgacaagggttagagcatggaaagccaaggaagctcttcaacaagtgttgcccatattatttgaatacaagcccaagtttcaaggagacaagtccaagggtgtgagttgtatcatggcccacatggaggacgactaaatggcaccaccttgtctcaatcttagagtgtcttgttagtctaaataatggaccaatccttgtatagttggctgacataaaatatgctttgggttaatcaactaaaagggcttt

SEQ ID NO: 51503 - DNA, 418 bp, Glycine max
  unsure (1)..(418): unsure at all n locations
ctactccattcttggctatgagattccccttgtgcattgngttaataataatagctcatgcaaatcaaaagactttgatataatgctacatggctagcctaatgtttaacaccctatcataagacgatccatgtcaagatgttcactatattgagaangtatagggatcatagggtcataagagttaattcttgatcccaagatcaatgatgacaacaatgtcaaacccattaaagaggcatgcacgttccaactcattattaaagaggaacatgtcacccaactcagtagtcaactcactaatgatgagaagagaattctgcaatgagagatccaagcacatgccgacttgttcgtatggtccgcaatggacattccaaggattgatctgcccttcattgtccaaactttcatatac

SEQ ID NO: 51504 - DNA, 456 bp, Glycine max
aagtacttttaagtaatatttgattcttattcctttattaatatatatgtgaggggtagagggtatcacatcccacaaggatactcttcaaatataaagagccttgtctctatgagtgatatgaaattggttggctcgaagtctcatgattgtcacgttttaatgcaacaattattgcctatagccatctatggtatattgcctgacaaagtaagggttgcgataactagattgtgttttctctacaatgtcatctacagcaaagttatcgaccctatacagttggatgatttggaaaatgaggctcccattatctattgctaattggagatgtatgttccacctgcatttgtcgacataatggttcacttggctgtcatctatatcgagatatacggttgtgtgggccttgctatcttgcctcggatgcattcggatttgcagttcatgaaagtt

SEQ ID NO: 51505 - DNA, 546 bp, Glycine max
  unsure (1)..(546): unsure at all n locations
ttttcgcttgtcggtttngngttannannnnanctctacttgctnnnggaggtggtctgctgctcggctcgcaagcgacgcagctgcagcttttgcgagacgtcttggagcttcattttctctatacacaatcctctattactagctatgttgaattcttaggtcctgggggggaaatctttatttttttggtcgcgcccccccctcctttctgcgaaagagaaaatccgatgctggcaaaacatggttgatggttctttaaatcactctctacgatgacatgggtgatatttcattttaagagcgcaactacctatctttcacagtcctttggttaatttgtcgtgtctccttatgtggtggggggttgcntaataatgttatacttttgccttccaaaaaaaacttatcactaatcctcctttccataatccactattggatgctagtgtgttaaagatagtgggttgtctacctggctccactgcttctttcttctctccttcttatgaacgcatccggttttgagtcttgcgtgtagcggcn

SEQ ID NO: 51506 - DNA, 446 bp, Glycine max
  unsure (1)..(446): unsure at all n locations
tctcctgcttgcacttanaaccttctggttgggtcatatagatgtcttcccctaaatccccatgcaagaatgtagntttaacatctaatttctccaagtaaagattctctacgagtacaatactcagaataactctgatggtagtcatctttacaactggagagaagatctctgtgaaatcaattccttgtttctactgaaaccctntcaccataagtctcgccttgtatcttcttctaccgtctgattcttcctttagcctattgacccactgtcgcaacctacccttttacgggcgagtgaggtgaggctcatgggtgcgtcttccatgggaggaaaatgtgcggagtcgccaccaacgtttattgaaagggaaaacgttagaaaaaccaaaggaaactggtcataaagaatattctagattcatgagttatttttacacttga

SEQ ID NO: 51507 - DNA, 452 bp, Glycine max
  unsure (1)..(452): unsure at all n locations
gtaccttggcttctctnttataatcaatgaanaccctanggatgttagatcttcttctatgtttaatctttatattgttgttatttcttctttttctctatccttttattattaagtttaggttgctctgtatgggaaggtttactaaagtgaaattatgagttttcaaaagaatgaatattatttcagtggcttatcaatgatgtttgtatcattggtttccagtaccacttgattgccacacatatatctatggaaaatatagtcttttttttgtaatggtgaagattgctgaattaactaaggtttcatcttcactcaattaacgaattggaggaaaatgtgctgcaatgacaatagaaaattccccaaatggtagattaattctgaatgaattgatctcagaacgtttatatgaatcaaatntagccaatcatcaaaatcatgaatca

SEQ ID NO: 51508 - DNA, 491 bp, Glycine max
tcgaagggaagagagagaccaatcacgagcacatattatggtcttgaaagaggagttagctgcttgctcaaggtccaaaagaaactcgtctcagcgtttatgcgagacagagaccaacatgttagccatcgtcaacaggtaccaagaagagctaaatctagccacggcccacgagcataaagtggcggacgagtatgctcgagtgtacgcggaaaaggaggctagaggaagggtgatcgactcgttacatcaagaggcaacaatgtggatggaccgatttgctcttaccttgaacgagagtcaagaacttccccgatggctagccaaggccaaagcaatggcggacacctattccgccctcgaggagatccacgaacttctcagctattgtcagcatatgatagacttaatggcccatataactagaaaccgctagggaagttgtattgtcacttagatcttgactagttataaactctctgaataaaatg

SEQ ID NO: 51509 - DNA, 481 bp, Glycine max
  unsure (1)..(481): unsure at all n locations
taaagactcacattcactgtctttacttcatattcaaacttgtccaaataaataataaagtcatctcgactcaaagaaagtcatataagtctcatacaattaatatagaacctatatcctaatgtcacatcctatcagagcgtggtgttcccgtgtcctctagcatgaggttcttcatagtcatccacctattcatctgctccctcgaacacaaagttcaagatcatcacaggatccaaacacaaacagcaaaccgggagtgagttatcatattgctaactactagggagaaacaacacaacatatagtagccaaatacaatttacttagcatatctcacattatttcatcactttgtcattcatcaatcacactnttcatccatcaatcacacctttcaatcatcaatcattatacacaggaatcacacactccgatcaagacataacaacacatcaagttcataataaacaatgagcaa

SEQ ID NO: 51510 - DNA, 397 bp, Glycine max
  unsure (1)..(397): unsure at all n locations
agcttggaagtttgacaaacttggtgatcttgtatctntacatgaatggcattgtgactgaaacagtgaatctatagttgtagacagaattttgaaaccttgatctgttgacttttttcattntaatttaattcattttactaagcctggtattattaaaatttataactaaaactcttcaagttaattataaactttctctagtttactttgaagtggtaatgctctatcatacaacccctttactttcatttttgtccttttgtgtcatcattttgcttagcgaaattcttgcttagttgatattagtcactggattaagattgcatgccttcaaagatcatattnattactcccgtggctagaagaaacaaactcgtgtgacatggaattgttg

SEQ ID NO: 51511 - DNA, 430 bp, Glycine max
  unsure (1)..(430): unsure at all n locations
actaagcttaaccttagggtgtntaccatgaagcaccaactatctcttactttgttatggcactaaataaatatatgttagaaaaagctattagcgctataaagaaattgagttaagaacctgctgattggctattacataaagacataccaaagcatacatgggctatgcacacattagaccctcaatgctagaatgacaatgtaacatacaacttctgcgaagtgtttaatgcttgcgttgggacgattggaaatatactgtcctatcaatgatgcaatctataatttgtagattaatgacactttttgacaataagagagacaaggctgcaacttaccaatttactatgacccttagggtcaaaagtgtcttggaaataatttgtgaatacgggaagttttgagttgtcacacatggtggcgatgat

SEQ ID NO: 51512 - DNA, 501 bp, Glycine max
ctgtaccctctacgacgcgagatcctctagagtcacctgctgcatgcaagcttgaccaatcgcgacctcacccgggcatattctgtcagtgataacctgtgatgtacctatacatgcgagctcctggctatcaacagattaaatgatcttagaccacaaatcaatgatgctttgggtggctggccaccttgtaaacttgatagatatgggagatatgggctctggtatcgattaccaatggggggtaatcgatttcaaggcgtaaaaatgaagacaggaggctaaaatggtctctggtaatctattaccgagggcgtgttatctattaccaagcttgaataacaagtcatgaaaccatgatggcatttggagatctattactgtagtggtttattaaatatcgatgttaatcaagtacgagtcctattgttgtgtatagatattattgtctcgtaaggtaacggttcgtttggtatgattattagagaatcgtatcgtcct

SEQ ID NO: 51513 - DNA, 219 bp, Glycine max
tcccgacccaacccgggcatagtcggtcagtgttatctctgtgatgtacctaagcaggcgagctcctggcagtcaacagataaaaggaaaacaagaccacaaagcaaggaggcttgtggtggctggccagctgtgaattttgtgttatatgtggatggtggcctctggtaatcgattacaatgcttaaaatttatgacaggaggcttatatggtctctt

SEQ ID NO: 51514 - DNA, 473 bp, Glycine max
  unsure (1)..(473): unsure at all n locations
tctggtgggacatcttgacttgctntccaatctgacattcaccacaaattctgccttcttctattttcagattgggaatgcctctaacagcacctttgtcaatgattttcttcatgcctcttaagtgcagatgtccaaatctttgatgccatattctgacttcatcttctctggagaatagacatgtggaggagtaactggtttcttgaggtgtccataggtaacagttgtcctttgatctgctgcccttcattaggacttcactcttctcanttgtcaccaagcattctgactntgtgaagtttacattgaatccttcatcacacagctgactgatgctgatcaagtttgcagtcagtcccttcaccagcagtactttgtccagactaggaagtccatcatggactagctntcccattccagtgatctttcctttagagccatctnccaatgtcacatagctagtggagcaa

SEQ ID NO: 51515 - DNA, 521 bp, Glycine max
  unsure (1)..(521): unsure at all n locations
ttacctgggcatcgggatatatctagagtaatgaannaaaannaaggtanaaagtgtgtgctcttacacgccgcttagaaccgcagcggcacatgagaacaccacggggattttttctgaccgaaagcattggactgggcactagcccacagctgacgacgatttagaactttaaatctgtcttatatcaccctattgaaatcagttgaccaagcccgggctttttaaaatatatcaggaccgggccagacgtaaaaaactgtctctagtgaactgtgaagagagaaagctggattatacaacccctctactagcattctcgatcttttgagtcatcattttgctgagcgaaatacttgcttagttaggagtaggcactggataaagaccgcatgcctgcaaagcatatatttattactctcggggcttgaagaagcatacttaggggacctggatttgaagtatataaacttatttgggcccataataatatagtggttcactggactaagtaatggagg

SEQ ID NO: 51516 - DNA, 496 bp, Glycine max
  unsure (1)..(496): unsure at all n locations
ggacacttaaatctaagcttaacctagggttttaccatgttgctcccnctatctctaacagtgttatggcatataataaatntatgtttgaaaaagctattagtgctataaggaaattgagtaaagaacctgctgattggctattacataaagacataccaaagcatacatgggctaggcacacatttgaccctcaatgcaagagtgacaatgtaacaaacaacttctgcgaagtgtctaatgcttgggttgggacgataggaaatagactgtcctatcaatgatgtaatctataatttgtagattaatgacactttttgacaataggagagacaaggctgcaacttaccaatttactattacccctagggtcaaaagtgtcttggaaaaaattgtggaagatgggaggtattgtgttgtcacacatggtggcaatgatgagtatcacgtcaagaatgagattgctaatgttgtggtatagttgaagatagtattg

SEQ ID NO: 51517 - DNA, 344 bp, Glycine max
  unsure (1)..(344): unsure at all n locations
gaaacgacaactatattggatcccaaggtgcttttcttccaaaaatagacagtaatgtctccctataattaagaaaacgccgacttctatgttgtgaagttcacttaaatgatgtgctgctaagccaaaaaatttatcntngatgggattttgcactatacaatcatctttattctgaccacagtctggagttcacgtacaagatattactgatccaataatntataaacattcaattgaattatgctataactttgtgctcttaagaagcacttaattttcatatgtatgttgaggttcaactttttgctctattattatcaancaagaagatgaatattctt

SEQ ID NO: 51518 - DNA, 488 bp, Glycine max
  unsure (1)..(488): unsure at all n locations
ntgacaatctggatatagtgatcatggatttatgaccatgtttattttaaacatgaacatatcatatgtgtagaattacaatcgccaataatcaacatcatcatcatcatcatcatatcataaatcctcatttaacctcaacaaattgtcccatcactatcacttatcatgattcgttaacaccataaaccatagttaacatgtaccatcacaaacctcaacatagttcaaacatcaacatccatcatcataaaccaacaaacaatatggaatacattttatccatcaactatcacaaattatcatcataactcaatcaacataattgtcataatcgacatataccaacaaccaactaggccactatcatcacaattgacacacacagtaaccaactcagtcgcctcaaacattaacattgaatccattctataggtctnttcctattagccaccacataaacctncagcactagctngaaagcctac

SEQ ID NO: 51519 - DNA, 382 bp, Glycine max
agcctttaacatcaatattcatgcactctatgctggtataatcatttcatggttcccttagctatgggaggttatttcatgattactctggagctttcttaagatgatatgttctatatgtggatatctttctttctttacaactgaactagagggagtggtgttggctatttctatgctcattccaaaggttagggcaagctttggctggaggtggattcccttttagtcctcaaagcttttagtagttatcaatgtggctccttaagatttaagaaatgtttggatgaatactttattctattgtggcccatatggaatgtcgtgtctcccatatcttctgagatagtaatgtatgcgctgatcatttggctaattatgg

SEQ ID NO: 51520 - DNA, 463 bp, Glycine max
  unsure (1)..(463): unsure at all n locations
gcgtgattctccaccaacagacacctgtaaccttcaacataaatatatatgactataatggtttatttcaatcagatacattttgctctaaggacttttccaccattatcaaatattatactcttaatttctaaatgtaagtttcttttatatatggttgatatttaaaactacatttcttaagaacttaattatataacaaaatngtgtcataccattcattgtatcatactaatactttttcaaataaatctttcatatatatatatatatgtgtgtgtgtatatttgaaatttattcttcataatgttttataaaataatctatttaaaattctaatcaaacaacaaattggctntataccatagattttattatagtaatacctttcatcaaatctaatntcttaaatatgtgtgtgactcttactntntcagaataacatatttactaatgtttctaa

SEQ ID NO: 51521 - DNA, 319 bp, Glycine max
  unsure (1)..(319): unsure at all n locations
cgatcaacagactggatgatcaattattactgattgacgaacaaatatctgggttttgaaataaggaaatcaaaatcacttattttaaattatacaaagactaagtattgtaatgacaccagtattttccatgtcttattggaacatcacaacacacacataaagacagacgtanactaaacaaagattttgatttcaaggaggcagaaataaaatactacatacataacattcaaaagaagttgaacatataactaacaattctcattaattataaacataattggattggagatacaaataacatggaaaagaaata

SEQ ID NO: 51522 - DNA, 475 bp, Glycine max
  unsure (1)..(475): unsure at all n locations
tcaatggagcttacatcattgtcctaggatatattagttttacttttatcagatgttcacacatgtgtgcagaaggaagttggttaggaaccaaattggaattatatatgtgcagctgtggtgatgccaattttcaagtgtacaggtctctaatattgtgtgggcttggtgctgataaaaagtaaagatgaagggtgattatatgaaggctcggtggtgggttactacttactagggccttttattttcttcataaggtttaaggcgttaggcgttctttgtttatatcggcctgtagaatatatgtatttntgttttacatcaatgagtatgatagattaatntactttctaaagtgagctggtgatcacttatttagaagatcactcttatttattagtaagttattgataatagctaattatgaagttcatttgacgttgaattatatcaaaatctataatttgtttctcac

SEQ ID NO: 51523 - DNA, 372 bp, Glycine max
  unsure (1)..(372): unsure at all n locations
agcttcggcaccgttaaaggtaaagactctttctgtggccttcaaactntccaattggtcattcaagcccccaccattctgctccttcttgggatatgggcaatctctctaaatatgccccttttgtcaatagttgaaacaagtcgtgcctttatcagcataatttgaggaaatgtgcctggcttaccacatttgtaacaagtgatctgagttgagaaagaagtgggtttgctaccattaccaccagcaaaccccatagcaacagtcctctgattgttggggcgattaccatatttcttaagaggggttgagtacgattatccccgttgttgaggtccattctgtcttgtcttcattgagcctgcactccta

SEQ ID NO: 51524 - DNA, 485 bp, Glycine max
ggaagggcaaatggatacattggttaactgggtaacccatctggccttgaaccagaaatttgtacctgttgtaagggtctgtggtttgtgctcctatgctgaccaccatacagacctttgcccttccatgcagcaacctagagcaattgagcagcccgaagcttatgctgcaaatatttacaatagacctcctcaacctcagcagcaaaatcaaccacagcagaacaattatgacctctccagcaacaaatacaaccctggatggaggaatcaccctaatctcagatggtctagccctcagcaacaacaacagcagcctgctccttccttccaaaatgctgctggcccaagcagaccatacattcctccaccaatccaacaacagcaacaaccccagaaacaaccaatagttgaggctcctccacaaccttccctcgaagaacttgtgaggcaaatgactatgcagaacatgcagtttcaacaag

SEQ ID NO: 51525 - DNA, 248 bp, Glycine max
tcataagttatcacacggaggtccgagtcacgaacatcacatatcgagacgctcgataaggaacaactgaagccctttatatatagaaaaggccataacttttcactcgcatgtccttttcatgcgcataatatatcgagacgctcgaagttcacaacggaagctctcgagaaatgaaattggcttaactttcactcggaatccgattgggcacataacatattgaacactcgaaattgacaacagaa

SEQ ID NO: 51526 - DNA, 360 bp, Glycine max
atgcttctacatcaatcgagaagctcgagattgaacaatggatgctctcgagatatctaaatggtcataactgttcacacggatgcgcgattcaagcgcatgatatatagtgacgctcgagattgaacaacggaagctctcgacatattcaaatggccataactgttcacatggaagtgccattaggggacatgagatctagagacgctcgacattgaaaatgaagcactctagagatttcatgagagcatctgttgacaatgatgtgcggtctggagacataatatatctggaccctccatattgatcaatggaagcgatcatgataatctcattggagcatctgttgacacagatgta

SEQ ID NO: 51527 - DNA, 394 bp, Glycine max
  unsure (1)..(394): unsure at all n locations
agctnntgttcttttataaaaagagaagttctggactcatcacgttacctaaaaacctttgggtggatccaagtgctccgatcattcatttgcatatttatgttttggtggcatactcacctttgtttatttctttaggaaattcatcataactaagaaaacaccaaggcacccctatacactcgatccagaaaaatggataatgaagagggcgtgcaggaacagatgaaggccgatctatcggccttaaaagattaaatggcttccatctcggaggtcatgttaaaactccagaaaaccatagaggacaaagccacggcaaccgcctccagtacggttagggaagcggagccggtgctgcaacccgctttaaatccgggccgagatagaaaca

SEQ ID NO: 51528 - DNA, 479 bp, Glycine max
ggccctgaccaaggtggccatcgggttcatgtatcctctggtcttaactctctcgcctaaaaagctgaggagtggaccagcgtgtgggtggacagtgtcgggtgagacctcgagtctctggaaggtttgccagtacaggatgtcaacggaactgtcctggtcgacaaggaccctagacaccatgaggttcgtgatgacaatggagacaaccacaaggtcttgggtgacggggttgatgcccttgaagtctctatatgtaaaggtgataggagggagacttcactgtaagggtgagtcgacaaagttaatgtcgatgtcccgaatggcatccaggttgccatttcgggactagctggactgtcctccgtagaaaaagccgccatcaatggtattgatacacctctaatgtgttgggtgggttatcgttccggaggtctttattcgccatcatgccacttttgctggtgttttattcgact

SEQ ID NO: 51529 - DNA, 397 bp, Glycine max
agcttgaaactcgagggagggaggataatctgagactctattaaaagatctcaccttttgtcagttgtggaatgcacacacacatacacacaaacaatcagtacagataatgaaaatcatatgggcatacaatccatttgacatacctaagcaagctatcaaatatctttcaaagagtataatgcaaaagcttcatagcattcccggataatttcgctgttaaatgctgcatcataattcaatactgacaaaaactgcaccatacaaacatcagaacctacaaatgcattattacattctatttaaaagaagaaacaaaaaatgaaaagactaagaacttgattatcaattatgtacagatagctgaaaatgctagtattaatgcttgtagtactca

SEQ ID NO: 51530 - DNA, 474 bp, Glycine max
  unsure (1)..(474): unsure at all n locations
gggagaggatgcttcaatggagganaagaaagagggagataaagagagaggggggagcatgaaatngaaggaagaaaaagggagagaagttgaactttgagttgtgtctcacaagactctcattcatcaaagttataacaagtgttacacatgcttctatntatagactaggtagcttccttgagaagctntctngagaaaacttccttgagaagcttctttgagaaaactttcttgagaagctagagcttagctacacacacccctctaataactaagctcacctccttgagaagcttccttgagaagattcctaanaaagctagagcttagatacacacacccnctataatagttaagctcacccccatgccaaaatacatgaaaatataaaaaaaagtccttattacaaagactactcaaaataccctaaaatacaaggctaaaaccctatactactagaatggcaaaata

SEQ ID NO: 51531 - DNA, 411 bp, Glycine max
agtctcacgatagtcacgtgctcatgcatcaattgttagtcgtggctatacgagacatcttgccaaacaaagtcaggttcaccataactcgcctgtgctttttcttccatgctatatgtagcaaagtgattgatccaataatgtttgatgagttagaaaatgaggccgcaattatactgtgccagttggagatgtatttttcccctgctttctttgacatcatgattcacttgattgtgcatctggtcagagaaatcaaatgttgtggtcctgtttatctacggtggatgtacccggttgagcggtacatgaagatcttaaaagggtatacaaagaatctatatcgtccggaagcatctattgttgagaggtacattgcagaagaagccattgaattttgtcagaatactt

SEQ ID NO: 51532 - DNA, 563 bp, Glycine max
  unsure (1)..(563): unsure at all n locations
gtacagtcggtgcgtgtgagagtgttgantagattatgtgtggaggagggagggaaangnaagggctggacctgctgacacccgatcttaagaacctgcggcatgcaggctatggactctggagatgtgacacggtattttctatcgagactcgatagaacgggtaccctcctgactgtagaatgcgtagacgtgcggaagcgtatatactagggaaactctcttcaccaaatcagattcgaagcgcatataggaggccttggtcaggctcgtgtgcatagcgccatatggaccgattagcgcacagtagtgagggtaggcttaacgcgcctttctcgcttagcggatgaactagaacggtgcgcatagagagatgaatgggggcagatagcgagcctgtacgactggatcttcatgcagaggcgatcttgcgcttaggccatgagtggggggcgtagcggacgctcactaatggagcagattggcttagcgagaaggtgagaaacaacactttgtgaagcgggcctaatgacgctgaagggggagaatagatcgtacacacg

SEQ ID NO: 51533 - DNA, 515 bp, Glycine max
cactataatactaagcttcgggttgatggccgcaatggacatctatccccacatggtaatatgccaaggggtggacatgacatttagaggatgtggcggaacattgacattgttcgcgtatgcttgacatttatgacatttccttacatgggcgcagcaatcgctttccatagtgagccagtaataaccggctctaaggatcttcctggccatagcatgcccattggcatgtgtcccaaatgaacccccatggatttcctcaatcatgtagtttgcctctttggcatctatgcatcgtaggagggtcatgccgtggtttcgtttatataggatggtaccactcacaaagaaaccagtagccaatctccttaacgttcttttgtcattgtcagaaatccctggtggatattctttgttctcaacatattgtttgatgtcgaaataccacggtttcccatctcactcttcctctatcgtacaacaatgtaccggcttgcccggagatctgaattcaa

SEQ ID NO: 51534 - DNA, 473 bp, Glycine max
  unsure (1)..(473): unsure at all n locations
cttattacttctattntcttgcttagggagctcttttgctactagaagttgaaggctcaggttttttatatatgcaagtccgaaacatggtaaatagtcttacttgttcctaaataatgtaaaagattattttgcagttgcaaaattactgtatagttgttccacttttgcaatgaacctatctgtttgcttctccaggtggctttgttgcttcagatnggtagggaagctatccctcctgacattgtaccacatattctggcgagtcgagatcgcaaagagcttgcaaaatactccttgcctgcccctccacatggtctttgtcttgtttctatcaactataatgaaagtcacctattgcctccgccggagtccccccctgcaaacagtnttggtagacatcagaccataaggaaatgcaaggttccattctntttgtaataataggcagcanaacaaacaatctaactatc

SEQ ID NO: 51535 - DNA, 300 bp, Glycine max
  unsure (1)..(300): unsure at all n locations
ctgcaagctggttggagctgatgtaaccttattttctctttggntattaatcaattcattcaaagagactttcagagaagaaacacctgattgatattcttgattatattacaattatttgtttcacagatattctgattattttattattattgtgctttttgatttaatcgagggtacccccgatcggatcggctcgattttattttaactgtgatcagactagattactacacaaatgatcggttgaaattcattttgtcaattattatgcgagataacggcttatataaacaatta

SEQ ID NO: 51536 - DNA, 492 bp, Glycine max
  unsure (1)..(492): unsure at all n locations
ctcctccatatagggacctagatgagctagtccatatctttgtataagagtggagcaacaacttaaaaaaaatctttcttcaaaatcttatggctttcactctattctaaggaagaaccaagccaaaggaattttgggggttgcaccttcaaaacccaagaaagataagggtaagaccatagagaaatacacccctaagactagttcccaagcaaggactagccacattaaatgcttcaaatgtcttgggagaggtcacattgcctctcaatgccccacaaagaaaatcatgattatgaggggtcaagatatttatagtagtcaaaaggagactacttctttcccttcctcgagtggaagtgaagatgaagtaacggatgaagagtgtagtgaggaattctacccncatgaagaaggtgacctcctaatggttagaanggctcctggaggtcaatcttgtgatctatctcaatcctaaagagtgaacatctt

SEQ ID NO: 51537 - DNA, 472 bp, Glycine max
  unsure (1)..(472): unsure at all n locations
cactaacttaatntatataaattgtgtttagctnganaactgttttctatttntaaatttcaatgtctntgatcaaattaaacatctagtcaagtaatgccactttatataataaattctcattatatatttttataatttatttttaacttccttctctcccatcatttattttgtcacttnttttaaaaaaaatataagaactgttgtaaaaattgtttaagaggataatttttcttatttctctagtaaattctaagaattgttgtgaaaaaaatggtgcaagtaacatttttctaaatgcctagcgcaaaggctacttctgtggccaacttaacacaaggtttcccttntacgcaccttgtcctgacactgacagcacggtccttctacagtctncacccagcttaacacaaaactatggtggcttccaaagaatagaaagaagctcacactttcaattcacaaatgt

SEQ ID NO: 51538 - DNA, 322 bp, Glycine max
  unsure (1)..(322): unsure at all n locations
gagcttccttgagaagctagagcttatctatacacacccatggagaaactaagactgacgctgcgtagagaagctttgcttgagaagctagagctgagctacacacccctataatagctaagctcacccccatgtgcgaagaacatgaaaagacaagaganggcctactacagagactactcagatgccctgagatacaagctaataccctatactactagaatggccgaattacaaggcccacaataagaaaacaatctattctactatctacaaagaagagaggaccctaccttggcgcatgggctcagaaatctaccct

SEQ ID NO: 51539 - DNA, 432 bp, Glycine max
  unsure (1)..(432): unsure at all n locations
tggcattaatcataactattcagctccaagaactccccaacaaagactttgcttaacaaaaacctgttctctaaataatntttggcagatgccattggcactgcttgttacatactcaatagagtgnatataggcctacctttaaataacacctgtcgcaacctacccttcggcgggagggcgacgcgagactcgcgggatgcgtgttccacgaaaggaatacgcgcggagtcgccaccaacgtttatttgaggaaaacgtcggaaaaaccggataagacgtgatctacgaactttntagtgaaaggttcgggagttgtatttacgcacggggaaggtattagcaccccacacgtccgtcccaagggacggcagcctttaatcgaatgtgcaaacatgactntgatattatgttccctttatagtcttatat

SEQ ID NO: 51540 - DNA, 509 bp, Glycine max
  unsure (1)..(509): unsure at all n locations
gctggcctctctagcacacgggatcatatgagaccagctgcatgcatgccagctgtgctcttgatatcttcctcacattctttatctatcgtaagaacaatatacctgtgacttcatctatctgtatataggctagacgtgcacagctctaaatactacttctaacatctactcgtactatgatgatccccacgctgatatgggagcgttgtgacagctcctttgcacactaccatacagtccgagaggtgcacatgtaatgaggccagatttaccgcgctttttttgctaagccgtcgaacatgatcgttgcgctatgcgagcaaaacttgtggccttagcgagactcaacaaactatattctttctaaattttgctcgcacataagccatgagtgttgggctgcacggtctcatcacttatcagtacattgtctagcttagatgagaaaaaaacactgtggcagctaggtgataaacctcgaactagatcaaatgatatttagcccn

SEQ ID NO: 51541 - DNA, 493 bp, Glycine max
  unsure (1)..(493): unsure at all n locations
tggtcttaattataaanacatagatgcttctccaaaacactgctatgttgtattgggagatgatgaaataagtttggatgcttgtaagcattgtggtacatctagatggaaacccaacaagaagaagaaaatagctgcaaaggttttacgttactttccattgaaaccaagattgcaaagatggttcacatgtcgtaagactgcataagatatgagatggcatgttttggaagacaataaagatgggttgttaaggcatccaagagatggagaggcatggaagacatttgatntaatccatcctgagttttcttcagatcctcgaaatgttcgtttaggccttgctactgatggttntaatcctgctaggaccttgagttctacctatagcatctggccaattttcttaattccatataatcttccaccttggatatgtatgaaccacacttccttcattctatcaatgatcattccaggcaagcaatctcct

SEQ ID NO: 51542 - DNA, 410 bp, Glycine max
ggatcttaagtcaccgcggctgcagctatcaaattaatcaaggcttcaccatgtaataaatagaatggggacccataggagagagcaacaatcgattttgttgaaaaaaaaaagatgagtaatgccatatgcagacacatactgaaactacagccaaacaaaaaaatgccaaataactattatctcgcttgtaaatgaatcatatatcattggattcttctgtccagaattaaaagcaaaaaaccttctcgggtggaagatctatccccaaatttccacgtgagaggatgataccatccgcttctcgcaatatctcatcaaaatgtgtcaacccctatgagatattagagaaaaaagatgcatttcaaaatcactataaagcatacacaccaaacagtcttgaactacag

SEQ ID NO: 51543 - DNA, 469 bp, Glycine max
  unsure (1)..(469): unsure at all n locations
cttgctgatntagttntcgccgacaaaaggatcgatttgttgtctganaagaggcaaatntaatcatcttgcttggacgaatgagaaaactggggcaaatgaagagggtgagaatgaaggagaaacccatgttgcgactgtcgttcctacttggaaactcccccaccagctcaacatcattattacttagccaatatcagctcctctcattacccaccacccagttatccacaaaggccatccctaaatcaaccacaaagcctgtctaccgcacttccaatgacgaacaccacctttagcacaaaccaaaacaccaaccaagaaatgaattttgctgcgaaaaagcctgtagaattcaccccaatttcggtgtcctatgcaattcaatggtagccataaccccaaccaaggttcatcaacctccatttctctaaggatacaactcgaacgcaatgtgtgcttatcatgg

SEQ ID NO: 51544 - DNA, 303 bp, Glycine max
acatccctatggactgagcgaaaaggctctggtcattaaagactacgcatcttttaaagcacaaatcaaggattaaaacagcgaaaccctaatcccacattctttaaaagattgcgacgagaaaattatagaggacaggatatccttgcgggggggaaccacagaaaacaaaagcatgtggtgacttctttaattgccccaagtcttaagcgtagtatcgcttgacaacgtcggagttcacgggtgaaggtagttcctcgtcatccatgttggcgagcacaatggtccctccagagaaagccc

SEQ ID NO: 51545 - DNA, 491 bp, Glycine max
  unsure (1)..(491): unsure at all n locations
ngtaggaatatggngtacccatcacatgtggtactaggtggcggtcgggcgatggtgcacaacaagttttcctcatccacaatgcgcgcataaacccaccatcccctgttgcccaccgccaactgagctcacgtactcccacgcagcccatatcctcgtttctctcaatactgggtccccatcaatcctcccaagcttccacaacatccaagaaaaacaacattcaaacagcacaagctatcacagccaagcaaaacagagcaaaggcagaaaactctgctcaacacaccaaccaaaatcacagcttttctcacttaaagaccccagtaacaattccttcgatccaattcgttaaccgttggatcgactccaaaattntactggaagtctatagtacataagcctacattgtgaccgttgggatctactagtaaacatccagaactcattctgcactactctttccacagccaaccacacacaagcacttt

SEQ ID NO: 51546 - DNA, 409 bp, Glycine max
  unsure (1)..(409): unsure at all n locations
tcttctctgggttcttcgggggaagatgatgaatgggaaacagtggggccgaagaataaatatactgttacaaggactcaaagctttctcccatcagaattaagtggtatttttggaggacaacttanaagtttggtgagactaaaggtacaaaacaactctataatatattagtgaagggattttttttgttttaaatgtcaacttcattaagattttgggaaatttcatttgaccagtctgttgcttcgtgctgatattcttcaaagaaaaaatgaacatgtaaataaagtatgtattatataaaaaaaacattatggccattggcacgatttctttttgtcatttaagaaatagagcntctgctactgttcaaccatatctctggctccatcttgacatctatcct

SEQ ID NO: 51547 - DNA, 493 bp, Glycine max
  unsure (1)..(493): unsure at all n locations
aatctcagctatattatggtnntattattctaaatcatacggttactatttaatgatgaatatttattntattaatcttctgactgtacatataaaactcattagtcatttattaaataatatgtaggattttttttcgttttatttgtttctttttccgttttttataggtgcatgatatattgaaagcctagaaggaccagaaaaaaaataaaaaggcccaaaggcatacaagcacttgactaaaacaggtagcccaagtccgaatagttcttacttggtgttaaattgttaatgtacaatcgcaggaaattaatttttatatttttacgtgttgcgccactctaattntattttaaaaatgagtatagtgtatgcactaatataaagggagtttataatgatatttaatcacaaatgatcatatatgantaaattattaatttttactataattaccttaaaaagtatgcttgtcagttgtcataatttc

SEQ ID NO: 51548 - DNA, 345 bp, Glycine max
tctattagaaccgcctatcaccatcttttagaatccatgatttgtgatgactctttaaatgtgaagggctattggttacaaatatggaagctagtcatcccaccaaaaatcaagcactttttatggatgcttctacaaaaatccttccaaataaaagctcatttcaaggggagtaaattgagaatctctttgttggtattgcaactcacattttgagaatgacttctaccttctctttttgggtgtatgcaagctcaacatgtgtgggtagcatctggacttttgcaccaaaatgaaagtgcgatttttcaagctaaaaactctattgaattaactttccctctc

SEQ ID NO: 51549 - DNA, 472 bp, Glycine max
  unsure (1)..(472): unsure at all n locations
tgtatgtgttggatgtagggcattgccatgagtgagtttcgagtgtacaataggttctccattgtggtacaacatgagacaatggacaataatcctttaaaaaaatcattatcatatcatacatacaaaagatgaagttagcaaaaaaaatcaatattatcttacaaagataaatgatatgtttaatagatattatatacttgcacaaagccattttcattgacaagtccaatggaaatgggatgagactntgctagcaagggactcttaagtggaaagaagggtgaactctacaacctagataagtggaccaatacaacattatactgactagcaatgacataacctatgttgggaatggtcatccacatctcataggacactggactacattctacatacaaagagggtattaattccaatagtctctcttctgaggcaaatnatngaacatagacagagtggtatgtat

SEQ ID NO: 51550 - DNA, 487 bp, Glycine max
  unsure (1)..(487): unsure at all n locations
tgtaaaattcatttattgtaaattcaaagccattattagttcatatggttntaatcttgttgttaaaatgagtttcgacatacgtggtaaaggctataatgtgttctcgtgcttcagctnttgtgttcataaggaaaatccaagtaaatcgagaatgatcatgaactatggtaagaaaataacgatgaccatgcatagatatctntgaacatggcccccatatatctatatgcacaagatcaaaacaacataatgcatgtgaagtgctagaaggaaagggtaatttcttatgtttcgcatagtagcatgtgttacatacaaaatctttattatgcttcaagaaagggtaggaggattgcatatatcgtaagcgctcaaaggaagggtgtcccatgcgaaaatgccaaaggtcaatgggtgtgatggtgcattgtgngtgagtaatagcagtctgcacagaaggtttagttatatggtttgggatgag

SEQ ID NO: 51551 - DNA, 460 bp, Glycine max
  unsure (1)..(460): unsure at all n locations
atactcaagctngtgtctccaataccctgatgaggatgtcccatatgttcttattactagactgatccattagcttccaaagattcatggccatgcaggtgaagagccgcacaaacatatgaaggaatgccatatcgtctgctccaccatgaaacccccagatgtgcaagaggatcacatatttctaactgcctttcctcattctttagagggagtggccaacgactggctgtattaccttgctccactgaccatcacgatctgggatgacctcaagagagtattcttacataagaatttacctgcttccgagaccatggccatcacataggatatatctggcattagacaacttagtggagagagcttacttgaatactgtgagagatntaatatactatgtgccagttgccctcaccaccagatttctgatcagcttcttctccaatcattatcctat

SEQ ID NO: 51552 - DNA, 312 bp, Glycine max
  unsure (1)..(312): unsure at all n locations
tattccttgcatccgttgtgttctgtatttcattntcaaaattgaaccttgaacttgaatgaatatctccagatacctagtttagattctaggagagcagattgttcaaggcaaattaccccgaaatttgggggagttgattgggatgtaaagtatatggttgagcattaacacacatcacgcataaattgtgttgaaaaaaaggaccattaattgcaatccacgataatgtgtgctgttgttatatggtgaaatgcaaattacagtgaaaagttggtgagaaagctcattgtattgaaagacatatttgga

SEQ ID NO: 51553 - DNA, 367 bp, Glycine max
  unsure (1)..(367): unsure at all n locations
gaagtttgctcaaagactaaatctataatcgtcatggatatataaatcaatgcttatagtctttttctctcataatgttcaaagtgttttgagaggtttttaaactatatagaaagtccagttgagatgtcaacattaatttttaaccatcaacatatcaatttggatggtaggaccaaaatcattgattntttaaacaagggagattaaatgtctaaatttcaaagtaggaggatcataattgcaaattgaaaaaaaaaataggaagaccaaaatttcattntagccctaagagaatagagggagaaatcttttggataattcttacaaaatatattataataaagaagcacttctcatataaata

SEQ ID NO: 51554 - DNA, 490 bp, Glycine max
  unsure (1)..(490): unsure at all n locations
tactaagcctgcatgattacattatcccctatctcaagcaaattcttaattcttcttgacatcatcaaaatcttcatgatttacaagtgcttcgaagacactaagattgttagttgttggtccaaatctcaatgttccaacttgtaagggatatgatatcaatcactattatttctacataaagtcacacgatgaaaaaagtagcctgcagaacagtggagtgagggttggcataagttattataaaatgacttgtcaaacaatgtagcaaaacatctttgtgcttggggcaatgacgcagctagtgaggttctaaccgaggtgcatctattgatggttgaaatctatttccaaacctttcttatgcctgngttntagctcaagcccaggtaaagtgcaatctagtttcaaaaatagttttcaaccttcctggcgtttgagaaaagctcctttctccaaaaagtttattacttcattacagtaaggcaat

SEQ ID NO: 51555 - DNA, 482 bp, Glycine max
  unsure (1)..(482): unsure at all n locations
taactagatggaggatgcccactaaatactaaatttggtatatctcaagtcgatgtgggattaaaccaccaaaccaccaccttcaaggctgcacttcaagcaacccccaaagaggctacaactaaggcaggctaaagtgtgtccacaattaagacggcctttccaacactcccctcacacccaggagggttgccccccacttatatactgtaattntgtcatatctctagttgatgtggaattaaactactaaaccaccatcctcaaggtttcacttcaggcaacccccaaaatgggcacaactaaggcgggttaagcggtgtccgcaattaaggcggcttttccaacaagaatcttggcatgttagatattaatgcttaaaattaaaataaaaatattgcttagcatacaatcatagttatcaaactcgagagtaactcgtaaatngcgagttacaagtcacaatcatgtccgagtaactc

SEQ ID NO: 51556 - DNA, 494 bp, Glycine max
  unsure (1)..(494): unsure at all n locations
atggatagagtaaagtgtggttgagatgaaatttagttgngagggaangagagctgaccttgcacaccggatcttaagcacctgagcatcagctggacctatctcacatggatgttttttgcttnctgaaggaccatctgagaggacatgtacattgctcaccattggtggtttggcatctgaccagcctccaggtgcgtggataaccctactacaagcttgatagattgtcctggctatggcgtcaccactgagaaagctgacactgcactcttttatttataaaaatgatcatgttatggctattttcttgtgatgtaaatgatcgcaacttacaggaaaaaatgtgtcggagactttaacacgtactgtttcaacaactgtttactaaaaatctgcgaagtccgccccccatttctaggatgagatgtggctcatccagggatgctcgtccccacatcattagtctgaggtcttggcacctcaaatgtaga

SEQ ID NO: 51557 - DNA, 482 bp, Glycine max
  unsure (1)..(482): unsure at all n locations
ctcggtgacgctgaagcatactatctagttcttgagtcagcaagttaaaaaaattagaccaaaatgaaagtcattttgggttgttttttatctgtttagtgttcaacataccttcattatgtatatgagtagtggttggccttcccgatttcatttgggaaaggcacacgttgtaattgcatgcatgtaaggagttcaaagtgctcgaaattgtccgcaatcacacagccattcattcaatttgacatgtcatacctttatctttcttagaatgtngagttttggcctaactcaaccccaaaagctagctcaaggggtgagggtttcccctcacttatatattctaatttgtctctatctctagccaatgtgggacttggnngtgtttcaacnacacccctcagctcaacacttcttgagcttaatgtgtgaacaacaatagtgggtgacccttttgaatggatctatgatgggctctgatc

SEQ ID NO: 51558 - DNA, 494 bp, Glycine max
  unsure (1)..(494): unsure at all n locations
ngtgacctttcgtacncaggngtcctataagtcagctgctgctgcagctttgtgcagccatggcanatgttattctacacggtgatagtgatcggggaagtgcataatcatgatatttgctagccactcattggacatctcattacggcactatagactaatgcctaataaaccctatctgttatataacgaagttcttggggaaaccaaaaaacatttgttatctttgaaagaacccaatgtcattagttgcctgacccttatacagatctacagtgcaagaagcgatttttgttcttccatatgcgggaacgaccttaaaatgcaacatctggtgacacttctagacgataccaatattttcattggtacataatatacgatgaagacgtgnttcataatagacaacacctacaaaataccctggacaaactttcactgctcgattctgtgtggggacaccgaccgggatgacattctttacctgactttcg

SEQ ID NO: 51559 - DNA, 480 bp, Glycine max
  unsure (1)..(480): unsure at all n locations
ntgatctaccaccaccaccgccaccatcatcttagttttctattatgtttaatattattagtaccttgatttctagccgtgtatttggctatattattatgacatttgaacaatttagtatttcttttatttgcatagtatgattgaacaattatgaattatgttatatgactatgtggtttttatatatttgatctattcatgtttctggcttcatgattggtttagattttttcaatgaatgtcttgtgaatgattagtaatgtatgtatgttttatatttgttgcgcactttggctntttgttgatgccaaagcgggagagaaataggaatcaaatcaagaactcacataagtaattaacttaatttcaagtaagcataaactcaaaaacaaagggggagaatatggagaataaagtgagtgatcgactaggaaaaagaatgtgtatgtgtttcttgatttcanggttgtcatcatc

SEQ ID NO: 51560 - DNA, 393 bp, Glycine max
  unsure (1)..(393): unsure at all n locations
aagatgaaacgacacataaatcatgtttttatgcgatgtattcattctcttgaacacatgattgattgtatnctgtaaagtggtatttagtaggtggagattttgccaattggaaaacacaaatgaagaggcttcttcataattatttggttatctaactttattccaacaagctgggccaggaggggtaacatgatgtgcatcatggggtgcatcaactgatgatataatggttcacaccatcattgcctattcttatgccagaaatttcactcttgctccttcanacatcactacaactgctggagggtgggtggttatgaatgctaacaatggtagagttgtatgggcattactcaactctataatcagcattgttcatggcctgttttt

SEQ ID NO: 51561 - DNA, 468 bp, Glycine max
  unsure (1)..(468): unsure at all n locations
actaagcctgacagttgtacctgtnattcgataggattgcttattttagctgcttcttttttcttgcctttttcccgagaatgaaccttagcgtaacagtaaggttgcttctttatgaactctatctcacgaagttaaatattggaaacaacccttgtactaagtggagtaattataattaaggcagcatataccagtaattattatcttataggtgtaagaagtcttaatcattggatcattctttcttgttttttcttctttaattcgtcctttgtaatccgagttatcatctatttggagtcgctaacttggtttttgcaatgtgcattaatctagctagtttcattattctcttaaatattntactgcatgtgagcatgtctgtgatacctatgaattattaccccggtataatgaatctgatgatnattggtgtataactatgactttgacaatatggataga

SEQ ID NO: 51562 - DNA, 402 bp, Glycine max
  unsure (1)..(402): unsure at all n locations
ccgcccagctcgcccaggctatttttttgcttcctcgaaaagcaacagccttctggaggaatcttctggaatgtccaagtgggcctgattgatatttacacccccctgtttactaaatgcaccccctctctatttttttgtaattctttttccgtaacgttacgaaactttcgaatattgtaacgatacttattttccttccgcaaggttacgaatccttacggattatgtatctactctttttttagctttcgaagaagttacgaaaactcacggattgtgcaaaaatacctcttttcgatctccgccacattacggatatttacggaacgcgcaagcctgcttccttttgatttctgagacgtctcanggacttttttattgcatgtcatcaagtaataa

SEQ ID NO: 51563 - DNA, 371 bp, Glycine max
  unsure (1)..(371): unsure at all n locations
ctgaagctctatggcatcgtggcntggtgaattgaaggaagaattgtagagccgttcaactttgagatgtgtgacgcaataattggatacgtcagcggtacaacaacagttgctcatgctcctattcatagcccgagttgcatccttgaggaagtcacttgagaagctttctgtgagaagcctcctcgagaagcgatagcttacctgctctctcactcttgatagcgcagttcaccgccttgagaaagtcccgcgacacacattgctagagaagcggaagctgatcgacccacacccgctctgtagtgagcttacctcctcgacacgagagtgtagagcttatcgtcggacagtgcatcattacctcatat

SEQ ID NO: 51564 - DNA, 295 bp, Glycine max
  unsure (1)..(295): unsure at all n locations
agtcttctgctcctctaacataacacacaatatctatatcatacaatggatgnaaaccacgagggcggacatgtaagcaaacaacactcttgcatactaagcacaagactatccacttatctcataagaaggaccaaacactgtcaccaagcctccctggagaggatgatctcacataagcgaggctcatgaggacgacaactgggagtgactgccacatacgaagacatcgtacaccaactgaaaaagtatagacacaatgcgctgtcacgaataacaaagagaggcatgagga

SEQ ID NO: 51565 - DNA, 488 bp, Glycine max
  unsure (1)..(488): unsure at all n locations
cgctgggaatttaaccctccagcataaccaaacgtgatcctttcagacacccacatgcacgaatgcaagagaaactcttgtttttctctttggggaaagcaaaggaaacaaaatgagcaaaaacgggtgtctcaaaggtgagagtacgtgcacacacaccttcatcgctgagaggtgaagcaaatgaagagactaatagcacaagcaccgttgccacaacaagcagcagaaggtgccttctcatatataaataaataattaaattaatattatttaattgatttttatttgatatataataataataattattataatttcacgttacagtaggaatacttgcacatttgataagagaaaataatcatttgatccaatgatttcaaaattcatttggatttttaatttattntagtcttatactttnttatntttgcaaaaagtattgaattaattgtaacatatataanaaaatttaaaaaaaaaat

SEQ ID NO: 51566 - DNA, 108 bp, Glycine max
atgctttgacggactataccaagctctattatccagggacggagaaagatctatttatacgctcgctgaaggtagagagaggaagactagagatttcgatcacgcaaa

SEQ ID NO: 51567 - DNA, 370 bp, Glycine max
tcgttgttcaatctcgagcgtgtcgatatattatgtccttaaatcggacatccgtgtgagaaggtatgacctttcaaatttctcgagagcttacgtagatcaatttcgagcgtctcgatatattatctcccccaatcggacatacatgttaaaagatatgaccatttcaatttctcgagagcttacgtttttcaatctcgagcatctcgatatattatgtagcctaatcgaaaatcagtgtgaaaaggtatgaccatgccaatttcttgagagcttacgctgttcaatccgagcgtcttgacatattatgactgcgaatcggacatctgtgtgaaaagagctgaccattcgaatttctcgagagctttcg

SEQ ID NO: 51568 - DNA, 312 bp, Glycine max
agcctatccttattgatgaggtgttgtttatgtctgagtaaatagacaaatcattcatctctagaatatgtcatatttctttaaaacgtggtttataaagatcaaaacatcttcaaatcttggctctggctcacaacagatttttctttccctttcatttggtcaccaaaaaatcacacgtgtgttaacgtcacttaattattatcgatcaaaacattatcatgtcctgatttgatgcaacacacgtttgattttatttcttctttcatttactcaccaaaagttggaacatatatcatcgtattatattag

SEQ ID NO: 51569 - DNA, 428 bp, Glycine max
  unsure (1)..(428): unsure at all n locations
tgngtgatgttgcgcgtactgatgggtaccatgatgtgtctgcggnggtttgacccatgcgggcgttgaagagacagcatgggtatctccttccttccttnttgcccccgttgtcccgatntctttggcattcgcactcgtgaaggaaacgtaatcgaactttcctcttttcaatcctaccttgattcttttcccggcgaacactatgtccgcgaagctggacgacatgtaacctactagcttctcataatagaacactggcaacgtgtctaccatcatagtgatcatctctctctcgaccatcggaggagccacttgtgctgccaggtctctccaccgctgtgcgtattctntaaaggtttcgccctctttcttgaacatattctgcagctgagtgcgatcgggagccatatcggaattatactgat

SEQ ID NO: 51570 - DNA, 489 bp, Glycine max
  unsure (1)..(489): unsure at all n locations
ctaagcttctaaataattatntattaacattgtagatgagaaatatatgtttatactattacttaaatcaatgattgatactggctagtagattgtcttttgagagactcgattgattaaatattaaaattaacaatgtgctgagattttatgcacagttttgaaaactccagaagatttctttttttttcccgacaagtggtggccatgccagtgaagaccagtttccatttcaaattgaagggcccttatactttcgaaaactagagccgttgatatgccacgtaatcttggacactttgtggaattgagccaaccacgagtctaaaagcatttaataaaaaactaagtttagttggctctaaattttgttattatttcattgtacgatattgggaccattttgatcgcgtaaattgtaattatctgagtttaatattcgtatcttaaaatatgtaatgttgttatttacttcacattaacattaat

SEQ ID NO: 51571 - DNA, 505 bp, Glycine max
  unsure (1)..(505): unsure at all n locations
ggtgctcgatgaccctagatggccatttaggcgtattggtgtaactcttngaatgggcaaagcggcgtcacctttggcaccgccgttgtgaaaataaacaacagcacataaaaacttccataagcaaccaacatgcaagaaatgaaacaatattccagctgaccaaaatgaaacaactttcgttctaaaacacagtaagcatgcatgtaacaaaacctcatgtgcggttgaagaaatcagccaaatgaaaggaaaacttgaaagcactgaggaaaatgcataaaaattatagcttaccttatagactatctcgtaaaactctgaacaatatcagaaatatgagtttcaggaaaaaatagcaaccaagtatccaaaanaaccacaaaaaatcagacaaaaaaaaacataaacactggtntaataaaatcaaaatagaagaatctctatcttcctcttaacttctccaacaacttctttgccaaagctggccgtgttactgtagtct

SEQ ID NO: 51572 - DNA, 410 bp, Glycine max
  unsure (1)..(410): unsure at all n locations
tccgtnttctattncgagcgtctcgacatatgacatgactattcttcttccgagntaaaagttatggtcttgtgaatattcacagagctcttgtattcaatttcgagcgtctcgatatattacgggactcaatcaaacatccgagtaaaaagttattgtcgtttgaatttgctcagaagatcggtattcaattatgagccgctccatatattacatgacataatccgacatccgagtaaaaatttattgtctgttgaatttgctaagaacatcggtattcaatttctagtgtctcgacatattacgggactcaatcgcacatgcgagttaaaagttattggcgtctgaatttctcagagcttctgtattcaatttctagcgtttcgagatttactggactaatccgacat

SEQ ID NO: 51573 - DNA, 304 bp, Glycine max
atcactcggggagaagcatatcccagatcagctgagacggaagctatatatatatgtgaacgaatgatcttactcggatatcacacaactggaggctattagctatacgatcccaaaagttacgataaaatcaacagcagggaagcgggatttgatgaatctagaagcggagactgggagctgaataccgaaacgaagggaccttcaataataatcacgtcagaagaggaagacacaagtgaaaggaatgtccaaaccacccaaagagaagtgagaccccagagaaatgcacccaaaccaccta

SEQ ID NO: 51574 - DNA, 485 bp, Glycine max
  unsure (1)..(485): unsure at all n locations
ggttntaaaccatatatagatatattaagcttgcattctctttgctcgccactataagaggagaaaccttcacgttgtttcatataaacctcttcctctaaatcaccattaagaaaagttgttttcacatccatttgttgcaactcaaggtcaaaatgagcaactaatgtcaagattatacgaagagaatctttcttagatattggagaaaaaagtctctttgtaatctattccttccttttgagtaaatcccttagcaacaagtcttgccttgtatctctcaatgttgcctaatgaatcccgtttggtcttaaatacccatttacatccaatgtcctttgccccattaagcatctctacaaggttccaaaanttgttactgtacatggaattcatctcatccttcatggcatcataccataaatttgactctttacaactcatggcttgatcaaaagttttatgatcattttcagttacaatat

SEQ ID NO: 51575 - DNA, 465 bp, Glycine max
  unsure (1)..(465): unsure at all n locations
ntgctgctacaccgtatggagctcaatagattctatgattttgagaagagtacacggganacgaacaacatatatcacgtacctacattggatttgcctaaattgaacaccaagattagtgcgttatctggcttactctatctttctggtacacgaagatggttatccttctctttatcttggatgaattcaatagatcgtactaaataacttaaattaaccaaaaaatagcttgtctgttgaattgtatcatttgaattccattctatgtcttgggtgattcccatatatagtgaaaataaggtattggatattatgtatcgcatattattcatatttagaaactaaacgtaaaataaggtgttattaaactcacacgcatgagattaaggaagggatgaaacatatgaactacaatnggtatcatttttgcagatgactttaccaactactttaacatttgag

SEQ ID NO: 51576 - DNA, 513 bp, Glycine max
  unsure (1)..(513): unsure at all n locations
aaggggttctgctctctagtacgacccgngatactcagagtcacctgcaaggcatgcaagcttgttgtagttagatgttatattatatttgcttgaactcattatctgagagaagctaatgtaccctttttgcagggatgtgcaagattaaatataatttaatgttatagtgctattgattgaactagctgactttttttggtaattgggattgcaagtagtgaggtacctaagtgacaaacagctcggaaaagctttggaaggtgcagatgttgttataattcctgctggtgtgcccagaaagcctggaatgactcgtgatgatctttttaacatcaatgctggcattgttaagacactgggtactgctatcgctaagtactgccctcatgtgagtgtctagttccttgaggtgcctttcattagatctgagtttgacaatagatgcagcttgctggtgacactgttcgtttgctctgactttggatgtggaaagcatatactggcctgggg

SEQ ID NO: 51577 - DNA, 433 bp, Glycine max
  unsure (1)..(433): unsure at all n locations
tgtaatcgattacacacataatgtaatcgattaccagagtagnttttcagagaacattctcaacagtcacatctatttatctgtttctaaaatggccatcaaaggcttatatatatgtgacttgagacacaaattttacaagagtttctcagaacaaaaaaaggtcttatcctcttaaaaagcaaaatcgttctatcctcttacaaattccttggccaaaacacttgtgattcaataaggaattatttgagtgctcaaattgttcaatctatctctttcaagagagatttcttcttctcttcttctttattctgaaaagggattaagagattgagggtctcttgntgtgaaagaattctaaacataaaggaaggattgtccttgtgtgtntagaacttgtaaaaggaacttacaagaatgtggaactctcaag

SEQ ID NO: 51578 - DNA, 359 bp, Glycine max
  unsure (1)..(359): unsure at all n locations
actaagctntanaagattggctaagattttgttaanacataagcacttagacaatgaaggaaagctggagttgctgcacatgatgtccaacgttatgtcaaagaataagatcgggctgcacaatgcacaaggcaagatgaaatgtcaaatgaagaatcgaagctgcaggattcacgatgtcggatacaatgtccaggacatcctgcccganacactggaggtgctgtacaatgtacaatgcaagataaaagtcaagtgaagaagtgaaactgcaggatccacgatgtcggatacgatgtcctgacatccggcccgataatactggacatatgaatctgttatatctttaacagattatt

SEQ ID NO: 51579 - DNA, 343 bp, Glycine max
  unsure (1)..(343): unsure at all n locations
tttattgtttctgtcactgtatcattatattatacttctgtcagtcgactgctgcagctccaaaacatccctataactgatatcacatactattatattaaggtatcatgaaatttccaacctgtgtccactaatttttcatattaaggctcaatggtattaattnttcatattaagtcatcactcaagaacacattggctgcagtattggtacttggtgaatgagcacacctgcaatctgaatagaaagtggtttgactggacataanattatcgttgtacatattatangagtattccatctgtcctctaatttgataatgtgaaaaaattcactagtctg

SEQ ID NO: 51580 - DNA, 429 bp, Glycine max
  unsure (1)..(429): unsure at all n locations
aaggatcaaagtgggcctggaaaaaggtaaatctgaccatcctgctntgatgaatgtgaaaactgaggcaaatgaagagggtgagaatgaangagaaacccatgctgcaaccgccattcctatacggccaagtttcccaccaacccaacaacatcattactcagccaatatcaacttgtcgcaacgtgtgtgacatcctggaaatttctacccggaatttttggaaacgatgtattttgaatgattatatatatatatatatatatatatatatatatatatatatatatatatatatataagtattattcagtgtatatgcatatangttcctgcgagaagaagaatagtgcggcaagatcgcgggtatgctataaagaagagaatcatactggaagtataggtaattctaataattagctaaaatcn

SEQ ID NO: 51581 - DNA, 441 bp, Glycine max
  unsure (1)..(441): unsure at all n locations
agcaagagttaaattctaaatctacaagagtgtctatgaaagttacgagaatgtctatgtgaagtacgagagttaactntgactagctccttgtcccaaccagctttgcatacaaattcctcacttgctctactataaaaccctccatttatagttgatgatcctccaagaactgttcctctcaaaggatacccttggaactaagccactaccaattgtacgaggaatgacatatattctgcttggtgaatatggtgcatacctttaatacatccagtattattaatgcaccttcaaatttaacttaactaatataacgatgggttgattgatttaattgtctaaattctaaaaatcacattaaactactttcaatcataatgatctgcaacttgaataatatgctgatgcacccaagcatgaatctgcactcctacttgg

SEQ ID NO: 51582 - DNA, 397 bp, Glycine max
  unsure (1)..(397): unsure at all n locations
tatattttatagtttaaattataattaattgtgatgcactattactatacaaaaatttatattttcaaccactcataaataatctttgactaattttgtattattcaatactttcttatatctaagactatttttttcatttattattntataaatattaaaaaattataaaaatatatagtagtatgaaataataaatatattggtcaaagaaacctttgtccattaaagaatgcagaatagtgaaaaattgacaattacttagctaataaacctttgatttaatataccaatataaatttcacagtcaaaccaaacattaatgttacccgcaatatttcaaagtcaaaatactgtaattaacggctgttcaaagaaatacaaattctagtattat

SEQ ID NO: 51583 - DNA, 304 bp, Glycine max
  unsure (1)..(304): unsure at all n locations
cacgaactgncactagctggagaatgtgcatcgattaccacaagatgaatgaagccacaaggaaggatcactttcccttacctttcatggatcanattgtggagaggcttgcaggacangcatactaatacttcttggatggatactcanggtacaaccagatcgcggtggatcccagagatcaggagaagatgacctntacantgccttttggcgtctttgattacaaaaggatgccattctggttatgtaatgcaccagccacatttcagaggtgcatgctggccattntctcatatatggt

SEQ ID NO: 51584 - DNA, 560 bp, Glycine max
  unsure (1)..(560): unsure at all n locations
tgccccnncnnnnnnnaattattgaatncatctagtacccgncatccttatagaagacctgccgcatgcaagcctgcacggatattacatacttactacatcaacatggngatgggttgactccatcttgtggatgncttactactctagctacatcctagtataaaatcttacacctacatagggatgggcacataccacgatatgccgacactgtacaaactataagcatcttatgcttcatgagaactgacaacaacatgtcctgttgcttattatcaccggaagccgatatgctctctgtaatactctaggtatgctacgactgagccgactattaatatggaggcctaggctgcaacactggtgtgagcagctagacagagtgtaaaggagatggcgactcacgcttcatctcatagagacagacagagagcagtgtacttcataagacatatgctagcgctatctgactctatgagatcatctcgtgaggtgcattctcacaacccacctgcnatctatatccttctcggataccgtctcagagtatatgagan

SEQ ID NO: 51585 - DNA, 174 bp, Glycine max
tagagagaagtgcactctcagttgtgtctcacaagactctcatcgatcaaaatcacaacgaggcgtacctcatgtttctatgggtctactagggggcgttccttgagaagtcttcttgggaaaacatccttgagaagctagacggttcctcacacacccccgtaattactaatc

SEQ ID NO: 51586 - DNA, 305 bp, Glycine max
  unsure (1)..(305): unsure at all n locations
gcttatctggtgtcccattaacagtgctntcatagaaaagtattgcatgccaaggcaagcacagtagcagggggaggaccaacagcagtcagccgcagatgcaccgttgccacctctacggtagccaccatctctactcacatgcggaggatggagctccagatgcatgcatatgtgcagcatgtgaccgactagtangcagccaatcatatgggtcaggtgcagctgaatgagagctttaaccagtacaccctgcatcagtagagccaagatcccagccctttcccatggcctaccctcaagca

SEQ ID NO: 51587 - DNA, 361 bp, Glycine max
  unsure (1)..(361): unsure at all n locations
gtcacagtctttagatttgggagccgatcacaatcttgttttcggactcttagccacttatgatagccgccgatgatcccattactggttgccctaagctctctgtcctttcttcacgccgcattccatgccttgcgaacttcttggagtaccctcgcgttatggtcactgaaacctcgcgcgatgaaaggcgtgatgctttcgtctaatggcgctactctcatggggtagccaagctgtcttatggcgaggacgggattataattaatacaaccccttgttcccatcaagggaacatttggacatnctctcgatgaagatggaatcttgaatcttccttccttctagcgagggaaccaat

SEQ ID NO: 51588 - DNA, 383 bp, Glycine max
  unsure (1)..(383): unsure at all n locations
agcttgaagtgagacagtgtggaagattcaatcttcctacttttatttggtgaccacagagtggtacctggagatatgtcgcggnggttaggagaccttgtggacgtcaggtggggtgctattgcccaaaaccaagcttgatcaatcccgacccatcccgggcatagtcagtcagtgagaacctgtgatgtacctaaacaggcgaactcctggcagttaaccaataaaagaacacagaccacaaagcacggaggcttgtgtggtggctggccagctatggatcttgagtgatatttggaatttggcctctggtactcgattaccaagggtgtgtaatcgattacaaggcttataaatggagacaggaangtgagatgggctct

SEQ ID NO: 51589 - DNA, 337 bp, Glycine max
  unsure (1)..(337): unsure at all n locations
agctngagatgtggaagtgctgaatgttgaaacttcctgctcttattggtgaccacagagtggtacctggagatatgtcgcggnggtcaggagaccttggtgacgtcaggtggggtgctattgcccaaaaccaagcttgaccaatcccgacccaacccgggcatagtcggtcagtgagaacctgtgatgtacctaaacaggcgagctcctggcagtcaacagataaaaggaacatagaccacaaagcaaggaggcttgttgtggctggccagctgtgaatcttgtgtgatatgtggattatggcctctggcaatcgattaccaagggtgagtaatcg

SEQ ID NO: 51590 - DNA, 445 bp, Glycine max
  unsure (1)..(445): unsure at all n locations
nttggatcgtgtgcgccgtctcctagcagctgcgctgcagctacgagatcagatgatcaagagttttgtgattacaagatgatgaccaaagctcaaaagtagaatcttcatgataccaagatgatgatctcagaatcaagaatgagtccagaatgaatcagtacacttcagggatcagaggaaagtgattcagtatcagaatcaagttcaagatcatggtccagaatcaggtcaagatcaagactcaagattcagaatcagagagactcaatcagatagtttaaaagtttttcaaactgagacatatgattttctcaaacctttacaagagtttactctctgtatcgatacagagcaaatgtttcaaaacttcaactgattacacatcaataattcaaatgtgaatcgatcaagtttgtatcactacccggttgatgtgacccct

SEQ ID NO: 51591 - DNA, 427 bp, Glycine max
  unsure (1)..(427): unsure at all n locations
tgttaaagttgtgtgatgatgaaagtgtagttggatcctctgctgcggttccaaactgagtactnggtggagatgaactgcataatagagatgacgagagagtgtgcatggcgatcaccacanagctattgatggatgttcaaaccctntgcaacaagtgctaagtgaaaattaagacctaattttcttattactcctaagtataacgctcaccattaattgacttcatttactgtttgttgtcaatggtgacaacaaagtttgaacctaagacatccaataagtgtagcttattaattgcacaccttaagtttatggacaatggactaagttccatctctataatatttctcggaagggacacaagtttaatgaactaactttggccaagatagttgataaccacctaaaaaccagcttgtgagat

SEQ ID NO: 51592 - DNA, 429 bp, Glycine max
  unsure (1)..(429): unsure at all n locations
gagtcgcctgaggatgcagctaggtactgaacgaagcaatctatagctgaccctattttggtcatacaacaataatacatttgagtataaacatttattaatatctttcacttcatattattacttactattatattatcattttttttctcttttatttctttctctttctctcanaatatagactacgtttggtagcgcagcccataagagatgggatgaattgagaaaagtgaaganatgtgaacaccttaagaaacataaaccatttggtgcaaagaaaagtaagataatagtcaagacaaacanagtgggtggattccacagccagaactctttcctctaagatgtgtggatttatacaaaaatatatcttctttcggtatcttatctggtgaagcattcttacataaaatatcttccccatag

SEQ ID NO: 51593 - DNA, 340 bp, Glycine max
  unsure (1)..(340): unsure at all n locations
ccatggtatgcgcaggtcacactatggttataccactntgggaacggngactggaagatgtttcccgggaccaccatggctaattggttggcgatgagagatggcaagagttccccatatgtcattgggatcggggcgaagatctgtgcctgccttggcgaaaagttccttgctgtgtttgcgccaaagtgagcatttgtggtcgggtgaggccgagtcngagccggtgcccgaagagctcccccctgtgggggtgtgggcgcccttggttgggtgagtgttgtatcagaagagacctcagcgcgagcttgaagacttgggtgatgttgcgcatattggt

SEQ ID NO: 51594 - DNA, 318 bp, Glycine max
  unsure (1)..(318): unsure at all n locations
tatttaattcattctattctttgccgcaatgtcaggcattttaatcatggaggatttgaaagtttgcctgtgaggccattaattaactcctacatactntgtggagtctagtattaatatatgaaaaagcaatcatttgaaaaaactcacattaaaaactatccaaaataaactaaccttagcctatgtagattntatatagttcatttttagttacaagctgagaaacgcactaattctatgttaaactgtctaaaaggtcagttcacaacttcatatattcaaaatgagtatcacgcagaagctgcatagtgttcc

SEQ ID NO: 51595 - DNA, 338 bp, Glycine max
  unsure (1)..(338): unsure at all n locations
attttgtgggtactttctaagctcattagcttttccactagaacaagagttcacttctgttcattctcacgtttgatagcgaaagtctatgttatttctttctctctctataaatnggtaaaatgttttagggtccatgttatgaatagacagtccacatgatcttatttttgaaccatgacatgtattagtttttaaaataactttaattaaatcatcctataatgtcttattttatagaaaccccataatatcttctagaaacaatagatctctcatcttgtgagacataacagtataatatagcatgttctaataactaacacataaatcaaaga

SEQ ID NO: 51596 - DNA, 311 bp, Glycine max
  unsure (1)..(311): unsure at all n locations
ttcgagggtctcgatatattacgggactctttcggacattctaganatcagttattggcatctgtatatgctcagagcatgaacattcaatntcgagcgtgtcgatatattacgggactcaatcagacatccgagtaaaaagctatcgtccgttgaatttgctcagagcttccacattctatgtcaagcgtctcgatatattacaggactcaatcagacatccgagtaaaaagttattggcgtttgaatttgctcagagcatcaagattctatatcgagcgtgtcgatatattacgggactcaatcagaca

SEQ ID NO: 51597 - DNA, 437 bp, Glycine max
  unsure (1)..(437): unsure at all n locations
gaaactctcctgctttattgntgaccacagagtggtacctggagatatgtcngcggggtcacgagaccttgtngacgtcaggtggggtgctattgcccanaaccaagcttgaccaatcccgacccaacccgggcatagtcggtcagtgagaacctgtgatgtacctaaacaggcgagcttctggcagtcaacagataaaaggaacaaagaccacaaagcaaggaggcttgtggtggctggccacctgtgaattttgtgtgacatgtggattgtggtctctggcaatccaatacccaaggcggccctttctcttctattgttattatcacaacaagaggtcacaggccttctctctcggtcaagcgtggcctttttatacccaagcggttactcttgagtatcgctccccctcacctctatcctctgtttcttatccc

SEQ ID NO: 51598 - DNA, 242 bp, Glycine max
  unsure (1)..(242): unsure at all n locations
catgagccaaccatgttgggatcataaacccatttctaaaatgaataaagtaaacacaaacaacataacaaaatgattgagcatggtacctaatgcgtggttaactaagaaaggatgtctcttcnggcatctcaatctcataattacantttccatgcatagcatgtgtattcccgagtctttcatccctatgaaatgttgctgaagtatcggcaatcaaaattgctattccctgcgttatg

SEQ ID NO: 51599 - DNA, 390 bp, Glycine max
  unsure (1)..(390): unsure at all n locations
caagcttcttctacaagtccatttaaactccaaatctcaccaaagtagctcattcttcctccattatcacaagctggtcaagaggaaaggagacaacatttccactcctttttaaagcttttccaagtgatcttgagcccttcttccatcaagcttaggtgaatgacctccattntcacttctaagcttgatttttacttcattaccttgctctattctcactcgtagattcttatcttatttttgcactattgaaggctagaaactagaacctatactccttcattcttacttctgaatttcgtggagattactagaggtagggggtgcctacaaaaatgagttgttggtcttgatttttatgccaaaatgagtttgtgtgtaaaacat

SEQ ID NO: 51600 - DNA, 463 bp, Glycine max
  unsure (1)..(463): unsure at all n locations
agctntgcaagtattgcaagagggtttaacaactaggtgcaactcaggcacacaaagaccttgtaagaaggataacaagagtagaaaaaatgattgatcattgttgatgtgatccttactaggagtggatcgcttgatacaagctacaaagtnttggacgacgccacttcctgatagggaagataagtcaggtagatgccacaagaattaccttgataagtccgagattggttcagcgaggaacccatagagaagttctcacaaatttttatcagaggccaaaagttccttcattgaaaacgaaaaccaatacatatagtgtatctgaacaaaaagataaaaatagacatgggccttcaaaacagtctgcgccaaaattacaacgacaaaaatatataaatgacnataagaatatattgacatgggccttcaaattagtctgggcctttagcaacaattaata

SEQ ID NO: 51601 - DNA, 447 bp, Glycine max
  unsure (1)..(447): unsure at all n locations
aatggtggttctcgtgggtattgggtgagccttggtgaagtttgaagaaaatggnggaagttgtgggtgaaattggcttcatccnnccccccctgtttatttntnttgtcagaccatgctcgcccaagcgagttgaatnttntttttgcaaagttnntttgttatatatatntcccttttaaaccttattaattatgtataagcttaggcaaattcatgagataattcaagaatataagtaagtatgaaacatgaaatttaagagcaaagttagagatactagtttgcctcctaagagtgcttttttaacatctttaaccggacgcatggtggtgattgagacattgccatctcatcctctctaaccacactgttggtacgattaatctgatcatgacttagcaccttgtggacctaccctattgcttgatcaataaagtgtaacat

SEQ ID NO: 51602 - DNA, 221 bp, Glycine max
  unsure (1)..(221): unsure at all n locations
agcttatgggtcatttctgtattggatgactcctaccatcgttccttctgttgaattcatggngtgttctcttttcgatagtgctccattgaatgctggaatcattatcacagttcttactagattgaagataatgggagaacctgttctgctgatccccgaggctctatcgactatgatccatgttaaggtctcctatgaatcgatcaatacctttttgc

SEQ ID NO: 51603 - DNA, 308 bp, Glycine max
  unsure (1)..(308): unsure at all n locations
gctttaaccttgacttggtagaacctcttgtcggntngatttgttcccatgcttgctaaagagagacaaaagctggtgcaaatcaaaactctgatatctcatgggtcgaatggatgaatgcatgaaggaatgcatataacacagatgcaatctatgaatgcgggagtccggtgaattcgtccccttcttagacacaacgtctaggggtagcatagtgccccaacgtacgtttttaagaaggcaacacggaccctccgttggtttgtttacacatgggatcaagacagaacccatatgcgacgcctatg

SEQ ID NO: 51604 - DNA, 303 bp, Glycine max
  unsure (1)..(303): unsure at all n locations
ctaagctgagtgaggaaggggaaggtgaatcttctgctttattgtgaccacagagtggtcctgtaatatgtctcggtggcatgagaccttgcggacatcaggtggggtgctattgcccaaaaccaagcttgaccaatcccgacccaatctgggcatagtcggtcagtgagaacctgtgatgtacctaatcatgcgagctcctcgcagtctacagattaaatgaacatagaccacatagctaggatgcttgtggtggctggccagctgtgaaactngattgatatgtgagatatggtctctggt

SEQ ID NO: 51605 - DNA, 374 bp, Glycine max
  unsure (1)..(374): unsure at all n locations
agcttctcttggaccttgaacaagcaatcaactcctctntcagaaccctgctatgtgctcgcgactggtccctttcttcccttcgcaacttgagttcattattgctaccccatagagctccgcgaaatttgttccggccatactcttccttgcgagccctcttggtctcttgttcaagggctcttgcgagaattgcattctcttcccgtaacccggcacactccttccgaacgtgtgtagcagccaacttgaacttctccttggcgagttttgcctttcctaactcgcttttgagagctnggacttcttcggcctcttgcggtgcttcaaaattntcttcgctgacgacttttaactcggcgagccaatctaaa

SEQ ID NO: 51606 - DNA, 423 bp, Glycine max
  unsure (1)..(423): unsure at all n locations
tggcgatcagaatngacattccttggattatatggttgaaccaaactcatgcttttaccaaaagggtcatcaagtcaaagtgaaatatggaagttaccgtccctgcaaattgggcaaaagatgaattgagtcacaatactgccttgtctacttgcaaacatatttangattgttgatgtcctctgttacttcagtttcacccttgacaaagatgtcattgatcatgttgaaaatctaaattgattcaccccatatcctgcgtaaaattccaatactcaactatcatcattcgcatacatcatgctttcattggtgcattgtcattgcatcttccttgaaaataaataaatagatgactcatcattgttaaaaaaaaagacccttacacccttacgactctctgactgaaatgataacaagagt

SEQ ID NO: 51607 - DNA, 227 bp, Glycine max
  unsure (1)..(227): unsure at all n locations
agcttgccacccagctcgcccaggcgagctaggttgcttcctccagaaggcaccgccttctatggttgctatntgcacccctccccctttntactaaatacaccccttgcctttttttgctaattctttctctgtaacgttagggaaacttacgaattacgtaacgatacttgttttcccttcgtaatgttacggaaccttatggattacgtaatcactcctttttt

SEQ ID NO: 51608 - DNA, 395 bp, Glycine max
  unsure (1)..(395): unsure at all n locations
gctgcttggaacagctttatcatctggagaacacatatatacagcattagactcctattacaatgcttatagccatattatttgggatcatatattgggacattgggctgaaaaggtatgtgaaagccaacaatacattgacataaataaataaaatgatgtgaaaatggaattcacacaaatttatcaccaagtaggttaatcatcactagtaaataatgaaaatcacaggaggtaagaagcagatctnttcaatgctatgggttcaatgtatgctgcagttaacctcattggagtgcaaaatggtgcctctgtgcagcctataatagcggtagagagaactgtcttctacagagagagagcggctggaatgtattcagcttngccatatgcac

SEQ ID NO: 51609 - DNA, 582 bp, Glycine max
  unsure (1)..(582): unsure at all n locations
tccctctcttnncccctccctnccngttcccnnncatctcgnactccnncttcacnntctagagcanncnnnnnnnnttatgctgatccctgcatctctnatcnancgacgcatgcagcttggcctttatttccaaggaactatgtacactgagaaagtgctcgacagcctgctggaagcacgctaagacatgatgtcattcccaccgacgacagcacactatgtaacggcaacatagattgcacgctatccctttcgtcctatcctggatctgtgagaacaagcgtaagatgcttagaacctcctgccatactctgagagatgtgtctttgcacctcgattgcaggtcggcgtcttctttgagagacaacgaactaatcttgggcagcagttgtactccgaaatcagctgcgtgagtcacgacgatggagattcactcgagcgcgtgcgagattcttgctccagactcgtagttaggtactacacttcactccgtgcgaacacttacacaaatcctctgccctgggacagagataaaggcttctaatgccccgttcgacatatagctccctcagccgcccg

SEQ ID NO: 51610 - DNA, 280 bp, Glycine max
cttaatgactgagctgcagctgacagccgcctattaagcagaattatactgatcatacctattatctataccatttgtatgacattatgaatgatacgacgaaaggacatacagtgcttacaagagtcacttgcatgcggaaaatcttcaaaagaaaaagactcctgttataggatattataccagataatacttcccagacaaatgttctgaaagataactcctgacaatctaaatatttttatttggctgtattagtaataatcatctctaatccatt

SEQ ID NO: 51611 - DNA, 326 bp, Glycine max
  unsure (1)..(326): unsure at all n locations
tactaagctaacggacggatagtgagatgagcacttattgtnactntttgtgaatggtacggtagaaaatagaaagaggaaatttatgtctttctctacccaccacctagcagagtgctacatatgcacatgttcaaacattntagctgcgtatacgtaagaactttttactaatcgtatttggtttgcttgtgaattgattcttctccgataatatataaccgaaacttctgtccggtatgcgaactagatagaaattgtcatcattatatacatatgctnttgattttcaaaacacattctgcggtaatgactattcaacttat

SEQ ID NO: 51612 - DNA, 112 bp, Glycine max
actcaccttgacatccgtgcataaagttattgtcaattcaatattctcagaacttcggatctaaattttgagcgtctcgatatattacgggactcaatcagacatcctagta

SEQ ID NO: 51613 - DNA, 306 bp, Glycine max
  unsure (1)..(306): unsure at all n locations
gagtcctgtaataaatcgagacgctccatatngaaaacggaagctcatatgaaattcaaacgacaataaaactttactcggatctccaattgaatcgggtaatatatccagacgctcaaaattgagactagaagctctgagaatatngaaatgccaataactttatacaccgatatccgggggggngccgctatatatcgagacgctccacattgaatacggaaactcttataaaatacatacgaccataagttttactctgaagcccgacagagtgcggtatttatcaagagatgctccacattg

SEQ ID NO: 51614 - DNA, 409 bp, Glycine max
gtgattaagaataccatttgtatcaaacaaatattgtttgtgaaagctaggagtgacttagtgacaaagaatatttgggtcttaatctcagggggagattaagtgtagtgccagaagtggcctaaagagtacttgttatagctagaagcggcatagagaatacttgattgtaatcaaagaattgattagtggaaccctctaaggtttgaaggagaactggacatagcccaagagttgaggtgaaccaatataaaacctgtgttttctttactgtttctatataactagttcttttctataagttactcctacactactatatccaagtttttgtgaattagtttctaagcacgacgtgattttaaatcccttagatgaaacccatcatccactgaaaaaagatttaaaa

SEQ ID NO: 51615 - DNA, 264 bp, Glycine max
  unsure (1)..(264): unsure at all n locations
agcttattaggtgtaaactcagtttcggcatttgtnagttttttntttttttactctgntctctcttctgagggcgagccctggtgcagcggtaaagttgtgtcttggtgactcgttggtcatgggttcgaatccggaaacagtctcttctactattttttttnttatgagtctgtgttatcttttaacaaaaagatagtttggaattaaatttaaaataatatttatntcagttgcgttttccctgattatcttattttggat

SEQ ID NO: 51616 - DNA, 395 bp, Glycine max
  unsure (1)..(395): unsure at all n locations
agcttagccgaattcagagtgaattgaagttagcttagctcaaccttggccagcttagcggacaaaatcagccttagatgcaagggttgggcgctaagctcttaagacttacgacttagtgcatgaacaaagatgcgcttagtgcgaggattccgcttagcaaaaagactattcttcagaaaaatgttttctatattattnttcagtcctttatccaagaaattgaaacccttatgttaaacattcaaagataggttgatatactcctatgtacagatcagacaacaagttccaaatgattaaatgcatgagaaacaaagataacaaaaattaaaaactgtggtgcctncaaggaagtgattcttaacatcattagcttgacgctcttacctcac

SEQ ID NO: 51617 - DNA, 226 bp, Glycine max
actagctcaaatccaattctaatccagtgattgttcatatgtggatgcccttgcttgtactattcgattccggagcaacctatttgtgtatatcttgctcatgtgtggagaaacttaaactcagtgtgtcgtccttcgatgatgatctcatggtagagacgccgattaatggttctaatttaactctcgatgcgtgttagaattcgcctatagtagattctgatag

SEQ ID NO: 51618 - DNA, 342 bp, Glycine max
  unsure (1)..(342): unsure at all n locations
agcttctagagctaagattatttaattattaataaccaagttnttaagttaaattgagggttcttgcgtgagtagaggaacaaaataagaccattaaaaataaattaaggactcaagttgagttctagtattagagcgaaatattaataaatgttcttacatcctatatgaaaaaaataaactctaagaaaaattaagatactaaattgaatgttctaatccatcaaatcaaattgactgatatcgatatacaataatatgtaagagactaaattgattagttcacaccaacttattaatgaattgacttacacttcttaatgcattaaatactctatttgt

SEQ ID NO: 51619 - DNA, 334 bp, Glycine max
  unsure (1)..(334): unsure at all n locations
agcttaanattgagcacgagatagagtcaagcatttttatcccncatctaatagtggttcaatccggactagcctgcanaatgacattgacaaggcatttagtatatgcaagtattgcatcagatctcgggattttagtaaattcaatattataattaagacattcagaaggcttaaaatattatacagacgtgtttcattatattggtaaaccacgtggagcattatttaggaaatataaaaaacactattgtaaccgctttttttataaaaaaatgcttctaagcctctaatttgaattagtcaaatcttgactaaattcaatatcaatatg

SEQ ID NO: 51620 - DNA, 74 bp, Glycine max
agcttgcttaagtatgacatgttatgcacttaactgagataagtcaatgaaatactttctgtccctctattgac

SEQ ID NO: 51621 - DNA, 401 bp, Glycine max
  unsure (1)..(401): unsure at all n locations
agcttgcaatccaaaggtaggaaactgagcgaatccgcaatcctgtgtccctgagaagaaccacttgaaaaaaccccacatgaaactgatggaaaaatacttcaagaacccaccaacttgcttcctgaaatacaagataattaatcaactcaatcattatctntaattaaatgattaattattaggacaacttataatccagttccttaactgttttttgtgttgatttttccagccagaattgaagttttacttcagtaacctgtattaatccttaatactacaaaactattataactctaactttaattggtgtaccaatatcaaaattacaaattatcatatcaattttattntaaattaanaagaacaagaatnttgatgactcaatgagaggagta

SEQ ID NO: 51622 - DNA, 297 bp, Glycine max
tttttaaatttccattttcaattaactgaatgcatgcagctataactttacatcaaacatttaactttttgtggtgatctcaaaacataatatgggtacccttaacaattaagtttgtctgtgaaacgataacccagacttttttaaaagaaaatttatctgaacaaaattaagaacaactgccttgtgagttatataaaccaacttatggtttccattttggatgcataagtactaacattaacttgttgtgaatatatcatattcctttcttaattatcaaatgaaaaaaatgga

SEQ ID NO: 51623 - DNA, 265 bp, Glycine max
  unsure (1)..(265): unsure at all n locations
tagaattcattagtcaaggcaagggtgtttggttttgtctttatcgggtacccaaattgtcgtcgagcgagaagcgggttgtagctaatttcgccacgcatacccaaaagaggtacgttgcgatattcaccacnacctcgcaataatctctccaacatcactagctgcttggtaccaaacaatgtcagatgggtcaagagtcatgattcggcgaggccaagaaagcttatcatcattggtcttgaggcacgggattgggtaagtg

SEQ ID NO: 51624 - DNA, 100 bp, Glycine max
  unsure (1)..(100): unsure at all n locations
gttgatagtaattgtagctctactcaaagtaactctgtattgaagctactagaaaagttttaccttgtatcgctngttaaagtcgctctccaaaaagcaa

SEQ ID NO: 51625 - DNA, 256 bp, Glycine max
  unsure (1)..(256): unsure at all n locations
atggtccaagatcttccttctcgcctcttccatttttttgttgaaattgctcttggagggaatggaagaaggatatgctgcttctctctagaatcacctgcatacaaattgtaggaacttacccttacattttgccatcatatctttctggagtagagtgaggttgggcaggttccattgcggatgacgaagatgttgctggttgagggccttgacactgccttnccgacctcaatgcaatgacacctcacatttt

SEQ ID NO: 51626 - DNA, 313 bp, Glycine max
  unsure (1)..(313): unsure at all n locations
cagcttgatcctttttctacanagtggtttctatcctgttggtttcatagaggatgtcttagntagagttggtgaactaattttccttgtntgattttatgttctgaatatggaggagggattttctcaaggatcagttcccatcattcttggcagaccttttatgagaactactagaactaagatagatgtatatgcaggcacactatctatggagtttggtgttataactgttcattttaatattcttgatgctatgaaacacccatctgaagatccttctgtattccgtgctgatataattgaccatatt

SEQ ID NO: 51627 - DNA, 337 bp, Glycine max
  unsure (1)..(337): unsure at all n locations
tagtaaaacactgtgtatgtgtcttctattattgtaatcatctcttccttcgccattgtcgatgccactttgagtgccaagtctttccatctttgggcatattcgaaagattgtgcccctttntgcacatgttctataagtgcatcctatctagagccatatcacgaatgtactgcctaacgaaggcaaccattatgtccttccatgaatggactccggaaggttccaagttagtgtaccacgtaacagctaccccagtaagactttctnggaatgaatgtatcagcaattcctcatttttttgcgtatgcccccatcttctgacaatacatcttta

SEQ ID NO: 51628 - DNA, 381 bp, Glycine max
  unsure (1)..(381): unsure at all n locations
agtattattatacatataactaaatacttatatgggtatggctttctattgtaattgatgttcatgattttgtagtgttattatgacatgacctcanaagttattgttatgttggaattacagaatattattatttaatgagatcgtgcactgagatgttgtatgtattgagttatgagctatgaacattgcaatcacacaactgttagaccctgtaagggcgacgagttaatacgtgacgagcttatgatgggctccatagtgggaacccgacgagtctaatcacttgaggcatgatgagttaatacaattctggaaaataattgtaattttgaaccacatcgagtgactctgactgatcttcttatgatctcacttaat

SEQ ID NO: 51629 - DNA, 323 bp, Glycine max
gattattatattatagtttacctcttttgggttccaatgtggttacggcatgaccgaacggtccgatttattttaacagaaataacggattttaaaatcaattatggctaaattatttatttttgataggtgagaaatgacttagttaataactaagcacgtcaataggggatggaagtaataaacgaaatatagtccgaacgatgggaccacaggtcatgatgaatgaaagtcatttcgactaccgtgacacgaaaaccaatacgttgaatttccaatacccgaactacgaaccccgatgattttacgacatttctctattt

SEQ ID NO: 51630 - DNA, 317 bp, Glycine max
  unsure (1)..(317): unsure at all n locations
agctnntggcanaaggaagatgaagaagaatattaagaagaagaagttcaaagagattcaaggcttgtaaaggattgtaatagattgattggattgatagaaagattgattgaaaatgcaaaacanagccttgcttttatagactcttcatgtctggccaagggtaccatttagaagagttataacttttagaataacttaaaaccaatttgaaaaagtcaaaaaccatttgaagagttacatcttttgatttattcagaaacaatcactggtaatcgattaccaaatcagtgtaatcgattacacaaagcttttat

SEQ ID NO: 51631 - DNA, 374 bp, Glycine max
  unsure (1)..(374): unsure at all n locations
gctgtaggatatggcgtacccatcacatgtggttctatgtggcagtcgggcgatggtgcacaacaatgtttgcacatgcacacatcgcgcataatacaccatcctctgttgcctacctccgactgagctcacgaactcccatgtagcgcatattctggattatctaagagcgggttcacatcacaactcccaagcttgctcgacatccaggtaattgaacattcaaacagcacatactaccacagccaataaaacagggcacaggcagaaaactctacccaaaacaccaaccaatatcaccgntgtttctcacttagagagcccagtaacatttactttgttccaattcgatcaccgttggatcgactcgaaca

SEQ ID NO: 51632 - DNA, 445 bp, Glycine max
  unsure (1)..(445): unsure at all n locations
acacttctctacaagcttcanacacttgtgtaatcgattacgatcaacctgtaatcaattaaaacaaagagttntaactatagaggaaatcttctaactctagaacttttcttctaacccctacatgatgatgcatgatgcacatatgaaatgatagagactaagatgcaacacacaatataacaatcaatacaaatgccactcaagagagttgggcatgtaaaaaataaaacatcttaaagctcttcttcaagcttcaaggctaagttttcatgttgctcctcctatctctaacaatattntcatggcacacaacatatatatatatatatatatatatatatatatatatatatatatatatatatatatatatatatatatatatatatatatatatattaaannggagtatattactttcaattaaagccggtgtctaccg

SEQ ID NO: 51633 - DNA, 433 bp, Glycine max
  unsure (1)..(433): unsure at all n locations
cttctacataatagctagtagctgctataatatnngttgcttactctaggacagatntcctacgtgtgtaaatgatntgattnttgtacaatacacaagcccacatgcatacaattnttccctaaaagtggtcttggctactatcatggtatctctcgatttgtgactcagagagtcaatgtaaaaaattgcaagtttcaccttcatccttatagttatttatgtccaaaagacatgtagttcaagaagctattcactcaaactatggcatgtatctctatcggagatcatcctataagagaacaaaaatattggtgacacgcttaatgattaaaaaccttgccatgtgtgaccatggcaaatctcattagaactattatggaacagtgaaagtcttgattatctataactccaatcttagaataggaaaaat

SEQ ID NO: 51634 - DNA, 377 bp, Glycine max
  unsure (1)..(377): unsure at all n locations
gctataacagtcaaagcatgctttcagtgtctctacctctattctttaagacatagtaacttactttaatctcagtaaaaagcgtaacaagaattagtaagacagattcgaccagactttgtactgtccataatctgtgtagcctgcttttggacctttcttatcctttnttttaagaatcacaattctgtgtgccaagcgtgatctgttctgcaccaattgtactttgctataggcttatgcacgggaggttgatgagcataaacgcacattgcttttggttaataaggcagatcttttacctgtctctatcaggttcggatgtcctattccaatgagttctatactgtatcaaaccattgcccttggtgttgcat

SEQ ID NO: 51635 - DNA, 330 bp, Glycine max
tgatcccctgaaggtacctcaccacgttctgtgtaactatctctgtggttaatacctgagatactctgatatcttcctaacattccaactgcataagcaatgtcaaaccttgtgcacacttgagtatacatgagactcccaacaacttaagcataaagaatgtttttcatttgttccctctcaaagtcattctttagacattgtatcaaattaaacctatcacctcttacaatgggagcaacacttggtgaacaatacttcatttgaaatctctctataatctcgttatataagttcttgtgaagaactaaatacctcatgtctatcctt

SEQ ID NO: 51636 - DNA, 368 bp, Glycine max
  unsure (1)..(368): unsure at all n locations
agcttgcttgagaagcttctatggaggctggatctttaagcttcaatatggtccttcaatggtgattntcagccatggagttgcagtgaaagacaaaggagaagaggtgagaggagacaccatccactagagaataagccatggaaggagaagcttcaccaccaagaaagtgtcttggataagaaacttagagaggaagcttcaatggaggaagcgaatgatagagagagagagagaaagagagtggcntggaaattgaaatagaatagggagagaagttgaactntgaagtatgtctcacacagttcttattcatcaaagctatgtcaagtgctacacatgtttctatctatagcatggcacatggg

SEQ ID NO: 51637 - DNA, 327 bp, Glycine max
agggactcattaggtaccttacttgtcctatagggttctcaagtttaagggagctttggatagattctggagatcaattcataggtttttgtaagcttttgagagaatagatgagttagatagaagctcatgataatattttcttagagatttagggccatcaaaatttacctaatcttcctagtctaattcagacccctcagaagttgtatctgccatcagacatatgttggcttgttcatcgggcaaggtgtcatctaggtgctctcatgtactcataagacccttgtcttgtttttatcttactcttctccaaatttggacatt

SEQ ID NO: 51638 - DNA, 321 bp, Glycine max
  unsure (1)..(321): unsure at all n locations
agcttgaagtggtctccccatctccacctctgattatcatctctgatttcccatctagagaaactgctgctccccctgattcaccagttggagaagcaacttatccctctgattgcccagttggaggagctgctgatctttctgattcctcatccggagnaagttgtgctctctttgattccccaatctttccatctgatagatgaggaggatgctcagactctgttgatctctttgattataactatattatagtttcagtacattggtttttagtgattntggctaatgcttattttcaagcatttagaacacattgac

SEQ ID NO: 51639 - DNA, 225 bp, Glycine max
catttgtattccattcttaagatcttctattcctagcatcctacacccctcattttaccatcagccaaacaaccaaattgcccacaattgacatattcccatttaacaccaagaggcaaattccatgaagctgaaactacgatgaatcttctgtgaggagagagtccaaattaaacaatgcccaagttttgggacaaacctagccgtaccttttttaataggggg

SEQ ID NO: 51640 - DNA, 410 bp, Glycine max
agcttcttagtctcagatgatgcagctgagtttgtagctacctcatgcactcctctaatgactatggcatcatttctggcgctaaactgctgagagttggaagccatcttctcaattaaatttctggcttcagcaggagtcatgtctccaagggctccaccactggcagcatctatcatacttctctccatattactgagtccttcataaaaatattggagaagaagttgttctgaaatctgatggtgggggcaactagcacatagtttcttaaatctctcccagtactcattcaggctctctccattgagttgtctaatacctgagatatccttcctgatggctgtggtcctggaagcagggaaaattttttctaagaatactctcttaaggtcatcccaactcgtgat

SEQ ID NO: 51641 - DNA, 385 bp, Glycine max
  unsure (1)..(385): unsure at all n locations
gtatatgatataagtgcaacacttaaattcctgtttgaattctctgcaacagttatttctctacagctccctgctgcaatagttacatccgtagatcatacatcccacggcttataatgacaaaacaaggagtagtattgtttgatttgctcgctagtctggtgtgtatgggtggtggaaaagaaagcttgaactaacgttacttaaattaataactatattatattatataataaaacatcaaattatttatatatgtatataaatactacattaataacattaattaaacactaactccatacttgtgcttaattctatttgacttatataaacaaatgttctttaatttcaatgtgattactntagaatatgcttttttatt

SEQ ID NO: 51642 - DNA, 164 bp, Glycine max
acaccactcacactcgatgtattgctttcctgctagcaaccttgtgatcaccatttgcgtgtcgagcaatgtgcaacgatttattaaatctttctcccaccttgctcctgtctctccccatcaatcccttgtcatcgactgccattgacttatacaaaatactg

SEQ ID NO: 51643 - DNA, 420 bp, Glycine max
  unsure (1)..(420): unsure at all n locations
gctacctggccgtttacaacctaataaatatcaaaatgatgttctgaaacatattactggcatgagactattttaacgatcgatcaggagtttcatgccatataagcagttaaagagacctagctactcaaactggctagttccatgtgcatggtgtcaaatgccacanaattggtgtgtattgatcaattcacatactccttttttttcttttgtagacaaaaccatgtattacacgaaagaaaaattaaaataagattatgaaggtgattcaactctaattagtttggttaattatcgctttaacttcaatgatgttatatcttacatacaagcaaacaaaataataaataaaggtagtccatgtcgattttgacaacgagtggagtataatctaatttataatatangaataaatac

SEQ ID NO: 51644 - DNA, 400 bp, Glycine max
  unsure (1)..(400): unsure at all n locations
aatgcctagggaaatataatattttaattacccgaaaacatggaaggggttgattcttctccatcacgaaanaatatgaactctaaatgaaaatccccgtgacgttaattggtcaaaaacacatacatctcctattttcaaattgtttttctttgtaaatttctttcaatcaccagtaagtttcgtttgcccatggccacaattcagacagacgtttgtttatcctctaacgaccaaagagtaaggctgtcacagtcctttttgaggtgttctgttcaacattgcgtggaaaggcctgcttgatatttctttttttggcacaaaataccaatagagaataatttccgttaacaaaatacagttttttatgtacttgtatgatcagcttctctgtataatc

SEQ ID NO: 51645 - DNA, 381 bp, Glycine max
  unsure (1)..(381): unsure at all n locations
ttaagtcacccccgctgcagctaagccttcgtattaactcaagtcgagttctagcctagtaaagcttgacttgacttggctcatttccacctctaatcacaatgtaaattatttgtcataaatataaaacctaacttatatatatatatatatatatatatatatattatgaaacataatncatatattcacaataaatgttaatcgcataaaatgaacatttatttttatattatcacgtggatttcacacgctatagaatacttattntataagatctaaaaatacacaagtttttttataagataaaatttacgtgaattaagtcttcaggctataatatgtcttanaagtcaaaaaacacatacaaaagtacttata

SEQ ID NO: 51646 - DNA, 242 bp, Glycine max
tcaaccaaaaatctgtgttactgatattagcagaaattttctttttccttatgttaatcacaaaggtgtaatctgatatttatttaaaaaaattaagttgagttttatttatacttacaatatattggttcatatacatgaactaaaacacataatacttcaaaggtgttgaacctaacaatgcagcggactaagataagaacatcatattttatttcaggctataatacagtttttatcat

SEQ ID NO: 51647 - DNA, 315 bp, Glycine max
ctcactaagtaaaatggatcatttttaaggtccaaacgccttaaaatgatcaccacttaagtaaaagagaatcacttgataagaaagaactacgtaggtctgatttcctcatcacaaattgaggaatacgtaggagcaaagggaaacacccttgtcgaccacaaaaaagggaataatataaaaagggtataaaggatataaggacatagaagggaacgtaaaaatcagagtcatgtttgcacattcgattaaaggctgccgtccctcgggacggacgtgtggagtgctaatacctttcccgtgcgtatatacaac

SEQ ID NO: 51648 - DNA, 353 bp, Glycine max
  unsure (1)..(353): unsure at all n locations
aggtacttacccgctgaatactgaagaacgaatgaagaacgtctaagaatggtcgaaaaccttcgcgaaattactcacggaaacgttacagaagcgtctcggcttggattttcttcacggaaacaatttttctaagcacattcgaaagagagagaagtgcctaaggggctaaccccttttctacttcacttctcccnctatttatagaaaattgggggagaagcttgccacccagctcgcccaagcgagcagggttgcttcctccagacaggagggcccaagtgggcctggttgctatatgcacccccatttgtactaagcacaccccactgccttttttggtgattattttt

SEQ ID NO: 51649 - DNA, 462 bp, Glycine max
  unsure (1)..(462): unsure at all n locations
agcttggctctagaccttgtcattggccccttcaactcattatgtgattctaggtccttatgctctttggatagccctctatcagaagatttctttacccattgttgttatattttgatatattaatactcttggtgatgttgtgtaatattttgaggggcagtgaataattttatctttctaacagttgtaatgatttcaatacttctatgtttatatcttaagggtcactgaggctcaatatgtatgattacacatttcttttagtttatcatcatttaattgtgtgcaagttaattctttataagttgtactttattatagagttgtgtgagggtagacagaaaatggccacaaccttcanaatggtttttaaatagaagaatgcatttgacaatattctttattatgagcatttaattatacgacatgcttatatattatataatatatatatatata

SEQ ID NO: 51650 - DNA, 328 bp, Glycine max
aaatatgacaaacgccaagaatgattcagattagtccaccgaagaatcagaagattaagagaagaaatcagaagcttctaatgaagtataaaaagtttttcaaaaacaacatagcacagttttttttcaaagagttttctaaaatttcaaagtccagagtttacttctggtatcgatccatggcaagtttgtttaaagttttaactgattgcacattcaaatgattcaatgggtatcgatacaagaattgaaatcataccgggatcttacgttgaattcaactcattggaaagcatatcttctacaagcttgagaatcatacatggtt

SEQ ID NO: 51651 - DNA, 454 bp, Glycine max
  unsure (1)..(454): unsure at all n locations
agctatgagcanattcaaacgacaataactctttactcggatgtctgattgagtcctgtaatatatcgagacgctcgaaatggaataccgaagctctgagcaaatttaaacgacaataacctttttactcggatgtctgattgagtcccgtaatatatcgagatgctagaaattgaatgttgaagctctgatcaaattcaaacaacaataactttttactctgatgtccgattgagtcccgtaatatatcgagacgctcgaaatggaataccgaagccctgagcaaattcaaactacaataactttttactcggatgtccgattgagtcccgtaatatatcgaacagctcgaaattgaatgtagaagctttgagcaaattcatacgaacaatactctttactcggatggtctgatgagtcccgtaatatatcgagacgctcgaaatgaataccg

SEQ ID NO: 51652 - DNA, 502 bp, Glycine max
  unsure (1)..(502): unsure at all n locations
tctacattcaatntcgagctnttcgatatattacgggactctatcggacatccgagtnaaaagttattgtagtttgaattagctcatggcttccgtattccatttcgagcgtctcgatatattactggactcaatcggacatcagagtaaaaagatattgttgtttgaatatgctcagagcttcggtattccatttcgagcatctcgatatattacgggactcaatcagacatccgaggtaaaagttattgtagtatcaatttgctcaaggcttcggtattccatttcgagcgtctcgatgtattacgggacttaatcagacatccgagtaataagttattgtcgtctgaattgctcagagctctacattcaattcgagctttcgattattcgggactcaatagacatcgagtaatagtttcgtcgttgatttgtcacagcttatatccattaagtgttcgtattttctagactatccacatccggtaaaattattgcgttg

SEQ ID NO: 51653 - DNA, 360 bp, Glycine max
  unsure (1)..(360): unsure at all n locations
agcttagactnggtcaaggttgttgaggtctctatgaccataattacagntgcattggccacatttgtctgcaatttcttgcaatattaaagattgcaatgaatntgtaaccgtgactgcaatttagaatcttggtcatagcttcaatcataatcagtgttgacctgtacagcttggaattggtaatacaaacagatatggcatcaaaagtttacttaatatcacagtttgcacatgttttctgacactattagcggtttaaaaaattcttgataaaaaattattgctttataaatcctctatctctctcttgtgattctcaattctttntctgctttcagaaatatgtataagctggca

SEQ ID NO: 51654 - DNA, 466 bp, Glycine max
  unsure (1)..(466): unsure at all n locations
tgagtgcgacccatgatcactgcaatacatgcnacctctgtacgaaactaataacaaattgacggcnagcttgcgaggttattgttattntctcgtaaaagggtatcactaaaactccacctttttaacactggattaaaaaaatcatgtgtttttntctcaatttttattcaaacccaaccctactaggttttgagtgatccttcggagagagctatctatgactattaacactttggagaataggatcccgaaaatggtactcatgaagtgccatttagtgctgacgatgacatgngaagaggaactgagtacaagttttcctgcactcttgaggagttatatacagtggaaacctagaacattaaatcactatagatattctgatgctcaaggtgagtatgttgttgttgctgcattaccaactgcataattatatctgtctgttctaatgctaatgctaata

SEQ ID NO: 51655 - DNA, 411 bp, Glycine max
  unsure (1)..(411): unsure at all n locations
agctntagaaggtcctgaattatattgcagaagaataggcaatgaattagacaataaaagcaaaatagtaaaattttacgccatagtcagaaagaaactatactggcaaatatttatcatcattaattcatcaaatcatttatagtttttgctacccaacattaatattattaggggtataaatggaaaaaagcaattaataatacattgaaaggctaaaataacacttcttttttcttcttacaagacacttgttatgggatggagggagtatgattaatacaatctgcacaagctgatttgctatgattaaatgaacaatntgtttgctgacttccttgtaacactcttccttcctggagtggtctcaaatataagaatgtccaactaacaagtaagaagaatcttgaa

SEQ ID NO: 51656 - DNA, 369 bp, Glycine max
  unsure (1)..(369): unsure at all n locations
agcatcccatgcatggtgatcctngcatgggtagctngaacaagttttaaagcaagaggaattcttatggttccagaagtctngaagtcaatgaatatatgattgagataaagaaacatgaagcaatattgctgaccataatatgtaggacgtaggagtagaattttgactggaaccaataatattttccttgagcacatatgcattattacttattagatataatacaagtgtaatatattgcaagttagacccatataatngtgtaatgaagttataaagtgatcacaaagatagttgtgtacaagatataaccagatctctctatggtggtacccccaactttgtaccatctaggtgcattcatga

SEQ ID NO: 51657 - DNA, 325 bp, Glycine max
  unsure (1)..(325): unsure at all n locations
agcttttaaatgaacattcaggggaaacatcgggttaagctgaaactgggaataaatcactcatagtgtataaaaactcacacaggcaagtgttttaccctaatcccaaaccataactgcaccatgactttattttgcacacggtttcctatcgaatcaaaagatcataagcacgatcacagaccaatagggttttctcgagggtagtgtttttggagaggaaactgggtgtttcggtcttttcctctttgtttaagtgggacgggatatcgccagtcaagaatgactntgaatgtcaatcccaaaggaagaaccaccaaaaaat

SEQ ID NO: 51658 - DNA, 423 bp, Glycine max
ctcagcttgcggattggctcttctgcaatgatcaagtgtgtctaaagaggcaattgatcatctgtttgataacaaaaacactggggcaagtgaagaggatgagaatgagggagaaacctatgttgtgactgccattcttatacgaccaagattcccaccaacctcacattgtcatttctcagccaataacaacccttttcatacccaccacccggtcatccataaaggccatccctaatatttaccacacagcctacctaccgctcttccaattgacaacaccacctgttgcactatccaagtacaccaaccaatatatgaattttgctgcgagaaagccctgtgaattcaccccactctcgttgcctatgctgactagctccatatctacttgttattcaatggtagccataacctccatcc

SEQ ID NO: 51659 - DNA, 190 bp, Glycine max
gtggatgaaccacccagccagcaaccgtactgttcgagagcaatacctcctatttctgccatccatacgatcatctcacttattgattttgaaaccaagctgtagggcccccaactgcctagcatagctaactgctcctatcatcatattgagggtccatacccaccccgttcgacctcttttcgagata

SEQ ID NO: 51660 - DNA, 215 bp, Glycine max
acacgcttactgtgaaacctgcgttcccacttaatccctgcgctcatccccttcccagctgggtatatcaagagcccgaccgtcgcctttcaacgttgcgcacctgaatggcaatggccctgatgctgattgtctctaccatctggcggattcacacccattgggcctctcatacaactgcttgagccgatcgttatgcaccccgcaccgccata

SEQ ID NO: 51661 - DNA, 223 bp, Glycine max
  unsure (1)..(223): unsure at all n locations
agctnggaactccttgaaagagcttcaaaataagctaatgcacaagtccatgcatgtangatctttangtatgcataacccttttggtattaatattacactattataaaactaaacatttgaggttttttttatctgatcaactgatattttcggctctacaacatttgccattgaggggcaagtcaaggacaaaagtaagttggttccatcattgatagac

SEQ ID NO: 51662 - DNA, 305 bp, Glycine max
atcttagagtcgactgcgctcgctgaatgacacgagcttcagaatttgattcttacctttcttccggaggccatcgggacttactgaggaaacgctcgaaatgacaacggagcttcgacaattcgatggtcataactttcaacggatgtgcgattctgggacataacacattcaagacgcttcgaatattgaacaacggaagctctagagaaattcgaatgggcataacattctacacaaatatccgatttgggaaaataatatatcgagatgctcaaaaataaacaacggaatctctagagaaa

SEQ ID NO: 51663 - DNA, 341 bp, Glycine max
  unsure (1)..(341): unsure at all n locations
tctaaaaaatttctagtcctgtgggttaattaatgaactttttcatcacggaaatttattctcccgtaatggaagaggaaaatcttaatttctctctagaatatggattcgaaggacttggacatcctctntataatacggtgggaaatgaaatctatttactgcaagagttntgactgtatgcagttttgtgcttcaggtatacattcttcctcacctcaccttttctctcttgaaattaatttcttaattatattgtacattgtcgtatattatgatatagttntaaaaaaataacgttagactccaactctntngatcaatngctagctccatttctt

SEQ ID NO: 51664 - DNA, 244 bp, Glycine max
acctcttgaattcatggatccagctccagccaccggattccgggtcgaacccaatgtcgctttcgccctctcccaaaaaactccccgttggccgcctcgacgacgacgacacctactcgcgctacgccggcgcgtcgagggtcgagcaattcccgctttccaagaaaacaaaggacgccctgcgagaatccaagttcgtggtcatgaccgacatccagagagcgtttctcccccacgcgctctg

SEQ ID NO: 51665 - DNA, 259 bp, Glycine max
  unsure (1)..(259): unsure at all n locations
attttttttcttaccttctcttccagttgtgnttcttcattnttctccatgtatctcctcacatgtcttcttctaaatgttgttaacatgattctttagagtttccaccgattaaacttgctatagaagttagatttgattttctatggntcaaatttcttgttcttgttcttgaaccatgaattgtgttgagtttaagttcctttgagttttgtcttgttattttttggggctgaatcctaaaccatataantcttac

SEQ ID NO: 51666 - DNA, 399 bp, Glycine max
  unsure (1)..(399): unsure at all n locations
aagcttatacgtgtcgatgattataacacgtatatatgtatatgtattttaaaattaaataggaattaatagttcanataataaaattaaatggaaggaaattaatatattaagattcaacgataaatactttcaattcatatttagtttaattatttattaactctttaattgaaaataatatagtttgatttaatatatacatggtttgtgccatgtcaaatattatactgtgtgatatgtatatgatgcatgaggtgtgataacatgatggtctgggattatgaaagtgtgatgaactgtgtgtgagtgacaagttgagtatgtgctaaattgtgagatcacacatgtattgagaatatgtgtgcattgagtctgagcatgaactgtacatcacac

SEQ ID NO: 51667 - DNA, 186 bp, Glycine max
  unsure (1)..(186): unsure at all n locations
aaattctatgttagaactttacatcaaatttgtccatttcnccgataatacacatttcgggcgccaccccacgcgtaagggcccaaacagctcctaaaaaacacccgcccgtccctcacgactcgtgtagttttttactttgtgcacgtggaccctcacaggtataacacctatcccgggcttccc

SEQ ID NO: 51668 - DNA, 421 bp, Glycine max
cttgctcttcgctcactgagcttcttgtttctccttgagaactaattgagtgcatcctttctttcatttgtattctcctgatgagattgtgaatcaactcgtattcatatgcagcaattttcaagaagcttcatcgacattgatgctggtccctggattcttgacattggatctttggtcccaattcttgtagaagttaggattttgtgcttagctcatcgcttcaaacattcttctagaccagaagtgatcacaattggggaatcttgtgaagtctaaaggttctcatcttattcgaacttatatcaatcaaagcggttctgtctttaaatccaggcctctaggactaacattccatattctgactttgactgcgtttaaatgttaagtaacaaacaaatgttactttgtctgccttttt

SEQ ID NO: 51669 - DNA, 402 bp, Glycine max
agcttatgcgcatatttccttacgaacattcactcgcacaagatattcttctaactaagaaaaatgcacccatgcacaatcaaggcactttcgttacctacattatttgtatgtacttccaaggtgtactacctacaccacatgcatttccttggctaaatttacatacatgcatgctcaaagcctcttggctaccaaaagttgcacacatgcaaaccttatgatgaatcttggctatctacacaataaggtgctacatttcatgctttattcaagtgtttttactacctaaagccgcatgcaaattcaagtatattttctttttgccgactaaaatgtattcaaattaaaagggtgttttgtaaggtattttctttacataacatagcaacatattatata

SEQ ID NO: 51670 - DNA, 319 bp, Glycine max
  unsure (1)..(319): unsure at all n locations
agctngaatcagacatccgtgtgagaagttattgtccattgaatttctcaagagcttccgtagttcaatttcgagcttctcgacatattatgcgcncgaatcggacatccgtgtgaaaagatatgaccatttgaatatctcgagagcttacgatgtttaatttcgagtgtatcgatatattntaaacctgaatcggacctcagtgtgaaaagttatgactatttgcatttccggagagattncgatgntttatttcgagcgtatctatatattataagcctcaatcggacatccgtgtgaaaagttatgaccatttgaa

SEQ ID NO: 51671 - DNA, 353 bp, Glycine max
  unsure (1)..(353): unsure at all n locations
agcttattatgtcaaccccatcctgagctgtttgcanaacatcatactattagtcttacaggaaaagtaaaatttagtgcaagtttagataaatagactgacatatcatatcactgacatgtaaattatttgcacaacaatgtatcacttgtccaaaaatagaaaatgcacctggtcaatagctgcaacaacatctgcagcaaatccaccagagctcttgtataatgccttgtaaacagcaatgctgtaaaagattgaaatgcagcactaacttaaattactatttttttttaaaaaggaaactatacaaggttaaatgaaataattaaaatacaaaatcagaccagacacac

SEQ ID NO: 51672 - DNA, 289 bp, Glycine max
  unsure (1)..(289): unsure at all n locations
agcttgtaccaatcccacatgattggagcattctcccaaaacaacgtgaccctaactagtctccctatgattntacctagtgagtgacctaacttaccagtgtgtggtttgttttgtcatgtactccttggcacccgacgaggtttttcactaacatggtaccacattgcatataggattgagtcttagtatatntgntgcataatgtttgtgtattgattgatattgattggttgagcgatattgtgtttgatccttgagtacgtgaatgatgtgacaataaatgaga

SEQ ID NO: 51673 - DNA, 367 bp, Glycine max
ttgaactaagctggcttccagtgatacataccttagcatatgttcttactctcactatgcatgttttgtcagtgtgtagacaacactgatgtgattgtttcactgatgtgaccaaacaagaacacattctattagacttctggttacatcctcaaattgattactacctggacgtgcttgtgcgctcttgtcctaacacttaagatcataatcctatgtcacttaacttccaaggcctgcgactcctaattgtatatactacaagccaattagtgtcaacaatctctttcttcaacactcatagggtgatattaacttttcacgtctggctatacaatcttttataccatggtcaagttctttcatt

SEQ ID NO: 51674 - DNA, 239 bp, Glycine max
agcttgcttctacagttgggggcgacgggcactccatagaactgacagaggcccgtaatcagatctggaaacccccaggaccctgttggaattctctgggtccactgggtgttttgtgggtgcaatccctgcaaatagtggatggcatcagaaattagttgagccatgtgcatacttacctatgtcatgatggcacagaccaactaacacttcggcagggggagatcggagttgtggtg

SEQ ID NO: 51675 - DNA, 452 bp, Glycine max
  unsure (1)..(452): unsure at all n locations
gagagatatttgcgctnagcgtgacagggcacgcttagcgcacaacanaactcaaaaatttctaagtgtctgagaacacattactcgcttagtgcacagacgcgcttagcgagttcataagcaattgaactttcaatcagagaagatgaacccacttagtgggacagagccgcgcttagcgagttcatttggaaatccatatgttcacagaaatgatgaactcgcttagcgcgctcatcacgantnccagaaaaagtagggacttctcacccctccacttaggcccctattatgccatctaaccctaatcaaaacgagcacattgtatccataataaaaccttaattctagtctagggaacaactaagtattattagagattcaacctaacactactaagttaactagcctaaaagttgaacttggaataaaatgacaaagttagaagctac

SEQ ID NO: 51676 - DNA, 333 bp, Glycine max
  unsure (1)..(333): unsure at all n locations
agctngcccagagaaggagtccacggaggaaatgcttaccacctcanaagactagaaagcggtttctaatgacgcctctgcggcttccacataaggcatagaggatgggcagctcaccaagatgtcttcctcgcctgatacgatgaccagatgcccttccactacgaattttaacttttggtggagtgtagagggaacaactcccactgagtggatccacgggcgccccaacagacagctgtagggggggttaatatctattatttggaaagtaacttgacaggtgtgagggcctatctgtactgngagatcgatctctctcctaacctctcg

SEQ ID NO: 51677 - DNA, 252 bp, Glycine max
ccgatgtataaacctgacacctgtctgggcctctggattaatgaaaaggccaacccgatgctctcgccgtgctctgtccgttattctatgtgaagaacagagagtagactgattgaccccccctgcatccttattactgggtggccactactgacgtgtcagtcctctttttgcataaatctcacccgccctatcatcgctgggctagttattacttggcgcgggtgaccgacatctagaatggttcttccc

SEQ ID NO: 51678 - DNA, 352 bp, Glycine max
  unsure (1)..(352): unsure at all n locations
tgatatacanactataggtgttaatagataatttctataataggaaaatgatatagaatttggatacattgaatagtgtactacttagtcaagtgttcttaatgatgattgtgattgaattatgtttgggaatgttgttccttttgactatgaacatgatcttttgtatattaaaatgagtgtgacatgtaatgtgtgattcttatgtgtatgagatgtggatgtcatactacatgagtaagatttgaaatgttgagagaacctagtccatgtgagataggattctccatgtgacatgataagtggaaccatgtgcatcctatatgatcattgatcataaatgtgcatatgt

SEQ ID NO: 51679 - DNA, 158 bp, Glycine max
gactaatagtacttatttaggcgtactatcacattcgataacggctccaataactgtgttaaagaattacgccccgccctgcactcattgaagtctgtggtatatattagcattctgcggacaggaagcatcacaactgtttgtgaacctcattgcct

SEQ ID NO: 51680 - DNA, 142 bp, Glycine max
  unsure (1)..(142): unsure at all n locations
gagagtatgagggaatttgtgcggtttcaattttccatgggatcaaccggntntgcaacctgccatttggagaaggcgtagttcatgttcacgtgttctatggaggagtgcataaacaacaacgttacttaagctttaattt

SEQ ID NO: 51681 - DNA, 390 bp, Glycine max
  unsure (1)..(390): unsure at all n locations
tggattacagatagaactctacaaactaagttgatatctnttttataccgtgacacatgcgcatgtactatctctgttgatgaaaccatatgccttcaattattggttcaactcccttnttaatgaacagtccacaactgagcatgtcggagggtgttctctatattacaagagtcgattgaaatccatcaaaacataaaactctccaaaatgaccaacaaattaaggaacttggatggaaaaggccagaataacaataataatatggggaataatatttcctaacctnttaagaactatatacgtattaagacattaattatatatatatactcgagcagatgctgatccggttgatgaactagctatacaacaatatatgtgaacaac

SEQ ID NO: 51682 - DNA, 382 bp, Glycine max
  unsure (1)..(382): unsure at all n locations
agcttcattaagaggcttctagcacactctatacatcttctcaaagatcccaacggtcagatcatggaaaatttatttgtgaagctgcagaccaaatttcgagaagatccaacggttaatgaaggctgggaagcgtttttaccgaggcagctccatgtagctttctctagaagcttcattaagaggcttcctctagaagcttcctcgtggcttctttgagaagcttgatccttatctatccacacccctctattaattaaattaaattccttaaaaataattacggatgaaaataacgcaacaaataatcaaacatcaaacataattactaataatatatagatatatatatatcagggtgttacatggngtgttaggggag

SEQ ID NO: 51683 - DNA, 384 bp, Glycine max
  unsure (1)..(384): unsure at all n locations
gcttcaaaagacaacagtcactgcaagtgagtttatcttgtgttntgttgngaatcaaatcatgcaacaggtcacgcataagagtacgccagggattaacatcatgggtgtttccgaagtgtccactcaagctgttcagtgttctgatgctggcgagaggaaacttcctccatttgctctctcttttgctgcagcacctacattttttctttgttggcatctcaagttgctgatggagcagtctgcagctcatataagatattgtgatcaaacaccaatattngatcaggaagaccctggttngatgacaaatggatgtactagcaccgataattgctcaaacaagaattctgaagttattcttatgaagggtatggagacttt

SEQ ID NO: 51684 - DNA, 570 bp, Glycine max
  unsure (1)..(570): unsure at all n locations
attttatcgccctgagnacgngcgatccttagagtcaccctcgaggcatgcaagcttgttcanattgatcatgtagacagttagtctgatacataactcagaataatactatgtgaaattaatgctgaaaagtcttgcttcacctctagtttatgacaacacaatacgatatgtctcctaatcacactgtggtagagtgatattgaggacatacacggaggattattacatgtacgtaagcctatctggtaggctcatgagagatgatcccatatagaagtttggatgtacgagtattaatacttgctgatatagatacacgtcacggcactcgtgaaattatttctagcttacaacgtatgccctatgggaaattgtgttgctgctacacgccagctagcataattaagcttaactgactacatctcgcgttacaattgtgttatggtcattcctagttgacataatctaccacatcaaatatttactacaataaattcggttattaccagaacataaagacacatattcacttgcgatctaatccataaagaatactgtnttagcacg

SEQ ID NO: 51685 - DNA, 405 bp, Glycine max
  unsure (1)..(405): unsure at all n locations
agcttgcccttcaactcattcttatacgagataaagtacttagttagactgaggggacacttgacacactcaaactaagtaccccctttgacaacatattcacatattntatacagcacgtcttgaccctcaacatatatggacaatgagaatcactcagccgtgattatcaccaataaactcacttaaggataattacttgattagaagtgtctaagcatgattagaaggtgtattacacaactggtaatcagccattgcagcagcacttcacttctcttttgacgtatgcaactatccaacactattagaaaatatgctttctacatcnggtatttatgactttcaacatcggtttttgaaccgatgttgaaagtaccgacgttgatagtattatcgttaaca

SEQ ID NO: 51686 - DNA, 490 bp, Glycine max
  unsure (1)..(490): unsure at all n locations
tctggggatatngcttcctgcaccccacatganaattaatataactggaaaggacanaaacacccttatatatttcacacaccaagcaatgatcgatgtcgcctccattccaagcaaccaccagcaccgacactggaatgggtatttcctcctttgtctagaaatgccagacaattaattatcaaaaaatataaattcagaattatgaaatcatgcataattatgggctaaaagacaatgttctggactgggtaatttagaatacaaatgtattccaaattactcaattcaatccaagacattgtttttagcttctagattctggaattatgatttcataattttgaaatgagtaatccacaatacaagtctagaacaatttttttagctttngaatgtcagattctggactattgtttcttattctaaaaaggtaatctagattcactcgtttatgatactcatctgaacatgttttagctatgatccg

SEQ ID NO: 51687 - DNA, 438 bp, Glycine max
  unsure (1)..(438): unsure at all n locations
agcttgtgtagaaatgctcatgttaactattctaccaaattagaggcactgcaattgatatcctttctgacaattagtgcatgaatgatctagtttatttttgaaactaattactattttttatgaaaaaaaattaaaataggtaacctatttcataaaagttagctagcactgtaaatgcataagcccactctacccaatatcgtgtgtttgtgaacccatacttcaattagcttgtatgtaatactaaataatgtgatacantaaacctttgaaatacttttatacatacaattgttagatctttagattctgctagaacgttggcatgaaaagaaaaaaatatgcaaatacttcatcaacaagtagctagcttcaagtcattcaagaattataatcagcatattcgttagacattttctaatntcatatcataca

SEQ ID NO: 51688 - DNA, 421 bp, Glycine max
tatactgcttaggcacagactataatattttctggttgagataatagtgacaatcatgtaaacaatatattgggattatttttactagtgaatccaacttaagtggtccgaatctcatctcttgaatccaacccaataagttgtcacaacagtatcggcatactgagtatgacctcataaagaaaaatcaaatgaagaaattgttaagtaataatacaagaacaacgtcattcaatcagaataattataaacaacattcactaaattaatgatttagatgtctaccttgtggagatgcatttgacgtggcttgcttcactttagcagtaacattccactacaatgcatgcactatctgtttcatttaaccacacttaagagatatccaacactaacaatttacatctcatttataagtgac

SEQ ID NO: 51689 - DNA, 450 bp, Glycine max
  unsure (1)..(450): unsure at all n locations
catgcaagctngaagcgacttccaatatatatgcatggatcttgttgctgncaattggattcaaatgtttttgcgttaggtctcaaccaagttatctgttgggtctcaatcaagagaaggtagctattttgaaggtttagatcttctacaatgatattttcattgtacaagatttttttaatagacaaataaaatatatattatataagtaaaagaattctggcaggatcatgaataattcccccacgaccccaggccactagacccttaattaacggcattgggaaagattntagtcatagaaattatttaatttaatttaatttataaaacaaatgttctannatataaagttaatgatcttaatttatactatatntaattataatcaacattttcttaagttatgttaacatcatgataatgagatcacttaattattcttgatgt

SEQ ID NO: 51690 - DNA, 416 bp, Glycine max
  unsure (1)..(416): unsure at all n locations
actcaagccttgatcttagacttccaagtgccttctctgtatcctaaatatagaatgcatatntagtgctgcaacaccatatgtgaagaagttaatcaaattaatggaacaagacatatatattcataaataatatctcataattaaagaaaacaacagacctgcattttagcctcatcccatgataatccaatacctttaccaaagaccttgccatctatttcaacctaaaatagagaaaacaaattattgtagattcagtcagagctttgtactttaaaaaatgccagatgatgagtagaaccacaatgcatggattaacaaagcgacagaaatgtatttgacagagaaagcatcctagtcatattatgcccctctgtggttacaagtaatgtgnaacagaactactacctgtc

SEQ ID NO: 51691 - DNA, 442 bp, Glycine max
  unsure (1)..(442): unsure at all n locations
atccttaagtcacctgaggcatgcaagttnntgaagtttttcttgagctgtaattgtgttatagggcattatcaatcgcttaaattaagagacacgtttatcaccttanagaggagctaagctgaacattntaaagaatatgattttaaagaggactggctatacatgggaaggccattttttccattaatatccagccattgtagattatacatctaatagggatataattaattgcatcttccagattgctgtgttcaacttcaacttatattacatgtttacatcaaaagggcaagcatgcgctgatgtttagtgcactaactagttaattatccaactcatacatatggacaaatatgggagtaaaaccttctatatgatggaccctaccgaaacagaananaataagaaaaataatatatatatcacactaaaataa

SEQ ID NO: 51692 - DNA, 430 bp, Glycine max
  unsure (1)..(430): unsure at all n locations
tgaatgaggctgngctgcatataaatcgtggttnttctttgatgcaaaggcttaagttctaggagagcatccgtccttagataannattttttcttttccagcttcaattacttgccttaaagcacttggcttcacttcttcttagataacagcacacacactcttattttgaatacttatcagttttttgtgaacaacaactctttacttgctgcatattgacttactgtgggtgctgatattntcttaccattagaagctatcacccaataaactcccccaaattagggacaaatttgctttcaaccataatgctctcctacaacctaggacaaggtagatggagatgtaatccataggttcaacgtacaattaaacaatcagattttcagcccaatcatgggtgcaaaggatatggcattcattcac

SEQ ID NO: 51693 - DNA, 314 bp, Glycine max
  unsure (1)..(314): unsure at all n locations
agctnttcgattcattctatgcacccatagtggtccacattgtgtttcgtgcaattttattctcgnnttgtttactnnttataccccctgttgacgtgcttaagccattttacttaagtcatttctcgcttaacttaanaataaaataaatttccaccgaacgtttgaattgtattatccattaacttcggttaaaataaattccgaccgttcggtcgtgccgtaaccacgttggaaatcaaaaagaggtaaaaaataatataaataatcgaaacacatcttttagtaaaataaaagagcaatatcaatcggac

SEQ ID NO: 51694 - DNA, 484 bp, Glycine max
  unsure (1)..(484): unsure at all n locations
tcagcgctntcctccaagcgtctgcttggtatccctacctttccattcctgttgtgcttcactcggtctaactcttgtgctgagatcttaaccactcttgctactcttgccatggaggggtagaatccaaaaaatagatacggcttccttcttcctagtgggaatcccaagatccattcaaactcttttatggttggnaccaactaaaagttcccaaacataaaacatcttagcgactggttgtaatattgagtgagggatgcgatggcttcaacggacacttctatcatggncaaatcccagattntcccatatgccttgcaaaggcatgacgntgacttgatcattcgttgcctagctttgcagctgctagtctggctctgacttgacatgataaactttcttacagagtgctcgttcacccatgttttacatgaaatttatgaaatactcacacttatctaagagttgataccataggatt

SEQ ID NO: 51695 - DNA, 402 bp, Glycine max
gacccagtgtgagaatgtcaatccttgttctcggaagaagacaaagaaaagaaagttcccgacccaagaatcggaagataacaaagagaaaattcccaatcaaaagagtggaagaaagcaaaaaaaaaggaaagagaattctcgatcaaggattggaagaaaacagaagatatatgtagaacaatatctaaacaacacagagttgtcaccaattaaaaaaaacacaaaaagaaaggagaacacgatctaaagtggtcctcttcctttgattgccaaccaaaaatcttgtgcgctagcgactttctcgccccgcactaaacaaaaacagataatgataaggctagaacactccaagcctaattttccaccacataaacaccattcccaagagaaagttctatt

SEQ ID NO: 51696 - DNA, 198 bp, Glycine max
  unsure (1)..(198): unsure at all n locations
ngnnnnnnnnnnnnnnnnnnnnnnnncnnctgtnnnntnnttnctcnnnntttctnttttttcccttnttttcttttctccttcctccccctctttctctctctcctccccctcttcctctcctcttctccttctctctcctctctctctttctntcctctcctcctttcctcctcttcttcctccntccctcctccc

SEQ ID NO: 51697 - DNA, 330 bp, Glycine max
  unsure (1)..(330): unsure at all n locations
agcttgtgtgtggnggaatattgaatggtcggatgagttctttngatgattgtgaggttaatggttttggtggtcacttantggtggaggatgaggccaactgtaaatttgacgttgttatggttggattaaattccagcgacgtgaggaacggtgtaagatctccgccgttggaattcattagacaggatgttcttcttgctgctaaattagttctttgtgagtttgggattcttgccattaatgtcattcctcctagcaggtccttctacgacaacttggtgagtcattntcaggaagtttctcatgagctgtacaagatacatgtac

SEQ ID NO: 51698 - DNA, 332 bp, Glycine max
  unsure (1)..(332): unsure at all n locations
atttgaaaaggcctatgactcagtctcatgggcttntttggattatatgctgcaaagaatgggtttttgtcccaagtggagacactggatntctgcctgtcttaattcagcaagcatttctaaaagatgtccaagtttaattctctgatttgacgctagtcaagaaattgtttctgacaagtcatcaagctaacaagcttgtaaggattctaccgaaatcattgtgattgaaaggaaaagataatagaaagtaaatatgatgctaggacaacaaatggttgtcattctgagatgattaatacactggcttagtacttcaatttattctttag

SEQ ID NO: 51699 - DNA, 384 bp, Glycine max
  unsure (1)..(384): unsure at all n locations
caagcatgtgttgcttcctccagaagcaacagccttctggaggaatcttctggagggcccaagtgggcctggttgctatntgcacccncatttttactaagtactcccccctgccttttttttggtgattcttttttcgtaaagttacggaaacttacgaatntcgtaacgatacttgttttctttccgtaatgttacggaaccttgtggattacataatcatccccttacgaattgtgacttacggaatgttacggaacctcactaattgtgcaacgatgcttccatttgatttccggtgtgtcacggaaccttacggattgtgcatcaatattttcttttgttttctggcacgttcctgaattcacaacatggctaatgatg

SEQ ID NO: 51700 - DNA, 308 bp, Glycine max
agctggtcagcaagggagataaatcataacttcttttaaatctaaagatgttgtttccacttccagaccattgtaggtattgcacacggatctatttggaccaacctgaacattgagtttgggaggaaagaaatatgatttttcatagttgatgactattcaagataaacttgggtatacttttttctcataattatgagtctttcaagggcttttaaatattttgtaaaagagttcacaatgaacaagacttttgtatctcttctattagccatgacactgagtttgaacatgttgagatcagatca

SEQ ID NO: 51701 - DNA, 453 bp, Glycine max
  unsure (1)..(453): unsure at all n locations
agctntaaaggaagtgataaattttgaacagagagactgttgcaagatataaattaaaatgttcccaatatggagcttgcactctatgacaaaccatttatctgtatatggtactgagataagtatccacaccaagaagtcattaacaaaaatgatcaattaaacttccaatcaccagggaaagatattcatattatatcttaccaataccaattaccaagtccacggtaaggtgctaaaacacctaatgccatgatgtaaactcgaatntgccccctaccttcttctccaacacaaatatcactatagtaagctgaaagacaaatgcanagtaatcaaaatgttggtgtggtgtgggcttgactgtgcggcaggtgcaactgcgttctttatcagctgcttaaagtattatagcaactataatctccttctactggcactgacacatattca

SEQ ID NO: 51702 - DNA, 343 bp, Glycine max
  unsure (1)..(343): unsure at all n locations
agcttgccaatgttcaaaggatgaaagccatctacatccttctcaaggctgatttcagtcagaactttctcttcatttatgtgcttangcaacggaagctgaaccaatatacctgcggatattaacaaaccaagcctcacaataaaaaaaaaggcccanaacataaaagtgtaatcgatattaaaaataacacatgcatgaattgaaaaagcatgtgttcaggcatgtaaagtaattgaggcacaaaaatgtgaagttaattgataagtatgatgaaaatcgaanagagtgtaataagtgacgaaccatgtacatcanggttaacattcaactcgtgaacttg

SEQ ID NO: 51703 - DNA, 333 bp, Glycine max
agatgccttagttgcaatttgactcgacactacccctttaaaccaggatacatctttatattcggctaatcaagatcgaaaaatctaaaaaccaaattgctttattttaacttagtatagaatgcaagatttactttacagcatgtcagtgaagggaaaatagcgtaaacatggggcatagtcctttgttgtgctgaacagttcaaagttgcttcactattacgcgttagcacaataactggggcttgatgagatatggctaatgtttcagcctgataggttcgctctttatgaggggaggactatctggttatgccttacttttttctcccc

SEQ ID NO: 51704 - DNA, 353 bp, Glycine max
  unsure (1)..(353): unsure at all n locations
actatgtcttccactccttggatgaggtacaattatcaacatactccctctgaagcttataaggctctacctgctgatgtaatggattccttggacatttttcttgaacgtgacctatctatcaaacctagagaagatgcaacgttattggattccttctggaactccacaaactanngtgtccactcctgatgttgaaagaagctaacaaacccaagggaagaanaaacaaaattgcataacccttataaaattggatacctcttncttaaggaacaacatgaatccatnncaaggtacctcagttcaaccattacatggtccaaacatatacatatttggatgcctactac

SEQ ID NO: 51705 - DNA, 177 bp, Glycine max
cacatatacttatggtatcgcataataattgatattaactgggaaaacatagtcatgctaatattaacctgcttaaatgttggtttcgagctgatgtgaattaagcgtaaccaacaactgttaccatggataaggtaggtgaaatgggtgagataatacctggtacttaccttaccc

SEQ ID NO: 51706 - DNA, 460 bp, Glycine max
  unsure (1)..(460): unsure at all n locations
agtcccgcgtgtgatctctagcatgcatactttctttctttaccccctcctcacctttggttttttagggaaaaacaccataactaaacgcgccacaaggcatccctatcgcaccagatccaaatctagaacgatgggtgatcaagaggagacacaggaacagatgaaagccgacatgtcggctctgaaagaacaaatggcttccatgatggaagccatgttagggatgaggcagctcatggaaaagaatgtggccaccgctgccgcaatcagttcggctgccgaagcagacccaactctcttggcaactgcgcaccatcctccctcaaacatagtaggacggggaagggacacactgnggcatgatggcaacnctcatctcggatacaaccgagcggcttacccttatggattggcgccaactactcaccacccgtcttgcaagacgatgcgggccata

SEQ ID NO: 51707 - DNA, 351 bp, Glycine max
  unsure (1)..(351): unsure at all n locations
atcacaaacaaatattagtgattacaaatgtgtggctgatcttgcatgaatgatttcccccttcttatatatccatttttcttgcatatgtgaatgtaaatccatgatgttttggtattttgaagtcgttagggtactaatgccacttcatttggaaagcttttcataagacagtaatttcatttcaatagataaattctaacatggctgtgaattttttaagcttgtaaatgtctaccgcctcaaagctntaaccttgttgtattgcgttgaaaacaaatgtatattattctggtgtgattagatatcttgaagcaaagaccaccatgttatactttaccaaatcttctt

SEQ ID NO: 51708 - DNA, 431 bp, Glycine max
  unsure (1)..(431): unsure at all n locations
tctagagcatgatgttataaccatcacccactttaatacatacggcataaaaatgtttatccagagaattgatcttcagatatgtctttntatcttatgagttatttccttagccttctagatttataacctaacatttttttacaacaaataaagcatttccacccaggaggttgtggataagaaattctcataattgggaaacgtacaacgaggaactataaaaactgagggtctgtttggttaatgtgaaaatacttatataaatattttaacggaagtagtgtaatttttcttgtctgataggtgtcgaataatacttgtattgatctggtttctactttcaattatgtgtgatcagggtgcaacatgggatccacatgggcgtatgatacttcttgcattttctgaatcgtcaactctgggatcta

SEQ ID NO: 51709 - DNA, 359 bp, Glycine max
cttcttccatggcttattccctagtggatggcgcctcctctcacctcttctcgtttgtcttccgctgcatctccatgatggaaaaccaccattaaaggacctcattgaagctcaaagatccaacctccataaaagctccataagcatgcttccatcactatggcccaattacaatgataacatgttcatggtgcatgggccactaataccaaccacaatggcaagcacaaaaattggatctttagttattttaaagaagtaaacaaactttaaggatgaatacatttattgacgcataatttttttttttttgaagatcaaaaacaatttgtttacaatctgtcttttaaaaaaaaaaa

SEQ ID NO: 51710 - DNA, 395 bp, Glycine max
  unsure (1)..(395): unsure at all n locations
tgaaggtgtgtaacctaccattntctcatagtagaacaccaataacgtgtctactgttagtcgtcttatacgactaacttttgtatagaaaacattttccaaaacttgtatagttccccaatttatagttattttgtagtgattttgtaaataaatcttgttttatggttaaaactgtctctagaatatgtccattggatttaatgatgaaatatgtgcaatttcatgtgaaaaaggggccaagtcatgaagtgctaaaagtgacagttgagcttagctcatcagtgggctaagcgcgcatccaccgctaagcgcagcttcagcgcacttagcacgatagaagaatctggcagagcatcaatatcaaggtcgcgcactcagtgggagaataatgc

SEQ ID NO: 51711 - DNA, 475 bp, Glycine max
  unsure (1)..(475): unsure at all n locations
gatcactcactgtaagttgaagcttgatgttctctaagcctcacatctcagtctaagcgcatgttgtagaaagatttttggtgttgcaaaaagcgctaagcgtcgctgctgcgctaagccccaaatacttactggaagttacaacttcaagttgggcttagcgcgaggctaggctaaacgccagtgttntaaactcaaacatcacattggcacgctaagcgcagctgcgcgctaagcgtgccatacgaattntagtttttaaaaagtagaacagaggcacttgtgttgctaccttggcacccaaacctctgcactctctcatacctgagcatatctttgtttctgctgtgtggttactactcctttgcatcatttgcttccttacaatctgcattacacatccaagtaagtctnttgatttccttttgtntgggatttatgttcacaccttngatagagattatgttcttagtag

SEQ ID NO: 51712 - DNA, 481 bp, Glycine max
  unsure (1)..(481): unsure at all n locations
ctcattgactccagattactgcaaagaaagacaaagttctgtatggtgatctgcagaagaacatagaccacagactcttgcaacatgtgcagatttctgattcatggcaagctaagttactaggttgaccaaggcatcaagttgtccctcaagctttttattctcagtagatgaagatgaatctgtggccacctcatggactcctctaatgacaatagcatcatttcttgcactgaattgatgggagttggaagtgatcttgataatcaaattcctatcctcagcaggggtcatatcaccaagagctccaccactggcagcatcaatcatactcctctctatgttgctcagtacctcatagacatattgaagaaggagttgctcacaaatctggtggtgaggacagcatgcacacaatttatngaatgctcccagtacctatacagccttctcttataagtagcctgatgcttgagatgtc

SEQ ID NO: 51713 - DNA, 373 bp, Glycine max
  unsure (1)..(373): unsure at all n locations
tgccaaaacttctaaatccctaggtcaggcctttagcttgtcaaactctcttgttagcacatcagcatgctcttgccccttctgtaaagtagcatctttatccttaatcaaatttagaggatcaacatcacccanagaccgcctcaactctagaagaactttatagcccagagtaacataagtcagataccctntcaccccagctaatatggacatggcaaaatcttagttggcaagaccattcttttgaatggactccctatcttcagaaacgatgacacggtatatatcnttgtcatgacatccacacaagaggaccaccaaacttactagcaagaaccaagctagagtcggggtagttcatgttgtcata

SEQ ID NO: 51714 - DNA, 214 bp, Glycine max
  unsure (1)..(214): unsure at all n locations
catatacctctttgcttttttaattttgatatgaatatccttcgatatgtcccctgaattcctacaatcacaatcactaatggagttaccttctttgcattctctgtcagngcatgttgtggtctagccttcgatccactctctttagagcttgctaatntcgagcaaccaatattggctagacaaactagtttctcatgacanatatcctatc

SEQ ID NO: 51715 - DNA, 330 bp, Glycine max
  unsure (1)..(330): unsure at all n locations
tgtataacaaattaactattaacgtactttcctagagaaactaggttgataagtaaaattgattatgtgggatgatgaacatgtatattgagaacagaataaagtcgcatatgagtttgcacacatctcttctgattatataataagtgagcgaagatgcaaatctttaattgctataaanacaaaattgccagaagaaacactcttactgtgaatgcattaacacctcttgattggcgtaacctttggcttatatcttcaaaacctagttacaagcggataaanaacagaatataggctatgaatatgtgattttggagatgaatgata

SEQ ID NO: 51716 - DNA, 276 bp, Glycine max
tgtgagaggtgaaagctatcaagaaaaagagaaacatataatgggcaagaaaaaagaatttaatgaccaagaaaaagaaaaagaaaatttaaaattaaaaaagatgaaaaaaatgataatgaagagaagagcacgaagtgataaagctgtaaacgaaggtgaggaagtaccatatcctatggtaccttacaagaaagagaaggaccgtcatttggcgagaattttggatatttttaggaaactagaaataaccatgcccttcggagaagctttaca

SEQ ID NO: 51717 - DNA, 358 bp, Glycine max
ggccacccagctcgcccaggcgagcagggttgctttctccttaagcaacagccttctagaggaatcttctggagggcccaagttgatgcaagctccattggagcttgtaggcctaggatcttcttcatcaatggattcctttgcttcttggaagatgaatggcagcggaatggagaatgaagagggagaggagacgccactttaaggagaagatgagtctataagaagctcacgcccatatgaggccatggataaaagcttggaggaagaacgagatgaatgaagggagagggagagaacagctcaaaatttttgctcaaaaggtgctctgaaatctgaagtttatattcaaatgatc

SEQ ID NO: 51718 - DNA, 286 bp, Glycine max
  unsure (1)..(286): unsure at all n locations
attatgtggntnttgataaatantcatgttttgggttccattgaggaattgattctaaactaaaacaactntgagtagcttaagtattggataaaatattttataatgtatctcaccactaaatgcttctataattaaaacacccaaatgtaaatcatatcacttcaaaatcaattttaaccaaagtcaattttgtaaaatcaatttcattcaaaattaattttgataatacttgtcgcaacctacccttcggtgggagggcgacacacaggctcacgggtgcgtc

SEQ ID NO: 51719 - DNA, 464 bp, Glycine max
  unsure (1)..(464): unsure at all n locations
ggtatctagccgccttttcaatccaaatgtcaaatacaaattcatacatgtgtgtttctcttctttcaccaaatctttcatattatttatattttcaatactagtaaaaatataataatattccacctttgtgaaatcaattaatcatttgatcatattaaattctctaatttaattaatcatcaaatattaaaataatttctttaatagagattaaaacactcgtttgtgtgtgaccccgtacgttcaatactaagccagtaatatattaatcaaattaatatactaatcaaggtaggcgtatagcaacactccttaacgtccagataacatgaagtagcattttactttcaagaactattagaagagtagtgtaataatttctttcatctttacagctctgggttaactctagagtatgatattactgtcgaaccctttngagtaactcataatgacttaag

SEQ ID NO: 51720 - DNA, 274 bp, Glycine max
  unsure (1)..(274): unsure at all n locations
aaagatacaatctttgcagatganaatgcttcagaaacattaagaaatctagtagatgggccctaaagaaatgttattacttggcaaggatacgacataaacaagtattcattntacacaaaagcacaagacgataaaagtacaatgcagaatagtggggtcaccctaagggctgaatctcaacacttcgcaagtgtgcatgatgtcaatccctatgtagcttccatcccttactntgngttcattcactgagattgggagcttaactatgtga

SEQ ID NO: 51721 - DNA, 477 bp, Glycine max
  unsure (1)..(477): unsure at all n locations
gctgctctagtaccgccaacacaatttacatatatacttatataccaaatgttattntatttgtacataattacttatttaaataaatgattagagcattagagttagaagttaaattttgttttatttataaataactagttggaagtcttgtcttgtcagctaaataaatactgagagaatagacttacttgtgttaaggctgaacctttaagacttttaagtctagcgtaaaagagtaggtgctctattcctgttagggattcccacagcaagctaacataatataaagtggaagcagaaggattagaacaatgtgaaatattggactnttaacatctagcgtgccatgagtactattcactgactcttgtgggtgcttgcaaaaatcgacaaaggagaataaaaattaattacctcaatctgactctgaaggaatctgatatacccaatagcttctaataagacagacatcat

SEQ ID NO: 51722 - DNA, 376 bp, Glycine max
  unsure (1)..(376): unsure at all n locations
gcttgaatgcactattcaatggtgttgactataacatcttcagactgatcaacacttgcacagtggccaaagatgcatgggagatcctgaaaatcactcatgaaggaacctccaaagtaaagatgtccagattgcaactcctggctacaaaattcgaacatctgaagatgaaggaggaagagtgtattcatgacttccacatgaacattctttgaaatgccaatgcttgcactgccttgggagagaggataacagatgaaaagctggtgagaaagatcctcagatccttgcctaagagattngacatganagtcactgcaatagaggaggcccaagacatttgcaacatgagagttgatgaactcattggttctct

SEQ ID NO: 51723 - DNA, 278 bp, Glycine max
ccttcttctttgcaccagcgctgctgatatatctatatgttattactgggcatagcaacatgattgtacgtccctctctttaggcgcacttgaatcctctcacccgtgaattcttaatacgcgaagctagagggcatgtggaccaccaattgttcatagtaaaacactggccgcgggtacactatcattgtgagcatgtatatctctaccatgggggggcaccacttgctctaccaagtgcttacaccattgggcataatgccttaatgatccatgct

SEQ ID NO: 51724 - DNA, 355 bp, Glycine max
  unsure (1)..(355): unsure at all n locations
atagcgcgggtctgggatacatatgtcaagtggtcgcgatatacaaagatgatgttccgagtacattagatttggtatgaccattccctcctgatttccagctgggaaattggcaagtggaggaacgccacggcatttacgcaacgagcataatgtaaacctttacggttttaaaagctctatagttgggcctaggctttagaagttttttctttttgttaaggctttgtgtcttttggtggtgattntataatacaaggatctttcttcatctggtcctacgtctctacccattctcattcatttgcatgtntacttctttntctgaaatggcagatcggatgatgagtccccc

SEQ ID NO: 51725 - DNA, 301 bp, Glycine max
  unsure (1)..(301): unsure at all n locations
taaaaaacaagaaatgaattgaaagtctcggattctaaatacttacccgtgaagaacgaagaacggatgaagaacgatgaagaacggacgaaaaccttcacggatttgcttactgaaacatctcagaagcgttacggaagcacctcggcttggattttcttcacggaaacaatttttntcacccaaaacagctgaaatacatagccagggggctgaggtatccttagaacagcccccttcagcctttttataagaaaaagggggaggaggttgccgnccagctcgcccatgcgaccttagc

SEQ ID NO: 51726 - DNA, 370 bp, Glycine max
tactaagctgcgaattgagggggattggtcctatgaagggattgtctttatgattggcaggcctagtggacctggaagcaaaagagatggaagagtggcttcatatcttgaattcttgaaccaccgtagcaaacatagcacactgatcagtgtgactagaatggttagaattggatgcaagctggtggagtcccaacaccacaaatatggtcatgtgacacaaaatgaactcaacagcattgtggattcttacttgtgctttctaagtatctttgcttagttaacctgtgattctgtgaatgtagatctcatcatctcacgctagaaaattactctaccaaaagtcaacacaggacaaattcggaacaga

SEQ ID NO: 51727 - DNA, 251 bp, Glycine max
  unsure (1)..(251): unsure at all n locations
tcacttgtcaatcaagtgcatcgccacttaaaaatcttatctaacttcactttatatggttactctcaaccacatcntatgtataaataagcacatgctcgcacaaaatggcaccaaagacaaattaagagcaagctagctatagttggattttcttacatggtatgttctctagtcaataatactctcttaactactntacatttatttgttcttggcttcttctcaattaacatacatatagtttgaca

SEQ ID NO: 51728 - DNA, 274 bp, Glycine max
  unsure (1)..(274): unsure at all n locations
tctaagagatattccttgagcgagaaaacatcttgctcctcctccaatggatttagagtaaaacttttccctttcattntcaccttgaaaatatcttgaccaactgcatcttttatcaagcaatatttgtcttcaaaaataactttaaatcctttatcaatcaattgaccaacacttagcaaactttggtcaatttcaggaacgaagagaacgtcaagaataagccttgtgccaacatagcttatgattgcaactgtcccctnttctttgactg

SEQ ID NO: 51729 - DNA, 461 bp, Glycine max
  unsure (1)..(461): unsure at all n locations
ggaggatgatgttagttntattcgtcagtgctgtgaccttccacttccattctcatagatntagattattattatatgttgttttttaagccttgcatttggctatgtttttatgacatttgaacacttagtatttcttttaatatttgcttagtatgattgaacatgatgataatatttacttgctcttggttgtttatgggtatgggtgttaaacttaacttatttgatgatatatatgtctagtggtatgtacttacatttggtattgtgctttatgtatgttttagaattatttatgtatgatttattttacacactttggcctntttgatgttgccaaagggggagagaaaaatgggtattttagaaatcaagatattatattttcaaagtcttaaattaagcataaactcacaaagaaaggtggagacagagatgagtgaatggtagaacaaaac

SEQ ID NO: 51730 - DNA, 242 bp, Glycine max
  unsure (1)..(242): unsure at all n locations
ctacgtacaaaaacaaaaacaacggtttatttttcacaataatccatgtntagcgatgtatctgacacctcttttactttaattattcgctctaagaagtgttactgtattatgcacacagcagcgagtcttattgagaattagaacgcaagaatcacacagcaattgagactcgcatcaagtacaccaaagagaccttaattgcatgactttgttgaacanatccacacaacacactctta

SEQ ID NO: 51731 - DNA, 410 bp, Glycine max
  unsure (1)..(410): unsure at all n locations
agctngtaagcaatcatttaataatggtctagaacctatgattatgtttggtgcactagagaatgaccatatataatagtagagtcacacatccggatgccctgctgtggatcctaaccagactcctttattctgattgtaccagagaatggcattattagctgtctttagacctctggactcaattatttattatatatatattatgntgctgatcaaaaaaaaaaacatgtataccaacatctgaaaaaataatcaataaaggaatatagaacaaaaacttccatatctattttataagtaaaatagcatatgacagtttcactctttgaacactagatattgcaattaatttctgagactaatcatatattttctagcagagctaatgtcatgtttattgtaattga

SEQ ID NO: 51732 - DNA, 415 bp, Glycine max
cccctgaatattacaaagaaaattttattcttagagagatgatctaataggtgtcattatttaacattatatagttattcaataatgactttaattttcatatatgcttcattttttcctaatatgttggaggtcattttcttgacttctagaaaattgtatcttttctgtgctacacactcatgatttttaagaatgcttcaatgtcttgatcactctttgtggtcaaacacaggagaccattctcacagctaggtaagagagcatattacatcatatataattgttaatgcatgtagcattcttacaaactgtatagtccctattcacgatggcagtgccaggataaaatgaacagtgaacctcatttatttatagcgtgtcacagtaacatatataagactaaacaaaacat

SEQ ID NO: 51733 - DNA, 305 bp, Glycine max
  unsure (1)..(305): unsure at all n locations
tcaagctgtctnttcagggtatacgaaagaaggcccagganattcataaatttaatgactgccctcacgtactgtctcgtggggggtatgaactgcttaacaagaaacatatggaggagaagagcaagcgtggacatgatgaacattcgtgtactgaaagccaacactcaacgtcacccaccatcccaggtgcagacacttgagtggaagatcgccccactaagcggcatggcaaatgacgctgagtggcccacaaattggagccaaaatggccagccacaaatttgttgggtactggcattgca

SEQ ID NO: 51734 - DNA, 596 bp, Glycine max
  unsure (1)..(596): unsure at all n locations
aactgagtataccgatnctnttatanaanccgactgcangcatgcatgcttgctttgaagcttgatggangtttanatcttgagcttcaatgagcgcctttaatggtgatctttaaccatggagatgcaccgcgagacaaatgagaagaggtgagaggaggcgcatccacaatggaataagccctggaactaagaacttctgccccaagaatgtgccttgaataataagcttggagaggatgcttctctgtgtgtaaagaaagagacacagaatgagagaggggtgagcatcgaaatgaacgatgacaagagggagagaagttgatctttgaagtgcgtctcacaagactctcattcatcaaagtaccacaagcggtacacatacttctatttatagcccatgcagctctcttgagaaactctcttgagaagctagagcttagctacacactctcctctaataactaagctcacctacttaagaacctcntcgagacgattctatgatagctaagttagctcaccacctctttatagctacttacctcttgaagagaactaagctagctcaccaccttttataactagccacctcg

SEQ ID NO: 51735 - DNA, 398 bp, Glycine max
tcattcattaggcaatagccatagcgtatccgcgcgacattctcaactaataatacttggtaacaagcgtcgaggacaccttcgtgtgcctagactacttccaatcggatgcaagctggtggagttccaacaccacaaatatggccatgtgacacataatgaactcaacagccctctggattcttgcttgtgttgtctagttattttcgcgtagttaatctgagagtgtgcgaacgaagagctcatcatcacacgctcgaaaattactttaccaatagtcagcacatgacaaattctgatcagaagatcctaggagcaagtcgagggtgatcaccatggatagtttcaagcactgttaatattaatgccccttatatgtctttgtgccttggatccta

SEQ ID NO: 51736 - DNA, 207 bp, Glycine max
  unsure (1)..(207): unsure at all n locations
accatacagaccttttgcctttcatgcaagcacctggagcaattgagcagcctgatgcttatgctgcanatattacaatagacctcctcaaccccagcagncaaatcaaacacagcagagcaattatgacctttccagcaacagatacaaccctggatggaggaatcaccctaacctcagatggtgcagccctcagcaacaacaaca

SEQ ID NO: 51737 - DNA, 221 bp, Glycine max
  unsure (1)..(221): unsure at all n locations
ttggcacccttaatcatgnttcaattgttggtatggttacgtcttttaatccaaaaaaggaaacttggttaccatgtgagagtaatctggataaatgacaatagttttgggtgttatatgcatgagtatttccatgcttgtttgaacaatgtattatacacaactgcctatcacaaagagagtggctatgcacttnggaatgcatttagaaatttcacatt

SEQ ID NO: 51738 - DNA, 240 bp, Glycine max
  unsure (1)..(240): unsure at all n locations
acacttnaatctcagctgggaattttacatatatgtgtgggcttcgtttatctctacctgttcaaaaaatgtgataatccactcctcatgtgttggttatgttcggatcatgtgatgatcttaaaccttgtgtttgtgagagcaaatggctatgtgaataactttaagaaaccctgtgaaggaggactcccgaacacattttttgtttgggtgtaccttggaacaacaattttttttatt

SEQ ID NO: 51739 - DNA, 383 bp, Glycine max
  unsure (1)..(383): unsure at all n locations
aacttttagtttcgcatattgactcattcttcaccataaaatttccaaaatccaatagctgagcaattggattattccctactttgcttgaaatggtgttggatgatgaccggttggtgcttgttgtgccattgagaaatgtgatgtcctctatccctcacatatatgtactaataataaaagaagtaagaaatcaaaattaattaaaagtgtttaaaacacatttaaatacaagtctttcaaaaggttaaaaggcttacattcacttttctaacatcataataaaacttgttcaaataaataataaatcatctcagctcanaacaaggtcgtccaagacgttatgcaattaacatagagacctattcctaatgcacattcta

SEQ ID NO: 51740 - DNA, 240 bp, Glycine max
cctgttgcgctgcagtattgacgataccatcatgccaaacgctggccagatatgaatcgaatcccatcactgctactaaaactgacgaacataactagggataggtgatgactggctactgcactgtccaccttgaccaaaatgttatggaccatgctgaaaacttcatatgaatctaccccatacactgcctataaaatctgatgacgaaggctgaccatacatagcatacatacatgc

SEQ ID NO: 51741 - DNA, 244 bp, Glycine max
  unsure (1)..(244): unsure at all n locations
ttaaagtggttttgaccttaatggaacaacacaatttattctttttttttaacatacaaactatttggtgtgtgtgctgatgcttaacctttttcttttcattctaattgacttcccttccncaaatttagagtaactttgccttgaaccatatgctctnctaaaatctaaacaaggtattaggagataattatttaaagttaaggttcaattcatgacaaaatcatttagcttatacagggag

SEQ ID NO: 51742 - DNA, 413 bp, Glycine max
  unsure (1)..(413): unsure at all n locations
tggccagagtggctgtggcatggtatacctatcttgaagtcttccagatccgatcatggaaagactnggtgactgccttcattaggcagtaccaatacaatacagatatggctctcgatcggaaccagcttcagagtatgaccaagcgagaacatgagtccattaaggagtatgcccaaagatggaattgatctcgcagcccaagtcgtgccgcccatgatagagagggagatgatcacaattatggtagatacgttacccacgttctactantgaaaagtgataggctacatgccagctaactttgcggatctcgtcttcgccggagaaatgattgaatccggactacgaaaagggaagttcgaatatgctgtcaatatggccctcaacaacaacagaagagccccattagt

SEQ ID NO: 51743 - DNA, 368 bp, Glycine max
  unsure (1)..(368): unsure at all n locations
agcttcatgatctacattctccccctttttgatgatgacaaccacctgtatggtaggagcaacaaccaagaaaatatctatttgcatatagtttactcccccttggttttacaatgaatgcttatatgagacaatngaagattncatatttttcatatataaaaagttgtctcataaaacaatagataatttttcttactactttatcntttatctttctctccccctttgtcaacatcaaaaacaaatcatgaatagagaggagaaagatgttaccactttgtgcaatggatgagaatcaagtgatatcaaaaggcattaaaacaatcattcaatattaatcaaagcaaaacaagtacaataacaca

SEQ ID NO: 51744 - DNA, 407 bp, Glycine max
  unsure (1)..(407): unsure at all n locations
tctntagtttagatgatgcagctgagtttgtagctaccttatgcactcctctaatgactatagcatgatttctggcgctaaactgctgggagttggaagccatcttctcaattaaatttatggcttcaacaagggtcatgtctccaagggctccaccactggcagcatctatcatacttctctccatattactgagtccttcataaaaatattggagaagcagttgctctgaaatctgatggtgagggcaactggcacatagntgtttaaatctctttcagtattcatataggctctctccactgagttgtctaatacctaagatatccttcctgatggctgtggtcctggaagcagggaaattattttctaagaatactctcttaaagtcatctcagctagtgatg

SEQ ID NO: 51745 - DNA, 330 bp, Glycine max
  unsure (1)..(330): unsure at all n locations
agtgcaaatctggaataagtacacaaggtctccccctctttcagcactacaggggtatttagaaatgtattaaaaatatcttcatcgaatttcactaagtgacctctcaccctcacctgcttaggtgatatatcctcggngtcatagaggttcgcataaaattccttcacaataacaatgtctatgctactgtcagcaaaatcggtcaacttctcgtcccaatgtcttctctcgagttcctccttgaactcctcanactcggtgtaataaaccaccacattcctcttcggtagcagcttccgaggcatcgcaatgtcttgtatacctctc

SEQ ID NO: 51746 - DNA, 485 bp, Glycine max
  unsure (1)..(485): unsure at all n locations
ngaagaggatgctntaatggaggaaaagaaatagagaatgtgggatcacgaaattgaaggaataaaagagggaaagaagtggaactctgaagtgtatctcataaaactttcattcatcaaagttacaacaagtattacacatgcttctatttatagactaggtagcttccttgagaagctttcttgagaaaacttccttgagaagcttctttgagaaaacttccttgagaagctagagcttagctacacacacccgtctcataactaagctcacctccttgagaagcttccttaagaagattcctaaagaagctagagcttagctacacatacctctctaatagctaagctcacctccttgagatgagaagctagaacttagctacacacccnctataatagctaagctcacccncatgacaaanaacatgaaaatacaaaaaaaagtccttactacatagacaactcagaatgccccgatatac

SEQ ID NO: 51747 - DNA, 334 bp, Glycine max
  unsure (1)..(334): unsure at all n locations
cgcgaaccttgaccattggtcttccttcccgcgatgcttcttttcatgtccgcctgagtgggcttatagcctaaaccatacttcccacgatttccttgggtatttatcacgctagttatgccgcccgttgtttttcctaaacccatcccgggttcataaccgttccccaacataactcgggccatcattaccgctgcatcggacagacaaggctgcccaaagagggagtccacggaggaaatgctgaccacctcanaagactggaaagcagtttctaacgattcttctacggcttccacataaggcatggaggatgggcagcttaccaagatat

SEQ ID NO: 51748 - DNA, 453 bp, Glycine max
atgagttagacatacccattctgttttatgtgtttgtgatgatgtttatgatgttgtattgctgaaatgcccatggaaaactgttagagatgaaatgtagagttaacctagggttggaaagtgagaatgtggtgttatgagtggaaaaagagtgaggctttgagagttggaaggttaagtctgaattctgtggtaaatggaggtttaagtgagttaatactagcttgaaatgtcatttaggacttgggagaaagcttggactgtgctagagagataaacaaatgatcaaagtgaacaaatagccatttctatggcaaaattgggtgttgaggagtcaaactattgatccgcggaattttatgtgtgaattcagtttgagcaaattactttgaggtatggactgtgtatgtgagagttgcttaactacctattctcaattactttcaactagaa

SEQ ID NO: 51749 - DNA, 381 bp, Glycine max
  unsure (1)..(381): unsure at all n locations
gctngtcatcccacaactgataattccctttattttttgcataaantttgcctgctctaggtatttggaggttttcctgagtcaaaacgaattcgccatacatcgggtccaatgtaaacacaaacactccattatcaagggtgagaacaaagattattgagctagaatacatgcacgaaccagctgcaagaaaggtgcttccgggttggcacacgttcacaacacatctttgttctgttgtgtcatgctgcaaattagcatatgcatcacattaagcactgaattcactaacaatcctttgtgcaattgtttataactctttcttttaagatagtgattaggaggagggtggaagctccttccatgatcaaggtaatactt

SEQ ID NO: 51750 - DNA, 482 bp, Glycine max
  unsure (1)..(482): unsure at all n locations
tataaaatggatntgactaccatagaatgacttatgtatatgctctagtctagctctaaatgcataatgagcttgtgaccttcatctgtgtatgttcttttgttctatttgttctatatataaaagcattcatgagtcttctattattaataccttaaacttgcatgtaccatgttaggtaattactcattcaatctgtagcatgtttgtgttagggaagtactataaaagcattcataatgcatgagccctctccttgtcattcgcataaagcaaaggaataactttctaatttctacatgatagtagtgttctctttttcttctttcttccgaggttcgtttaccagttttacatacaatgatccatagacaactaaactggtagtatcagatgtctatatgacatgtatntagtntgttgaatttataaaatatctaataatatctagttatatatcatataaaacattagtattatca

SEQ ID NO: 51751 - DNA, 440 bp, Glycine max
  unsure (1)..(440): unsure at all n locations
gcttctttggagccatcagacagaaggaaatatttatgtttaagacactagtatcttagcaaaattattattattattattatctttactttaaagaatagctagtcattgaaatttttctccccccccccttttttgtttaaaattntatattattatctatataagttttcctacacacacacacacacatatatatgtataggtatataaatggacatttatttctggcaaatcaagaagctaatttgtgcacaaaatcactctagaatagccttaacatgagtccaaaacaacatttaagcacaaatttaaatcctcttacttgcttcanatttaataagaaatgggtggtgactaaactccacaagttactttgccatcaacaactcatatgacttttctcaattcaaacaacaaccctatgtaaataccaattt

SEQ ID NO: 51752 - DNA, 395 bp, Glycine max
  unsure (1)..(395): unsure at all n locations
aatctacatgaatggcctggctacagtanatgttctggagtatgcactctgtgtgccttttcaattcaaagtattcacgcccgactctagaatcacactaggagtcaaactttccaagtttatccttggtgtttaggatgaaacgctgacatccaaatgagtggaagctagagatattgagcttacgtctcttccataattcagagggacttctataagataggccttatgtaaatgttgttctataaataccaggaaacatttacagcttcaacccataaatctttgggagtngagtgatcgttaagcattgttcatgccatatactgaagagatattcttttcctctcaacaactacattctgttgtgctgctcttggagtgggaaaattatg

SEQ ID NO: 51753 - DNA, 333 bp, Glycine max
  unsure (1)..(333): unsure at all n locations
ctcgtcattgatgttaattgggaattagcacattatgccaaatggcattgcttgatccatgtagccaagtagccaatcctaactagtgggagaaggcttgggggcggtgtactggttgttgatgcaacacattctgcatattcaaattgatttctgcgcctacatctgttcatgagacaaatgtgataatatcttgtcttccanaattataccgacaatcttgcaacagagaattatagcaattgcaaaattaacaatttacgcttgactttctgagctgcacttgatgttgagggtgaatcttcgttaaaagattatatgaagagacttgaa

SEQ ID NO: 51754 - DNA, 305 bp, Glycine max
gccctcctttgctctcctctaacgaccatagcatgacctcgggcactaggctgctcggagtaggactccatcttctccattgagtgtatggcttcaacagagggcatgtaagcgagggctccacctctggcaccagctatccaacgataatccatactaccgagtccttgatcaaaatagtggagacgcagttgatcaggcatcagctggacacgacaacacgcacacagaggttgcaatctctcccgggcatcagtataagccctgtgcactgcatgtctaagacctaagagatcactcctgat

SEQ ID NO: 51755 - DNA, 280 bp, Glycine max
gcagcttatatgtatctcctggtgttattttttcggaagcgaaagtgtggcaggaattattgaccgcctcgaaactttaccgagagtttgggcacgggcctcgtaaactttactacaaccgatgagctggactatgagtactcacagcgaacctgccgggtttgtgagtgtcatacctgaatcgttgtgatatacgagactatggttcttaggacactctttacatctttctcgaaccttgcggaactattaaggggggctgcattgtctcacctttctt

SEQ ID NO: 51756 - DNA, 402 bp, Glycine max
ctgtgtaactcttaaaggagaaaagatttcaagttatgtcttgaggttgagacaaatgccagcaaaaatgctacccttctttataacatttatgagttggaaaacaaagggaaatatcttcaaatggatctaaaggagcttaatgaacttcataatcatcagaaagaagaaaaatatgatctttggagagatcgttcaaaagcacacaaagattatgaagacctcaatatgagtaaacataatctctgtggaaggtgaagaacataagaaatatgtgagtttcttgaataatgagcttctgaagtatctagaacttatgggtcaacctcacgatgttgtaaaacttcatgaccgaattagaaccttaagactatattatcccaattcgtccatggaaaaaac

SEQ ID NO: 51757 - DNA, 246 bp, Glycine max
  unsure (1)..(246): unsure at all n locations
ttgggaacaaacaagatataagtatttcatgcaacatttcaaccttactttcctgtctcacacatttataaattggatttttacttgacaactacttatggatttggaaaaatgaaaaattaagaatttgtaaaatgagagtataacttccttacttcttctttatgggtcaattggtctgtcttcaggttaatttattntataaaccctgagggtttttatgataattttttttattgctatgtc

SEQ ID NO: 51758 - DNA, 441 bp, Glycine max
  unsure (1)..(441): unsure at all n locations
ngctctanattacatngatgttggtatttatgggtggatgttgtatgccacttttgttttaagagtagtgtcccactggtaaaactaactttccaaatgtttgccttcgcaggaaatggccccgaggaagcttgcctcaaagaggtccaggaaggacaaggcagccgaaggaactagttctgctccggagtatgacagtcaccgctttaggagcgctgtacaccagcagcgcttcgaggccatcaagggatggtcgtttctccgggagcgacgcgtccagctcanggacgacgagtatactgatttccaggaggaaatagggcgccggcggtgggcatcactggttactcccatggccaagtttgatccagaaatagtgcttgagtnttatgccaatgctnggccaacagaggaaggcgtgcgtgacatgagatcctgggt

SEQ ID NO: 51759 - DNA, 236 bp, Glycine max
  unsure (1)..(236): unsure at all n locations
atacacagattatcggtgaatgattntgctatacggtaaaaagaagaagaaaggctaatgtggcgagaagagccaagtggttcctaaggacacttgtaattactgcaaagaatcatgtcattggaagcgagattgtccaaagaacacanagagatgtacttctttttgctcttgtttagaatgactccttatcaaaaagtgatgtggttctgaatgctggtgaacaactacaacaa

SEQ ID NO: 51760 - DNA, 467 bp, Glycine max
  unsure (1)..(467): unsure at all n locations
ntacagcagaatttagtaatgacccactaacctagaattataataacttaatgccattaacctagggaattaaaaaaaacttaatggctgagtgtaactgaaattgtggcaaccaaaagtcaccctcaacagccaacaagtcagccaccatttggtctcccaaaaggctgatgcctaggttgccaattgggcccttattacaacttgaactaaacctaactaaagcccttttaattgattaacccaaaacatatttttggtcagccaactctacaaggattgggtcattatttagacaaactaaacactctaaaaattgagacaaagtggtgtcatntagtcctcctccatgtgggccatgatacaactcacaacacttggactttctccttgaaacttgngcttgtatcaaatagtatggcaacacttgttgagagcattctcgctttcctgctctacccttgcat

SEQ ID NO: 51761 - DNA, 287 bp, Glycine max
  unsure (1)..(287): unsure at all n locations
nctggcctgtgcacaatgctatgtttacagcataccatacttatactcgcatcatccgctattaatccttattcagctgaatcatacagccgtctatggtcccaataactgcttttataatcaatgctcgctctcaaattttactaaacctgtactatttcttatacattatgccgcgattgttcatctataattgtgtgtttaacactttctccataagatcatggccaaccactcggtcaatatttcatggttatactgtcngtaactngccattacgcactctt

SEQ ID NO: 51762 - DNA, 144 bp, Glycine max
  unsure (1)..(144): unsure at all n locations
accacttgntagacaagtggcctcagacatcttaagaaggtgggggggctgaattaacatattacacactattttcccaattaaaatgttatatcactctctattcacagtacaacattcccttaagaacgaacttctttaata

SEQ ID NO: 51763 - DNA, 351 bp, Glycine max
acacttgaatctcagcttgtgaatagaatacactaaattgtattctttacgattgactgctgccgaaaaacaaactatgtaactcctaaaagggttgtgactgtttcaaaatgggtataactttttatgaaagatatgactcttctagatggtcttgttgaccagacatgaagagtctataaaagcaaggcttagtgttgaatttcaacaacttggatacagttacaatcattacataacacatctctacaagcctggcatctcgttgaacagcttctaattctatgaccaaaagcacctgaagttatatggtttctagaccttataactaggctattcatctattatctc

SEQ ID NO: 51764 - DNA, 264 bp, Glycine max
  unsure (1)..(264): unsure at all n locations
ctaggtacttacccgttgaagttctaagaacgaatgaagaacgtcgaagaacggtcgataatcttcgcgaaattcctcacggaaacgttacggaaacgtttcggaagcgcctcggcttggattttcttcacggaaataatttttccaagcaaattcgaaagagagagaagtgcctaaggggctgaaccctnttccatctcacttcctcccctatntatagcaaaataggggagatgcttgccgcccagctcgcccaggcgagca

SEQ ID NO: 51765 - DNA, 343 bp, Glycine max
gtcggcagaagagcataaaccacatagtctggcgatagggtgcaaattttgattcatggccagctgggttaccaggttaaccaaggcatctagtttaccttcaagcttcttagtgtcacctgatgaattcgtggctacttcatgcacccctctaatgacaatagcatcacctctggcactaaattgctgggagtttgaagccatcttctcaattaaatttctggcttcagcaggggtcatgtctccaacggctccaccactggcagcatttatcatacttctctccatgttgctgagtccttcataaaatattggagaagctgctctgaaatctggtggtgag

SEQ ID NO: 51766 - DNA, 272 bp, Glycine max
  unsure (1)..(272): unsure at all n locations
ttatgacagcttctacagatgaccaccgcacagaatttcagagcagccacatgcctatttggggaaaagagccttagaagcagaaaagaggagcagcttgtgcaatgaagcctanggtttggaatttgagagagaatattgagtagagagtgagtgtgagattctgagaagaggaggaggaatccctcttcttgtgtaaggaactatcattctctgcttttaatctcatttattgttagtatttctttgtaatggctggctaaacaccctag

SEQ ID NO: 51767 - DNA, 207 bp, Glycine max
gggtcagaatcatacacttttctcaaagaacctatggtggttcaatgtgcagcatgatgtggtattacaaagactgagtgagtgttctaaccaaataaaatgacgtcatgagctattatgtgtagaagtttcttagattaacgggcaaactatatgattttgacacagttacattgattacaaactccatatctacgatcttgacat

SEQ ID NO: 51768 - DNA, 376 bp, Glycine max
  unsure (1)..(376): unsure at all n locations
tcattcattccttccccatacttgcccttntttattaggcacttagctttcattcctgaaattatagcatatacacttattaactttatttatacttacaattttttttaaacacatagaacagaaacagtgtgtatatactantttcttttaccatttcaatccttacccattgcctcccccaaatttggaactggtggatcaagtggcctcagaataattaagaagggggagtngaattaattattaatgtaccttggctaattaaaaaaatatccttcttaatgttactagattncaatagggctttactacaaagttaagaaaagtaaaaacagaaatagaatcttaaccaaaagtaaaagcaataattaaa

SEQ ID NO: 51769 - DNA, 484 bp, Glycine max
  unsure (1)..(484): unsure at all n locations
ggtaggattatggggtacccatcatatgtggtactaggtgtcggtctggcgatggtgcacaacaagttntccacatccacaaagcgcacataaacccaccatcccttgttgcccacctccaactgagctcacgtactcccacgtagcccataacctcgtttctctcaacaccgggtccccatcaatcctcccaagcttccccaacatcaaagtaatacaacattcaaacagcacaagctatcacagccaagcaaaacagggcaaaggcagaaaactctgcccaaaacaccaaccaaaatcacagcttttcacatacaaataccccagaaacatttccttcgttctcattcgttaaccgttggatcaactcgaaatatttactggaagtctctagtacataattctacatattgaccggtgggatctactagcaaacatccagaacgcattctacattactctntccacaaccagcanatacatg

SEQ ID NO: 51770 - DNA, 419 bp, Glycine max
  unsure (1)..(419): unsure at all n locations
gcttcttagtctcacctgatgaagatgaattcttttttcttcatgcacttttctaatgacaatagcatcacttttggcactaaattgttgggagttggaagccatattctcaattaaatttctagcttcagtaggggtcatgtctgctagggctccaccactggcagcatctatcatacttctcttcatgttgctgagtccttcataataatattggaggagaaactgctcataaatctggtggtgagggcaactaacacattngtcatagcctatatggtacactctctcagtagaatttcttggatactaatagattccctacacgttangtatggcacgacgtggtaaggatcataaccgtgatgtcctcgaccgcatcacagctattgtggaaactctaatgcangaacgtgatg

SEQ ID NO: 51771 - DNA, 422 bp, Glycine max
  unsure (1)..(422): unsure at all n locations
tcgaagaatggaaaatgaanatttggaaccaagaatgagatgctttcacgaatttggtaaggaaaacaagaagagaaagaagattaagagccccttaccaaagctttgatggaagaaacctcaagaacaccttgtatgaagcttagaagaagaaagaaattgactcctctccctcttggtgaactcatgcaaaaatggtgaaggaagggttccaaattgatttttaaagaaacaagaagataaggcttaaggctttacattgacaagcttaattgaaaacataaatgacccatgaccagccatggtgaacgtgccaagccatgtcatttagggttagtgttgcttctgaaatnttaaccaaaaatggccaaagtanggttaaaccaaanatggtaaatcctatcccaatcccctagatagac

SEQ ID NO: 51772 - DNA, 140 bp, Glycine max
  unsure (1)..(140): unsure at all n locations
gcagcttgtcatactcatacacatggatttgttatatcatgctcgaacaagctttggtcaatatacttatgaatcatagctacaaccttatgaataaagagctcttattcattgtncttcttcccctncgacttattatc

SEQ ID NO: 51773 - DNA, 416 bp, Glycine max
  unsure (1)..(416): unsure at all n locations
actatgaaactaagccttaaagctaaaacactctagcagatgttagaaaatatttcttttctctagtacaaaagatcagtttaaagatcatacctactgtacacgtgtgaagatggctctattcctcttgctcgcatactctcaaatgtttggcgtgcatgatgcatgtcccctccgtcgccataatatntaaccatcaagccatattcttttctagcaggctgaanaattaataacaacaaaatgaatccaagaacaattacttaatacttataattaaaattacaaaagataaacacaggtgcacattaagaattttcgtgcagccatcatctatgtgtatgcaaaanagatagccactctctttttttcaaaatttaaggacgtattattatgaatctactactgtctctgac

SEQ ID NO: 51774 - DNA, 589 bp, Glycine max
  unsure (1)..(589): unsure at all n locations
tttttgaganttccgacattttttgttagncttgttcaangcagtcttaccttntggtcctcctcatagatgttcattataaacaagccctatttncatctgccactctaagtaggccttcggatcaccccctcctttaaatggaggaatcgtgagttcaataccatcaattctgttctgctacgaacaccatcattccctctctcctgctttgttctctcttatgagctctattctccatttgattcaccctctcatggagcgcatcatctcgctggttcattaacctcctccaatgttgcatcatagtttgcatatcgcaatgctacacgccccctctcttattatgatttataccgcgcatctccaacacactacacactcggaacaacacaattatcagtgctgtttgtatacctctctctctacagtgtgccacccatctctgcttctatatattgacacaccctactatctcctctcaatctctcccgagtcctctgaacattataatctcggcgcacctacaaacctctctatcttttttcgatntctactaccgcgaccgtccccactatcatccttgtcg

SEQ ID NO: 51775 - DNA, 369 bp, Glycine max
  unsure (1)..(369): unsure at all n locations
gtgtngaagggtgagacttcctgctgttattgttgaccatttagtggtacctggagatatgtcgcaggggtcacgaaaccttgaggacgtcacgtggggtgctattgcccaaaaccaagcttgaccaatcccgacccaacccgggcatagtcggtcagtgagaacctcggatgtacctaatcacgcgaactcctggctctcggcagataaaaggaacacaagaccactatgcatggaggcttgtggtggctggccagctgtgaactttgtgtaatatgcggatcgtggcctctggtaataaattactaagggtgggtaatccaatacaacggctgcaattgaagacaggaggctgagatggtctcttgt

SEQ ID NO: 51776 - DNA, 397 bp, Glycine max
tgttggtctgggtcacggataaaagggaactgtccacattatctccatgacacatatgcaacaatgatgatattcacctatgtggacactcaagtgtcgaaattctttggacatgtgatgctagggctcataattcatattctctactttagtcaaccaagtgttttcaaaatatgtttttctatcaatatgtgcattcatccgagtctatcttgggtgttcggaaaaactttcacagcatgtacccttcaaatttgtacacccattctcttcaaaaattggtatgatcactgaatatttcaaagaaaagccggaagtctttcttttcaaagcatgttggcttttagctaacaactattttcgttttcacttttacttcatcattggtattcttttc

SEQ ID NO: 51777 - DNA, 278 bp, Glycine max
gagcctcgaatcctcccttgttaaagccactcagccttaatgcaaaccatggttctccattacttaggaatgtgggctcggaatagttagtgaataactgtggggggtatagtttcattggataatatggtctgacggctatgcttcatgacgtattcttgggccatactcgatgtacatagtatattgcataatgtctgacatgctgaatgaaaagttctacctcaaacgactcttggataagctttctagcactttatgggagataactctagaaa

SEQ ID NO: 51778 - DNA, 355 bp, Glycine max
  unsure (1)..(355): unsure at all n locations
gggcgatggtgcaagtcaactttccacatccacacatcacacatatacccaccattcccagttgcccaccttcactgagctcacgtactcccatgtagcccttatcctcgttcctctcaacaccgggtccncatcaatctcttcaagctttcacaacatccaagcaattcaacatcccatacatcatgaactatcaaaaccaaggaaaacaatgcagaggcaganaactcagcccaacacaaaccaatatcacaacttttctcacttatagaccccagtaacatttccttcgttcaatatgttaccggtggatcgactcgaaatatactggaagtccctagtgcataaatctaca

SEQ ID NO: 51779 - DNA, 385 bp, Glycine max
gacacatagaaactaagctgttgaaaacttcctgaaagcagagccattctctctctcccgtgcataactaagcacacctacttgagaagctttcttaggaagacccgcagagaggctagagcttagctacacatacctctctaatagcgtatgtcaccttcttgagatgagaacctagagcttactacacaccccctatcatgctaggctacccgcatgaaaaacataacatgacttgagaagaagtcttttactagacaactttaatccctgcatacaggctaaacctatctagtgaaggcacatacaagccgtgcgaagataactattaattgacaagatagcggctatctagacatggctgaattcccaagctatgaaccta

SEQ ID NO: 51780 - DNA, 303 bp, Glycine max
  unsure (1)..(303): unsure at all n locations
atgatttccacaatagactttgctctacataatttggaccatgtatcattcataatggatatactttgacatgtgtatacacttatttttctttgtatacgtgtagtaaattatgaactatatgaactattgttcagttgtcagaacattaaacanatacgttctcttaaaaatttaatatgttggaggaggaaccaattcgttgtaagtgagaccaatttgtaacctatttgcagctctctttctctcaagtattggaatgatcatacatgtgtacttccttgtatataggttggacctctc

SEQ ID NO: 51781 - DNA, 489 bp, Glycine max
tattcttcaagttcaaactacctaacgacatccatgagtttaaacatcagaatgtgcacatgtcatacagttaaggaaacaaaaaagaaagaaaaagattgtcaataacaattcgaaatatgcacaaaaaagaagtttctattagtaccttagaaaccagaaatgcacacaaattaggagaaggtgaacaaaagatgtaactcttcaaaacacattcgaatcttgtttctgaataattcaagagttcaagataagagtcaataagaaagtttagagtcaagaatcaagattcaaggttcaagatctcaagaatcaagatcaagattcaagactcaagattcatgaatcaagagaaggcttaatcaagataagtatgaaaaggttttctcaaaattgagtagcacatgatttttcttataacatgtttaccaaagagtatttactctctggaatcgataccagattggtatatcgataccagttcaaaat

SEQ ID NO: 51782 - DNA, 304 bp, Glycine max
tccgctagcttagtgaacgtctgctaagcgcaacacttatgggctaagcgcgaggtatactctggaagaagatgagctgtacaggtttgctaagcgcactgcttcatcccactaagcgcaccgcttcagtccattcgctaagcgtgaaaggcacgcattaagccgaaattcactaatgtgcgctaagcggtccagaattgcgctaagcgcacgagcatgaacaaggccatctatttaagcctgaaatcagattttgtgaggggatgttgggctgagagctcgagtcttgcatgtctagtgattc

SEQ ID NO: 51783 - DNA, 402 bp, Glycine max
atgtctcatattggtttaaccaattatagtcttatcataatcgattacacaattgtttttgagataatgactgatttattcaagagtctctactttaatcgattaccatgtcatataatcgattacttccctttctataagtgtttcagaagtgaacaagaacactttaattgattactttgagtatctaattgattacattgttcttatgttctttccaatttttgagaagaacaatttaatcgattaaaatgataatctaatcgattacatcattgaattgattgattaccttgtagatttaattgattacagccagctatagttgttttctctataaataaccaacttgtgctatctctaacagacacaacatttgatcttttgaagagcttggatcac

SEQ ID NO: 51784 - DNA, 377 bp, Glycine max
ctctaaattacattgatgttttatttatgggaggagggtatatgccattcttgctttaagagtaatgtcccactaaaactaactttccaaatgtttgccttcgcaggaatggccccgaggaagaatgcctcatagaggtccaggaaggacaaggcggccgaaagaactagttccgtcccggagtacgacagtcaccgctttatgagcgttgtacaccaccagcgctttgaagccatcaagggatggttgtttctccaggagcgacgcgttcagctcatggacgacgagtatactgtatttcaggaggaaatagggcgccggcggtgggcaccactggttactctcatggtcaaagttgatccagaaatagtccttga

SEQ ID NO: 51785 - DNA, 253 bp, Glycine max
ctacatacacaacgacgctccgtcgtataatgtacagtgctccgatactggtcagaccgagagcagattgttatagtagcagtgaaactgaaccttagcgaatgccgttgaaagggcttattccccgccacgggaaaccaattgcaggataaggcctgctatcaagtgtaagcataactatagatactaccaaagaataatggtccgcttaggatacatgacgagctcgattctctctacaagccctcaacct

SEQ ID NO: 51786 - DNA, 402 bp, Glycine max
  unsure (1)..(402): unsure at all n locations
agcttgtagagtttcatcgaggcttggatttgtgaacctgtgaggaatcatcaagttgggacttatgtttgacgagtcttatgtgcaacgcatgtgttgtgctcttgcatacatatcactcatcatgggtggcatgtactggagacatcgtgccgtgaatcagtaggactaaccaagggcggacctttgggtttgcaagccctttggaggattgactagggaatngtctaaactgggttttgggcgccatgctgttgcatacatgtcactcaccatgggtggcacatactgcagacttagtggcgtgctcttgcgtacatgtcactcgttgtgggtggcatgtactagagacgtagtggcgtgctcttgcatacatgccacttgttgtgggtggaatctact

SEQ ID NO: 51787 - DNA, 395 bp, Glycine max
  unsure (1)..(395): unsure at all n locations
ctcttaactgaattgcaacattccaaatgatttttaaatggtgtaatcgattacaatatattggcaatcgattactagtatatctgaacgttgaaattcaaattcaattgtgaagagtaacatcttttcttaaaatgcattgtgtaattgattacatgattatggtaatcgattaccagtgccatgttttgaataaaaggtcaagagatgtaactcttgacatacatttcggaagggtataactcttccaatggttctcttgaccagacatgataagtctataaaagcaagacattgacttgcattcaatcaatctttttgaacaacttcttgaacgactnttgagaaaccattaaacctttaccattaaacttcttgaacgactcatgaaaagt

SEQ ID NO: 51788 - DNA, 363 bp, Glycine max
  unsure (1)..(363): unsure at all n locations
aattagttccgtgaagaaaatccaagccgaggcgcttccgtaacgtttccgtaacgtttccgtgagtaattacgcgaagattctcgaccattctttaaagattcatcgntcgttcttcgttttcttcagtcttcaacgggtaagtacctcaaaccaagcttttcaattcactctatgtacccgtggtagtccacattntgtttcatgtatttttattctcgttntcatttactttttatacccccttttgacgtgcttaagccatttatttaagtcatttctcgcttaatctaanaataaagtanatctcaccgatcgttgaatacatcatccgtaatttggttaaaatgaattccgaccgtc

SEQ ID NO: 51789 - DNA, 451 bp, Glycine max
  unsure (1)..(451): unsure at all n locations
ntagatattaggaggagcaggccanagaatattctggtgtgtatgatgtatatatactacatacacaacgtgtacagtggaaatcatacaagtgctgagattctaatcagaaagagaatagtttgttagaatagctgggaaactgaaccttagctctactgctgaaaggggaaatcctttgcgaatgggaaaccctttgaaggataatctctactatcgtttgtttgcaattcaagagatactaccaaagcatatttgttccctttcattccctgtttttcttgtatatctccccgataactcaacccatttgtgggtttctaacaaatacccccccttagcattatgctattctgctactaactataactgcatttaaagctcgctcgtaacgtcgagagtttacttgtttagattgattcattgagagccaatctaactgtactggaat

SEQ ID NO: 51790 - DNA, 321 bp, Glycine max
gtaatatatcgagacgctcgtaattgaaaacagaagctcgtagcaaatgcaaacgacaataaattttaacttggatgtccattaagtcccgtaatatattgaggcgctcgaaattgaataccgaaactgtgagaaaattctagcgacaataactttttactcggatgttcgaatgagtctcgttatatataaagacactacaaagtgaaaacggaagctcgtagcaaattcaaatgacaataactcttaactcggaggatggattgagtcccgtaatatatcgagacgctcgtaattgaaaacagaagctcgtagcaaatg

SEQ ID NO: 51791 - DNA, 428 bp, Glycine max
  unsure (1)..(428): unsure at all n locations
acatganntgatacatgattgngacttgttataattganttgggcaagattggatgaggggaagtgtgattttcgaaatctgcacttatgcagaattttgctgtcaaaataggtgcagcaggagtttggctttgtgcagaaaaatgcttgtgtgtggttggctgtggaaagagtagtacagaatgagttctggatgtttgctagtagatcccaacggtcaaaatgtaggcttatgtactatagacttccagtaaaattttggagtcgatccaacggttaacgaattggatcgaaggaattgttactgtggtctttaagtgagaaaagctgcgattntggttggtgttttgagcacagttttctgcctttgccctgtattgcttggctgtgatagcttgtgctgtgtgaatgttgtattactttgatgt

SEQ ID NO: 51792 - DNA, 455 bp, Glycine max
  unsure (1)..(455): unsure at all n locations
attgttagtaaattataaatgttggctaataaagaaaattaaagaagaaaacggtcatacttgaatgtcctcccatatcaaatccttctgagcagtagggacatccttccaagtctggtatgtcacatcgacattatcacgagcgacaatccccanatatgttcttaatttcttcttttggggaccgtcagccttgccagtcacaagatcgacgtggaccactggtctctttgccccaggtggtctagtggccaaggatcgtagtcgtgtggtgttgcgtgtccgcttcacgatagacaaagatgctgatgggtctgtaggaggaggaggagatgaaaagaangatgaggaggaggatgangatgcaaccatgtggagtagcatggtttgtaaaagaaaacttgagtagtaacatatcaacagacagatgagtatgtaatcaattaccgaatcaa

SEQ ID NO: 51793 - DNA, 490 bp, Glycine max
tgacaaccagaactgttgcatgagacttcttgctaactgtgtttgtattgttttcttccatccttatatcatatccccatcttacatcctctctatcttctttcttattcgtgtttttcaacctcctactatgtttagcaacaacatgtgttgtgctagtagttatgcctacataagacttttcaggtcttagttcaccttttcctgagatcacactctttacagttgtattctactgatgcgactttgcatatgttcctataactatgttgacctcccatttattttgttcttcaaaatttggaaaattcaccatcatgctcatattacccacaaagatattgtgcagttctttctctaatgctacataattttccacctctgtgacacacacaaatccatgctgaataccgtatttaccctctgctggtgatatgaatacttcaaaaacttcgcaaactgaatgacgatctctatatgattacacctc

SEQ ID NO: 51794 - DNA, 253 bp, Glycine max
  unsure (1)..(253): unsure at all n locations
tcactcctgcatttcatctctaccatgcattctttctttctttacccactcctcacgtttggttttttagggaaaaacaccataactaaacgcgccacaaggcatccctatcgcaccagatccaaatctagaacgatgggtgatcaagaggagacacaggaacagatganagccgacatgtcggctctgaaagaacagatggcctccatgatggaggccatgttaggaatgaggcagctcatggagaagaatg

SEQ ID NO: 51795 - DNA, 484 bp, Glycine max
  unsure (1)..(484): unsure at all n locations
cgtgacactatgatactaagcttgcggantggtcttaccggaaaaggatcaaaatgtgtttgtaaagaggtatatctgatcatcctgctntaataaatgcaaaaactanggcaaatgaagaggatgagaatgagggagaaacccttgctatgactgccattcctacacggtcaaatttcccatcagcccaacaatgtcattactcagccaatatctgtccttctcattacccaccatctagtcatccagaaaggccatccctaaatcaaccacaaagcctgcccgccgcacatctggtgccaaaacaccaaccaaaaggaattntgtagcaaaaaacctgttggattcaccccanattccagtgtcatatgctagcttactcccatatctacttgataatgcaatggtagccataacccctgccagggttcctcaacctccanttttccgaggatatgactcgaacgcaacatgtgcatatcat

SEQ ID NO: 51796 - DNA, 280 bp, Glycine max
caacaccaaagaagcggatatatactattataaaagcatcacccaacaacttatatttgttaattgtttaactatcatcctcaatcatagttctcacatttgaagaagtaaggtgtttcacttctatttgtataaactaagtacttatttatatcaatctttccggggtgataatcttaagaatgagagacaaatcgtatcccttattacgcaacatgataacaccctttcttaaattattaattatcacatagatctatcaattataactctgagcttt

SEQ ID NO: 51797 - DNA, 332 bp, Glycine max
  unsure (1)..(332): unsure at all n locations
aaagattagataatcatgcttatgtcagtaattacatagcctctaatttcatataaatcatataatataatataagggaacatgagttagaagcttacaaatatataataattaaaaggtcattttcatatatcacacaatcgaagataacattcaatagttcatcatanaatgttgcatcacatacaaattttgaataggcaacacagctctcagtcaaaatgcattttcagaaattgtgtgttatatctaaaatattaagattgtactactatcagactgagaaccacactcagccgcatgtcgaaagacctgtganagtaatgcaccat

SEQ ID NO: 51798 - DNA, 316 bp, Glycine max
ctactacgtacacaacgtgatctgtggcactcatacaattgctgatagtatcctcatactgagaataatttgttgcaatagcagggaaactgtaccttaggtctactgctctgacgggatatatcatgctaatggccaaccctctgaaggatcaattatactatggaggataagcagctatgaaatactgccgaaacggctacgagcccattcattccctgatcttctcgaatatctacccgagcactctacacatatgtgggtaatgaacgaatactctcctctagcagtatgctatcttgctactaactataac

SEQ ID NO: 51799 - DNA, 462 bp, Glycine max
  unsure (1)..(462): unsure at all n locations
tttattacttcccaaagcttgcanaggatgctgggtagggtaggagaatcaaaatccatggagcaatgcacaactatgattggccactctgatttgaatggagatggcctgctttgctttgatgaatttagagtcatgatgcagcgatgagtctttgtctttacttgatttaatgggggatggggttgaatttcattcatttatttgtaattagattttaaatcttgtgtgatgcacgaattctattacattatatattnttttatatttatataaaaatgaatatgcattaataaaattaaatcttataatacttattagaatataaatgtaattatactaaaattgagaaatatatgtattttaattgcgagatgtattaatataagtctaatgaattattttatgttaaaaagttggttgactgtnttgaccattaactcaatgtanatttacaacaca

SEQ ID NO: 51800 - DNA, 302 bp, Glycine max
  unsure (1)..(302): unsure at all n locations
gattccgctccgattgaagggttcctctctgtgtgttgtttctacggagaacaacagcggtccgtggcggccaccggtggttgtgggtggtggagaacaagcttgggacattgnggaatggttttggaagatagaatgatataagaatgggtgtttttcaaggctacacgaataataatgttagacaagtggcctcagatatcttaagaaggaggggttgaattaagatattccaaactatttcccctaattaacaaactatatcacttttactcaagcaatgaattcccgtaatgacaatc

SEQ ID NO: 51801 - DNA, 368 bp, Glycine max
  unsure (1)..(368): unsure at all n locations
gctagtcataaatcatatcacatcctaagattcaaagacacgatgaaaaataacttgaaatatatcatataaataaaggtatagagctcagtgtaataattttaagctagaagttgaaaaaacaagacataattctcacacaacataaccagagtagtaatggaacatccaaatagagtacataaaatgaatgataatgtgaaaccctatttcanaagaatgaanacagcataacacaataatcaaatagggtgggtgcttcttcagttccatttggttatcaacaacaacaaagccatggtgaggttggctacatggatcacatgacaccattcggcacagntaaaaaccanaggtagatatataca

SEQ ID NO: 51802 - DNA, 425 bp, Glycine max
  unsure (1)..(425): unsure at all n locations
tagacaccaccagcatcaaagaattagggcggttgatggtacctctccaaatgcaagctttccgcaagacttacggaaagatcatagagttgaccttagcagaggtatccatagaagccattgcatcactcacccaatactacgaccagcctttgagatgcttcacattcggagacttccaattagtaccaaccattgaagaatttgaggaaattctaggatgtcctctcgggggaagaaaaccatatctttcatccgggtgtctcccctctttgagcagaattgcaactgtggtcaaggattcagcaagaggtttggactgcataaaacagactcggaacggcatagcgggcctaccacggaggtacctagaagacaaagcgaggggtatggccaatcaaggagatngngtcccgttcatggat

SEQ ID NO: 51803 - DNA, 232 bp, Glycine max
gaagctccccaagttccaactccgaacacgactcgaccggccggtaattccaacacgacaaggaacttccctccgaggccattgccggaattcaccccgctcccaatgacgtacgaagatcttctaccatccctcatcgccaatcatttggccgtgataactcccggaagggtcctcgaaccccctttcccgaagtggtatgaccctaacgcaacttgcaagtaccatgggg

SEQ ID NO: 51804 - DNA, 431 bp, Glycine max
  unsure (1)..(431): unsure at all n locations
ngagccttgaattgagtatcgttgtcggtgacaatggtgtatgagagaccatatntgtgtataaggtgtttccaagtgaattnttccacctcgctggctgagattntgcgtaacggccttgtgttaatccatttggtgagtaatcgatggtgactagcaaatatttgagtgctcttggggctattggcagcggtcccagtatgtcctttccccacatggcaaagggccaaagggggcttaagctatggagattgtttggagaggtgtgtgagatgtctgtgaatacctgccatcatctgcacctatctttgaagtcaaaggtgtttgccctgagtgtcgatcaatagtagccgacatgcaccacttcggttcaatggagtggtccctagtatggagactataaatcccttcatgaagntgtctcatgacat

SEQ ID NO: 51805 - DNA, 288 bp, Glycine max
gcttctagccaaatggacttaccttgtatttatttctttgatagcccttttaagccttgtttccccttccttgtgttgaagctcactacaagccttaaatgaaaaaccatgatatcaccatatctttaaggaattttggagctctggaattgttttgggaataagtgtgggggggttttttttgttcattggataacttgtttcgttggctatgcttcgtgatgtatattgcgccatacttgatgcacattgtatattgattaaatgttggacatgctgaatgaaatg

SEQ ID NO: 51806 - DNA, 296 bp, Glycine max
  unsure (1)..(296): unsure at all n locations
tctggtgggacatctngacttgctntccaatctgacattcaccacagattctgccttcttctattttcagattgggaatgcctctaacagcacctttgtcaatgattttcttcatgcctcttaagtgcagatgtccaaatctttgatgccatattttgacttcatcttctttggaggatagacatgtggaagagtcactgggttcttgaggtgtgcatangtaacagttgtcctttgatctgctgcccttcattagaacttcactcttctcatttgtcaccaagcattatgacttt

SEQ ID NO: 51807 - DNA, 343 bp, Glycine max
  unsure (1)..(343): unsure at all n locations
tgactggtcttcctatgattntacttagtgagagtgacctgacatacccattgtgtggtgcgtttttttatgtactcctaagccccctagtgtggtttttcattgatatggtaccacattgcatataggctggagtcttagtataattgctgcataacacttgtgttggcttccattgagttaacaattgtggtttgatattattttctggagtgtgtgaacttgaatggatgtgaataatgtgtgtgattttgtgaagtggtgctatttatataaattcaactctaagtattatatgttttacatgctctaatgttttagtatatatgaatgtgataactca

SEQ ID NO: 51808 - DNA, 479 bp, Glycine max
tgatgcttctacttgtgatgaaaagatttatattatattttagaagatgtacaagctctttgattaatatgtgagtgtgaagtcaagttcatctacttcatcaagttctcaacaacctactgttgaagaagatttcagtatagaagaaaatcaagagatggatgatccatataatgttagtcttttcttttgtttgattatttaattgagttatgattcaatttatttaatttaatttttctcttatattgtcataggaatatatcaattatgtgagccaaaatgttaatgtcaatgacaaggctgaattagatctctatttggctgagacaccactcgagccaaagttttttcctaaagtggatattttgagttattggaaggaccgccaagaacgttatccaaatctttgtaattggcatgtgaggtgtaagcattctatacaactgttgttgtgaatcgacattagcattgtgctc

SEQ ID NO: 51809 - DNA, 414 bp, Glycine max
  unsure (1)..(414): unsure at all n locations
gcttatattactattacgtgtgggtaatctattttctntattaaatggatgagttagatattttaatggatattacaggttcctaaggatccaccattgtcccccctgaggtaaattaataactaacacactgatactgttaggaaccaaaaatagaaattaagaacagaaaaaatggaagaaattgaatggaaagaacggaaagttagagatctctcctagggacagtcagaacaattattgaggttagctagtgataggggggaagggaaggaatattcattcagagactgngcttatttgcttactgttcctaactactattgagttatatnttttgcaaaggattttctattgagttagggcttattcagtcattattgggtcatgtaattctatgctntcatgatattc

SEQ ID NO: 51810 - DNA, 452 bp, Glycine max
  unsure (1)..(452): unsure at all n locations
ntacatcaaacaccttgtgcacacaatgccattcacattttatcgancatcgntattgatgtacaaatcatatccaaacccaccaaccaagagtgtttgggcatggagttgcaccccaaaagatagcagagaagggtaataacattggacccaaacatcattttctcatggaacagtacaaataaactacttggaaaaggaatcctcgaagagagtaatccaaagtaataatgagatccgagaattacctggatctagtgtcacgttcatctaattcttttttattttctttttctcattcttgcatgattaaagttaaaaacacgattanttaagtcaatntaaccaaaatctttgattcccgaatgaacatttngtccgagacttactctaatatagtggtgtgttcgcgtaaggtcttttttagtttccttttacatcacactctctat

SEQ ID NO: 51811 - DNA, 276 bp, Glycine max
  unsure (1)..(276): unsure at all n locations
tntnctgngcgtngactaaactcatgttggcagctatgatctatgtacgcgtcctccttttatatacttattaatgcgctcatccatgcgtctcacggtccaatatctgacttaaataatatccacctctctcgccttatcggagtcctggactatacatctatgcttcatgcgcatagataccatcagactcttatgaactcgaacctcgctgataaccgtcgtgcttcatttattttgccagagaaactgccaatcacttcttattactcttcc

SEQ ID NO: 51812 - DNA, 374 bp, Glycine max
  unsure (1)..(374): unsure at all n locations
tactgacttttgagtctcgccgacggncgaaaatacccgagtgggtattcgtataaactttctgttgtctataagacgaaaagcctgatagcacgcagaagactaacgtcgtcttttgcgcccttcgtcaatcgcggccgacaagccccgtgacacgtggagatttacgttatcttccgcgctcacaagatctgtcatactgacttttgagtcacgctgaccggcgaaaatacccgagtgggtatccgtataaactctttgctgtctgtaagacgaaaagcctgataacacgccgagactaacgtcgtcttttgcgcgcttcgtaattcgcggccgacaagcaccgttgacacgcagagaattacgtcatcttc

SEQ ID NO: 51813 - DNA, 386 bp, Glycine max
  unsure (1)..(386): unsure at all n locations
nttcgtcttacagaatgcanaaagtttatacggataacctctcttttatttccgcccgtcagcgtgactcanaagtcagtatgacagatcttgtgagcacggaagatgacgtaaatcaccgcgtgttaacgggcttgtcggccgcgattgacgaatggcgcagaagacgacgttagtctctgcgtgctatcaggcttttcgacttacagacagcanacagtttatatggataaccactcaggtatttccgcccgtcagcgtgactcaaaagtcagtatgacagatcttgtgagcgcggaagatgacgtaaatcttcgcgtgccaacgggcttgtctaccgcgattgacgaacggcgcagaagacgacgatagtctctgcgtgctat

SEQ ID NO: 51814 - DNA, 240 bp, Glycine max
  unsure (1)..(240): unsure at all n locations
atgaccattngaatttctcgagaggtttcgatgttcaatttccagcatccccatatgtgatgttcttgaatcggacctccgtgtgaaaagttatgaccatttgacattctcgtgacgctccggtgtttaatatccagcgtctcgatatgtaatgttcctgaatcggacctccgtgtgataacctatgaccatttgaatttctcgaaagcttccgttgttcaattatgagcatctcaatat

SEQ ID NO: 51815 - DNA, 369 bp, Glycine max
  unsure (1)..(369): unsure at all n locations
agcntaccgatgatgccatcaacatttctaacacatttgctttgttattatggatngaatagaataaccaatggccggtgtctgtcgtatatgaccccactgaatttcagcgaatggcaatttttacaacctggcgaaagtttttattacggagagaagttttttgttttgtgttgcctaaaaaattacaacgtaggacggctaggtttttcggtgcgagctcaaccgagggttcgttccgaccgacactggcatgttgttcttctcaattatgaggataagaaaacgttcgcccaccccggcaaaaacaaataanaaaaaacattattcacgcaaacngataaaaaaaatgattgctgacgtctgcat

SEQ ID NO: 51816 - DNA, 310 bp, Glycine max
  unsure (1)..(310): unsure at all n locations
acctatggagaagntagatgagagagaacaattataaacatttttttatggaaaaaattataatctcccataacaatccaatcctaacaaacttctatacgaagaattgtaatcatttcatctccttaattccttttatgttcttttcctctaagtgcatattgagaaatttatccaaatcgtcatcttgtaaatgcagccatagtatgtcacataatngcagaaatatattattttcatgtttgaactctgtgtcaaaagacgatgacttttttttttttttaatatgtgaagcacacaatactttaat

SEQ ID NO: 51817 - DNA, 358 bp, Glycine max
  unsure (1)..(358): unsure at all n locations
aagctgggtaagtgttaacatctattgtgaattgggtctgaccctttcttattgtcctttcgnttgattgattaggatcaaatgtcattgaaggtgcacgtgccaactccagctgtgattgcaaatactccattgcaacaccctttacgacacgagctattcgagcaagtggtgattgtttgtgatcccatcttagagcaagatctttgcttctctggccagaaaccatgcatggttgagaagctaaaatcccaacacaaactaaaacaaagaaccctcgcagcaaagtcaagagactcatcatgtctatggctatgaaaaacttggaggaacaaaagctntctctttcagtttgaag

SEQ ID NO: 51818 - DNA, 403 bp, Glycine max
  unsure (1)..(403): unsure at all n locations
gcttgacctgtcaggctaagcgccactntgtctttgttatcaacctttgaataaagctaagcgtgccctgtgtgctaagcctgagtgtcattctggtgaggctgtgctaagcgtgccctgctgcgctaagcctaatctatagaaaaacattctctgtgtctttaggctaagcacatgtctatcatgcttagcccatgagtaaattngcataaggtggcgtaagcccagcatgctacgctaagcgcccagtccaattntcaggtntatttttctatntttgatgaaaataatcctgtttaacattgcgggttgatcttatttctttcagatggcatcaaagaagaggaaggcacctgcaacaccttcccaggtctcatatgacagatcaagggtcacttctcta

SEQ ID NO: 51819 - DNA, 297 bp, Glycine max
  unsure (1)..(297): unsure at all n locations
gaaaactctgctcaacacatcaaccaaaatcacagcttttctcacgtaaagaccacagtaacaattccttcgatccaattcgttaaccggtggatcgactccaaaattttactggaagtctatagtgtataagcctggcatttgaccgttgggatatactagcaaacatccagaactcattctgcactagactntccacagccaaccacacacaagcatttttctgcacttgtgcaaaattctgctgcacaatttcacagcaaaaattctgcataagtgcagatttcgaaaatcacc

SEQ ID NO: 51820 - DNA, 437 bp, Glycine max
gtgtctgcagatccctcatttgagactaggcttattattttcaacattatcatcacaacatattaagaaaacttaaactttatctgcagatccctcatttaagactaagtttcaatcctgcttctatcaagttctaaggcaagagtacattttccaatgctaaaggcacctaactaaacatacaaatgggtgatcagaccaatagcatgtagacattaagcatggaaagaagcattggacacagaatacacaatcaattagatattaaagtaattacatcagctgttccttagaaattaccaacaaaagtgtttagccagccatacagaaaaaccttaacacaaatgagattaagagtagagaataattgttccttacacaagaagggggatcccctactctcttttcagcatctcacaatcactctgcaactcact

SEQ ID NO: 51821 - DNA, 296 bp, Glycine max
  unsure (1)..(296): unsure at all n locations
gcagcttctcatgattatgcgcctgatctttattccgtgaatggaatgactcttggaattcttaaaagctctcgttgctcatctcaagttcttatttattatgcgcctgaatcggactnttcgtagaaagctatgatctattgtatttcacgagagctttggttgtccaatttcgagcgcctcgatatattatgctccagatcggacctccgtgtgatatgatatgacctgtacacgtacttagaccatacctgttaatgtcgcgcgtctcatataatatgcgcctgtatcaacat

SEQ ID NO: 51822 - DNA, 166 bp, Glycine max
gacacatagaaactaagctctcgaatattatgtgcctgatcggactacgtttttatatattaccacttgaagctcacgagagctttggctgaccaatctctagacgctcgatatatcatgcgcctgcatcgtagctatagagcgacaagaaactgaaacgtcgaat

SEQ ID NO: 51823 - DNA, 310 bp, Glycine max
  unsure (1)..(310): unsure at all n locations
tttatttcaaaaaggaagtcgtatctagtcaaggtcttagagaccatacaagtttcctaacgatttctaattatgtgggccattaagtctatcatatgctgacaatagccgagaagcccatgaatctcttcgggggcggagtaggtgtctgccatcgccttggccttggctaacaatcggngaagttcttgactcccgttcaaggtaagagcaaaccgatccatccacatggttgcctcttggtgtaagagtcgatcaccctcctctagccttttntcgcgttacttggcatattcgccgcaatctatgc

SEQ ID NO: 51824 - DNA, 397 bp, Glycine max
  unsure (1)..(397): unsure at all n locations
ngagatgaggaagtgttgaagggtgaaacttcctgctcttattgttgaccacagagtggtacctggagatatgtcgcggtggtcaggagaccttggggacgtcaggtggggtgctattgcccaaaaccaagcttgaccaatcccgacccaacccgggcatagtcggtcagtgagaacatgtgacgtacctaagcatgcgagctcctggcagtcaacagataaaaggaaaacaagaccacagagcaaggaggcttgtggtggctggccagctgtgaattatgtgtaatatgtggattgtggcctctggtaatcgattaccaagggtgggtaatcgattacaaggcttaanattgaagacagggggctaagatggtctctggttatccattaccaacgg

SEQ ID NO: 51825 - DNA, 282 bp, Glycine max
tatcttcaaagattattgttggtggagcagttaatgcttgcattaaatgcacatactccttattgttggaaaatcactcttgtaagcttctgtgttgatcatttcagtagaaaatcacttactttaagtcagagcaggtctttcatcagtagtgcacactctttagtggtgttagacaacttctagatcttgaacttcatttatttttcataggatatgacacatcctaggtgaatgcccatgcaaaacaaatctaaatagatatgtttcttcacttgagct

SEQ ID NO: 51826 - DNA, 447 bp, Glycine max
  unsure (1)..(447): unsure at all n locations
tgttggttctctgattcctttacttatttatttcattacactaactaattaagaagaaaaaaatgtcattatgtcaaaactctcttagtgttaaaataaaaaaataccattcatcggatgatctgttgttgcctactttgagttgcctagttgagctgcttagcctttcaaagcttcaatattagcttccttcaacataatntanaaaacaaattattaaaaatgtatttatgccattttgtatgaagactcagtgtatgtttgaattgaagttagaaatatcttccaatataaatccaacacataaaagaataataattaagaatcctgattcttttgacaaaattatctntgcttcataaatatattttcacctaaaaatcaaacatatatgcacttaactaatgacanaaggagttgagcttagtaaaatggattaagttctca

SEQ ID NO: 51827 - DNA, 390 bp, Glycine max
  unsure (1)..(390): unsure at all n locations
gctttagacagggtttgaaactcttttaacattaatgcaatggttctctaatcaagaagactatttctttgaccattggcaaggtgcttcctggttgtctgtggtctatgcagatgacatttgcttgttgccaaggctgcatgtgctcatttattaggccagcttaagcttgttcaactgaatcttggtccttacaatattttgggccggaagtgaaagtctagaagagcattgcttgactacgaaatatgcccttcttatagaggatactggttttggtgcnaccatctccttcaaggatcaattaagctcacatgctcaggggattactgccgacctcatgacaacgtactggcgctatgactactattcaagcaatatacattgtgt

SEQ ID NO: 51828 - DNA, 332 bp, Glycine max
aaatatgagaatttaacctaagtaataagtttcaagctattaatctatataaatcactcttatatttttccttttatatttaacagctttagataataattcacaatgtatcacattttcaggtggggcattcttaattattatgctatttccctcgtcatgtgagttcaaactttcttttaccttcaaaacaaactaacctttttcagtacgtaacaccctaaccctatcttaaggaagattcaatcgctctgaatttgtcgctgcgtattttaattcacatataattctatcaagagaatatcttttcttagtcccatcccgtgcggact

SEQ ID NO: 51829 - DNA, 467 bp, Glycine max
  unsure (1)..(467): unsure at all n locations
acacatgaatactaagcttaaggagcactcaacagggtgaccctctttgttctctctttgaagagcncgtcaagggctctccctcttgattcatattcaaccccaaaaacattttagcacacaaactctatctatgaactgtacaaaacacatgattcctcaattgttctcaaaatagttttaactcgtcgccctttaagggttatagcattaacattgcgcccttaaagagtcttagcattaactcgtcgccctataagggacttagcattaactcgtcgcccttaaagggacttaacattaactcgttgccttaaaaagtttatagtcggtgattgttaattcatattcaaactaatgccacagcatttaatacgtgcatactagatatacatcacncgactaatccatgggtatatcaattacacgtatacactcacgatatatacttaccttgacatgcatta

SEQ ID NO: 51830 - DNA, 552 bp, Glycine max
  unsure (1)..(552): unsure at all n locations
tagtcgatgcagcgacccttaattgaaaganngacgacgcttancaatattagaggatcgantgatgtcattattattgagagatngcgantgatatgactgacacactagaaagaagcggctggctatctatcgctaatataagaattcatatcgcttgccagattacggacataaagaagtgactgattcttcttacggtggtcccacaatatgctctgagtcagatcgccgtgacttcttgatgtcgtgaacgaacaaattaaaggctgagctgcctggaatggaatattgaaaatttggaaaattttgttcaagacaccgactaactcangatggaatggattctatgagtactaatatctagtgcctataagacatgcgcacttgtaacactcattaactcaccttctaagacttataaccaattttgcaccatatcgatctctatatatgcgaaaatccctgcatcgtgaggaggaaaatattatgatgcgcagaacgctgatggtgggccacatttccagttcttgcgttcctgaaatagcgtct

SEQ ID NO: 51831 - DNA, 396 bp, Glycine max
  unsure (1)..(396): unsure at all n locations
ctatacacactcaaccttcctgtgcaagtcctgtgttatagagtatactgaccagttattttatcaggtctttcgaacagacccaaggtattgatactgcacctcatgactgacataaaacatgacatgtacagcatgctggcatagaaccttactaagataattgattaattcaatgcctgcgtcatccttgngcgctcatacttctaataggatcggcttttcccttgagaaactatcgacaagtgaatttactagtgatcttctatccccacgggagatttactgcgcattcaatatcatgtcaggcaggaagaattgactcactcctttttttattttgtcccacctttcgtacgtccacaatttcgaatcctcaaagaattcactattcct

SEQ ID NO: 51832 - DNA, 391 bp, Glycine max
  unsure (1)..(391): unsure at all n locations
cacaagtatgaactatttactatagaggaaggagaagacatacaatgtatgtctagtagcttccaaaccatattaaacaagctaagatctctaggttgaaactttgataattatgatcatattgataaaatcttgagaagtttgtctagaaaatggagaccgcatgtaacagctttaagagccctaaaaaatcatgacaccatgtcccttgaagagctccttggaactcttaagttcatgaacaagaacttcagaaagatgaaagacttaagaaaaggaagtctctggctcttagcatctagaagaccaagaaaacatcatcctncaaggattcatcttcaaaatcagcatctagaagctcgccaaagcttaagtgtagaaagtactctat

SEQ ID NO: 51833 - DNA, 487 bp, Glycine max
tactcaagctggtctgtggcttagatatgatttatacatgatttaggacttgtatgtatccaattgggaaaaattggatgagggcaagagtgatttctaaatctgcccaatttgtgcagcaaaaagctgtcaaattttgtgcagcagaaaattgtgtttgtgcagaaaatgttgtgtattgctggttgtggaaagggtagtacatattgtgctctggatgatttctaacagatcccaacggtcaaaatgtagacttatgtactagggacctccagtaaaattttcaagtcgatccaacggtgaaagaattggaacaaagagaatgttactatggtatttgagtaaggaaagatgtggtattggtttgtgttttgggcagagatttcttcctctgccctattttattgtttttgatagtgcatgatgtttggatgttgaactgcttggatgtcgtggaagcttggagggattgatggggacaccgtgt

SEQ ID NO: 51834 - DNA, 307 bp, Glycine max
  unsure (1)..(307): unsure at all n locations
aaccagttccgctcccgaatatgacagccaccgttttaggagagctgagcaccagcagcgcttcgaggccatcaagggatggtcatttctccgggagcgacgtgtccagctcagggacgacgagtataccgacttccaggaggagatagttcgccgacagtgggcatcactggttacccccatggccaagttcgacccagacatagtcctcgaattntatgccaatgcttggcctacagaggagggcgtgcgagatatgcgatcctgggtgaggggtcagtggatcccgttcgatgcagatgctctc

SEQ ID NO: 51835 - DNA, 479 bp, Glycine max
  unsure (1)..(479): unsure at all n locations
acacttaaatactaagctaagacaactatgtaatcgatntatgataaggatgtaattgattaaaacatagtnttgccttctgaagaaactnttctaacttaganaattttcttctcacttactcatgatgatgcacgatacacaaaagatatgatatggactaagatgcaacattcaatataacaaccaatacaaatgccactcaagggagttgggcaactaanagacaaaacactttcaagattttctccaagcttcaagctctagtcttcatgttgttcatgttgctaccccatctctaacaataattgctatgcatacgtaatttgtgtatntaaatcacatagcgattacctaagtttcctctcttttatttcttntcttgtatctaatcattagaaatttaacttcttctgagtttatccagtagatgctaagtttgtaattacagtgttttagtgatacttttgagagataca

SEQ ID NO: 51836 - DNA, 363 bp, Glycine max
  unsure (1)..(363): unsure at all n locations
tgtgtacaacagatgtggaaagcaagttttgattgcaattgagtatataactgtcaccatggtttagaaacattttaatgaagctgtgaacatacccaacgtatcatataaaggaacacaataaagtccatgagcattgtaagcctgcaattggtttacaatatgttaaaaaccattaagtggaagaagctagttcaacaacattattgttaagtgagaagggataccaatcattggcacaacataagaatagagcaacaattaanataagtggaactctctgcagagagtagatattcaatataagagacaaagcttcaatctagaaatactctattctccattaagctcaataaggactac

SEQ ID NO: 51837 - DNA, 512 bp, Glycine max
  unsure (1)..(512): unsure at all n locations
actatacatactaagcttccatacanaggagaatgaatttaatgaataagattgtgtatagttctgatntgaaacacgtaaacgttatccagagaaaacatctctagtgcaccggaggagaatctgattgcacttttctaccatgatacgacaaaacccgttggttctgaccgtgtacaataaaaaaatcctcgacccttctaaacacgaatgctctttctctcgtagaaataagaaaaaatttaaagaaaaatataaaagtattntttttttacttgtatctattggctaaagaagaaatatatatatacttatacaacagtacaaaaaaatcaaagtaaaattaggtgaacgttgccaatgtgcagaaaaaaaaaaagaaataaacataacaagctcgtgacaaatcaaaatgattcactacaagccaaatcctacaaaaataaaaattctaattctacgtcataaaatgtacaacaaatattttatnttatattaatacaacgtatata

SEQ ID NO: 51838 - DNA, 381 bp, Glycine max
tacctaaaaatatgtttttccaaataattcaatattaatggttaagtgtttaggaattgttgcttttgcttatttactattactatatattttgcagatttttgtcaccagaagaattgataccgatactttcttatctgtatccgggagaggaagcttatgctaaatatttcacatgttacttaatgaatgaggttagttaactacctatgaattgacatggtgttgttaattgtattaatacatattgaagtgaaataagaatcactagaaatagggatggaacatataacatgcttacatattaccaattatttgctgagaatgtatgtataccatgatttgatgatgccaaagaagaatcaaataagactgttacat

SEQ ID NO: 51839 - DNA, 314 bp, Glycine max
ctatgaacgattgtatatggaggagtccgactcaatctctaattatttttctcgagtataggtcgtactcaagctgacttgaagacactgctatgatgtgactaggtgactgcatggcaaacatactctcaactttaaatcccagtctcgacttcattgttaccaacattgaagaaaacaaggatgtaatgaccatgactatcgagcgactcatgggtttcttacatgcatacgactaacaacataagagaaacattaaacaaaatgaggcttccgagcaactacttctactcaacataaatgatgcaatctat

SEQ ID NO: 51840 - DNA, 286 bp, Glycine max
  unsure (1)..(286): unsure at all n locations
ttatgatttaacggtaccctttttgattagtggctgccaatagcttaattggntatggtgccttgacagaagggaagggcacncgagaaaacttgctgatgtatcatgtttctaatatgttttttttatccgtaagaattgaacatggtaccagggggtttagaatactcacacaccttgctcagccaactgagctagacctccttggttcttaatatgtgttttacaagggtttattatatttacaaaattaaaaatgtgttttgttgtgaaaaatattctgatg

SEQ ID NO: 51841 - DNA, 336 bp, Glycine max
  unsure (1)..(336): unsure at all n locations
caaaacaacctgctggcatagctggcagatatgagaggattatttagttcctctngcgcanagccntcatgcgtcaatgaagaatgcatgttgtgaagaagacatgacagccatagaaaatcaggacaaagatctaactttaataaccgcattacctaagagccttaggcaatgaggattatatgcttcaaacacgcaccctgcaagcacttccagaacaattgcaagaataatgaagctatgtacttcaccccaagagcgcctattcactggagtcccattaccgggagaatgaattgcgattcttctttctttcgctcttatctcatagacata

SEQ ID NO: 51842 - DNA, 264 bp, Glycine max
tctgagagaccatacaagtttcctaacgatttctaattatgtgggccattaagtctatcatatgctgacaatagccgagaagcccatgaatctcttcgggggtggagtaggtgtttgccatcgccttggccttggctaacaagcggcgaagttcttgactcccattcaaggtaagagcaaaaccggccatccacatgtgtgcctcttgggtaaagagtaatcacccttcctctacctcttttcccatatacttgagcatactca

SEQ ID NO: 51843 - DNA, 478 bp, Glycine max
  unsure (1)..(478): unsure at all n locations
nggagaggatgcttcaatggaggataagaaagagggagattattagatatgggggagcacgacattgaaggaagagaaagggagagaagttgaactttgagttgtgtctcacaagactctcattcatcaaagttacacatgcttctatttatagactaggtagcttcctttagaagctttcttgagaaaacttacttgagaagcttctttgagaaaacttccttgagaagctagagcttagctacacatacccctctcataactaagctcacgtacttgagaagcttccttaagaagattcctaaagaagctaaagcttagctacacacacctctctaatagctaagttcacctccttgagatgagaagctagagcttagctacacactccctataatagctaagctcaccctcatgacaaaaaaacatgagaatacaaaaaaaaaagtcttactacaagactactctaaatgccccg

SEQ ID NO: 51844 - DNA, 270 bp, Glycine max
  unsure (1)..(270): unsure at all n locations
ggcagaggtctccacagaggccattgtctccctcgcccaatattatgaccagccgttgaggtgcttcacctttggggacttccaattatcacccacggtggaagagtttgaagaaatcctgggatgccctctgggaggaaggaaaccatacctcttctcgggattctatccctctntagctagaatttccaagatagtccaaatctcaacgcaggaattaaaccacagataggaagtcgaatatggtgtggttggagtaccaaggaaatg

SEQ ID NO: 51845 - DNA, 464 bp, Glycine max
  unsure (1)..(464): unsure at all n locations
tttggtcaagtggctggtatatacaaccataatggtctttatcttatccacatttatgcatttcattctaaaattcagagattgatacaaaaatcatagctctatgctagtcgttctctcaataattaagttcacactcttaccgggttatggttcaagcttttctttctcaatcaatctgtccactgactaacatttctaatcgtgatcctactttcttgttctgtctcatttacatacatgctcattcaaaactcatgacttcaacacatgcttcacccttcacgcaatcaattcacaacaccaatttcacaaaaaaataattatgtttgcactggatactcaaataatcaagtcaaactggttagtatgctncaagacatgcatactactattcacaatcaaaaagtacccaatatcaccacannaaaaaagtntactatagacataagtataataattat

SEQ ID NO: 51846 - DNA, 301 bp, Glycine max
  unsure (1)..(301): unsure at all n locations
ttttgttgtgaaagtcaagagtgaattagtgttatggaatacttgggtggtcttagattcaaaaggagtggcacgacaaaatacttgtttgtaattaaagttttgattagtagaattctttacagtcacatataggagaattgaacattgctntgtttaagtgaactattataaaccaagtgttaccacatctttcttaattggttttattgagtattcttttaagcttatcttgacaccgtttctcaccaagtgtntacctganaaacctttgtggaaatattactttattattactgga

SEQ ID NO: 51847 - DNA, 382 bp, Glycine max
  unsure (1)..(382): unsure at all n locations
ctaagcttgccccacagaggtccaggaaggacaaggcggccgtatgttctagttccgctccggagtatgacagtcaccgctttaggagcgctgtacaccagcagcgcttcgaggccatcaagggatggtcgtttctccgggagcgatgcgttcagctcatggacgatgagtatactgatttccatgaggaaataaggcgcccgcggtggacatcacttggtactcccatggtcaagttcgatccagaaatagtccttgagtgttatgccaatgcttggccaatataggaaggcgtgcgtgacatgatatcctgggtaaggtgtcagtggattccgtttgatgccgactctatcggacagctcctgngatatcatttggtgtt

SEQ ID NO: 51848 - DNA, 435 bp, Glycine max
  unsure (1)..(435): unsure at all n locations
atcttaagtcaccgcggctgcagcttcgtgatttagtttaccgtcatttgatcaaagcaagtatgaaaagaggcaaatctgatcatcatgctntgataaatgcaaaacaaactatggcaaatgaagagggtgagaatgagggagaagcccatgctgtgactgccattcctatacagccaagtttcccaccaacccaacaatgtcattactcagccaataataaaccttctccttacccaccgcccagttatccacaaaggcaatccctaaatcaaccacaaagtttgtctaccgcactttcaatgacgaacaccacctttagcacaaaccaagaacaccaaccaagaaatggaatttgcagctagaaagcctgtagaattcaccccaattccagtgtcctatggctgactgctccatatctatttgatattcaat

SEQ ID NO: 51849 - DNA, 406 bp, Glycine max
  unsure (1)..(406): unsure at all n locations
ggacacttgaaactaagctgaacgccgncatcgcggacacgtggttactgtcaccggcggcgtgaatcctgacttgatgtggactctggtccaccgcgaggggagtatatgattctgaactcggcgttgctctgcaccatgactcacctctcacagtcatcacgcatgctggaatcccgttagcgtaccgacgtactatctgagattctaatcttagatgaccataccacttccttcggcatacaagtgcggaatgctgcatttctttcaatatgcacaatatacacctcccggtattgacattacaggtgtgatgttggtgcacaggtttacaaaacctccctgacatctttaccactgacagatcgccactcatatgcgcgttgcgcactagttcattgatgct

SEQ ID NO: 51850 - DNA, 447 bp, Glycine max
  unsure (1)..(447): unsure at all n locations
agctnttacttcatatacgatgccttatcatctttttatctttacttaaatcattcatccttaagctattcctttattagcttcagaagcccatatatttccagttaaaatggtctgaccatgaaaattctcccatcacagatgctggcttacatattttaggcaccaaggaagtcctcaaaatgtcatgatattcatgtaatgaattaaagttgcccaaataagtagctcttaagtcttaactaggttgctggtggtgtctttcctattttgggctagttagttgatacaagaataggatagtgtaatatagttcctggacattttggtggtcaattataatcaatctttcttctgcctacgatttggtacactttttatattacaaaggtgaatagcaatgatttacacactgtcaattatgctgctttgcttctctttatttct

SEQ ID NO: 51851 - DNA, 376 bp, Glycine max
  unsure (1)..(376): unsure at all n locations
tccatcaagtggtaataagagcacaagagcttatttatgttctccttaaacctccattgattntcagttttaccttctcctccattgtttgttcttcatttttctccatgtatctcctcacatgtcttgtgctaaatgttgttaaaatgattctttacaatttccacctattaaactagttatagaagctagattcgattttttatggttcaaatttcttgttcttgttcttaaaccataagttgtgttgagtttaggttcctctcgagttagtcttgctatttcttttgtggctgatacctaaaccataaatatcttacaaaaacatttaagttgaagaaaacctcaataatctagagtgacttgctcacctatt

SEQ ID NO: 51852 - DNA, 289 bp, Glycine max
  unsure (1)..(289): unsure at all n locations
aaaaaattacttgtgaaacaaaaataattttactatagaatcacgaattttacttttagtttcgtactgctttcaacttcaatccaaatatacacgagattatctcttttatattacgttccatgagctcaagtctgaagaacatagatatatatagagcgttntatttcattntattaaaaattgtgattgataattgtagcattgggttatttataataaaattatagaaatgattcataatttcatatacaactggaaaaaatcttgtgaacaattcttgacatcc

SEQ ID NO: 51853 - DNA, 279 bp, Glycine max
agctgctgcagctaaagctgtgaaatgagagggtgataaaggttcgaactcctctgctgacatgaggcgaaaaaataagaaagtcaagagctaactctattgcacgccatgtatgtgctgctcatctgtagattcttcaccaagatagaatattctgttctttccacttctactctgtgtttgactttgacacactgtcgcgccactatcagttcttaggtgcaattttgggatctacgatgtgttttactgtgacattcattatactgtgtataatct

SEQ ID NO: 51854 - DNA, 348 bp, Glycine max
  unsure (1)..(348): unsure at all n locations
ttatagatactataatgcttatcctgccttacacatatcacgtccctacatatatattaatataattataatatgctacttaacatatattatatcactctctatgcaacagaattgtgtattttttttattttaagactacttaaaagtaacttaatcttagatctaagtatctaatccctcaaccttcacgttcatgcaatcatgcactgcgcctcttctcatatcccagtgagtgcgatcgttcgagacctcgagtgtcgtatgcgccactacactgcctacttgtgccaccgcgagctcgtgcacacctgccccatgacatcngctcattgtaccacatgatat

SEQ ID NO: 51855 - DNA, 369 bp, Glycine max
  unsure (1)..(369): unsure at all n locations
cttaacattaatcattagaagaccggttgatgtnttttttaataggtttaattgatataatgctcctaattaattatgcattgcgatgtttggttacttttctttcttattgtacttggtagtcaatctcaattttctctctttcttggtaatgcatcactgttctatcgcttacagaatctctaattttttggcagcaaaatagaaacatcatctctcgctcctaagttgtacatttttttttgctacataattagtacgatacaattcnaataaaaaattaaattgatttcttacatgattcaatgattaattcgtaattatcaataatgcatgtttgataacttactgtataccgtgcgtcacctt

SEQ ID NO: 51856 - DNA, 440 bp, Glycine max
cttgaatctcagcttctcaggaagcctctaatgaagcttctcaaggaagctacatgattttgcctcagtaaaaacgctgcctagcctatgttaaccgttggatcttctcgaaatttggtttacagtttcacaagacacatttccacgatctaaccgttgggatctttgagaagatgtctgtaatgtgcgcgacgtttccgttcctgagaccattgctcacttgtgcgttttgagccttgtagtccaagtagcttaggaaaaacgccatttcttctcctttatttcttctaaaaccatttccaacatttcaagatttttcttcatcacccacaaccaccattatccaccacaccgagaggaacccttcaatcgaagcgagatcttccaacttggcttgtggtttcggtagagaacgaaaccctaactctgacctttcattt

SEQ ID NO: 51857 - DNA, 244 bp, Glycine max
  unsure (1)..(244): unsure at all n locations
aatatagacgctactgaatgattgccaatctgtatggaagtanaaatcttaaaccttattgatacatttgaaagtggtgcatgggcatattacatctcttatataaccataccattttctttgaatcatcaaccaagcgtatgtggaccancacaaacnaggaacccgatcaaaaggcttccagaggtagtgcttaatatttaaaaaatttattttagaactaataactccataatagaattta

SEQ ID NO: 51858 - DNA, 442 bp, Glycine max
  unsure (1)..(442): unsure at all n locations
aaaatactaagcttatgatgtcatttctctgcgctaccctatcttatttgtttcatggcggcgcattaatttcgtagtacattgttttctaaaataacattaatgactgagtcttgattcaattttactacttatagcttgcatatgacctatgtatntcttgcgtgaactgaccgagcttacaaatnttcctctactattttcaggataaatcgtcttgtattggttgtacaaaatgtaataaatcgtggacataaaatacctacgtacaatagaaaagtgtattcttataattgccacgtcatttattaagaaatctgtatcattattaattacattcaatcatcttcatagaatatgtgtatttatattataagcatacagcattattgctatcgtacctatatatatatacatatatatatatatatatatatatgta

SEQ ID NO: 51859 - DNA, 430 bp, Glycine max
  unsure (1)..(430): unsure at all n locations
tgcagcttgtggattaaattatatttttttatatatagcataacaacggctaataatgctaattatttaaccatctaacatttaatcattgaattacaatgtgttatccatttactaagntattcatttacaacccatcccatcatatatattatgtttggtgtctattatataatattaagaataattttataagtcatatgataattatttattattgaatgataatttaaaattattttacattatttaagcatgattattaaatactagatatttgtttatgaatttatatattaaataaagtgatacgatcacacttgattttatgtcatgaattcgattaattcactgatttaattaacacaaaaatatttataatatgctacacgcacacgactcattgattacacctacaagaaaatacata

SEQ ID NO: 51860 - DNA, 353 bp, Glycine max
  unsure (1)..(353): unsure at all n locations
ttgagaggatacgaaaatttatttcataaaaactcttangaatcttgtgtcccaagtcacctatttataggcctttgatggtcattcaaaaatctcttgaacaaatgtgactcttgggagttattttctgaagagttgtgactcttggcttggatcaaacttgagaagcgcttatctttggcatcatcaaaacttcatatcatacatgcttctacattcttgacataacttgttgctcaaagaatgtgaatgtcagatgccaagaatacttctgctctcatggagttcatgaatatctattgagtgctgttacaaactctcgcaaattaatggatggaactgacgctctactt

SEQ ID NO: 51861 - DNA, 245 bp, Glycine max
gtaatatatcgacacgctcgaaatcgaatgtcgaagctctgaggcaactcctacgacaataacttttttctcggatgtcttgaatagtcccgcaacatatcgaggcgctctaaattgaatgttgaagctcttcacccatttcacacgataataacttcttacacggatgcctgattgagttccgtcatatatcgagacgctcgaaactgaatgttgaagctctgagacaatttagacgacaataa

SEQ ID NO: 51862 - DNA, 440 bp, Glycine max
acacatgaaactcagcttaacattcaacttcgagcgtctcgatatagtatactacttattcagacatccgagtcaaatgctattgtcgtttgaatttgctcacagcttcaacattcaacttcgagcgtctcgatatattacgggactatatcagacatccgagtaaaaagataatgtctgttgaatttgctcagagcttcaacattcaatttcgagcgtgtcgatatattacgggactccatcacacatccgagtaagaagaaatcgtcatttgaatgtgctcagagcttcaacattcaacttcgagcgtctagttatatactcgactcaatcagacattcgagtcaaaagttattggcgctcgaatatgctcagagactcaacattcattttcagcgtctcgtttatgacgggactcaacagacatccgattaaaagat

SEQ ID NO: 51863 - DNA, 332 bp, Glycine max
tctgtatggtggtcaacagatgagcacaaaccacaaacccttgcgacaggtgtatatttttctattcaaggccagctgggttacccaagtgaccaacgcatccagtttgccttcaagcttcttagtttcagatgatgcagatgggtttgtaactacctcatgcactcctctaatgactatggcatcatttctggcgctaaactgctgggagttggaggccatcttctcaattaaatttctggcttcagcaggagtcatgtctccaagggctccaccactggcagcatctatcatacttctctccatattactgagtccttcatataaatatt

SEQ ID NO: 51864 - DNA, 467 bp, Glycine max
  unsure (1)..(467): unsure at all n locations
tcacaacatccaagcaaaacaatattcaaacagtacatgttatcactttcaagcaaaacagagcaaaggcagaaaactctgccaaaacaccaaccaaatcacagcttttctcacttaaagaccccagtaacaattccttcgatccaattcgttaaccgttggatcgactccaaaattntactggaagtctatagtacataagcctacattgtgaccgttgggatctactagaaaacatccagaactcattttacattactctgtccacaaccagcaaatacatagcatttttctgcacttgtgcaaaatcctgctgcacaatttcacagcaaaaatctgcacagagtgcagatttcgaaaatcacacttcctctcatccaatcttgctcaaatcagatcctacaaagtccaaatcatgtatcaatcatgtctaacccanaatcaagctttacagcacaacaacatag

SEQ ID NO: 51865 - DNA, 329 bp, Glycine max
cttcttcttctttaaccttttctttttctgagcttcatggagctgagtcacatgagctatcatttgttcttcaatcattttcttcatattataagtcctctcatattgaatggtacgaaattggagtatgcattgaatgaacgagccgttgtcggcgtcctttataaagaagatgcaagcatcatcgaagtaatacttcctaactggtcgtaacacttgaaggacgtcatggtgcttagcattgtcatttccatcataaccaaaagtgaaggctttatgagtgtccatccacatgacctcgttctagaagatcttacatcatatgcgtc

SEQ ID NO: 51866 - DNA, 434 bp, Glycine max
  unsure (1)..(434): unsure at all n locations
gttgaacaatatactnggccttcatttaactgtctttgctgtttggcggccacgctcaacaaagtatnttcgacacctactgtacgttgatttgaccaatgctgttatgggaatgtttcgacaatccttcaaaaccttattgatacattctgaaaggttggttgtcatgtggccatatcgacgtccttctctatcataagccatcgtccattnttcctttgaaattcgatcaacccatgtggctatggctggactcagttcacgaaatttttgtaaattctgatcaaaaatgtgcttgcaaggagtgtaggctgcataaaaatagttatgaataacaactttaagtatataggaaacttaaataaacgtcaccatcaaatangaaatcttacccacatttttcaacatttctttttgtttggcatattgaattc

SEQ ID NO: 51867 - DNA, 371 bp, Glycine max
  unsure (1)..(371): unsure at all n locations
cggattctggggggtgaaccacctttaaatatttcgtatgacaacgcacaaagccagagaactacagatgggttcctgcanaattattgctaagtttatattagagaaaatttgcataaaccaactagaacatttgaaattaccatacatgtccttgtgcagaaacaaaaaacacgtgaaactgtaatagtaataaaaaaggaaatatgcgtccttaaataagaggatataaaatacaatatttatttcataaaagaagagatttgtatatccgtagaacaaagaatatattactgccattataagagaaggagagacagatgacttataacctataacaaggggagaggggaagaaaagctgtaacagat

SEQ ID NO: 51868 - DNA, 467 bp, Glycine max
  unsure (1)..(467): unsure at all n locations
acacatagatactaagctgtgacatttgggggaggggggaaaaaattccttgtggatgttgaaggttgaacagttgtaatatgagattgtgatagagaattggaattctcgctgagtgtgatgatctgttgcaacttgcagcatttgcgtgaattgtttggaattaaaaacaccatataaaagcctttgggtgactttttcatttttctatttgtccttactttcgtttgttctctctaatgatttgatgatgtaagaaagaggaaacaaacattgatggatactactctgcacaaaagggtggttgttttgttcagttgagattgggacaaggtcagcgacacatttgttggcagtcctggttatacctgcagtgatcagattaacacttccctngggctatgcctatatatatatatatatatatatatatatttgtatatatgtatatatatatatatatatag

SEQ ID NO: 51869 - DNA, 359 bp, Glycine max
  unsure (1)..(359): unsure at all n locations
gcttgtaggccttgatcttctttattaatatagtctttngcttcttgaagatcaatggaagtggaatagagaatgaggaaaggtgattggagatgccactttaaggagaagatgagtcaagaacatgctcactaccataggaagccatggataatagcttgaaggtaggagaatatgagtggagggagaggcatagaggggggaacaaaatttatgcctcagatgaggtcagaactttgaagtctaatttctcanatgatcaaagttgaaaaaattcacacacaaggcctctatttatagcctaagtgtcacacaaaattggaggggaagattgaattctattcaaatctatcttgaat

SEQ ID NO: 51870 - DNA, 298 bp, Glycine max
  unsure (1)..(298): unsure at all n locations
ccaggggacctctaaaaaaaggctacacctcctccataatacacataatgtaattagagcaagcttatgcgcatatttcttacaacgtacttgccagacatttataactagaaaagccccatatcatcaggcactcgtacctagatattacatgacttcaagtgattgtacttacatacaaatntctggtaattactactgctactaagatntgggaccaaatgccagtcactctggatttaaactgactgccaactctgaaactgatttaccataaggctcttatgttttaaattgt

SEQ ID NO: 51871 - DNA, 328 bp, Glycine max
gcttctcgatatgttatgcgtctgaatctgttatgcgagtgaaaaattatgaccatcttaatttcccgagagctctcgttgttcaatattctagcatctcgatacgctatgtgcctgaatccgacatgcgagtgaaaagatatgaccatttgaatttcttgagagcttccgttgttaaatctctagcgattcgatacgctatgcgcctacattgaacatgcgagtgaaaagttatgaccattttaatttctcgagagactccggtggtcaaattcgagcgtcttgatatggtatgcgcctgaatcggacatgcgcatgaaaagttatg

SEQ ID NO: 51872 - DNA, 414 bp, Glycine max
  unsure (1)..(414): unsure at all n locations
ngctgccacggagttntccgactatgctcttgtgtggtgtgtcaagctacaaaaggagagagcaagagatgaagagccaatggttgatacatggacagagatgaaaaagatcatgaggaagcggtatgtgccggctagttactcaagggacttgaaattcaagctccaaaaactaacccaaggcaacaagggggtaactatggctcgatctcttaatggatgtgctcatgattcaagcaaatattgaagaagatgaggaggtaactatggctcgatttcttaatggtttgactaatgatatccgcgatattgttgagctgcaggagtatgttgaaatggatgatttgtcttacaaagcaatccaagtggagcaacaattaataaggaagggagtggtaagacgagtttaccaac

SEQ ID NO: 51873 - DNA, 491 bp, Glycine max
  unsure (1)..(491): unsure at all n locations
ctgcagctgaagagtttggctttacatgccttactcccttaagtagtatttgtattggttattatattgaatgttacatcttagtccatatcatatcttttgttcatcatgcatcatcatgagtgatgcaatcctaccccccaagagcattggatagaagactccaagaagattgggccagagatgccagagaaggccccagggttctcatgagccttagggtagatttcgggcccatgggctaagtatgagcccacttatctttgtacatattatattaaggtttcattatatttgggccttgtatttagggcttcatagtgtaggagaggtaccctagtaatgtaggaattttaagcccttgtatttanggcttcatggtatgtcttgatgggttaatcgatattgcctatataatcgatacacaactattttggacatgactgaatnttcaggagctcttcatcgatatatgtatatatcgatactta

SEQ ID NO: 51874 - DNA, 359 bp, Glycine max
  unsure (1)..(359): unsure at all n locations
nggctagcagtagttagtagtaacatgtcattgtattttgttaatgaanattctctnttcccaagggcagtttaatcatgggattaaattatacaattcatcaatgaagatagaaaaacattcgccctcacattgagcttgtttcaatntgaattacttagaaaagatataccgttatgtaaacgcagtttcggatttagtcaagggcaggggttggggttgcatcgtgtatgtatgattttgagcgttntgcacactgattggcggtcattatacgcagtggatggattggaaatgagatattgttcaccattttgcttcatctattattctgagcaatgtantcttataatagtttg

SEQ ID NO: 51875 - DNA, 311 bp, Glycine max
  unsure (1)..(311): unsure at all n locations
tcctctaatgactatagcatcatttctggcgcctaactgctgggagttggaaaccatcttctcaattaaatttctggcttcaataagagtcatgtcttcaagggctccaccacttgcagcatctatcatacttctcttcatattactgagtccctcataaaaatattggagaagaagctgctccgaaatctgatggtgagggcaactggcacatagttntaaaatctctccaatattcgataggctctctcactgagttgctaatacctgagatatccttctgatggttgtggcctggagcangaaaaaaa

SEQ ID NO: 51876 - DNA, 346 bp, Glycine max
gcaagcttgatatggaaagaaatgatcgctcttttttgtgctatatacttcaccttttgtgctggctgtagcagaaatgaagacacacagcagctagacattgaaagaaaaaataaccacgtgtctcatgatcaacccgccaaaatgctcctgctaaaatggaaagaaagccacaagatggatgccattaaaaaagacgcactcgttaattgattgacaaaatgtgacagctaagaaatggaagggtattcaacaaaggaggtagtatattttgaaatattaaataggcttcaagtaaattggcacatgacatggcttatattatgatttaaaaataaaatgctat

SEQ ID NO: 51877 - DNA, 463 bp, Glycine max
  unsure (1)..(463): unsure at all n locations
tgcagctaataataatctatggctgaacaagtcttccgccattggtattngaagnttcatgatgtcatcacttcatttggctttgaagagaacatcatggatcaatgtatataccaaaaggtcagtgggagtaagaattgatttcttgtgttatacgtggatgacattntgcttgcaactaatgataagggttttctatatgaggtgaacacaattctctcgaaaaactttgatatgaaggatatgggagaagcatcttatgtcattggcattaagatccatagggaaagatctcgaggaatgttgggtttgtctcaagagacttatattaacaaagttttagagagatttaacatgaaagatcgttcaccgagtatagctcccattatgaagggtgacaaactcactttgagtcagtgcccgaannaataatttgagcgggaacacatgaaaaatactccat

SEQ ID NO: 51878 - DNA, 343 bp, Glycine max
  unsure (1)..(343): unsure at all n locations
aagcactaataaattcttgatcactacctagaaaccttttgcaaacatgtttcctaaatgaagatataccccccattgactatttaatgtcttgaagactgtcacctttggcagtaatacatcattctaaggaaaatagttacctgctgaagtgggaccatatgagtcttcctattgattccttatttcttggtgctgcatcttttggggcacatanacaatctgagatatattgagaatgaagacccgccataaaattatttgtagaatgatcagctggaactgatattgatcggttttgatggaatactattgtgacattgtcatcaaatctgtgattcag

SEQ ID NO: 51879 - DNA, 386 bp, Glycine max
  unsure (1)..(386): unsure at all n locations
caaaaatacatcaagtgaagggtgatcacaccaaagcaagcaataatgcataaaaaagaacacttaataataaacaataaacatagattattaatcaaaatgtgtatataaagatgatgtccgntcaactacatcaaccccacaatatgtaaacctaactacatgacaacaagaaaaaagaacaaaatggatgatnaagaggatgagaagtggtagggaagccatggagggcaagggagagcttcacagttgcaacctaaaactatctatagtttccctcgatcaaatatgtcttctaattgcatcctngatgcttaaataggaccaatatgtgttgcactatcattnttgcataattgagttgtgcgcttaccgcacatttactc

SEQ ID NO: 51880 - DNA, 375 bp, Glycine max
atgcacatgcaatgcagtagaatggtgtgctgacaatagtttactacgattatattgaattgagaagataatactgcgaatagaagattagtagcatgaccgaaaataacatatgcgctgtgtcatataacataacacttgtctcaaataccggaaaaaatacttgacaacaacattctccgaaatgacttagtgctggcgatagaaacaatgttgtccaattctttctaattgtggtgatgatgccgatgtccaacggtgtgtcattaccaaaccactgcaactgttcgtagttgtactgagtactgcaaaataaatattcagttcaatgtatggtagtcatgcttccatggacccatactctgatgtcctggc

SEQ ID NO: 51881 - DNA, 348 bp, Glycine max
actctccaacctagctaaaaagacaaaaggctacaactagagtgataagacaacttcctatgccaaaggattgagttggtctatatgatattgatcagagtgaaattaagcctattaatgcttaactaaaattctgagtcttactctattcactaaaaaacatgatcgccatagtatccaataaatctgatcaatcaatttttgatcggacttagcatgcacgtgacaaaaagccaaagtaacatatgtccagcttaataatttttattaaggacaccatagttcattaaatatggtaatcaatcaccactacaatgaattccaatttcaataaaatctatactacaa

SEQ ID NO: 51882 - DNA, 391 bp, Glycine max
  unsure (1)..(391): unsure at all n locations
agctagtgcacatctctctctatcgctcttctctatctttatttaagcatatacttgtggtatctcctaactcatatacttacttgagcatcagaatcttttattgtacaggtcttccctcgtgtcctcttaacaaaggtgtctcctactcgacgtgtgaagtttatgagcccacttatgtcacatccatcttgatatgtcctagctctgaattttagaaagtagccacacattatcgacctgtgaaaaatcaaaatgaatttagataggttaatggagcaagacagaaaaattcttgaaagggaaagaaaaaactctttgggattaggattggacaaagagatttgatacttantcttcttcttttctttcatgatggtattcttgatct

SEQ ID NO: 51883 - DNA, 435 bp, Glycine max
  unsure (1)..(435): unsure at all n locations
ttcaccttcttgttttatccgcgagctttgactaccggtcgtgcttcccgcgatgcttctctttatatctgcctgagtgggcttatagtctaacccatactttccacgatttcctttggcatttatcatgccagatatgccgccgctatctttgcctaaacccagtccgggttcgtaaccgttccccaacataactcgggtcatcattactgctgcatcggataggcaagcttgcccagagaaggagtccacggaggaaatgcntaccacctctaaagactggaaagcagtttctaatgactcctttgcggcctcacataatgcatagaggattgtcagctcaccaagaggtctttctcgcctgatacgatgaccagatgcccttncactacgaatttcaacttttggtggagtgacagggaacaactcccactg

SEQ ID NO: 51884 - DNA, 470 bp, Glycine max
  unsure (1)..(470): unsure at all n locations
ggatcttaagcacctgcagctgcagcttancaagagacaatattcaactgttatatcagcatatgcttttttgagtgacaaacaatgcgtctatccaggaaggagagtctgctgatgggatcccccataaccataaatgagattttggatgttagcatttcgtttctaaatgaccatttagaggaaacactgggttcgacaaaaatagaagaaatccactcaaagtgtatcaatctcgcacaggtaagtgtttcatcctaattccgaaccatagatatgtcatgacttgactttgcaaattatttcctatcaaatcaaaaattacatgcgtgatcatggatcaatangacttcccttgggaatgggttcttttggtgggtgtttttctcggcttttgtgtgtttttggcttttgattttctgggcttttctctttctgttcttttatttagtgcggggcgagaaaaaaag

SEQ ID NO: 51885 - DNA, 461 bp, Glycine max
cagttagaggagtcgttggataagcagtttgtatgactctagtgtgtccacgtggggagcactagtgttgttagtgaagaagaaagatgggaccatgagattgtgtgtggattactaccagttgaataaggtgacgattaagaataagtaccctttgcctagatagatgaccttatggaccaactggtaggagcttgtgtgtttaagtagatagaccttatgtcatggtaccatcagattcgagtgaagttcgaggatatacctaagactacttttaggacccgttatggtcactatgagtatctagtcatgccctttggtgtgactaatgctccatgtatgtctatggactacatgaatagagtctctcacccttaccttaatagttttgtggttgtattcatagatgatatattgtgttacttcaagactagagaggaacatgaagaacatttataatt

SEQ ID NO: 51886 - DNA, 413 bp, Glycine max
  unsure (1)..(413): unsure at all n locations
acctcgctatgacctgggtctaccatatggctactcaccttaacgaggctcttaccagactgagcttaacgtgttgttacagaagagtctgagcgagctgcacttgccacataaagctgcgatagtgctcactaacaactattatatgcagacgtctcctcgagacaacggtgtggcgagagtagctnctgcagactcggaatggatgactaagattcgggacttcttggagaaaggctcactcccaaaaaatccaacagcgacaagacatatcaagagatatgccatctattatgtgatagagggaggagagctgtacgaactacgcttcacggccaccctgttgaagtgttcgacttacgactatcctannatacgtatgaatgaaatgcataaagggatatgtggaatac

SEQ ID NO: 51887 - DNA, 308 bp, Glycine max
  unsure (1)..(308): unsure at all n locations
ttcttccttaaagatatccaaagatcaattaacaaatcaatagttttaaatcagtgctcagagaaaagggaaaaatattatttacaatgatctctatattgggtcaccctaaccttgcgctatgatcagtcctcacaccttcaagataataatttttcttacacaactcaaataacgattggaccacctcaacattggatttcaactacatggcagcaaccctatgggacttcaaacctagcaattgctagaccaacaacacctctcgttacaacctttgttaatcacttgttatgctnttacagtaa

SEQ ID NO: 51888 - DNA, 452 bp, Glycine max
  unsure (1)..(452): unsure at all n locations
agcttgcattcgatggctcagtgtgttgntgttctatgccttgctgctggtgatcagaagtgttcatctatagtgaaaatgctcattgacattctcaaggatgatagcagttctaattccataagcttttctcttcagtatttttgttgtgtagtgaatttaattaataatccatctcagcatttaactatttatgcagttgtagcctgctctaattcaatctgatcttgtagtctatatcagttttatcctgtcattttctataactccttatatttccactttcttttctttctttataagtggctatgctctaatagaatatcttcatagtattttatactatatatagaatatcatagaattaccgaattgcttgttcccaacacctctcanataaaatgaaatatattgccacaacantaaatngttccttggcttctatgtgtact

SEQ ID NO: 51889 - DNA, 370 bp, Glycine max
  unsure (1)..(370): unsure at all n locations
tatcatacgccggtctcccttgtctggttctcacgtcttttgtggcaccacccttttgcaacaaagagcttcaccatgctctcatctnctattgctgatgccacgtgcaaaggcgtgtcacctgttataaataattaataattagaaataacgtcttattattagttactatatataccatatacaagagatgttattatgggttggcattatctaatgctatccaatatttgcgtgatatgtttactttttcttttagaannaaaatatttcattcttaaacgactgatatttaagatttttccacacagtcaaaaaagtaagtattttaagaaaattgacatttattaangaaataatttatcaaaat

SEQ ID NO: 51890 - DNA, 275 bp, Glycine max
aatctgcatctgcacttattattggtgcaagagtctgtggtctatgttcttctgctaatcaccatatagatctttgtccttctttgcagcaatctggagtcaatgagcaacctcaagcctatgctgcaaacatttataatagaccccctcaacaacaaaaccaacaactgccgaataattatgatcttcaagcaacaaaacaatccaagttggaggaatcattcaaatctgagatgggaaaattctccacaacaacaacaacagcagcaacaaca

SEQ ID NO: 51891 - DNA, 420 bp, Glycine max
  unsure (1)..(420): unsure at all n locations
ttgatcaccgnatgctggttcaaaatcttactgcacaggtaataaagtgcttaatttcccaattaaacgtggctatttatttgtgaccaaaattatactgcctatattactttaaaggatttgttatgcttgataaaaatcaatgcagattctatagaatagaatcaatactgggaataagctaattatatattctaaaaagagaatttcaaatattcctgaaaatagttggggtagtaaaatgtaatgtgttgtttgggtccaagagtttgaagaaacactntaatagttttcacttaatactctccccttgaaagaccaggttttaaaatactagaactgttaatattcatatgaccagaaatgctatatatgcccnctgtattgacaatggctnttcagcatatttgtgtatggata

SEQ ID NO: 51892 - DNA, 393 bp, Glycine max
  unsure (1)..(393): unsure at all n locations
cccgctatataggntcctctggtgttctgagatcaagacagaaaaagacaattttcactagattgaaacagaatcttctattacatttttagggtgaactntataaacataaattttgaatcaaaagtatatgataattcaagtttgatgaaaatttagtgtattaaaatggtatttatgtcttttttaagtattttgtttcaacatgtatgttcattccaaaggttgataagatattatgaatggataagtctccaaactcacatgtgaaatattggctcgaatatgataagcatataataattgattcatgtgtctgatgatgttgtttaaatgctcatcaatatagatttggttgaatatataattaaaagtagtttatttgatgtatac

SEQ ID NO: 51893 - DNA, 415 bp, Glycine max
  unsure (1)..(415): unsure at all n locations
ctgatattcacacgccatttcctattcgtttacatgcttcatctcttgctaggcttcatctagatacatatagtttatttttagttgtaagaataaagaacacgcacgtatcaaatattataacaattcacgcattttagtacatactctttaatgttacagcaaggtatacattaagttaaaatacacttttaatcttttaatatttttttattatatnntaattaatcttttatatttaaaaattaatttaattatttattnttgaaagtgagtcaaaatgatgaatttaatttaaaatattataaaattatctttaatttataatttaagtgcatactttaaactatatatgttatgagttagatatgaaatatgaattttgaatggaataatatatatatatattatatat

SEQ ID NO: 51894 - DNA, 381 bp, Glycine max
aatggttcacacttaggctagattctttcctctattaaattcaagaaactacataatttgaatatgactgttattttgaaccaaataaatgatgcatccactgtagaatattatatattgtgatttgtgactgcaacatttccacaacaaaataaaggaatgcatgtctattctatgtggaaacttgtaggtgattattgcttaagaatatatataaaatgcctatcagagcactttctgatacaacttagactaaccagtgtatataaatatattcaacacaaatgatgtctgtgacaactaactgagccttatattatacttgcattaacacaaatactttgtggagtgcagcactacacacatatctacaatatacaa

SEQ ID NO: 51895 - DNA, 466 bp, Glycine max
  unsure (1)..(466): unsure at all n locations
cttgtagatgtgctcagacccaactatatatttgtgtagatatatgctatatagnnaattcgatgaattattcttagaaactagataatggatatattcatatacataatctctttaatattatcatgtagatatatgtcttcctcattctagaaatatggcttatgcgcttttatattaaataaaatttaaactctgatctttctttaattaatgttatctaccgaagaatatttgtttatcttctcaattatttagtaatacttacagtctactcatcaacattaatatgatacaatatttataaatattcattagtaagataaataggacaagagttatacattacaaatataaggttttacccagtgatcccatcacaatacatgatatataataagcggatcaactgtcaaaataattatcttaaattaattcaaatgataatgtatgattaaatgatagt

SEQ ID NO: 51896 - DNA, 273 bp, Glycine max
aatgaatccaacaatgtactattcatgttataaaaaaatgaaaacattttttttgggcataacaacaattaatataaattgaatctgccatttatacatttatgaaaataaaacacgaaagagaaaaaattatgaaaatatatagttgagcataaaaagtaaaaacgtcatatacatgtgctattaataaataaaaatattaatggataattattacatactgcgagttggggaaaaataaataatttcataatcattttggacgataaaatg

SEQ ID NO: 51897 - DNA, 328 bp, Glycine max
tgcgaccacaccatgcatgtgtgaggagtcctcaagttcattatttatgctgtgaactgcaaacaaagagtgcacacgatgcgaccataagaccatatatgcacgacgcaatcaggaaaatacaaatatctaactgcaatcatgtcatgctccatggaactgaaactgttgaatggttgttcgttttaatattacttggacatggggaatcagtttgaaaattctatatcagacttcaagcaaccgagcatatgaggcgaaagatatactgacattcatcatgtggcgaacatagaatgctctatcttaagaataagtgatttgaact

SEQ ID NO: 51898 - DNA, 301 bp, Glycine max
  unsure (1)..(301): unsure at all n locations
gagtggtntccgacctgagagtatggcagcttccatgatgcggtcgatgaaagggtgttgacgagtggtccaccctgcaagactgtggatgtgggagaaacttggatcatcttgagtgttgactgtgtgtcaggggtgttattccccttgagtgtgctcaggcaatgtatgagtaaagtgctcgtcttcggagggcgcctaatacgagccttcggctaattgtggtcaactattagctctctcaactcctcctcatggtgatgctctatctccgcaatgcgaatttggagttgctggagag

SEQ ID NO: 51899 - DNA, 337 bp, Glycine max
ctacatatctcctgtgggtattgtagttgacgaattacttgtgccacacttgtgcatttgagccagatctttgaaattcaagtgtccaagcctacagtgccaaaaccattcttctttgttgctcacaacacttagacattcgtgctcaagtgcttgctgtccaatgtatgaaaaggtctattttctggtcaatggtgtgtttatgattagaattctgggtttgtcatataccagcatcatcatgtcctccataggtatcctatagcctttctgaagtaactcggcaagacttataagattacttcttattgcctgaacataaagtacattctctatg

SEQ ID NO: 51900 - DNA, 426 bp, Glycine max
  unsure (1)..(426): unsure at all n locations
agctntacagcagaatttagtaatgaccttttatatctataattaaaataacttaatgccattaacctatggaattaaaacaaactaaatggctgagtgtaactgaaattgttggcaaccaaaagtcacccccaacagccaacaagtcagccaccatttggtctcccaaaaggctgatgcctaggttgccaattgggcccttattacaacttgaactaaagccctttagttgattaacccaaaacatatttttggtcagccaactttacaaggattgggccattatttatacaaactaaacactctaaaattgaaataaagtggtgtcatttagtcctccatttgggccatgatacaactcacaaccttggacttttctccttgaaacttgcgcttgtattcaaatagtatggacagcactttgtg

SEQ ID NO: 51901 - DNA, 485 bp, Glycine max
  unsure (1)..(485): unsure at all n locations
tttgatggactataccaagctctaggaaccagggactgattatagatctatatataggctngctaagggtagagagaggaagactagaganttggatcaagtaaagtgtgttaaggatgaagaaggcaaagtcttagtgcatgaaaaagatatcaaggaaaggtggaaggcgtatttccacaacttatttaatgatggatatggatatgactctagcagtctagacacaagagaagaggaccgaaactataagtactatcgtcggattcagaaacaggaagtaaaggaagcgttgaaaagaatgagtaatggtaaggcggtggggccagacaacatacctattgaagtgtggaaaactcttggagatagaggtcttgagtggctcaccgaactctttaacgaaattatgaggtctaaacgcatgccggaggaatggaggagaagcacgttagtgccaatctataagaacaaaggggatatacaaa

SEQ ID NO: 51902 - DNA, 379 bp, Glycine max
  unsure (1)..(379): unsure at all n locations
agctngctccagaacacaatgttngcttacttgttatggaaagaggtcaagaggttctgaaagtangaaccaaaacataagatcacccagtgaggtaaaagcgtcaagctaaggatgttaaagaagcgcttcctgngaggcaacccaattttaatttctgttatctttgtttttcatgcatttaatcatttggaacttgctgtatgatttgtacatangagtatatcagcctatctttgaatgcttaacataagggtttcaatttattggaaaaaggactgaaaaataacttaaaaaaatattttctgaaaaaaagtcctttcgctaaacgcaagcctcgcgctaagcgcatctcggttgatgcgctaagctgtgagtc

SEQ ID NO: 51903 - DNA, 343 bp, Glycine max
tgctgaatacaaacatgcacacgcgatcaaacttcactaagagtaccaaaaacaaaattaagtagggctgggttgcctcctattaagcactctgttaacctcattagcattgatgcgacagtctttgtcaaactggatcaatcttggctctatccttcacaacattctattgactctacgtcacctctatacaaacatatctgtgcagtaatgtaatatcttcatcaaatagctcagagataactttggacttcaatacccatttctagacttttatttgccatgtctactacacaacattgagtacccataaatggacattccacaattaagggaatatata

SEQ ID NO: 51904 - DNA, 413 bp, Glycine max
  unsure (1)..(413): unsure at all n locations
agctntctatctttttattctntggtgtttcttaagctttctatctatataagatttatcccaagggttcttatacgaagatccatcacttattatagatcaacaagcttttttgataggaagattaaaagaaatgttaatgcactctttttttgagagaactaattcacttgctatgtacaagattatgaccaagagaatttttcaagtaatgctttttagatacacggtctgatggccaagagattttttcaagcaatgatcgctatttactgtngcattttttaccaacacttattataattcttctttctttgaacaattccatctcaatttattttctctgctcaaacaagttgaattgatagtcggtactcttcgattaccaattgtatgtgtgattgctatcttga

SEQ ID NO: 51905 - DNA, 328 bp, Glycine max
tacgcttctcaagctaacttatatatagcaataaggggtacatttgtgtggttgccctcaaggggaatctgagaaagtgtatgatcgcctcaagtgggagttcattcatgatactatattagccattggatgccggtctaatttcattcaatttatttggtgtttatgtctatggtgaaaatgtgtatattgtgtaataatgaagcctttagaggaattttctcccaagccgtgtgtgagacaacgggatctgatttgcgcgcattttttaatatgtcctttgtttggaaagggtcatacaccttatcaacattgcagtctctaataa

SEQ ID NO: 51906 - DNA, 364 bp, Glycine max
ctgcagcttctaaggaaggagctttttatgagattttgtgcgtaactaagctctagcttctcaaggaagttttctcaaacaaacttctcaaggaagatttctcaagaaagcttgtcaaagaagctacctagtctattaatagaagcatgtgtaacacttgttgtaactttgatgaatgagagtcttgtgagacacaactcagagttcaacttctctccctttttcttccttcaatttcgggctcccccctctctctttctctccctctttcttgtcctccattgaagcatactctcccagcttcttatccaaggctcatcttggtggtgaagctccttctttcatggcttataccctaggggat

SEQ ID NO: 51907 - DNA, 420 bp, Glycine max
cgggacctctcagtcacctgcagctgcagctggcttggttaaacatgtttgtatcatttattgggacttgtaggatttgatttgagcaagattggatgaagggaagtgtgattttcgaaatctgcacttatgcagaattttgctgtcaaaataggtgcagcaggattttatcttggtgcaaaaaatgcttgtgtgtggttagctgtggaaagagtagtgcaaaatgagttctggatgtttgctagtagatcccaacggtcacaatgtatgcttatgtactatagacttccagtaaaattttggagtcgatccaacggttaacgagttggatcgaaggaattgttactggggtctttaagtgagaaaagctgtgattttggtggtggtttggcagaagtttttgccttcgctctgttttgt

SEQ ID NO: 51908 - DNA, 284 bp, Glycine max
ctctggggagcactgattggtgcaacccaaggatgcctctttttcgattccacagttggaagaattgtaaatttagactgacttggtattgatgcataccccttattgcaattaagagtttgttgtgatgctttgatgcttgctatacttttaagagtgagagcctattgtgtgcttgtggatgtgtgtgtgtgtgtgtgtgatggagagaactatgtgctgaccacatttaaagaggctgctttgtggaggctgcttaattgtatctcacctgatgttgtgtg

SEQ ID NO: 51909 - DNA, 290 bp, Glycine max
  unsure (1)..(290): unsure at all n locations
tttgacatattgtagaacttgaaatcccctaatggataaagctaataatcttgctatgtattttanggtaagttattaatataaaatgtatcttatttcaattcccttccccttcctatttttaagatgttataataaaatggtagaatatttatcatttcttttatatcttggaaaaaacaatagtntgtattaataaattatattactgaaacaaaccaaataattaacatacctagctattcttttatgatatatatattcactacttttttgtttgctcatattat

SEQ ID NO: 51910 - DNA, 374 bp, Glycine max
  unsure (1)..(374): unsure at all n locations
tggaatgtgtctttttctttagttagaatggattaacaaaatcaaccctaaacctgttatcccatatttgtgacttantactagtcattaaagaagcattactctcggatgaattttctttttgttattgcgtagggctaaatacattttatgaacagataacaagcatgcttattttagagaatcttcattatgtgtatatcatacattggggtaatgaatgtattgagatactgcttcaaaaaatctatcaaataaccttgcctgtaattgaggaaaatctagtgttcaaggaatacaaagtacattactactagtatgtcaaaataaagtacatagtactaagtgtacatcaattgattcattacatcaac

SEQ ID NO: 51911 - DNA, 416 bp, Glycine max
gaatatcatggatcccaatttgaaggtgttgaagcattctcctatttcatccagtcatattcagtcaacttgactaattcaacaccaaaatattagtatctaataacatgaccactggatatacatactacaacgtacagtctccaaacaagagttgcttaaggcaaatgctgtaccaataaccaaaggcaagacaacaatattattactttataataaaggggtttggttagtttatacattgtgggcgggagaatataatccagagtcacaatatatacgttaatgaagatcgtttgttccatgtcaaaaggtatgaatattattttcccatctgtcgggcctctctcccatatataggtttctattattctatataagccatatacaaaattaatttaagtccttctaccatt

SEQ ID NO: 51912 - DNA, 387 bp, Glycine max
  unsure (1)..(387): unsure at all n locations
ggcactttcatttttcaaacctggttaagagtattactttaaactatatattagcaacattctcatttaaaaaggaaaaatatatgtgaaagaatangagtgagtcagatcctactcactagtgaatgctgacactgcaacttgatcaatacacatggctaaacaattatatcatcagcttagtcggataatcaagtcaagaaattggaaaatgattcccagtatatagtgaagataactganagttcttttctttatgttattaagttcacaaaatggaaagagatagtgtgtgggggcattatcaaatgttaataacttgtggctctattatatatatatatatatatatatatatatattatatatatatatcttcatttttta

SEQ ID NO: 51913 - DNA, 467 bp, Glycine max
gcttgtcgctggagctgacccatcaactgccctatctctttcagactggtgattcctaggctcttgaccttgacttgatagaacctctttttaagtgaaggcacctgactcgatcccatgttttactaaagtgaaacaaaacccagtgcgaatcaaaactccgacatctatcatgggtggaatggatgaatgcatgaagaaatgcatatgacacagatgcaatttatgaatatgggagcccgggaaattgtccccttcttagatacaacatttgggcagcatggcgcccgacgtatgtatttaagaaggcaacacggacccttcgtcggtttgacaaagtgaggggatcaagacgcgatccatgcatgatgcatatgtgaaaggcacaacacagagatgtatatagtacgactatatccacaaacaaatataagcaaaggcatacatgacatttatgactacatgca

SEQ ID NO: 51914 - DNA, 404 bp, Glycine max
  unsure (1)..(404): unsure at all n locations
ctcactaagcgggttaattgccttgcttagcggatgattctcgctaagcatacaagcctcgcttagcgagacaccaaccacaacaactttcttattctttatcttttcaccttcttattcttcatcttttcacctgaaactgaagttgaaagaacaattcacttgttctcaagtgacaagctcacagtggttattcagaaatgtgtttgtntccaagcatcaatcacatgacacaagtggcatacaatgcttcaaccaacaacttttcacaagatatgcatattttcaaagataggaacatgattattaagcaacacatgtgaaatatgctagcaagcaagacagatatcaaggaaggatcatcaagccaaatcctcacggtcactgtttcactcacacacaag

SEQ ID NO: 51915 - DNA, 431 bp, Glycine max
  unsure (1)..(431): unsure at all n locations
acagaaggaccaatgaaaccaagactagtgaacacaattgtcgaagagcatcatgtataaatagagacaggctgcatggttcatctcaagtttacgattaagtacagctagaaggggagatgctgacagagacttgagctaanaaatattattctctctctaatgttctccgatgtgaacacatctacaggggataatgacaaaatgatgaaatcatagaaacaccattcaaacacataatattaaatttcttgccaaatccaaagttgtaaatgatgttgatcaagtttactatttactatttaaagtagataggtaacaaatatacatatatttaatacagctggtgaaaatgaaaccaacagttctagctatcacaacaaggatgatacataaacgaggactaacacttaaatgacgtctcaatcatc

SEQ ID NO: 51916 - DNA, 416 bp, Glycine max
  unsure (1)..(416): unsure at all n locations
gtagcaaccgtttaaattactgtcgcagtctcactatcaccgtcgttgtcggaatatatgacattgagggaaattgtggttaaatatgatcaattcagttgcaatcatatgaaagtccaaaacctcgatgttgcggccacaataacggcggcataccaatttttaaatttttgttcaatctatgaactcacttgaaattatatgcttttgtatgagactacaaattaatggatgagtaattgttgagagtaatggtatatctcctactactgatggtcttagtactctacacgattanatgaaaaagtgaatgaatataatatctcgatcatatcaattgcatcaattttttgagggatatgtggacgattatactaatctgcagttgtctgtacgagagtagttatgatttatgc

SEQ ID NO: 51917 - DNA, 437 bp, Glycine max
  unsure (1)..(437): unsure at all n locations
agcttttgtcatcacctaaaaaccatttttatgtccaactccttgagatggtcttctttgcttttattaaacgtggacttttaaaagcctaaagtcaacatataactttgtcacctctttcaaaaaaccaagagatcattaatggtccaatgccttgatgttttctctcctttcaaaagaatcaaaagatcttttaatagttcaacgccttaaatgacctttcgttcagtcaaaatatatcttgtaaaaaagataanaacaacttaaccagcgtttagttctgaaagaactacgtaggtctngattccttatcacaattgaggaatacgtangagcaagggaaacacccttgtcaccacaaaatgataataaaaatagaaaaggcgtaagatacacataagaacgtacaagggaaaataaaacattttgaagtcata

SEQ ID NO: 51918 - DNA, 398 bp, Glycine max
tgtgtggtaggtgggttttgtatgtgatttaaggatggcctttgtcgataattgggtggtgggtaatgagaaaggctgatattggctgagtaatgatgttgttgaactggtgggggatttttccatgtatgaaaagcagcatgggtttctccttattctcaccctcttcattgccccagtttctcattcgttaggcacgatgatttaaattttctctttcatacccacttgattctttcgctgcgaaaccaaatccgaatacttgatgtgtgaaacaccatgttcatagagaacattgtaatatgtctctatcattgtatcatctccttctgtattagggtgccactggctgcagtcttccactttggcgattcttgaaattatgacgtttgacatgc

SEQ ID NO: 51919 - DNA, 395 bp, Glycine max
ctaaataatatacgatgaaacaatccctcctacgatctgatcagagacagagagagttacttaagacccaaaataccagcgttccaacaattgattccaaaccaatcatttaggaaatatttctcacagcacttccgtaaacaaagtatatacactgggtaaattcggtatgggggcaattttgacataatcataagtaagatcttataatatattaggtactgcaagtcaaaactgtagcatgagaacatcacgttcattgtctgccaatattttacacatatcttactcattcaaaaacgaatggttacttatgcatatgcaacatttcaactcaagcaaaaactgatatgacatcaaaataatataggtcacatttctttacatctattttt

SEQ ID NO: 51920 - DNA, 232 bp, Glycine max
aactggtgctatgcacaaaatccattatttgaccatgccgatatttcacttgtaacttgcttcgttttttttggcttttataatcatggctaactagggaaagcattctggaaggaatgaaatcaaagttatttgggttgtgagaatattatcttagattaaataaaacgaatggctgtctaacaagaaagtcatctttgcctgaaaacttgtggtatgttctagagttaag

SEQ ID NO: 51921 - DNA, 443 bp, Glycine max
  unsure (1)..(443): unsure at all n locations
gcttgaccaaatggacatataatnggatcatgtatttttaatatagnntatgttcgggtcaaacatattctgctttaattttggttctattctatcacaaaaatactggggctactatttgcattctattctttactcttcacacctcttattattttcaaacattttaaaacaccctcccctacttctatcttaaacacctttctcacctcactttcccaccactcccaaaataacatgcatagttattgtctttgttaacaaacggtgagtaaccttacgatcacaaaccataaattttacataataaaggcagacaattaatgaccatctcatatgtattgattattaagaataattgttgtactttactgactaattacataaatgtggcccgntgaaaatccatatttattcccttttgtccttacaagacatatatc

SEQ ID NO: 51922 - DNA, 440 bp, Glycine max
  unsure (1)..(440): unsure at all n locations
tatacaagtggatgcanactntctaactggagtntcttttttaaaaatcaaacaggtcccttaagaacaaaggttaaccaaggtttcaagctatacttgtgttgtatctattaagcacataaaatgaatgaccaagatagtcaaattacttggttttgcatctgaaaccatcgcggtccataataatcatattgtgcgccatagcccgtatgtgctcaaggcaattacataacacaacattgattattcagccaacatttctgtacaaaagcaattcgaattggacaaaagcaggcaatatctatacctgcctctctgggcacaatattaacaaaatcaattcaccactataatattcatcaacatcaacatgaaggtgacaaaataaacaagaataagcacatgcacaattataatgactcgaaacttacccgcggagc

SEQ ID NO: 51923 - DNA, 480 bp, Glycine max
atcttaagcgaccgggctgcagctcattgaactgaataactttgtgtatattgttgaaagccaccttacttgcggtcttccgtagcccaccttagttgttgcctctttgtgggctaccttaatagaaatatgacatagatagagctcataaagcttgcgtagtcctcaccttacaagtcaatttcgcgtggttgagttaggccctcagaccatcttattagattggataaaaggttatcccagattcattgttaagctacatgcatttgcactctctaggctgataaccctgagcatgaggaaagtgttggagagccaccttaattgcggttacccctagcccgccataattgtgccctctgttggggctaccttaattgcagcctcaagggtggtgatttagtctcaccaactatagatatggcataaaatatatcttatacagcttacgtagtcttcattttacatagtggcttctgt

SEQ ID NO: 51924 - DNA, 374 bp, Glycine max
catatctcagaccagttaagaaggaagctcgatgataaaggtgaacaaatgatcttactcagatatcactcaactggaggctataagctgtttgatccaaagagtaatcatgataataatcacgatggatgtggtatttgatgaatatacaaactgggactgggagcagaatactgaaatgaagggaccttcaataatgataaggtgagaatacgacgaaacaagtgaagggaatggtaaaaccactcaaagagaagtgagacttcatagaaatgcaccccaaccatctatatttcaacggtttgagatgttgtctgatgctgatgtaagtgcacatgggaatcttatacattgagctatgttctatgaagcag

SEQ ID NO: 51925 - DNA, 430 bp, Glycine max
  unsure (1)..(430): unsure at all n locations
agcttgagatgaggaagnnganaaaggtgtaacttcctgctnttattcgncgaccacaaagtggtacctggagatatgtcgcgggggtcaggagaccttggggacgtcaagtggggtgctattgcctaaaaccaagcttgaccaatcccgacccaacccgggcatagtcagtcagtgagaacctgtgatgtacctaaacaggcgagctcctggctgtcaacagataaaaggaacaaagaccacaaagcaaggaggcttgtgtggtggctggccagctgtgaatcttgtgtgatatatgggttatggcctctggtaatcgattaccaagggtgggtaatagattacaaggcttaaaaatgaagacaggagactaagatggtctctggttatcaattaccaagggagtgttatcgattaccatgcttgaaaa

SEQ ID NO: 51926 - DNA, 296 bp, Glycine max
gcttcctccagaagcaacagccttctggaggaatcttctggagtgcccaagtgggcctggttgctattttcacccccattgttactaagtacacccgctgcctttttttggtgattcttgtttcgtaaaggtacggaaacttacgaatgtcgtaacgatacttggtttcttttcgtaatgttacggaacctcgtgggatacataatcatacccttcttgacttacggaatgttacggaacctcactaattgtgcaacgatgctttcatttgatatccggtgtgtcacgtaacctta

SEQ ID NO: 51927 - DNA, 398 bp, Glycine max
  unsure (1)..(398): unsure at all n locations
agcttgtaaggtaaggggtgnctcaacttatattctttaatttggccatatatcccgtcgctgtgggactaaaccaccccaccacccttgaggcaacaattaaggcaggcccccaaagaagccgcaactaaggaaggctaagggggaccacaattaangcagcttttcaacactccccctcacgcccaggacactcaacttggagcatgacaatgcaagtggctcaacaatagatctaggaataggcttgataccataattaaaatgtgtgttatgagcctaactcaaccccacaaaatccagcttataaggtgagggttgcctccacttatatacttcaatttggccatatcactagccaatgtgggactaaaccaccaccctcgtggttgcaattc

SEQ ID NO: 51928 - DNA, 407 bp, Glycine max
  unsure (1)..(407): unsure at all n locations
gatatggtccacagaaaattttgcttaaaattctaattggcctaacatatgaatcatggatatgaattangctttctttctttaccttttaaaccactggcccaaaagctatcctaatgtatattattttacctttgcagcccttgaccaaacacttgatttttgttggacattacctangataaaaatnttctacccttacctangttangagagcaaaggtattttgatggggatttctatcattnggtggctaatgtgatgcaaatactttgtttttaatattggaattaagggaaaacagaanagataaaaanatttgaaagaaaagaaagagaaaacaaaaaaaagttatacaagttcttatggataaaaaaagtctgatcatgtacattttatcatagtgt

SEQ ID NO: 51929 - DNA, 459 bp, Glycine max
  unsure (1)..(459): unsure at all n locations
atgcttaccacctcataagactggataacgggttctaatgactcctctgcngcttccacattaggcatagaggatgggcagctcaccaagatgtcttcctcgcctgatacgatgaccagatgcccttccactacgaatttcaacttttggtggagtgtagagggaacaactcccactgagtggatccacgggcgctccaatagacagctgtaggggggggtaatatccattatttggaaagtaacttgacaggtgtgagggcctatctgtactgggagatcgatctctcccctaacctctcggcgggtgccgtcgaaggcacgaaccaccattgaacttggctttaagtgggaggcattgaatggtaatttcttcaaagtgctcttagagcatcacgttaaactggaccattatcgatgaacacttttgctacgatatgggtcatacacttgactgata

SEQ ID NO: 51930 - DNA, 412 bp, Glycine max
  unsure (1)..(412): unsure at all n locations
gcatcaacaagaatcaagcccaggctattgtgcaagcaatcaatggggcaaaacacaccanatgattatgatgatggatgactcaaattctcacaaaggtaaactcatcactttcaaattgagcttccaaaactatcatgacatgtagaggagaatcaaagaattcaagtcacaaaatgtcaaaaactcttattttcaaaacaattacccatttcttgaacatatcctatgattcaaagaaaatngtgcaaagtcgtacatgcgcacaaaattgacccaaaatattaaactaaaaatccgacgactaacaacattaacaaattaacacaactaacaaattaacgaaaccaacaaaactaacaaaaaccaaagaacacttcccccccccgccctacatacttaaacaacacat

SEQ ID NO: 51931 - DNA, 483 bp, Glycine max
  unsure (1)..(483): unsure at all n locations
gttttaccttctcgctaagccaatctatcttcttagcgaagcgtccgtgatgtgccatcattttcttctattttctaaaccctttttgcaccattttaattattgattggtcctaattgtcaattaattaagcaattttattatttgcggcttcattttagctaatttgatgtttttaatctaatttcacgaattaatgaaacattgggcttaatccggatttggttgtggacttgaagagncaaataaagcagcgcttaccttagttaatttctaattaggaaatttcgcaattttattttatgttgttcagtggttatttcgttntgggccagagtattgtaatatggcccagtgactttgagtgactctttntaaatagatgccttgggaatcgtgcagtgcattctattctgttatgctattcattattcagagctttgctttanggttttcgcttttctattttgatgcttctgagtt

SEQ ID NO: 51932 - DNA, 465 bp, Glycine max
  unsure (1)..(465): unsure at all n locations
gcttatgcanatgctgataggagaaatcngccttatacttcacagattaactacagattcatgcattttttttttgggaattcactcattacctggaaatctaagaagcaacacagttactatatcctcagacaggtagagtaccgagtccttgcctccgctactagtgaattcatttggttaataaccttacttaaagactctgaaagtaatggaggcaatacactggttttctgtgacaaccaggcaatgagtgaactcccaaaaaggtagatgctggccccattttatgttcaatctgtgtatcaattagcatatttactaatcaaacctctctcagctcttcaaagcattcatatccacaatgagagacaatgatatntactccccgtcttgaaagggaggtttagtgtcagntagttatcagtacaaagttatcagatagctgaactgctgtagagagtc

SEQ ID NO: 51933 - DNA, 459 bp, Glycine max
  unsure (1)..(459): unsure at all n locations
ctatcaacttcaacttanaataagcttccttgtcaacaacatttaanacttaanataagctctaattcaaagattggtggcagagtttcttacaaaagaagatcaatttattattcttttcactgtgtagaataaactgatttcctagtttaatataaatgagaaaggattttaaatagagaaatgatattccaaacaaaccatacaatcatagatttttttcttttcatntaaaacaacatgcgttcttaaattntgctgagacaaaggtgtttgtcacaaggagatagaacatataccaaattttcaatcctatacatgcacaataaaataatttatgagtggccaaatacaaaagcattaaaacagtatcggagaaccttattccttcaaatggattcacttgactggtctcggtttagttagtctaaatgtaggtctaagtactacatgtctaat

SEQ ID NO: 51934 - DNA, 416 bp, Glycine max
  unsure (1)..(416): unsure at all n locations
gatccttnagtcaccgcagcatgcacttgactaattaaccaatttttttttgtggactaaaccaccctcgagctttattatggcagcctctatagatgccgctactaaggaggactataggtgtgttcatttaatgatactatcacgctcagggcgtcttttctggagcatggcgatgcaaatggcccaaaattggatctaagagaggctgtcactccattttagaatttgagattagggctaaactgaacctcagaagaccacgcttgtagatagggagtatccaagctttacaagctttatttaagtctattgcttgcatgtgaaactaacaccacctttgttgtgctattagggaaaccccaacatgctgtaactatacagatttgggtgatgctttaaatatcttatcagat

SEQ ID NO: 51935 - DNA, 225 bp, Glycine max
aaaccctgacctgtggcaataaatgccgaagacatggctaaaacatggagcaaaattctcatctacatgcccaagatgccacacccttaacacaactgaacgaatttgaagaactcgaaggagagagggattacctaactcgtgtaggtgcgctaaccatctatcaactcgttcatggaggaaaccaataacgctcggcgaggcagatatattggacaattacat

SEQ ID NO: 51936 - DNA, 294 bp, Glycine max
  unsure (1)..(294): unsure at all n locations
ggatccttaagcactgcggctgcagctatacattcatntcgagcgtctctgtatattcttgactcaatcanacatccgagtgaaaatgtattgtcgtttgaattggctcacacgctcaacattctattttgagcgtctcgatatattacgggacttcatcagacatccgagtaaaaagttatggttccttgaattggctcatagacttaacattcaattccgagccgtctcgatgtattacgggactcaatcagacattccagtaaaaagatattgttctttgaattggctcag

SEQ ID NO: 51937 - DNA, 355 bp, Glycine max
  unsure (1)..(355): unsure at all n locations
tcagcttgagcaattcaacgacaataactttactcgcatgttggttgtttccgcacaanaacagggcgcactcaattgaatgttgaagctgagagcatatcctaacgacaataactgtttactcggatgtctgattgagtcccgtaatatatcgagacgctcgaaattgaatgttgaatcgtagagcacattcaaacgacaataactatnttatcgcatgtttgattgagttccggtatatatagagacgctcgaaatttgatgttgaacctcttagcgaattctaacgacaataactgtttactcggatgtcagattgaagttcgtcatatatcgagacgctcgaaattgaatg

SEQ ID NO: 51938 - DNA, 411 bp, Glycine max
gcttcatcacttaatatgagaagaatgtatatcgtttaacctcttccatataacgacctagatgagctagtccaactctgtataagagtggagcaacaacttacaagagagtcttcttcaaaatcttatggctttcactcttatccaaggatatttgtgggttgcaccttcaaaacccaaaagataatggtaagaccatagaaaaacccacctcttagactagttcccaagcaaggactagcaattaaatgcttcaaatgtcttgggagaggtcacattgtctctcaataccccacaaagaaaaccatgattatgacgggtcaagacttttatagtagtcaagaagagactacttctctccctttctctattataagtgaacatgaagttaggggagaagagtctagtgag

SEQ ID NO: 51939 - DNA, 364 bp, Glycine max
tctctctcgaatatgcttagacaaattgctcctgtgaagaaaatcctagccgaggcgcttccgtaacgttttcgtgagtaattacgcgaagattctcgactcgtctataagattcatcgttcgttcttcgttttcttcaagcttcaacgggttagtgccttatgaccggcttttcaattcattctatgtacccgtggtgggccacattgtgtttcatgtctttacatttactatttataccccactttgacgtgcttaagccatgtatttaagtcatatttcgcttaatctaaatataacataaattgccaccgatcgtgtgaattcgttcgttcattattttcacttgaaatgaatgtcgacc

SEQ ID NO: 51940 - DNA, 462 bp, Glycine max
  unsure (1)..(462): unsure at all n locations
agcttatccttcgttgacaatatcnggctatgatcatgctatctcctttggcgaaaactttttgcctcatgggtcatgacttccctttgtcaataatgattcagctgtctaattaataaactnttgtctactgccaagtgccaacctccttttgccacctttccccaccctgtttccctcaaatttcacggcatatcatttgatgtctgatatttacatttacagggtggttggtgcctgaaattgtgctagtagaggttggatcaatgtggatattgacaccatatcttgtgaagcatgtggggtgcgtcttcttttctctactccagcatcttggaatcagcaacagggtatgtcgttgttctcaatgattatactattcacagcaacattcaattatatgaattntctaactggatgtcttctattcagtggagaaagcacattggtctttagctaaag

SEQ ID NO: 51941 - DNA, 504 bp, Glycine max
  unsure (1)..(504): unsure at all n locations
actaagcttagacaaggacaacagtggaaatcaaaatcaaaactttattgtcgcttctctntaattctaccattggaggtaaccctaacgactgcgtgtagattntaatcataaaatcattgggccctaccaattaacattgatttgggaaagttgcctacggtgtgaaagaaactttatggccatctaatcaaatcatagaagaaaaaagataatacaattaatgcaatgaagaacttgctcttattaatcaagttaatttattatagttaaactcttggtaggagacaagttcctctcataatggacgaagatgggtatgatttctgctttctgtcaaaagctatacttcaataatgaatacagcttcaaccacaaaaatccaaaagaagaaccaaacaattctatcttggtatccagttaactccacagaacacaaacaacctagtcaagttctgatgttgatgggaaaagccaatggaatactccaacatgaaaaatatc

SEQ ID NO: 51942 - DNA, 474 bp, Glycine max
  unsure (1)..(474): unsure at all n locations
agcttatgcnaccacgacttgaacatgccatatttatgtgttgttctcatatcaacaatcattcactgcaaaccaccatcaaaccacagcggctcatcaccgaatggcgagatctaatcttgatgcgcaccaccattgataactgttaaatataaactatttttttataataaaaatatattgaaaatattgttaaaaacatttatttaacaaataatttctgccttaaatattaagaattgatgcgcacaccgagtctcagagcactctaatacacacctaaaacctaagaactctcccttagaaaatactttcttctctttcatcattttctattccattgttccatctgttctcccccatcaattcctatactcattgtctagtgtaagaccccctaaggttatgagaggctatacccttagttacggcctaatacgcctacaaagccaaaagatgtattgtacacttcat

SEQ ID NO: 51943 - DNA, 488 bp, Glycine max
  unsure (1)..(488): unsure at all n locations
ngtgtccaaaggtcaaaactcctcannattttacttngatcttgtgaagcacttgcttaatgtatgaaaatgtcaactatgtaaccatacatcaccctagccctaatcagttccaacttcttttactttgatctgaaaggttaaaaagaaaatctatcttagtaaagtgttatataaggagaagagacaagagtcaaagttaacaagaacaaaaaagaattaagacaggtgtataaaaagacatttatgaaaaaaaataaaaaaaatgaagctggagttgtattctgatcatcttgcaagaagataataaataatataccatattaagaagtttagtttctaacggtttaatacaccatattatgctatggcattgttaggtttctttctttcggcgctttagaatgccaagggacaccacaacacttatgaaagagtgtgaagaccattgagataacgacnggtgtttaataaaactcatcataata

SEQ ID NO: 51944 - DNA, 434 bp, Glycine max
  unsure (1)..(434): unsure at all n locations
agcttcggaagaaagtgatgaggtacattccctataggcagagcttgaaagagcctgngtagtcgaagagaagttcaagtccatagccatcaaagtctgaaaagagtatgatgaactaagggatgtcaatatggccaccgatgaagccttggaatgagaaaccaagaaggcccgaaaggaagaacacgaccaaagcaaagttttgaggggctttatagggcagcaatagtgagctcaagctccgaagaggtgaaaggaatcatcacgggtcaaaggcatgatctggaaggacgagccaaaggcttaccttaggtcgaanagaaattngtcccaacagttaagcgagactgaagggaatatgtgggtcgtcatcgatgagtgcaaagagaagctaaatctagcgacgactcacgagcanaggctaaaggatgagt

SEQ ID NO: 51945 - DNA, 394 bp, Glycine max
  unsure (1)..(394): unsure at all n locations
ggaccttaatctagcttaacctttcaggagagcaagtaagaatgtgtatctccaaactctaagaggtgagtttgaatccttacatatganagagtcggagtccatttctgattatttttcaagaattctcgttaatcaactaaaaagaaatggtgagaagttagaatatgtacaaattatggagaagatactactctcattagatccctaaattgagcacattattgtgacaaatgaggaaaccaaagatttagaaaccatgacaatagaacaacttcaaggatcactacaagcttatgaggagaagcataagaagaagcaagagatcaccaagcgactcttcaagttgcaactgaaggagaaggaaganagtcaaggaaatgaaagaagtcat

SEQ ID NO: 51946 - DNA, 452 bp, Glycine max
  unsure (1)..(452): unsure at all n locations
tgattatcattctcccctttctcatgcatattcttaattcttcttgacaccatcaaaatcttcatgaattacattctcccnctttttgatgatgacaaccacctggtggttaggagcaacaacaaagaaaaaatatctatttgcatataggttactccccctggttttgaatgattgttattgaacagtgaagatttatatttttcatatgtaaacaaattgtctcataaagaatagataagtgatctttctatcttattttttatctttctctccccctttgtcaacataaaaaacacatcatgaatagagaggagaaagatgttccacttgctgcaatgtatgggaatcaagtgataccaaaaggcattataacaatcattcaatattaatcaagcaataacaagtacaataacacatcaatcatacacaatcatatacaatcaatcatc

SEQ ID NO: 51947 - DNA, 417 bp, Glycine max
  unsure (1)..(417): unsure at all n locations
atgtgaattangaagcatcaacaagaatcaagccaatgctattgtgcaagcaatcaatggggcaaaacacaccaaatgattatgatgatggatggctcaaattctcacaaaggtaaactcatcactttcaaattgatctttcaaaactatcatgacatgtagaggagaataaagatttcaagccacacaatgtcaataacttttattttcaaaacaattacccatttcttgaacatatcctacaattcaaagaataacatgcatagtcgtacatgcacacagaattgacccaaaatattaaactagaaatccgacgaaactaacaacattaaaaaattaacacaactaataaattaacaagaaactaacaacattaacaaattaacacaactaacatattaacaaaaccaacaatac

SEQ ID NO: 51948 - DNA, 418 bp, Glycine max
  unsure (1)..(418): unsure at all n locations
cgaaagnccatcctcgtgtggatttttattgggtgacacttactgtgcacaatttgattctcaattcaacaacaacaaagctttatcctactaaagtaggtcagctacatggatcacttgatgccattcgacacggttaaaaaccagtgttttagaaataatggttatccctaagatccccctggagattaccttccaccacctttgtgggctcccacgacttctatttaccagactaacaaccatgccatctattcttctaacgggcacctcctcttgtggccttcttagtatatgcctaaatcaccaataccagatttctgtcatcgtgttctaaatgggtcctacaccatactatacttgtatatagacatcatgcattctatcctttcttgataatcacacacccaacttaata

SEQ ID NO: 51949 - DNA, 336 bp, Glycine max
actatgatgcacaatgtgagaatctgaaactgcacccctcaatctggcacaccaagcatgcaacttgtgacagaatgtccccttccaaacaatttaaaaatttagacaatcattctacacgagtcaccatttcaaataatttttaagatatcaaccaatcaatcacacgctcatcgttgcagtgtgcaagtaacaaaatattgcattagaatatggaatcatttctggccatgatgccgtcttccccacatgtcaaagagggtgcttgtcacacatattgaattaaagatcgtgtacaattaataacaacaaactgaagactttggataccaaaca

SEQ ID NO: 51950 - DNA, 454 bp, Glycine max
  unsure (1)..(454): unsure at all n locations
ttaagcacctgcggcatgcaagctntaaagttgttaggatctcagccactttgtttcttattctccaagngtatctctcactataggggcttaatttcttctttttaattcccttcaacatttctagcattttgtgtgtatagatatatatttactttaatcatcattcggagcctcaattttaactgctctntttgctttcaaatatatgtatctgaatctaccatgtgatgcatgggtaattaaggagaggaacaagaaaactaaggatgagatgaatgcttagatagcagagtttgccaagtccctaaaatcacaacggaaaggaaatgtttcgaagggtgccatgcccaaaagtcccaaacttggtggtggaggcaggaaacgctgagcctttactttggtaccatttatggctacattataatagtgctgcttggatctgactatttta

SEQ ID NO: 51951 - DNA, 278 bp, Glycine max
agcttcttatccaaggctcatcttggtggtgtttcttcttcttccatggcatatatcgcagcggatggagactcctctcacctctctccttatgcgtccaaagaatcttaagtggggataatcactcatttacgacctcaatgtatctgtataagctattccctttcataccccgacggcccgtttggatcggcaggttagaattactctatatatgagtatagagactcctcctacccaattcaaacgaggtgtaggctaaaccaccccgtcacaac

SEQ ID NO: 51952 - DNA, 458 bp, Glycine max
  unsure (1)..(458): unsure at all n locations
agctttatgtgaaacgatgtgactctttactttatatattgaattncaacgntcacaggcactggtaatctattaccanaacattgcaatcgaatacagcttattgaaattaattggaacgttgttaattcaacttgaaaanattttcaaaaacattttgctactggtaatcgattacagcaatctggtaatcgattaccagagagtaaaaactctttcgtaaacatgttttgaaaaaatcatgtgctactcaattttgagaaaacctttttatacttatcttgattaagccttctcttgattcttgaatcttgatcttgatttttgagatcttgaaccttgaatcttgattcttgactctcaactttcttcttgagtcttgaattcttatcttgaactcttgaattggtcttgattcacttgaggtgttctttgatagaacttgattcacttgattg

SEQ ID NO: 51953 - DNA, 470 bp, Glycine max
  unsure (1)..(470): unsure at all n locations
agcttantaaaattgtttatcacanagattgtctatatctcttccattcaaatatatgttctgactatctggataaaaataaatgaacagtaaaaacttacatctcaattttttttttattctattctaccaaacagatcctaagagagtttagatagtatgtacgaaatttgaaatttgattctcattgaagctcaataactgactttgttcaatcacagcatattaagataataactaaaggaagatgatgaagaaggtagcacgcaaggataataattaaatattcttgtgtgtcaatatatagtaatattatgttctagtcccatatacatggtcaaatccagcatcgatgatggctgaaagtaagacccaaaaaagaacaatttccctaccataacttttgtgccatcaacgagtacctctaaaatccgttggatgttcacttgctgtatcatgtactgtgttga

SEQ ID NO: 51954 - DNA, 429 bp, Glycine max
  unsure (1)..(429): unsure at all n locations
agcttcatcctcatcgggttaaggaggcttcttacattttctagnnncatgnanctagcctggtagttatgttctccaccgaactgagaactatagttgagttctcttgatggagtgaagcataccatccatcttatgaatcataattaactcataaagactccattgatgtgcatgctcttgggagcttaactttacatcttcgtccatctattccaagtttcgtactgcttgctctccaatgattatccactcatggttggcaaacctcttttcatgtgtcttgagattcctttcggtaatctcactagatgctttggaaaatccactatctcattagatacatcgacattgaaatagtcattgaatcttgaagcaagcatgacataaagaaaatttgagttcactaactgacaactcattaatatg

SEQ ID NO: 51955 - DNA, 480 bp, Glycine max
  unsure (1)..(480): unsure at all n locations
ctagcttaatcgtcttcacgtcttacacggcgacatcgtcttatatcttaacggcgaaanacctgcaaccaagcttatctattcattctatgtacccgtagtggtccacattgcgtttcgtgcgattttattctcttcttgtacactctatataccccctgttgacgtgcttaagccatattacttaagtcatttctcgcttaactcaaatataaaataaatgttcaccgaacgtttgaattgtatgatcccttatcttcggttaaaataaattccgaccgtacggtcgtgccgtaaccacgttggatatcatagntatgtgaaaaataatattataatcaaaaagacatctcttatttaaatatagcggaaaatcaatccgacgtaatctgtatgggatttctcattcttaatcgaatcgagtaatcactacagtgaaactaaaggctaatatcaattcgcctagtcaagctcgttcat

SEQ ID NO: 51956 - DNA, 440 bp, Glycine max
agcttgtctcagcgtctatgcgagacatatactttacatgttagctatcatcgccaagtaccaagaagagttgggtctagccacggcccacgagcatataatcgcggatgagtatgcccaagtatatgcggaaaaagaggctagaggaagggtgatcgactctttacaccaagaggcaaccatgtggatggatcggtttgctcttaccttgaacgggagtaaaaaacttcccgattgtagccaaagccaaggcgatggcagacacctactccgcccccgaagagattcatgggcttctcggctattgtcagcatatgatagacttaatggcccgcataattagaaatcgttaggaaacttgtatggtctctcagaccttgactagatatgaattcttttgtcttttttgaaataaaatgagttggtcccatgtttctact

SEQ ID NO: 51957 - DNA, 402 bp, Glycine max
aaagagttgttgataagaaatgagagaaagaaaagtactttgttgagaaatacactatgcttaagagagttcattctttataatacacaaagtactcgtgagacattttaacttcattgtatattcactcatcgagtattggtaagaagctttgattctacatcaaactcttggttgtgagatacatgagtgacttaattgaaaaacaatacgtatgtgtgcttagatcaagtggagttacaggtgggccattatgaccataaaatctcatagccaaagtgatgaatagaatctagttgatatcggaatcttactagttgttagaaaactgacgaactatgttggtgaaccgttaaacaaatatttactgctctttagctataaagtattaatgccattgtg

SEQ ID NO: 51958 - DNA, 457 bp, Glycine max
  unsure (1)..(457): unsure at all n locations
agcttgaacagatgaatttgagtattcttgtacttaaacaacaggagataagtgagttntacatgatagatcaccatgttcttccataccaaatgcgcaaggaggagcaagatatgtgagccatgtacggtgtgtttggtttagatgatggaaatacagaagatggtaattaaagagaatntttttaattaaaatagagggtgaacagtgatgggtcccacaaaaaatgtacacagccttcacctcaatattatttatctcctcctacccgtagtgatggtagtgtaacagagcaggaggtggagtaacaattgactggatatataaaatgcacaaattaacttatggcaaagtttgacaaagaattcattttctatggtaagtcgatataaacagacattataatcagatttcatattcattcaatgtttcaagagtattgttagtttgggtgagt

SEQ ID NO: 51959 - DNA, 370 bp, Glycine max
attctgtggaaatatctctcttccagcgaaaatacttctgaacctcgggctaaatacaagaggttttattgacttatcactctgacgacaaggagagtctattatgctggggtatcgaattgcataagcataatcctcacatcaccaatgtgtacacccgccaatacccaattggcgcaaaccaccacactgttacaacccacccaaagggtgctaactactccatagttacaacacacccaattggtgccaggtcaaaatatgtgaatcaatgagacataaccctggcgagcactcaataccaacctgaaagggacataaccctagctagcaatatctacctatctcaagatatcaatatggagacatg

SEQ ID NO: 51960 - DNA, 397 bp, Glycine max
  unsure (1)..(397): unsure at all n locations
cgacaataactcttttctctgatgtcgtgattgagccngaaaaatatcgagacgctcgaaatggaatacacgagctctgagcaaatttaaacgacaataactcttttactcggatgtctgatggagtcccgaaatttatcagatgctaaaattgaatggtgagccctgatcaaattaaaagacaataaccttttactcggagtccgatggatcctcgcaaatatctaaacgcttcaaatggatttcaagcctctgacaaattcaacaaaataactttatccgaggtggatggagcccgaattatcgaaccttgaattgatgtgaccttgacaaatcaacacaataattttactggtgttgttgatcccgaatatctaacctcgaatggaaatgaact

SEQ ID NO: 51961 - DNA, 353 bp, Glycine max
  unsure (1)..(353): unsure at all n locations
cgatgactactccttcgccgatatgaccgacttatgcttggtgccggatgtcgtcatccctcccaaattcaaggtacctgattttgacaggtacaagggaatgacttgccccaaaaatcatttaaagatgtattgccaaaagatgggggcatactcgagggatgagaaatngctcatgcacttcttcaatgacagcttggtcggagccgcagtcatttgatacaccaacttggaagcatcacggatccgctcgtggaaggacttgattactgccttcattangcagtatcaatataatactgacatggctcccgataggactcagttacaaaacatgagcaaacgggaacatg

SEQ ID NO: 51962 - DNA, 423 bp, Glycine max
  unsure (1)..(423): unsure at all n locations
aatatttttagtgatcacatacatcttcagttctactgtttatttgaggacttatatattgccattggctatatatatatatatatatatatcaagtaagtatttataaatcgttaattaaactatctttttgttgctgatcgccattgactatctttttgctcagtattattttcttcaactattgcagcattgtcaagaaacctattcattaattgaattaattaaagttacacttcttcaactatnttatacacaaaatattatatactaccacaataataacttaatttacattctgtngtcatgccaacagttttacttaggtattactctctaatctataagtctaaaaactaaactatattcatagtcctatatataaaaaaatattcctgtctcggttttgcacactttatatat

SEQ ID NO: 51963 - DNA, 450 bp, Glycine max
  unsure (1)..(450): unsure at all n locations
agcttgcacttattcatggcaggcatgacgtttatgatctctcagcattctttcttttactaaaccaagacgaacattccaccacaccaaattagcataatttccttcgagcctatggaattgaaccactcatgttttataccagttaacataacagatctaatacccttttgcaaccacaacaaataagacaaaanaataaaatgacactctggtttctgcttcggttcacgcaggagaataagagacaccaagtgagttaactaaattttggttcactcaattgattggccaagagtgtttcaagtccaaaccctatttgaaacccacaccatttcccatgactatgaagaacctttatttctctgcacatttgacaaccacttcaagatcgcaatcttgttcttgccattactggtgctactgctgctntcatctgtcacacccaca

SEQ ID NO: 51964 - DNA, 393 bp, Glycine max
  unsure (1)..(393): unsure at all n locations
aaacagaanaaatgactacatgataatttcgattgagtttaagtggcttaatgctccaaaggaaacagaaaaaatgactacaaaaaatagtgtactaaatccttaacgcatttaagcactgtgtacagggaatcatcttatgttaaatttcacagcgctgaaattttcacatgtatatataaaaagttgcatatgtcagctattaaagaaaatcactgagcaaaaattgtgacaatatgccaacgaataacaatagaattacggagaatgacttatntccttaattattaattgcacaacaataattaaatggtgttgagaaatgaatgaaacaaaagaatctatgtttattttcagaaaaaatttatatacactatgttatatatatagaca

SEQ ID NO: 51965 - DNA, 375 bp, Glycine max
tgtgaatggacgttattatggcaatacatcgatcttcttttgattcatccttgctgacacgccaagggccattgctcttggcctcaaagcatactgatgatgcataaataggaaaccgggattgatgagtcaacacaataaagcaaaagcatttgaaagttggcgagctacttctgataaagagggtttttcctatctgatgcttaaatacatgcgatgaattatatctctctggtcttactctacatgtgtatgagatgcatcattgtcctttaatgttgtactgttacacctgaggactacgatattgcatcccagcacatatacattttgttactttagaatcttgtcaccgttaaaaatataaacatggaa

SEQ ID NO: 51966 - DNA, 353 bp, Glycine max
cgattgaggcggataatatatcgacacgctccaaattgaacaatggaagctcttgagcaattcatatggtcataaatattcactcggaggtccgattcatgcgcataatatatctagacactcgtaattgaacaacggaagctcttaataaattcagatggtcattacttcttacccggaggtccgattcacgctcataatatatcgagacgcacgaaattgaacaacggaagctctcgataaactcaaatggtcattacttctaactcggatgttcgattcatgcacataatatatccagacgctctaattggacaacggagctcttcaaaatctaaaggtctaatctttac

SEQ ID NO: 51967 - DNA, 386 bp, Glycine max
  unsure (1)..(386): unsure at all n locations
tctcgatctattatgcgcctgaatcggnacctncgtgtttttatttatganccattaaaattctcaagagcttccgttgttaattccgtgcgtctcgatatattatgtgcctgaatcggacctctgagctataagtatgaccatttgaatttctcgagagcttccgttgttcaatttcatgcgtctcgatatattatttgcctgaatcggacctccgagttaaaagttatgaccatttgaattttttgagagcttccgttgttcaattccgagcgtctcgatatattatgtgcctgaatcgagcctccgagtgaatagttatgaccattcgaattgctcgagagcttccttgttcaatctggagcgtctcgatattatatgcgcct

SEQ ID NO: 51968 - DNA, 447 bp, Glycine max
ctgcagctgtaaaagggagatctagttatatattttttctgacatgtccttcaaaaataaaatcattctttgggttgcgaacaaaactggaatatatcaaagcccctatagtgatctaatctctcaacctcacccaagtgcacacatataatgatcagatgggaaataaagtcaaactatcatacaccatacgcgcagatgttaattaagttccaatggaggagaaaacataattaaaagtccccacctagaaccctgacagcaataatgtgtgtctttggatcccttataagcattttgccaacaaggtccttaacactgtttgatatgcttggtcatggaatactttcaaaatccatatgagcttgcaaatcggatcaaatatcccttttccgtctctcacaccatattctaatagaaataactaactgagaacaggggaaacta

SEQ ID NO: 51969 - DNA, 388 bp, Glycine max
  unsure (1)..(388): unsure at all n locations
ccttctgcatgaatgctttcttatcctcatcagccatcatcattttcgagtttggcttctccatcaagtgcttacactaggccttgctgaacaagaagtgctctcatcttcaatcaccatagcccacaatcattgtgcccggtgaatttttcaaccttatactagggcaagcccattgcttgaatcgagccctaagtcatcgatgttcaccacaccagcttgttgtgctcagatcagaaattctactgttcactactgtctaacatcaagaaataggattaaatatgcatcgccatctcatatnggcaaccatgaagatttaaagtgcattgtcctgtagcaacttcaagattgtacaatgaaatgctgacacacgggctttcacctg

SEQ ID NO: 51970 - DNA, 323 bp, Glycine max
atttaagttgacagaacagatcaagcaccacatgtcatggtcatccgaaatattctttgagaatcggaacgagcgggacattaaaatcatatcgtcacttatcataacctatggcatggcatattaaaatgggcttctgatcaaggacatttagaactatatatatatatatgtagtatatatacctacatatatatacttacacctgacagagactgtgtacaatcatttgtcactgccaccacttattcttgggagagggagaatgaagaagcatacacactatgtctattacaagagaaaaattataacatgagtatgtc

SEQ ID NO: 51971 - DNA, 458 bp, Glycine max
  unsure (1)..(458): unsure at all n locations
agcttgcaaaggtggatacattcactatttattctctttgttataagggtgcttccctcattgctttatggcatgcatgcaaccagctgctggcaataaaccacacacgccaaatgccattaatgttgcatttccaacattctgataatagccaccctacaaaaataaagaggaagtccaatatatgtgacaacatatagccaaatactcacatcaaccacttgatacacaaataacacacaatgtctttcacaaaatcatttatacggaaaccaatgttttgagaatatcgcctcggtccctatattattttntcaatggtaccaatatcgaatctacattgtcaatcatatattgctttgttatttatattcaacaaatttagaaaacatttattacacaactaacaattcacctcaagtgtagtaccttacatattaacataatcactccctaaa

SEQ ID NO: 51972 - DNA, 307 bp, Glycine max
ctcaccggaacatggagtctgacgccttgaagaacccaatgggtgtggctgtattagatactcggacaaaactcaaatcttttaagcaacggatttctaacaaagctagctatacgtcgatattgatgcttggtgtaacctatcaacaccctcaggttgcgctctaccacatgcatacaatgaaaaaacatgtgcccacataaccggatctacctcacaacatgttcaattaagtgaatcataatgtcaaaatgacgttggggaaaatacatctccaattcactttcgatgaggacaacctccatct

SEQ ID NO: 51973 - DNA, 461 bp, Glycine max
  unsure (1)..(461): unsure at all n locations
agctntctccccattntcctataaatagggggttatgtgtatggaaaaaatgttcagccttgctggtaattcgagaatcacatgaaattagtgaaaaaaattgtttccgtgaagtaaatccaagcccaggcgcttccgtaacgtttccgtgggtgatttcgcgaagattttcaaccgttcttcggcgttcttcatcgttcttcggtcttcaaccggtgagttcccaaaattgaacttttcaattcattctatgtacccttagtggtcctcatttgtttcgcgtacttttattttcatcccatttactttccgtacccccttttgacgtgctttagtcatttacttaagccattntctcgcctaatcaagaaataaaataaatttccaccgatcatttgaattgtaatgtccgttaatttttgtaaaatgaaatacgactgttcggtcatgccgtaaccacg

SEQ ID NO: 51974 - DNA, 419 bp, Glycine max
  unsure (1)..(419): unsure at all n locations
ttatgggtgtaaccgacaccccatagaactagaaaagacttgtgatctatgtcgggaaccccaatgctctgttggacttttccgggtccactacatgtctgggaggtgcgatccctgcaaattggtaaatggtgttcgagattagctgggccacattaatactaacttgagtcaagatggcatagaccaactggcacttcgacaagggaagatcanaattatgatcgctggggaggatgttgctgagatgcagtgtcatccacatctgtgtcagggtggtcatgctagtgtgcatgatctgcacccgtctccctgtcacgctgcgcgcaaagtcctgccctgaaatgcatagcaactggccaatgacctcctcatcaaacctcgaggcctatggtcttctctgactgaactcacaatgt

SEQ ID NO: 51975 - DNA, 414 bp, Glycine max
  unsure (1)..(414): unsure at all n locations
gcttgcaatatgattctgaactgatatgtgatatatgtaatgttcttctatcacggtgaattgttcaaacatcctcatttgttgctgttgcaaataagaaattccatatataaacttcctggtggccgattaaggccaggtgaatcatgtattagaggaagctcaaacattgaaatgaaaagctttgcgaatgttttttgtgatattctactgaagattaaattgtgaaattctagatactgatgggttgaagcgtaagctggcaaggaagctctctgtgaatgaagatggggacgggtcacaatgggaggtattaaacttgtccttttgtacttgtcattacaacctcacatcacgtgagcatttgaactataatntactttgtttacgtgggtgaatgccttggaatgtggt

SEQ ID NO: 51976 - DNA, 438 bp, Glycine max
  unsure (1)..(438): unsure at all n locations
acattgtgtttagaatatgttcatttttaaacacaaacatgatatatattcatgggtcacaatcataattatatgcacctcaaagcaatatggaccaaactgaatttagcttaaaagaatcaagacaatgtggagatctaagatcaacaatagaggtggtctcttgtatgcatagctctgaattattaatttcaatggcgtcggagtgctgagtttattaaattgagcctacaattagttcgatggcccaataaccaagctacactagtgtacatntttaacattatcaactttgttactcttctataaaaaaagctagtgccccagagacaccaggacaactggttactcataccctttcacaaatagacatttatcacaccccaccaagttagaataattatgaacaagacaatagtgtagcatgacgtgaccctt

SEQ ID NO: 51977 - DNA, 459 bp, Glycine max
  unsure (1)..(459): unsure at all n locations
agcttgcatgatntacatctccctctttctcaatcaaattcttcttgatatcatcaaaatcttcatgatcccgactcgttggtggaggatgcatgaatgacaatcaattcatggggctccgaataaaagtggagaatggaggataggcgaacagcgctaggcaatcaattcgcggttctcccgactcgttggtggaggatgaatgaatgacaatcaacttattggggctcctaataaaagtggagaatggatgatacgagaatagcgctaggcaatcaattcgcggggctgcagactcgatggtggaggatgcatgaatgacaatcaacttatggggctactaataaatagtggataatggataatatgcgaacagcccttgcaatttattctctgggcttctaacttgttgtggaagatgatgaatgacatcaattctggggcttcaaataaaataga

SEQ ID NO: 51978 - DNA, 354 bp, Glycine max
ccttcaaactcactttaatcttttgaccgggggtttatttgtttcatgaaacaaagcactggtcatttgcttttatcaccttttgacatgcttagccattatttagtcattctcgctaatctcaaataaaaaattacactgtcgctaaatttatatccgttatttggtaaaatgaatccaccgttcggcgttcctgccacttggaaataaaaagacgtacatattattaatactcaagatacctttgtaaataaagcaaagacgatctgactttctcttgggatagtattctaatcgaatgcaatacaaagtgaactagtatatgaactgcagcaagctctccaaatggttttg

SEQ ID NO: 51979 - DNA, 170 bp, Glycine max
  unsure (1)..(170): unsure at all n locations
tataatacaaggatctttcttcatctgttcctggtctctacccattctcattcatttgcatgtntacttctttttctgaaacggcagatccgatgacgagttccccgaaggtactaatacctgggacccgtctatcgacttcgagcaagaaatgaatcanacggaagatg

SEQ ID NO: 51980 - DNA, 466 bp, Glycine max
  unsure (1)..(466): unsure at all n locations
actaagcttctcgattcattctatgcacccgtagtggtccacattgtgtttcgttgcttttattctcngtacggttactctttataccctctcttgacgtgcttaagccattntacttaagtcatttctcgcttaacttaaaaataaaataaatttccaccgaacgtttgaattatattatccgctaacttcggttaaaatcaatttcgaccgttcggtcgtgccgtaaccacgttggaaatcatatagaggtaaacaataatataataatcaataagacatctnttagtaaaataaagcggagaatcaatcggacgttgtctctttgggatntctcattcttaatcgaatggattaataactaaggtgaaactaaggctaaaatcaactcgcctagtcaagctcgtccacaaaaataggcttttgaagttcgtcatttcaatttctcactaagtaaaatggatca

SEQ ID NO: 51981 - DNA, 440 bp, Glycine max
tgcagctatattggaaatcttaggaatatttttgtatatttgtggatatagaacattgcgaaaactgcaatcagaaagatacgaatcatatgatgaggcagtgagcatgtgcaggccaaaaacttatgttattataatttgtcactgcattagacaagtcaattacttggatccattacaaggcggctgtcaatctaacctaacaagtagaatataatttgttcatttataaatggtaaagaaggaaaacggagccaatcaatttctactattagtgcacaaaatcattaatggtgctattatgatcttcaaataagttacaagtcttatcctatcctacccctacaaaaggatgcacgactcactatctatgtgatgactccactcatcacaaaaagtatatgagcatatagtgcacagcatgtgagagatattgacat

SEQ ID NO: 51982 - DNA, 262 bp, Glycine max
  unsure (1)..(262): unsure at all n locations
tgctctgtggtatggatcaggatgttctattctcttactgtaattactggttttagttcatgcattataaaggatattctctaagcaatttaccataacttaagatttctctgatatgcgttctattccttcgttgccttttgaggtgtaagagtgtactngagtttttcatatatgtttatgcaaatngtgattgttgcacttgtactactagcatttagtatgctgaagtcccttattgtgctaattcaccccattcttg

SEQ ID NO: 51983 - DNA, 461 bp, Glycine max
  unsure (1)..(461): unsure at all n locations
gcacgcttaccccaagcaccctattgttccgaccttatttctctttagctcgcgatgttgcaccgacgctgtcgccagcgaggaacactttttcaaaatctaagtgttcgttcagacactcttcaatgccatttgcacccacgtgagaagcaacccatttgagtgcacaccatgagtcttcgtggccggtgggaatcangtgctccggtgcanctccggtagtggacagagacaacgacaaccattaaccttggaaactgttaaaacaaaggagaatgtggatgatagtttgaaaaaaagaatggataaagatgaagaaaaatatgcttcaagtcccaaatcgctcaagataaacacttgaatagtgtttcactccctatatatagagaactcctctcttcatatttctttgccccagatgagaagcatgtcctcaactttcttttctcctctctatatca

SEQ ID NO: 51984 - DNA, 298 bp, Glycine max
tgatcatgcatgtacaaacgtatacaaccgatctgctccaaagattccatattatgagctgcaattcaacatccactctcattgaaccaagctcgatagtagtgaaggatgagtcagaaaaatcagtggatagcaccctatatcagcaagttgtctggtcattgagagatctctataatacaagaccagatatgtcatttgcagtgggtctaatttacaaattgtcatacgatcctaaggcctgtcattgggctgctggcaagatgattctgagatacctcttaggcacactcaacta

SEQ ID NO: 51985 - DNA, 440 bp, Glycine max
  unsure (1)..(440): unsure at all n locations
agcttaatgaaacaaacanaagcataatcctaattcatttctttcataatntaatgagaaagaaaagaaattaatgaagaattggttaacctgtgatgctaacaaaggaagaagaagagatgacgaaggatgatcggaaagaatgatgaagtgattggaagcacgagagagaaattttgaggaacaagagagagaaattttgaggacatgctttgtcattntgaaatattttgaagacataattgtccaagcattatttagggaacagattcccgaaaagaaaatttcacacactggaaatctgagcttcataaaaagatctactgaaagcttttacttttattaaagctaaaacacattattaacctagcactcttaagaaaatacaaaactttttctgttaatagatggtaaagattttctttaataaatggaaaaag

SEQ ID NO: 51986 - DNA, 424 bp, Glycine max
  unsure (1)..(424): unsure at all n locations
agtgggtttcggcattacatttaaactcgatccattgtttatttcaccttngcgacaatgtggtccacacatctcaccgacacatgtagagccttgttgtgtcctctcccttcaatgggaatctcttcttccgcaaatgcgatgtaattgttggtggttatatgattgacgatgccttctaaaccctccaccgagatatcatgtgccacatgggcatcgttaagaaccttgatcaacatcgcacgatgaggctcggagtttatgagtagctcaagcaaggagacccttgctggagttttatttagttgctcgactaccttanactcgctttgttggatgaggcggaggaactcatgggcctctttcaaagccactgtttgtccttgaagtccctctttctattccgctcctcttgccatgggag

SEQ ID NO: 51987 - DNA, 478 bp, Glycine max
  unsure (1)..(478): unsure at all n locations
gagcttgtataaggaataacaacatatatacaatgtcgtttaccaacaaggaataatggactcacacggtttctctgtatctataccagcagcacanatacagtttaaccatgaaacccaaccatcatctgctgttcacccttcgtgcgtatatttctaagagtaaagcaaataagcaagctatacaaaagagccaacccttaccaactccttcaacattcacgtaagtcctgtatcatcatatcaatcgatctcctttccttcacaaagagatcgaaacaatcataacgttaaacaattcaaacaagccctgggattcatctcccattcacaataagagaattttcttcctttccctttcgcattaatccatgcccaagctctatgttttgccagatcccatgcgggcacacaacacagcttcccaattcccattggcccctctaaagatatacattgttttttgggagggtacctg

SEQ ID NO: 51988 - DNA, 351 bp, Glycine max
caagcacaagagacttgatcattgccatcttgaaagaatgctatacatgaaaaaaaggaaatatgctaaagaaaatttgaagaagatttcaatggaggaatgcaaatctgctatcacactaatgaatctaaggagaagttccaaaagagaacgtgtcgataacattgatgaaggatattatgggagcttgattggatgtctaatgtatctcactacaacaaggccaaacattctatttgctcaaaagaacaaaactggaacttctattgataatcaagtagccattgctattgcaacaatctcgtgtgcatgggaagactaacatttaacatccagtctattatttgataa

SEQ ID NO: 51989 - DNA, 393 bp, Glycine max
  unsure (1)..(393): unsure at all n locations
acctacttatgccatgcaaccttttttatcntatcttccgattgtgacgaaattgataagagatgatgcatttctatctgggaagactcaaatgacagtaggaaagttcactggatgagttggaaagccttatgctcccctaagaaaagtggtggtcttggtttgcgattgttgagtcatatgaacacatctcttcttatgaaatctacctaaaacatgtgtacaaaaccaaatgatctttaggtgcggattgtgagaagctaatatagatgagggaaggatattcttccttaaattgacccagagaacactggaacaaacttctggcggggcatagttcattgttgggagaagatactcatgaaatattgctcgaagatatgcatggccgat

SEQ ID NO: 51990 - DNA, 261 bp, Glycine max
tcaacatatgataacaaatctattgatcaagtcgtaagcttaagtttcaagaaatacagagctcatttaaaaatgaggtaaggctcgcccacgtaaaattatttagtccgcctaacgaataaaacactgtcaaataatagatggtaataattggcaataattaaggataattggagaaaattgtaaaatatattatatttgtagcaccgcgctgcaataacacttttatgctggctgctttacgaagactttaagtgactg

SEQ ID NO: 51991 - DNA, 463 bp, Glycine max
  unsure (1)..(463): unsure at all n locations
gcttcttcaaactttgatggtatccgntacttcttttgttaaagtagcaagcaacatttcctcactaattttaatgaatgtaggaccaacaagacatttaaacaatactccctcagaagttgataccatatcaccagcgtaatacacaacaacaacgactccctccatctttaaactaatatgtgaatatcaacacaattaaatgaggtacctcagaccactaacttgtattattagcattttctgatgttctctcgtgaatcatttatcagccacaaccaagattacactgataaaatagacgggtcagattgcatcgagctctacatgggtattgtttgcttgcaaactatcataaatatggttttttttcttcttaacccctagttcatcaggtgaaaggaatcttgnataatctggagatagactatgagataaagtaagtctggccaataattatttt

SEQ ID NO: 51992 - DNA, 162 bp, Glycine max
  unsure (1)..(162): unsure at all n locations
gagatgagaagatagtggttagatatgcacaccccttatnatagctaagctcattccatgccaaaataccatgaaaatacaaaaaagtcctactatatagactactcaaaatgccctgaaatacaaggctaaaacccttttctactagaatggccaaaatac

SEQ ID NO: 51993 - DNA, 445 bp, Glycine max
agctataaactatttgatttggaattactcacctctatcactcttggatagtggtcatggagaacttatgagctttgaaagccatattcaaaagctttgaattaacctcaggcttgagggtcaactatcataagagtaatattatgggggtcaatgcggatagccctttcttggtggcggcagaatcctttctccattgcaactttaccatttaacttcttagatgttcccattggtgtcaacccgagattgtgcaatacttggagaccaattattgagaggtttgaaaaaatattgataggatggatagtgaatcacttatcaattggggggagactagacatgattaattcggtattgagcatatccttatacattttctcattctacaaaactccaagaaaggtgatatcattgctacaatagacttaacataagcttttgt

SEQ ID NO: 51994 - DNA, 444 bp, Glycine max
  unsure (1)..(444): unsure at all n locations
ctatcgcacaccagaagccatcacgtttcaaaggtgaaaaggctgtgaaacattcagaagcaaggataccttaataaactcccaaaagtaaaagcaatcatctaataaattaaaaaagtaatgaaataaattgatttctgctaattattatttcaacaatagagatgtgaattatctcttacctttaattgcatttaacaaaatcatgttgttgaggttctgaataagatgacaattataaaataagtataagattttgaaggtggtgtaaacggttgcttgtgaacttattataacaattaattaataaattaaaaatccaatatttgaatgtcttacttaccttttataatatataactcttaatatcttgagttctaacttaaactntaatattttataaaaaatactgtgtattaagataacattatatcataatataaa

SEQ ID NO: 51995 - DNA, 272 bp, Glycine max
  unsure (1)..(272): unsure at all n locations
agctatgagggatttcaaacgacaataactntttactcttatgtctgatngagncaccgaatatatcgagacgctctaaattgaatgttgaagctctgaccaaattcaaacgaccataactttttactcggatgtctgattgagtcccgtaatacatcgagaccctcgaaattgaatgttgaagctctcagcaaattcaaacgacaataaccttttactcagatgtctgaatgagtcccgtaatacatcgagacgctcgaaattgaatgttg

SEQ ID NO: 51996 - DNA, 193 bp, Glycine max
  unsure (1)..(193): unsure at all n locations
ncaacattcaatntcgagggtctcgactagattactgttacttanatttgtacatccgagtgacaaaggtgtctgtcgctttgaatattgtacatgagcatcaagattctatttcgaacgtgtcgatttatgatgggactcaatcggacatcccagtaaaaagttattgacctttcgatttgctcagagcttt

SEQ ID NO: 51997 - DNA, 272 bp, Glycine max
  unsure (1)..(272): unsure at all n locations
agcttgatgtcattcanaacacactatgtagacttaaatgaagactaaacatgcattgnttatgtaattgtattcattatgcgatataatttgttgtaacccgttactaaccaattaatattatcaagtactcgtttggttaagcaaagaaatagttggtccaaacaaaaatcatttacgcgtgcacattacataattgtcttaattgacaacacataatgacttccttgcgtgtaacagtttaagggcgacaacaaattggctgacttgct

SEQ ID NO: 51998 - DNA, 447 bp, Glycine max
  unsure (1)..(447): unsure at all n locations
ctaagcttttctttctttttcctcggtactatttatgtttttatcggcgcagancaggaaacaatgtgtgtgctatttatagatagtcttaagttgtacgattacagttcgataaaatattaagtattacaaatcgtgtgtgactagttttaaggcatatgaagaatcatgaatagtcgtgatcatgaattttgcgtcattgaattgtcttctttgacgtggccatcgagccttctccttgtagagttattcatgtggttgcatagaaggtggataactttaccagcttctaccatgtagaggtgtagaaactaccaaccactgacttgtaactcttcattgtttcagtaagagaaacattctatggtaattaagcatggaattgcggaaatgaatggcctaatataagattgaattttcttctcgcgtctctacttactattgata

SEQ ID NO: 51999 - DNA, 404 bp, Glycine max
  unsure (1)..(404): unsure at all n locations
agcttctacagtatacagtcattcacctaanatattccaaagatcaaatgtcagcaccgcggtaagtatgccttggccttcaggctacacatcaacgtcaatccagctgaaggatccttaaaaattataaactaaggatgcattaaaataaaaaatttcattaagcacttatttaataaactcttaccaaataaaaatctgttcataaaattaacagaattactgagaagttaaaaaaaaaacttattttaacaagtttatctgtaaatcttattaaaataaattgaaaacaaaaacttataaaagttgtgaactactttctcacaagtctattttttttttcaagcaccccacagaataacatataattctgaagattgtngtgctatatataggatgcttga

SEQ ID NO: 52000 - DNA, 384 bp, Glycine max
tcacagggaagatcagcttcagtgcagttatatatgcttatagaatgggtctcctcaaactttcccttgaacacgcctgcgacatttggagaaccttcagcttaacgttgatgcaatcattatctaccaccagcttagtccaaaactgacgcttgccatcatttttctcataataatcagatgttgtggtttggctaccacgaagaatatgatgaggaacctccatgtagagtgtccatgaccaagcccgagaatgccatgtgggattagaaattatctgtagatatgggaccttgcatacctgcacgtatcaaaaactctaacaaatgttcatttacaaccaacttcggaaagagtcatctcacgttttcacttctgcagact

SEQ ID NO: 52001 - DNA, 462 bp, Glycine max
  unsure (1)..(462): unsure at all n locations
agcttctgtgagatcaaattcagaanatgtggatgcggaataagaagagatagagtttgtcgccattgatgatcgactaagctctagataccgtcatagatttctagactaagagaattgagagagagaaatgaagaagtaaaatatcattttttaagtcaatgaacttcaggcttacaaacagtatatatagacaattctattagtctggctaacaactaactaacgacttacaattgactagcttctactaggagtaactaactagcttccactagaagctagaggagactgcagttgaataattgcagctccttataatactctaatagttagtatctttataacttattntaagagtgacaaccggaacatagtgtataagtgtttaatatctatttatntatgcatccatcagtggcctgtttgagctggcgttcttgatctggtacatcanaactg

SEQ ID NO: 52002 - DNA, 366 bp, Glycine max
  unsure (1)..(366): unsure at all n locations
atcatcctactatgacgactgagaaaactggggcatataaagagggtgaggatgatggagaaacccatgctgtgactgccatttctgtacgaccaagtattccaccaacccaacaatatctttactcagccaataactaaccttcttcttacccaccacccatgtatccactaaggccatccctaaatcttccacacagtctgtctaccgcactatcaatgacgaacaccacctttagcacgaaccataaacaccaacaataaggaatatngctgcgagacagcctgtagaattcaccccaattacagtgtcctatgcttactttgctccacatctacttgataattcaatggtagccataaccct

SEQ ID NO: 52003 - DNA, 403 bp, Glycine max
  unsure (1)..(403): unsure at all n locations
attacgccacgtggcagaccaaagtgggccagtaacttggatggcccttattatcaatgcggaaaggattctgcgcttcactaatcatggtcacacattattgcagcttgtgggttcctgagcatgaactactaccaatatataaatgttgttacacaaatgaacacatncttaaagcttactccgcacaatggtggcctcttgggaatgaagcgacaatttcttcttctgatgacgcatggacacttattcctgacccaactacaattcgtgcaaaggtcgggcaaaatcaacantggataagaatgagatggattggctcgaaccatctgagcaccgacataagtgtagtatatgtggagcagaatgcacaacatgcgtcgatgtccaatgcatctgaccg

SEQ ID NO: 52004 - DNA, 261 bp, Glycine max
tccaaataaactacagttttgttaacaccgccgatttttttttatgataacctctggttgaaaactctgtctgctaccacagcatggagaaaatgttctgttttgaagaatttactgcaccagacaagttgtcagaggaacattttttaaattactgaagattggggagctcattctcctttatcatgaatgaccatttagttctttagtttagcttccaacctttacaattaaagatcgtgaatgtccaggtgtcatgaa

SEQ ID NO: 52005 - DNA, 366 bp, Glycine max
  unsure (1)..(366): unsure at all n locations
agcttgtgccanaatccgcaatctacgccaagttgctgtgacgtgatactcanatagactctgcttggctaggaagaaaatcgatgcgcacgagaatgttacgaaccctcgctgtgttatgaaaacgcttagagtttatgtttacaacactttttcgaatcacgtgaaagtggagcctgtgaagaatggtgtggaggagccttcttgtgcgcttatgataaccggaagggtgttggaagatggtaaggattctgtggcggaagggatttctacgaaagaatatccaaaattctcggctcttttcaagaagataccatatacttggatcagggtttgtaccaagataaccatgtttgtgtgtgggat

SEQ ID NO: 52006 - DNA, 339 bp, Glycine max
  unsure (1)..(339): unsure at all n locations
tgagaacatgtgagaatgatgaaacattggacatttatatagcttcattcataacgactagctttccaaccgctagttttagaacgactacttttataacgtatacgtttacaacataaaattatgaattggaaatataacaacgacctacatagtttaaattaaagatcaaacacaacattcgtacataacaactaaacattgaatatcctagtttttttcctaatatggtcacaataactttcgtggtcttggcgttgtngntcggacataatagatttatccttcatgaggatgtcatacttcatgttcttggttacgcctttcatgagcttcttt

SEQ ID NO: 52007 - DNA, 469 bp, Glycine max
  unsure (1)..(469): unsure at all n locations
ttaagtcacctgangctgcagcttttattacactccttcttctcctttgtgttatctgaccatactgnngacttcgnagaccatgaccacatctggttctccaccatcatttctaatggcctctccatcaccattgcttgtaatggcccttcgaccatgtccacatttggttctcctcgctggtggctgcctttatgaggttgccacattgggttaatgatgaaaccatccccctcgcaatgacagagcactccaaatttgatgacataacctccactctaatattacttttactcatggaatcaccattcgaggaagctcccttgttccataaccaacacttacattgcaacaccattgaagatgtttcctccataactctctcttggtgaaccaacgcactaanttggactctcttgtacacattcaggaatctatgagcactacntttcactataacacgcacata

SEQ ID NO: 52008 - DNA, 381 bp, Glycine max
catgtactggaggcatgatggcgtgctcttgtatatgtgcctcttacaaattggcaagtactggaggcatggtgatgtgaatcaatgagacttaccaaggctggaccttgggttttgtgagccctttggagaattgaccagggaattgtctacctgggtttgggcaccgtgctcttgtatacatgccactcgctataggtggaacgcactagagacgtggtgatatgctcctacatatatgtcacttgtcgtggatgacacatactggaggcttagtagtatgctcttgcgtatatgtcactcgtcgtggatgacatgcactggagtcatagtgatgatatgatcttgcatgtatgtcagtcgtcgtggatgtcacacact

SEQ ID NO: 52009 - DNA, 440 bp, Glycine max
  unsure (1)..(440): unsure at all n locations
agcttggtgganagaacttatagaggtgggtcatgtgtgattgaaggataagccatggtggcaaaagatgcaaactcgtgaagagttggttgaagcttccgctaccctcatatggattgcttcagctcttcatgttgctgttaactttggacagtatccatatggaggtttaatcctgaataggccaactattatcaggagattcatgcctgagaaagggtctcctgaatatgatgcgttggctaagaaccctgagaaggagtttttgaagactattactggcaagaaagagaccctcattgaccttacaattatagaaattttatcaaggcacgcatctgatgagttctaccttgggcagagagatggtggtgactactggacttctaatgtcgggccattaaaggcctttatgagggttggaaagaatcttgaagaga

SEQ ID NO: 52010 - DNA, 156 bp, Glycine max
agctcattgactgacatgaatatgactctggatcatcattgttactccacatacgttaatcttgctgaatatgacaattccacactgcgtgagattggttatcgctcttgatacgtaatcacctatatattaaataatcagtgatacatggaacac

SEQ ID NO: 52011 - DNA, 458 bp, Glycine max
  unsure (1)..(458): unsure at all n locations
agcttcttgattcagataacaatgatcgttgcttttctaataanggtactagttctcgttcttgaatcagtgcttaatcagtgcttcggggacattcttcgcaacaattattcaagaggctaatgcacatgatttaaattttcgcactcagcgccgtgaatgtgagttttgtaggaatggaaatgctatatatatatatatacaatatntatggttgaacttcgaaatattaatcgttgtggttgcagctattagataccttgttgcatattaaccattgtgagaacgatgtattataaaataactggaatagtgttcatgtgctcattgttagagatataatatcaaagtattcgcgtgttttatctaatagtttacacacttatggtatatatggtattagcttaaagtccctataacttacttcaagaccaaatacttattgtctcgggcagtat

SEQ ID NO: 52012 - DNA, 494 bp, Glycine max
  unsure (1)..(494): unsure at all n locations
actagctggtgatttgatatctaaatacactacttgtctttttatgatattgaaatgactaaaattgattttaaatggaaataattctagataattttcgcattcgataaattttttatattaaatatgtaattatgttcctctataattctaaatatgtaatcttagtctctttatttctaaatctaagacattaattcttctattttctagaataagtaattttggtcacttgatcatataatgtcaaatggttagttgatatgtcatattggtgctcacgtgatgttatgtacgctgttgacatgacacttaagtgacaaagggttaaataaagtgggaaanataattagtaaagttgaactcattatcttttatttaaagaaaaataattataaatcactcaagctattattttatctagataactntatacacactattctacatgtaaattagtctcacgtgattaatttttaattataaaaatgtat

SEQ ID NO: 52013 - DNA, 293 bp, Glycine max
  unsure (1)..(293): unsure at all n locations
ttcttccacaatcgtaagaccaaaagagtattgttcgtgttgcatggcaacngcgtgaaacagggaccggtattgcatttcccaccctcgccccctactgtgtgaccaatacccaacactgcccccgattctcgactggtattaaaataacatacccatacccgtccccgataggggttgggataacccgtcccactggtattgctaagaatatcctataagagaagtgttgtgaacttattgaattaaatgatgaaccggggataaaaggtttacgtgctaaaatgcggaac

SEQ ID NO: 52014 - DNA, 469 bp, Glycine max
  unsure (1)..(469): unsure at all n locations
agcttgctgctcangccatcanatgtgtttttcttggatattccacattacagaaaggttgccgatgntactctcctgttcacaatcattattatgtctttgcagatgtaacatttttntgaagaaaaactatactttgctccctccatggttgaggccaatactcttcaagaaatttttcctatttcctatcttaggccatcaccttctttgcaagaatcagagtcacctgtacattctaccatagatattcctgacatccttcacttgagcagactcaaagatcacccattgaatattgatgtcatcctcgaattcctgacgcacaactngaagggtatgaaagaccagttgaatcatgtcttactccggcagacaacctgaccatggacctacctgaagagaatcttgacttgcccattgctcttatgaaagatactctgtctacacgtaatccttattctattta

SEQ ID NO: 52015 - DNA, 250 bp, Glycine max
  unsure (1)..(250): unsure at all n locations
atatgcaaggattgatctgctcattgggcttcaaaaaaactattacagaatagccttacagacctatgtagtgtttgggaagccatgaacaacctgattacgttgcaacacactgtaattgagatatcttttgatacaggtacacatatggttggacatgtttttanagttaccttgtgcaaagactatttggcatggtatcaaggtatgctttaaatcaaaattgcttctagtttgagtgtgtacatta

SEQ ID NO: 52016 - DNA, 450 bp, Glycine max
  unsure (1)..(450): unsure at all n locations
agcttattacatataaacacaattcaggagcctctaagaaacttggtaaaaatatcagctagttcgctagaactagtataacaagtagaaatacaacgagagaactttctctaatgaaatgataatcaactaaaatattttcttgttctgataccatgcaaaggtcactgaaaagtaattattaatctggaaagttaagtaattattaatctggaaggtaaaggttcatgacagattatataactaatgacctgaactaatgggcctatgggcccaatgatattctaactaccatatagtattatgtgatttgaatatactttccatctacaaagtggttntctgaccttgatcgtttatgcttgtaaaanaattgtttaaccaggttattataaactctgaagtctgtgatctgcgcaagttcatactgttacgcaatgtaccttcact

SEQ ID NO: 52017 - DNA, 434 bp, Glycine max
gcttcagattactaggcagattcctatatatgggtttatttgttctttctccatatcctttgccacctgaattgactcattgactgccatgtgtctttttttccaaaggaaaatatcatcatatacccaataaatattagctagttccctagaatagagctatatcacacaaaataaaagagcagatctttgcaaatgaaaggaaatgaaacaacgaacttgtcttgtcatagaaaaaaatggaaatagcatcctacagtagtactatttacaataagacagaaataaacctatcctacaaatctgttctaataattgaaaagcaacaacagtgactagtcacataattattccttttatatttatcacataaaagagtgtaacttatcctctacagttctcttttcaatcaactctgtcctcagcctacataa

SEQ ID NO: 52018 - DNA, 465 bp, Glycine max
  unsure (1)..(465): unsure at all n locations
agcttgtaggaatatggngtacccatcacatgttgtactangtggcggtcgggcgatggtgcacaacaagttttccacatccacaatgcgcgaataaacccaccatcccctgttgcccacctccatccgagctcacgtactcccacgtagcccatatcctcgtttctctcaacaccgggtccccatcaatcctcccaagcnttcacaacatccaagcaaaacaacattcaaacagcacaaactatcacagccaagcaaaacagagcaaaggcagaaaactctgcccaaaacaccaaccaaaatcacagcttttctcacccaaagaccccagtaacaattccttcgttccaattcgttatctgttggatcgactcgaanattntactggaagtctctagtacttaagcctacattgtgacgcgtgggatctactagcaaacatctagaactcgttctgcactactc

SEQ ID NO: 52019 - DNA, 481 bp, Glycine max
  unsure (1)..(481): unsure at all n locations
tatgcgcatatntccctacgaacgttcacttgcacaagatattctattaactaagaaaaatgcacccatatacaatcaaggtagcttcattacctagattatttacatgtacttccaaggtgtatttgttatttacatcacacacgcctccttggctaaatttacatacatgcatactcaaagcatttcggggtaccaaatattgcacatgcgctcatcttggtatttctaatacctatacatatacaaacttcatgatcaatcttgactacctacgcaataaggtgctacatttcatgctttnttttttttcaagtttttgctacctaaagccacatgcaaattcaagcatattttcctttgctgactaaaattgtattcaaattagaaggtatatanntttttgtaatatgttttcttcacataacatgcaacacatttatatatattttttgtgagacatttngactaccaaaaatta

SEQ ID NO: 52020 - DNA, 345 bp, Glycine max
  unsure (1)..(345): unsure at all n locations
agcttctttgagaagcttncttgagaaagttcctatagaagctagagcttagctacacaaacctctctaatagcttagctcacctncttgagatgagaagctagagattagctacacaccttctataatagctaagctcacccccatgacaaaatacatgaaaatacaaaaaagttcctactacaaagactactcaaaatgccctgaaatacanggctaaaatcctatactactagaatggccagatacaaggcccaaaagaaggaaaaatctattctaatatttacaaagaagaggggatccaaccttggcccatggggtcaaaaatctaccctgaggttcatg

SEQ ID NO: 52021 - DNA, 465 bp, Glycine max
  unsure (1)..(465): unsure at all n locations
actcagctgtccacatagcgttccaacgcgcctcccattctctactgtgctggtagttcacaagtgggtaagtagcttaatcacatgttacgcctctttgaatataaggggtgttttgagaattttntaacagaaaatatagaactttttctaatagaaaagctctcaaaaatatttttaatcttgtatccaaaagcttattatcatggttagggcgaaggaagagaccagagagaatgttgaggagaaagagagagagattgaagagatgagacagagaattgaagatgtagagaaagttagagttgtggaaatgaaagagaaaggagagagtggatggtgaatggacgaagtggttggggattgtgtggccggtggtgatgactgggagtggagccgttgctgcagtgttctatttcttgtttcagaaacatagtaggtgacgtttcannatattttcttaat

SEQ ID NO: 52022 - DNA, 438 bp, Glycine max
  unsure (1)..(438): unsure at all n locations
agctntctcctaagtcctaacagacatttcaatctangattaactcactntaacttccatttaccacagagtccagaattagtctttcaactctcaaagcctcactctttttccactcataacaccacattctcactttctaaccctaggttaactctacctttcatctctaacagttttccataagcaatntcagcacatgaacatcacaagcatcctcatanaaaccctaaacagaatgggtatgtttaactcatccaaacatggaaatttcaacatgctttcaacaagtttcttcacaaataactatcatgaagcagaaaactagcaagactatccatcatatctcccaaaaccccatacccacgaaaatcaagagagaaagaagtccacccaaacctgaagtttcgaagtcccactcgtagacacgcacttcac

SEQ ID NO: 52023 - DNA, 436 bp, Glycine max
taagctccttcaactgcacaaggctcttaatattttaagagtatccttgtggaaccttcacccgacgaagacactgacaaaaacttatcttctttttcttggacaaagtatggcatgctgggggcaagtaaattttctttccatcagaccttggatgcagctgtgattgtatacccatataagctagatcttgacgggtattcaagtcatccttcgtctggccttgaatgttaaggagcgtcccaatcacactgtcacaaactattttctccacatgcataacatcaatacaatgcctaacgtcaagatctcaccagtacggaagatcaaagaaaatggacctcttctttcatatgtgactctgactattatccttcttttgcgttttccaaatacaagattcacgtgttgaacccgctgattacatgctcaccag

SEQ ID NO: 52024 - DNA, 363 bp, Glycine max
  unsure (1)..(363): unsure at all n locations
gccactccggaagaattaagccaagcccctactttngaggggcaactcccaccttatgaagactatcccggacaagacgatggggaaggagatacccatcttggcttcctgctccacctcanagatcaatccccgcatgaactaccccagccgaacatagttcgtcatatcccggcctcacccacacccgtaaaagaatctgttccctttgcggaagataatggaaagaatgaggcgcttgaagagaggttaagagcagtcgagggcctcggtaattacccattctcggatntggcagaattatgtcttgtgcccaacatcgtcatccctcccaagttcanagtaccagactttggtaagtac

SEQ ID NO: 52025 - DNA, 450 bp, Glycine max
  unsure (1)..(450): unsure at all n locations
gttgtagagttagtccaatgctgtccaattggtggtgtaaatgaaacactntcttgtgntttgcaagttcacaagtatcacaatgaaacatcctgacatcaactccttgaaataaaatagggcatgagattntaagggtactaaaaggtggatgaccaaaatgtaagtgatataagccgatttatttttatttgtggagagatgacttggccagtgaagacaangataattgactctaaaatggacnaaactatntgttgaataatatgngtnnttatatgttntattatctttcttaattttctctcttcctctgctgtgcaagggctgcagtctgcaccctatcttttcatatncttgcatgtacttaatttcctcttaaatatgcaagtctcagctgagtgagacaagtanagcccttccaaatcataagtcatagttntaactcta

SEQ ID NO: 52026 - DNA, 403 bp, Glycine max
  unsure (1)..(403): unsure at all n locations
gcacctgcggcatgcagcttgtataatcttgatagagtggagataagttttgagtgtttctctctttaaggagaagatntgtaatntgtgcaataaatcataaacccgttttctataaagtctagtagtggcgggtagaagagaaatccagtggtgtagctagtgtagttgacgctangattgaagtctggtggggaataggaagggttttgaaatctagtggttatccgttctagttgtgtacaagttgtgttggtgaaatctcatctttatgggtaaggattggatgtaacccatggttggggtgaactantataaaaacctctgtgcacttttcccttttctctctacttacattgctntgcacacgattggagactcattttgatcaaatcattaaatc

SEQ ID NO: 52027 - DNA, 348 bp, Glycine max
  unsure (1)..(348): unsure at all n locations
ctttcatagtagagtaccgataatgtgtctactcatcacgattatcgtctccctttntgcacatgttatgtagttgcatcttatccggaaccatatcagaatagtactgatactgcctaacgaaggcaaccattangtccttccaagtatggactcgggaaggttccaagttagtgtaccaggtaacaactaccccagtaagactttcttagaagaaatgtnatagaacgtcctcatctntgcgtatgcccttatcttccgacaatacatctttcgatggttcttggggcaagtagtccccttgtacttgggaggggtgatgatattgggtactaagaacaactcttc

SEQ ID NO: 52028 - DNA, 521 bp, Glycine max
  unsure (1)..(521): unsure at all n locations
gctctgggtcctcttaataagatctagtggagagatcccactagtgtttatgtgtntaactctgatgtgngtntgaattgttctgtggagatttctggtagaacattcttgattggatgtgatttttgccttngagccggatagactgtattcnttggatggactggttatctttcaaccatgtcttgttatactatnttgataaaagtatgggggttaatgattctggagtgagtatcgatgtgatgtttatctctgtcaaccaagttatgacatctttaaaagaagatgctcgagtgtacatgatcttgtctagcctggaaatagagacanaggtctatatatgtgacctccctattgttagagaggttcctgaagtgtttcttaaggatatatccggcctgcacctgagagagagagatagagtctacatagacttagacctggtgtggaccatatccatactcttattggatgcttctattgagtaactgagctaagaacaatataggagtgttgat

SEQ ID NO: 52029 - DNA, 260 bp, Glycine max
taacgatgttattaggttcatattgcgcatactatgtagatattataagtgtgttatcatttattcatctactcaagtgaaatataattaaaatatgcatgtcacggagaatttccttctacacggggaacattatatggtaaatactcattagtcttatagttatgatctatgatctaccttgtagtctaagttggaggggctttagtctatatacattactcttagcttatgttaagatctttaattatattgattta

SEQ ID NO: 52030 - DNA, 264 bp, Glycine max
catgaataaactcaggataaaactctgaccttgtttaactaatctattgtcctacccagcgcctatcatatatacatgtttaaaacctggctaccacctgcctacccattcaatttaatccaaatttgggtatgatagctcctacctgtgactaaatgtctcattcctactaatgagtacctataacttctacgattcagtacctgatcctactatttattaaaagagatgctaccttgctaccatataatatcaggatactcc

SEQ ID NO: 52031 - DNA, 317 bp, Glycine max
  unsure (1)..(317): unsure at all n locations
cggaatcaaaagatgtgagaaatgatgaccctatggctgcacactcgtatatcccgtgggtatggcttttgaaagggggaaaataaatttttgaatgcaaaacgcgcccctctcgcattcttatatctggcgacgggtggctcgaccagcgagctaacctgcatttttttttaagatgaacattaccatgtcctctcttccttatagcgcttgctaacttaacttacttattagaatcatggtttattcttatttttagaacaaactgattgtttataactgtaatacatagatacgngctgccttgcatgacgttc

SEQ ID NO: 52032 - DNA, 408 bp, Glycine max
  unsure (1)..(408): unsure at all n locations
tgggtctggttgctattctcaccctcattattactaaatacacctctctgccttattattatgattcttttttcgtagagttacggagactcacgaatttcgtaacgatacttgttttccttccgctattccacggagaccttgggattacataataagtccctttttgacttacggaatgttacggagcctcactaatngtgctacgatgcttccatttgatttacggtgtgtcacggaaccttatggactttgcatcaatatattctttagttgtctgcatgttcggaatttacaaattgctaatgatgggtgccagacctttccagactatctaatgtacatgtattatcagatgtaccgacaattagggtttaacctagacattgtatacatagtaacgatatc

SEQ ID NO: 52033 - DNA, 393 bp, Glycine max
  unsure (1)..(393): unsure at all n locations
agctacctaattacctgagatgagagataatattattaacacanatatggaaaactaagttntataacctatacttaacagaaaatacttataacattacaaaataaccataaattgggagagtntgatacaatttatacaagttntatacacaagagttagtcattntcaccaactaacagtctcgcagagacttcaatgtcttctgcctntacttttcaagactatcaaagttttttgtcttgtagagactncaatgtcttctgcctttacttttccaagactattgaagtatgtggtcttgcagagacttcaatgtcttctgcctttacttttccaagactatcanagtctgttgtctntcagagacttcaatgtcttcagccctttaca

SEQ ID NO: 52034 - DNA, 359 bp, Glycine max
  unsure (1)..(359): unsure at all n locations
agctttctagtggtttaaaaaaagtgagttgtactaatttatctctagatgtcataaaataatatcagcaagtcattaagataacaatattgtgattagcacttaattaaatttattagccaagtttcatctttagcttatatttctgtcaccaatccgcaatcctcctttcaatgtgtgtacatttgtattaattgactatcactgcaaatccattaaacaatgtttatagaaatattcataaatactntattatattattcagaaaaaagatgtaaatnntttgcatttcatagaggcaattgtcaatagaatctcatgatatatggaaataanaattagtaaatacataactacta

SEQ ID NO: 52035 - DNA, 402 bp, Glycine max
  unsure (1)..(402): unsure at all n locations
agcttgtanggaaacccgctgagttctttgttagcacctaaactctaggaggaggccaaganactactgtgtaagattntctttttttccttgttagtgttcttgaattgtgaatctcancttaaatttgagcttaatatgtggcatgcattgtgaatcacanttttaatctttatcagctaagtngagttgtttatgntatgtgtacggcctttcaaggagaaacgaagcaatgagcttaaattctaatagctcaaaatcacatataattntcacatttgtcattgagtctttgtgaacggactgtcaaatntgtaatctacctaacattaccacagttggtatggaaatgttgtttctaagatcaaccangttatatttctctgtagtctatgctaacat

SEQ ID NO: 52036 - DNA, 421 bp, Glycine max
  unsure (1)..(421): unsure at all n locations
ctctacgccagtttcatcgctgccgcatgttanatgactgtcaatgtctctaagacagcaatgtgaagatgtatggtatgataatagcaaggcaaattgatatataatatgtatattgttatntcattgatccttcgcatgatatatataatacatgtacaagaatgttctataccaattcttatgcatgacagacgtgatccataatcagtggcatctgatntattctatgcattttaaggtaaataaatatagaatcaacgtatcatatgaaatgtaatatatacacagcatgtttcaatcatgtagaagatatgtcctaatactctccctcacgttggcgagtgaatatcgtgaagtcccaaccttgtgctcattgtcactaattgagcttttcccatagctgttgttaacacatctg

SEQ ID NO: 52037 - DNA, 453 bp, Glycine max
  unsure (1)..(453): unsure at all n locations
agcttctcaaggaatctacctagtctattaatggaaacatgtgtaacacttggtgtaactttgatgaatgagagtcttgtgagacacaactcanagttcaacttctctctcttttttcttgcatcaatttcgagctcccccctctctctttctctccctctttcttttcctccattgaagcatcctctccaagcttcttatgcaaggctcatcctggtgggggagctccttcttccatgggctattccctagtggatggacctcctctcaccttttcctttgcttccgtacatctcatggggaaaataccataaaggacctattgaactaaagatcagcctcatagaacccccaagcaagcttcataactggtgtaaacncacaattctgtagcgagaataaacatcagcaatgatacccncggatggattanggctgacctngcatcataca

SEQ ID NO: 52038 - DNA, 449 bp, Glycine max
  unsure (1)..(449): unsure at all n locations
acagtctggtggngaagctccttcttncatggcttacntcctagnggatggngactctcctctcctcttctccttngccttccactgcatctccatggnggaaaatcaccattgaaggacctcattgaagctcanagatccaacctccatagaagctccacaagaaagtttccatcagaagtcctttatcagaaatttgataagcttggacagaatggatgagttggagagttcatgatatgctaattgaagagtttcaaggggtgttatatntacctcttcantctgattagaagtctggtcttctgatgcagtgtaactgtggtttacaataatggcataaacttganaatcctaatgagtcattagagacatctaacaacaacattcanaatngccccatgtgtggtgtcgcttgtcaatgttaggattcacaagcgattcttctc

SEQ ID NO: 52039 - DNA, 356 bp, Glycine max
  unsure (1)..(356): unsure at all n locations
gcgcatgtttaggcatgaatagcaagagagtgnggacaatgtggcatgcctcattgcttcagaatgtaccctaggcctaaggccatcccctacaacctctcaattcaaaccaatcaaacatgaaacaaagccaaaattgctccattagattgggcatattcatacaagttagagccccaaaagaagaccaagatacatcaatagaaagctagaaagctcaagaatgggatacttacttgatggagtgagtaacaacactaagaatggaagacaagcgccaaatggtggctanggggaaaaaccataattcccgtgagcttcttttttgatgaagggggaagttttgttgcaaaacg

SEQ ID NO: 52040 - DNA, 498 bp, Glycine max
  unsure (1)..(498): unsure at all n locations
aagctgaggcaactgatgcgtggtcaactggtacccatctggccttgaatcaganatctgtacctgtcgcaagggtttgtggtttgtgctcctctgctgaccaccatacagacctttgcccttccatgcagcaacctggagcaattgagcagcctgaagcttatgctgcaaatatttacaatagacctcctcaacctcagcagcaaaatcaaccacagcagaacaattatgacgcttccagcaacagatacaacaaccctggatggaggaatcaccctaacctcagatggtccagccctcagcaacaacagcagcctgctccttccttccaaaatgctgctggcccaagcagaccatacattcctccaccaatccaacaacagcaacaacctcagagacagccaacagttgaggcccctcacaaccttccctcaagaacttgnatgcatatactatgctaacatgcagttatcaagaaccagagcctcatcagagctt

SEQ ID NO: 52041 - DNA, 277 bp, Glycine max
  unsure (1)..(277): unsure at all n locations
cgganacctttcttttcttatgtgcactctaacccaatcttcgggntcgaagacnaccttctttcntcctttggtggcttgttaacatagcatcttattttcctctcaatttgatctttgactctctcatgaagcttcttcacatagtccgcctttgcttgaccttctttatgcttaaaaacagaaacattatgcatatgcaaaagatcaagaagagttagtgggtaaaaccatanacaacttctaaaggagaacaattagtggtgctatgaacagc

SEQ ID NO: 52042 - DNA, 524 bp, Glycine max
  unsure (1)..(524): unsure at all n locations
gctaacaaaaatagtgataccatgacctattatcttctgcaccttttctctcattntctctntctcaattggttcaatctgagcaactctagccatataatcaacatgaacacgtgcaccatatatcttcactttgtctgtgtccatggcgtgtttgccaccagtatcttcgcattctctatttgtttaggttgtccaataccaatttttttttaaggatgaatctaaccaaaaaaaaaataaaacaggcaaaaatatttcttttacccagagtaatgcaaggataagcaatgcttggaaaataaataacaaggatactaatgcaaattattcattatgtaggtaagtgtagaaagttaataattttataagcatttgactntattaaatggcttgaagctgctatcaactaatatgaaaaatcaccatattaataacaggtgaacttcttttgcnacttaaatatcaacttcacatatacctctctagataatcatatgacctcagttctttatctgataatt

SEQ ID NO: 52043 - DNA, 194 bp, Glycine max
  unsure (1)..(194): unsure at all n locations
attgttgngaaatctganattctgaagtatatgcatatntaaccatacacacacatttnttagggagatctaccttaactaacattaactaacttataatgggtgaantttagttgttcaggctgtagacttactaacatggacatggacattaatctcttcgccttgactgttatgtgaatcttctgagttct

SEQ ID NO: 52044 - DNA, 236 bp, Glycine max
  unsure (1)..(236): unsure at all n locations
agtttcactttttacgactctgtctatcattcgtattactactttcctgaattctatcacgcttcataatcgaactactctgcctttctcttcatttacaaggtacaagcgaaaactgagaaaatgaaatgactgtgaatngatttattcttgaaatttaatgagagtcgagagatcgactaaaattctattgaatctgatgtacttcatggtttgaagtaatttggtattgtcat

SEQ ID NO: 52045 - DNA, 110 bp, Glycine max
cttctagagatctattttcctctcatacacatttgtgagaatttgagggaatatggatatatcatctctaaaaatcaatcctattgaatcactcatatactttcaacttg

SEQ ID NO: 52046 - DNA, 323 bp, Glycine max
  unsure (1)..(323): unsure at all n locations
cggactctcagccacttatgatagccgccgatgatcccattactgcttcccctaagctctctgtcctttcttcacgccgcatcccatgccttgcgaactccttggagtaccctcgcgttgtggtcactaaaaccccgtgcgatgaaaggcgtgatgctttcgtctaatggcgctcctctcatggnggtagccagctgtcttatggtgagaacgggatataattaatacaaccccttgttccatcaggggaacattggacatcttccatgaaatagaatctgattttcttcttctacagggaaccattacaaccccccccctgc

SEQ ID NO: 52047 - DNA, 308 bp, Glycine max
gggaatgtatcgctacattccacacaacaacccggactaaggtaagctggggccataggactactcacttattgctgcctcacgccgttcatcggaactgcggcactgttatgatcgcacccgacctgcgcgtcgtcctgactttttgttaatatatatcatttacttatcgtattatattggctcacagattagtccttatgctaaaatctccgctcacaaaagttgtttatatacttctttaaacatcacttgatactttatatgcagacttaatcttaattactgaaatggcacttaagaagatt

SEQ ID NO: 52048 - DNA, 119 bp, Glycine max
  unsure (1)..(119): unsure at all n locations
tnnggcgatctgatataacatgtataatgagtgcggatcaaagtatatcgatgatctacgcttacgttggcattcactgactaagcagaataggatngcnaagggcgctgtccttctgc

SEQ ID NO: 52049 - DNA, 529 bp, Glycine max
  unsure (1)..(529): unsure at all n locations
gagtcacctgccgcatgcaagcttaacattcaaantcgagcgtctcgttatattatatgactcagtcagacatccgagaagaaagttatggacgtttgaatntgctcagagcttcaacattcaatntcgagcgtgtcgctatattacgggactatatcagacatccgagtaaaaagttattgtcggttgaatatgctcagagcttcaacattcaatttcgagcgtgtcgatatattacgggactcaatcagacattcgagtaaaatgttattggtcgttgaatntgctcagagcttcaacattcaagttcgagcgtctcgctatattatacgactcaattagacatccgagtgaaagttattggcatttgaattgctctgagcttcacattcaatttcgagcgtgtcgattatacgggactcatcagacatcgagtaaaagtattgtcgttgaattgtcaagcttcacatcaactcgagcgttcgtatttatggactcataacatccagtaaagtattgcgtgaattgt

SEQ ID NO: 52050 - DNA, 372 bp, Glycine max
acttactagagctttgttcgtattacagacctcgaatgatgtaacttgaccatcacacgacatactttactggatgatgatgatccgtaataaagagctcaaatgaagtgagctatgaccatcaatgacaatactttactcgagttgatggtccgaataatcaacgctaaatgaatgtgccttgacaatcaacacatactttactgatgctgtgagcccgaatacaacctcaatgaagtgacttagaatcaacaatactttatggagcgatgatccgaatatcaacctcaatgagtgaccttacaatcaacaatctttatcgtgtgtgatcgataataacctaatatgtgactagaatcaacaatacttctg

SEQ ID NO: 52051 - DNA, 341 bp, Glycine max
  unsure (1)..(341): unsure at all n locations
tctctcacagtctntagaattgggagccaatccaatccttgtgtccggattctcagccacttatgatagcctccgatgatcccatcactgcttcccctaagctctctgtcctttcttcacgccgcatcccatgccttgcgaactccttggagtaccctcgcgttgtggtcattgaaaccncgtgcgatgaaagggcgtgatgcttcgtctgatggcacttctctcatggggtagtcaagcctgtctcatggagaggacaggattataattaatacaaccccttggtcccatcaaggggacattggacatcctcncataagatagatcctgatcttccttct

SEQ ID NO: 52052 - DNA, 381 bp, Glycine max
  unsure (1)..(381): unsure at all n locations
agcttgcctaaatngagcncctngatctctatgatacttcatatcatagcnaatctgaactgggtgtcacaagtatgactttcatgtctattaggattcacatcaagctccctatattntggaatccacaattgaagtcttgcaaagaaacctgagttaggaaatgaagtctttggcaattttccagtacccattggaggacttccaatattagggggtccataagcttcacctccaaatttaatcaaagatgatcctttgcgtaagtgagtgaatattttctttggccaatacccaacatcttcacttccatcactttcttctacatgcnaccaccaatggcctgatactgantcctacacatatntaagcaatcacaca

SEQ ID NO: 52053 - DNA, 496 bp, Glycine max
  unsure (1)..(496): unsure at all n locations
tctctncctgaaaccgactgttagtaatggtatgatcttgataaaccattntntntaatatntagttgatngagtactgtaaacataattgttcagagtcttgctgcagaatccagagaagaagaccataattccaactgaatacttgagagtgaagttgatctcttttggatttgctggacaaggacgtgcaataatgcgtggccccatggtttctggagtcatagatcaacttctgactactactgagtggtatgcatttctgaacaacattttanaaaaatacatgctntattcgctcgccaaaccatgtctttcataggattttgcattgtatttattgtataaggcacctagttggataggctnttggttgttgtttttgtagatgtacccgatttttttacatttcttcaagttataggccaccccagatcatgtattggagtagacaaaattgaatcatataggatctatacttactccctctcaaaat

SEQ ID NO: 52054 - DNA, 478 bp, Glycine max
  unsure (1)..(478): unsure at all n locations
gcacctgcggctgcagctgtgtcagtttcanggtacaaggggttctttgtgtttggtttgctagagaagttcaccctcaaggttctgcccaggaactcctgacaagttcatttacaaatntcagcatgcaaaaagtttgaacatagcttgtaagcaaatgctagacaaaggaaagagccattgatccttacttttccatcaagattctctataaccgcattacaatcttcaatacaactcattgtcacaaatgcaaagcctctactttttccagaatccctgtcgtaaagaacctaaatatagatataaataaataaatcgttaaatttactgaanattagggaatgtatcatgtccacaagataatcaaatcataaaatggaaattggattccatttagttgcaagtttaaaggatgtatgctgacanagaattgtntatgaagtgagaatatgctccaaatatgcaagaaaacaat

SEQ ID NO: 52055 - DNA, 380 bp, Glycine max
  unsure (1)..(380): unsure at all n locations
cgcgagnttattctttgttctttcttgtganatnntctttggtaaatcttgtatagatactaagctctcaaaatacctcgtaaatcttcagagaanaagactaaagtattgagtgatatatatntatatgtaagacgatcatgtattagtcatggtgtaaactntcaatgaatcttgttatnntttttagagccaacaaggacttggtaggataaagaatactanggtaaagtcaagcttagggaggagtgacactgaatagtactggttacctttaataactntgtaggttatcaagaaatagaaatagtttcggtgtagagtataacttctggtgtatntatattataattaatggaattataaaatatgaattcata

SEQ ID NO: 52056 - DNA, 411 bp, Glycine max
  unsure (1)..(411): unsure at all n locations
ccgctgcagcttgactttgtatctgaatatgttcatattctatgatccaaatatcctanagagagccactgttggttatcttccgctctatgcctcctctggtgtcatatttttcacaacaaatgtaggacttctatttagaatgtgcacgctccaattaacagcttcaggccaaaattcttttganacaccactcttagtcaagaggcaccgtaccatgttgagaatagttctatttttcctctccgagaccaccatttgttgtggtgtatatactattgtcaacttcttctggattccatgatatacacaataagtagaaaattcatctgagcaatactctccatcacagtctggttgaagagactcaatagtcatttcggatcttgttcaactcgagctttgaagctt

SEQ ID NO: 52057 - DNA, 350 bp, Glycine max
  unsure (1)..(350): unsure at all n locations
ttggtacaagaactaaanatatttgaagaattgagtggttattacttgtggctatagcacgaggtcatcatgatataaagaatcattacttannaatttgtttcttttccttgcccctgttaaactgttaatgcntttgtagaatatttatgttcccttntgtcttcaggaattcttgtattcctaaatttgtaattttaagaagatggttntgttatactaattatntattttgcgggtggcatcagtcgtatttggaacgagacatggctggcaggtttcttttataaaccatgcaattatgaaatttttgtgaagcaatccctcaagatggagaatggctattgtat

SEQ ID NO: 52058 - DNA, 383 bp, Glycine max
  unsure (1)..(383): unsure at all n locations
aatgcatttctaatttctaacattgctatttttcttcttaagggaaaacacacccaactcaattttgtttcgcttttgatgtccaccccaacccaattattcttgttatattttgtagaaactgcgaatataattttgtaattgtctgtttgtgtactgcgctggctntattgtataagcacaagagacactctcttgtnttgttactggcttttctctcactctactgtcttacagatgaaaatgtatgtttctaccaattaggtgtggttttcaaactaatacactaatttcaatcgaacctttctctttatattgggatatgaatgatgtntaatagctttgtcacagcttagagggcaatgccggtgcactcacatatt

SEQ ID NO: 52059 - DNA, 470 bp, Glycine max
  unsure (1)..(470): unsure at all n locations
tgcatgcgaggccatgtanatacctntaatgataactatgagaagagttcgactggtagtagagnttattatggtgttcattcgttaggattntctctgtttctcttgtacagttgcactttctaatgtaataaaagatatgcttctggcttgagattctctaatattgattctatgcacagtgtgtccgtatatgatgatnggtaagcttccagctagtaataatctaaggagaaatagtactttggcactcatgttatagcaagacaaggtngaggagggcagatngcaatgctcatgtgcattcctagttaccaggcaggtcatagcctttctagtaggctctcaaattggcccctagaattgcttcttatagaggtgtcatgtaaatatattacctacagttgaagatgataggacatattaaagacttacctagagtaggagatgtagtagaagtaatgacttta

SEQ ID NO: 52060 - DNA, 393 bp, Glycine max
  unsure (1)..(393): unsure at all n locations
tggcagggttggtgtgcccattaccagtatcgcgcaaagcctatgaagacctttccctagaattcattatcaacttgccagagtttcgcggttacaccgccattttagtagttgtcggcatatcttcaaagagatacacttagggatgctcccaacttgacacacgacccacacagtcgccttgttttcatagagattgacgggaaaattcatggcatgacccgtattctggtttagacaatgactcctngtcatcagccattctggcgggagttgcttagctaagaacactcggttctagcactctcatatttttgaaatatacaagcgctctatggtcatataaagcgtgactcatatcacaagctgttataaattgaattgtcaaaatgc

SEQ ID NO: 52061 - DNA, 489 bp, Glycine max
  unsure (1)..(489): unsure at all n locations
cttgtggcacaagtagctggtacttctactngtgttgttatactgagaacaagagatggtacatctcttgtggatcagttcaagtggagggtacatccactctggtgttcaaagagaacaagggagagtacatcccttgtggatctctggcttgtaaaggattatacaacgttgaaagaaatctcaagaactcgtggttgcttgaggactggatgtatgcacaggttgtggccgaaccattataaatcttgtgttggcttcttctccctacactctttaatttcactgtgtactctaattgccgctttacttttgattaagatctgttttgttcttacttcttacttatagtaaacctagttatctagtacttaagaggataattttaatagtaaatcattatattattcaccgccccttatattcatgcctgatcacccaaccaccttctgccaattgagactctggctctcattaaaatacaaataa

SEQ ID NO: 52062 - DNA, 177 bp, Glycine max
  unsure (1)..(177): unsure at all n locations
attgatacttatatctatatataaaaatattntaacaaatctggtgagtgaaatatacctaatcatgatngtctttctacaccttcgtaatatntaaacaactacaagtatgtgatcaactaataaatgtttcctcttgagagtaatnttattatnntagtgtaatataaatggatg

SEQ ID NO: 52063 - DNA, 150 bp, Glycine max
  unsure (1)..(150): unsure at all n locations
gctacatagagtgtcatacaccctaatgtctctttgagtgttatgtttacccctactctctgactttgctatgctaagttctgtttttagcatanagaaggtcaagcaaaggcggactatgtgaagaagcttcatgagagagtcaaagat

SEQ ID NO: 52064 - DNA, 406 bp, Glycine max
  unsure (1)..(406): unsure at all n locations
tcttaaagtatcttggctacttgtgttctgtgtttcacaacataacatatcttcttaactcaagggctntttaaatgtggctttgacagcttgaataattgatattataaagttctgatattaacgacagggaatcttgagaacgcgcgcggnggattgtgtggatgttctatcccatatgctaattagatttatgagtaaatcgaactccaggttacaactagcattggtatggcctttntatttagttgtcgagtctatcaaacttatcaattaatgtaccgttgcatgaatttgttaatangataacatatggaatagaagagtgtgtatacgaaaatactctttattacaaggctgcacatatactcaccgactcctatctataggaataagagtatagtgg

SEQ ID NO: 52065 - DNA, 374 bp, Glycine max
  unsure (1)..(374): unsure at all n locations
agtcccgccttggataattttcacttctctccatcctatatatatnnccttaatataaataaactaanagatagganaattcactctntaactnttcttttcttttgtaaaataataatgtgattaggagtgacgttggaatttccagttcctccaaatgcaataacgaanattaaaacgtgaactntcgtgttgcgtgtctagaagacaatatcactcatggcaagctgtatatgtaccatgagtcgaatttctattcgaattgaagcttcatccccctctgacagtataatatataatcaaagggtgcactgtgcacaagtgcataaatcattaattggttcattcaatattacgatgatgtagacttgtaa

SEQ ID NO: 52066 - DNA, 131 bp, Glycine max
  unsure (1)..(131): unsure at all n locations
tatctcacccactccagtgtatcacacaattatggcttttctcttatgaaacactcttgccttttaccactctaatttcccttgagttcgtaggcattcaagagattatgggcacaacanagaacaattca

SEQ ID NO: 52067 - DNA, 447 bp, Glycine max
  unsure (1)..(447): unsure at all n locations
gagaagatatgttgttacatattatgtntctntaacacaaattatgggttanacaaagatatcaagcaaatatcanaaaccaagtgttaagaaccttaaccaataagaaataaagaagtgaaggatagagaaaaagatgcacacacaatttatactagttcaacttctaggaaatccacatccattttgatcatagtaacccactaggatcctttcactatnattctttggtacaacgaaactcataagcaaatgcacaccacanaggcctaanaaacaatcaagaactaaacctacatgtagaanacccattacatgcacattattgacaaaccaactcaatgaanacagaaatcataaatgaggaataaggaaatatttcacctgatatgtgananatatgaannatttgaaaatatttatntgtagtatcaacttactttcatg

SEQ ID NO: 52068 - DNA, 290 bp, Glycine max
  unsure (1)..(290): unsure at all n locations
actagctcactatgggggcggcttctacctctgctcactgacttacatgtctctccggagctctttatgtcgctgatggctatagctaacatctccacattctggattatagctatatgcgcgtgttttctaaccatccggttataacgtccccncataactcggccatattaccgctgcatcgacagacaggctgcccaagagggagtccacggaggaaatgctgaccacctcanaagactgganagcagtttctgacgattcttctgcggcttccacataaggcatgg

SEQ ID NO: 52069 - DNA, 450 bp, Glycine max
  unsure (1)..(450): unsure at all n locations
ctgcaagcttggagaaaacataccatgagagctagagtgtttgtgacacctacaccgtgagcaagagtgagatcatgagtgagagtgacatcgacagtgacgacactgtgagcgaagggtggtttcaccgtgagcgaagggtggtttcagtgccacgagagtgagagtgagaatgacaccatgagtgacacaccgtcaacgacaatggtntcagcaccgcgagaatgagagtgagactaacaaaagggtttgtgagggagacnagtcttgagggagagaagggtagtgaactgtgagaagtganaaanaattattaatatgacaatacaacgtcggttttttcttccaaaaccaatgttagccaactcacgttaatatcgattnttcagagaaccgatgttgaagaaatcacgttatttacgattatggcacaatgtgntgggttatatc

SEQ ID NO: 52070 - DNA, 307 bp, Glycine max
  unsure (1)..(307): unsure at all n locations
tttgagcacctcgatatattatgctgcctgaatcgaatctaagagtgaaaagttacgaccattngaattgctccagagcttccattggtgaatttcgagcgtctcgatatattatgcacaagaatcggacctctgagtgagatagtatgaccatttcaatttctcgagagctttcgttgcacaatttctagcgcctcgatatattgtgcgcctgaatcgaaccctcgagtgagaaagtatgaccatntgaattgctctagagccttcattgtntaattatgagcgtctcgatatattatgcgcctga

SEQ ID NO: 52071 - DNA, 278 bp, Glycine max
  unsure (1)..(278): unsure at all n locations
ggaagaaagaagggtgtcttcgaccccgagattgnngttgggtgcacatgagaaaagaaagggttccggaacagaggaaatcaaagcttcaaccaaggggagatggaccatttcaagtgctngaaagaatcaatgacaatgcttacanagttgagctgcccggtgagtataaatgtagttccacctttcatgtctctganttacctctttttgatgcagaatggagaatccgattgaggacaaatccttctcaagagggagagaatgatgatgacatg

SEQ ID NO: 52072 - DNA, 472 bp, Glycine max
  unsure (1)..(472): unsure at all n locations
attaaggacttctnttaattaaagaaagaggggggaattagcttttaaaaattgtcaagtaaattagttntttaaaaataagttgtactgcttatttttagtctctttcgctttctcatgaaataattaatgtggaataaataaataaatttagtatcaaacaatgtgttagaaaaagttnggtccaaacattacttcaataaaaagaanaaactagctgttatgtaatttaatntgatgtaaactggttgaactttngatcaaatattacctccggctaaagaaaccaaatggtgatatttntttcctaattataagaaatatataatcaattntaaattactagtgggctaatttatgttatatccttgataaatgatgcgaaatggatgtatntaatgagatattaataatataacttattcttactggttgaaannaatattgtcggatatgaatagtatcatatatc

SEQ ID NO: 52073 - DNA, 479 bp, Glycine max
  unsure (1)..(479): unsure at all n locations
tatagtttatatttttggaaactntcagtagaccactgaattatntaaacaaaacanaataatcatataaatntactntaacctatcaattgtcaatgaggcaattaccaagttgaataaatgtttcaaaagttagttntatcanaattacattcattgatatatactaagaatattagtaaaaataggtcttatcaagaatanttaatnttaatannatntaataantatacagagaatgttaanaagtgttatacaaaatgttaaaaaaagtgtcttatcaattaagtggtaactaacattatattatntgaaatagttgccaaccattataaatatttntacaaanttttaaatgattcacaaaacattattttaaaaaaatatctnttttactttacatatntaaagaatttttatagtcnattatagatataaatatataaataaataaatatatatatatatatatatatata

SEQ ID NO: 52074 - DNA, 304 bp, Glycine max
tcttgagtcatctttccagaaagttcccagatgtgtatatacgtcaacaagtttatatgagtatcgaggatggaactcacaagctgccaatcctacacaccgtccgcttacttggagccttagactgctggaagtaagttaccgactaatttttctgggttagctattatggaatttatactttactctgacatcctttgacaatattacttctattattgcccccatgagcgtggcaatgaaggacatgcttcttctgataaatttcaagttgaattattgtcttggattaatttactatcat

SEQ ID NO: 52075 - DNA, 343 bp, Glycine max
  unsure (1)..(343): unsure at all n locations
taattttcttctttctagttctactgcctcaataacaaacagggaatgaaggaaaagacctcatagaaatcaatattcgagctgaatatcacantttgttatgaagcaaagatacccacataaaagagttcaccagaaacattcctagaacatcaatgtcattggctntcacaatatataaccccaccccacgaaaaaaaaaacattgttcttcttcttctctctagtttcaatgcctcaaacggggaggggttngaaacanagatacccacataanaaanaatcaattttgtttgctcccttaagaagggtaggtcataaaatgcaagagagagagaaagtg

SEQ ID NO: 52076 - DNA, 274 bp, Glycine max
cgcgcgcactacagttttatttcaatttttgataataaatcacctgcgtgtaaactatataaccacacaatcttttggtttaataactaacaaacacttgctactaatactacacaaagaacattcgtaaaaatataggcttgccgcattaactatcttgctatttggatgacatacctcacgaagactgctaagcgctgtaagtgaaaatcagatccaactttgctgtgtccatcacaataatgtccttgatgacctctaaaaactcggagac

SEQ ID NO: 52077 - DNA, 416 bp, Glycine max
  unsure (1)..(416): unsure at all n locations
cactctttntcattgtcactgtgtgtaanagtaatatagtntactaagatattacccttaaattttctataattaagatcattcagcacagtaacatcatgagtcatttttttgctcagcacaaatagataatatatattgatagagtaccagaggtactaaaatacaaggtactgggttgcccagtgcagtggttccactgcagactaaaatggagtctagattggaaccatagccgagctaccgcagccaatggcagaactacaattagtcttgtaaggacccttctatataggttacatatattcataagccctcccacctaattactaaacgctgtcttgatgttagaggaccattgattgaagtgaatngcaaagtccttctccatgactntaatccatgtccatagtaat

SEQ ID NO: 52078 - DNA, 441 bp, Glycine max
  unsure (1)..(441): unsure at all n locations
tccaatccttgtgttcggactctcagccacttatgatagccgccgatgatcccattactgcttccactaagctctctgtcctttcttcacgccgcatcccatgccatgcgaactccttggagtaccctcgcgttgtggtcactanaaccccgtgcgatgaaaggcgtgatgctttcgtctaatggcgctcctctcatggggtagccaagctgtcttatggtgagaacgggattataattaatacaaccccttgttcccatcaagggaacattnggacatccttcgcatgaagatagaatcctgattcttccttccttctagcgagggaaccaattaacagacgcccccncatgctagccaagagttggtcccaattcgcctttcctttttcgacacacgagcggtataccttgagcggatagactggcctaccttcttgga

SEQ ID NO: 52079 - DNA, 436 bp, Glycine max
  unsure (1)..(436): unsure at all n locations
attatacgagtacaaaagctagagttaccgctaggtgtatttaccggtggatacctaattgtaggttgcttctgatctgtgcccaactgctaactacaagaagtttgtactggtgatagtagtcgtcactcataattaataatgaagaaaggagttagctgaacctttcaaagcaacaatatttaattatgctaacagaagcattcttaagccacaaaatcggtagttcttcagtataagtataatagtaatagtaataaataataatatagaaagaatacattccacgtgtagagtccattatgtatagagaaaagttaggtgggggctaanagtggtacttccttgtngaatacattggatttttgtnctctntntttnnnttttattcagntcttggttattttctctcacatatatctctttacttacatat

SEQ ID NO: 52080 - DNA, 329 bp, Glycine max
aagtaccaaacgaattatgaaactgtgtattgtatctaactctcttataggctaatgaattacaccaagacaagtaacatggtactccaatgcgtgtaataatatgctttcattgacgttatactttgtcaacactttttaggacagattccttatcagtttaataatgccttgactattcaaattgaactatctaatgtggtcttccttttcaattttacttgcgtctgagagacgagaaggtattattctattactaaacatattcaatatgttatattgtgatacgataacatagtggaattgatataataaaggactaactacaa

SEQ ID NO: 52081 - DNA, 452 bp, Glycine max
  unsure (1)..(452): unsure at all n locations
taagtttggactgaacaatgcacatnagtgatggttgtttttttttttatttaaagatacaactagaacttaataaggaaaaaaaaaaaaaaacaaagaacgtagaactactctacgaagtcttcgagttaattgatgcagcgtttttcagtaaccaacattgcacgtacgagactgaacatgggacattttgacaccttgtnttcaatctaaaagggagaagcttggtcaacaggttttagattgatgcgttgcacgttgttaacacctggattgcgagactagacgtgaaatcaaattgaagctgccaaacatgatttaaatttgaattttgctgagtaggacatacccaatcttaggtactaccgatacatctgaactagaaaattacatatggtgcaattaatattcttattacattaacttattatttatgataagctctcatctcc

SEQ ID NO: 52082 - DNA, 331 bp, Glycine max
  unsure (1)..(331): unsure at all n locations
gaaaccacgtggtgaaaaaacactttcttaacatggcattctaaacactgtcattttgagtaaccacattctgagtacttgtgtcagcacaacaactttctaagtgttgatttatcattacataatttgtggtttcataacaactaanagatatgttatttatgtgatgatntctgaacatgagcaaatgcacattgacattaggtntcatactcatatcaacattataatgagtgtggactaccacttaaattcaacttcgagtgcttgacctctgtgcaaacttctaacaccagtatctgagtaaagtcaaagataagttagaaagtgc

SEQ ID NO: 52083 - DNA, 328 bp, Glycine max
  unsure (1)..(328): unsure at all n locations
caaagtctgtaatcaattaccatagttaaaatttcaaatttaaatgtgaagagtcacaactcttgaganaacaactgtgtaatcgattacanccatttggtaatcgattaccagtgaggaattntcaaaaataactcccaacagtcacatcttttcanatgattttgatggccatcaaggcctatatatngtgactnggacacgaatntcttagagttttacttacaaaaaagtttatctctaaaattcttggcanatacttgcaatcaataggaatattgaggacttatgatatcttctttaaaagagaatggtagggaccaaggta

SEQ ID NO: 52084 - DNA, 368 bp, Glycine max
  unsure (1)..(368): unsure at all n locations
gttattcattaaaattctactatgtaaatgtattcatttcaagggccaacgccttanaatgatcacctttttaaataaaaaagaatcacttgataagaaagaactacgtangtctgatttcctcatcacanattgaggaatacgtangagcaaagggaaacaccctcgtcgaccacaaaaaaggaaaaatataaaaagggtataaaggatattaggacataatagggaacatanaaaccaaagtcacgtttgcacattcnattaaaggctgccgtcccttgngacggacgtatggggtgctaataccttcctcgtgcgtaaatacaactcccgaacctttcacttaaaagttcgtagatcgcgtcttt

SEQ ID NO: 52085 - DNA, 319 bp, Glycine max
  unsure (1)..(319): unsure at all n locations
gtaaaatgcattcatatcatgcatcgcataagcatctcttcataacatcataatggacatattcttgcatttgtccgtatcatattccggcctacattttgatgagtcatggcatatcatgatatgcgttaacaaacttttgatctgcaaaatgatacaattgtttcatgttgctcatcttgcgttntcttacaaacaaaacaaaaaggggagcgtgaactcacactcattcttattcatgtgtaggcacatgagcaacctgtgtgatctatacccttctannaaaacacacacacaaacaaataatgacatgatctat

SEQ ID NO: 52086 - DNA, 396 bp, Glycine max
  unsure (1)..(396): unsure at all n locations
aaatgtcttatgcacacttacggatcaagtttatccgcgagcttgcggatcaagttgatccgtgaattacttaaggatcaacttgatccgcaggtgtacgaggacccaggagcattnttggcttttataaagaatgctgggtgccccagcaatactactgggtgcaccctagcacacnctaaatttaaacttgtagggggccatgcatancggccgnngtggttntattattatttggttgtttaaatcanacataataacacattgaaacaagaataaataaataaataaatgaattatacaagagaatagatataataacgtgactaataatataaaagcggagaaatacaaaatataacggtgtaaccacatcanagctaccactatcaagta

SEQ ID NO: 52087 - DNA, 423 bp, Glycine max
  unsure (1)..(423): unsure at all n locations
tgataccataaacagcacagcaagacatatgtcatgccaagcaatttactgatcaaataccctctaaaatctgcactttatattttataaagttgtatttcaatgaagaatctcaagggacaaagattcatgttatcatgtcccatattggctagaaatatggccaaaatacatcttaatgctggggcaaactctcgccataagttatctgtagggatgtacgcttggaccatttctaatatgatntcagagcctacgtgaccaagtggtctagagttcgatccttgctgcctcactcttgtaataaaaattatatctcagcataggagatatgaaagcctatgaatcactcacacttcaagcccaaagggatcttatgtgagggtgcatgttacatatataaacaatatcatacatctacac

SEQ ID NO: 52088 - DNA, 495 bp, Glycine max
  unsure (1)..(495): unsure at all n locations
aatgtgtgacgaacactccttatgttattnaatactaaaatacagtgacaaaaatataaatatgatctaatttatgatatgataaaaaaaggagagataaagaaagtattgatagaatatataaaataaaaataatttatgcatcacttcttatcaaaaggtgtgcataaagaaagaaacaatgaacaagacatattgcatgatcgatcaaaggtgagaatgtcccttgcgttgaaaagacgacatatgcttacttacaatncgacatntgtataaggaacgataagcaacatagcttatcaaatcctacaatactgatcgatcaatgatcaacctgatctctaaaccaattattctcctggtcaagagcccatatgccacgcaccacaatcaagtcttttataatcttggttgaatatagaggagtcatattccgtcttgaacttcaacttaaccgatgagcagaactaaatgatcattgctacaccagactct

SEQ ID NO: 52089 - DNA, 390 bp, Glycine max
  unsure (1)..(390): unsure at all n locations
atggtatcatctctctctccatcatctgtggcgctacttgagctgccagatctctccatctntaagcgtattctttgaaagattcattatctatcttgaacatattctatagttgcattctatttggagccctattnagagtatattgatattgcctaatgaaggcagccattangtcattccaggaacggacccgggaaggttcccagattggtataccaagtaatatgtgccacaacaagaatctcctggaagaaatgcatcaacaacttttcatctttcgcatatgccctcattttcctataatacattttcaagtgattctttgggcaagtagttcccttgtacttatcgaaatctggcaccttgaacttcggaagaataaccaca

SEQ ID NO: 52090 - DNA, 439 bp, Glycine max
  unsure (1)..(439): unsure at all n locations
ctcagctattagatgggaatgaaggtaagcaactctgggcttgtcatatacaagtgatgaaaggaaggggtccttggctatccttagcttccaagggtatgccctctattggtggacttccctagttagggaaagaaggattcatggngatcctctagtagagtattggaatgacttgaaaagtgcccttangaagaggcacatcccctcctactatgaaagagagcttatggaccaactcccaaggcttagacaagggagtacaagtgttgaagagtatangcaacanatggaactactcctttngagagctgggcttatggaggagcanagaacaagcattgctaggttccttagtggacttaatatggaagtgagggacannagtgagttgcttccttttggggacctagatgaacctagtgtaatggctattcat

SEQ ID NO: 52091 - DNA, 549 bp, Glycine max
  unsure (1)..(549): unsure at all n locations
agcttaaaatgaatttnntaaaaactgctcataatgtataatacaaaaatactattatattccattccacttctacccgtgcaatatttcccaatgccgccaaaaacaatccaccatcttctcctatctaggaccatcagttcctgctccttntttgtcagcccgtgtactcttctttngacatgctaaactcagcttcatcgagacaaagggacttcgatcatccagtaagaattaatctgaaatattcatcatgcttatgaagtaaacttcatggattgttaggagcccaaccattntattcttctnttcanaaacattcacagatngattaagcatatatgtntctgacatttcatatctggtggctnttccatacatggatcagcaatctgacaccagcagacataaggttgaaatgaaaatagcaatgtctcatataataaataatagaatacgattntcaagtgaatatcatcatgtntcaaatgagcccagcactgggtattatctcatctattactttataaactatctctcaactgaaga

SEQ ID NO: 52092 - DNA, 427 bp, Glycine max
  unsure (1)..(427): unsure at all n locations
tgatggattgcttatatgcaaaatgtgagtntgaagtagattacttgtctcaatntatgattntcacatgttcaagtttagttgaaagtttgactntatgcgatattcaaacattggctgaactatgctgcacaactaggtcttttcctttataaagcttaaaattgtagtcactctgtcatatgagatgcttcaggaactactagacaatacatgcagggctatgtcttatacaatgattcatttgtatgtttctattaatattttcattcttagttctgtttcatgtcaataaccagtttaatttattaatactttaataattgtntcctcggcttcataattaggagatagtatatatatggctaagtctaccacatactaataatcacagcaatattaatataatattatagtatacaagtac

SEQ ID NO: 52093 - DNA, 183 bp, Glycine max
  unsure (1)..(183): unsure at all n locations
cccgaatatatcgagacgctcgtaattgaatacagaagctctgagcaaactcaaacgacaantaactttgactcaaatgttcgcttgcgtcccgtagtacatcgagatgctcgtaatagagaagggatgctctaagacaatcaaacgacaataacttattactatgatgcccgaatgagcccg

SEQ ID NO: 52094 - DNA, 441 bp, Glycine max
  unsure (1)..(441): unsure at all n locations
cactccatcattaggantagtaccttgtatctcanacanacanatcanacgtaacaagacnnaatatagtgctgtttgaatccctcacccactcaagtgtatcacaccaatatggcttttctctaatgaaacactctngccttttaccactctaattccncttgagttcttaggcaattcaagagattatggccacaacanagaacaattaccaatatgtgtanggtaggctagacanggaaaaggtaaccaagaaaaaggtaacaatgtttttaggacacatgaggaaaaaaatcagaattaggaatcaagtacaatcttatgcaccaaatatacctanagagtnntttttaagtcttaacatgaccatcagccaatttttttttttatttgctatcaactctgtttttttttttcttatacaatatacaatgttacttt

SEQ ID NO: 52095 - DNA, 366 bp, Glycine max
  unsure (1)..(366): unsure at all n locations
tggaatgatttcgtaaatttctgagagctgntggggaatgcagaacacgagattaacacgaaaatattagtttgaatgaggaatgtanatggacgtgtgaagcaacggtcgaatttgcttttgttcagtagtgaacgtgctattaatgttaagtgattcgtttgggcacgttcagatatcagtagttgctacaattcctctagcagacaaatgcccagcttgcccctcagttnttcaaactgttttgcatccaattgcctttgtgaaatatctactatttgttcctcagtgtcaacatgctccagtgtgataactttatcatcaacaagctctctaatatagtgatgtctaatgtcantgtgcttg

SEQ ID NO: 52096 - DNA, 497 bp, Glycine max
  unsure (1)..(497): unsure at all n locations
ctcagctcacaccataggggtaagactctnctgtgggcctcggatgtccagtttggtcattcaaactcncaccattctgctccttcttgggatatgggcaatctctctgaatatgcctcttttgtctatagttgaaacaggtcattcctttatcaacacnaattgaggagatgtgccctggcttaccacacttataacatgtgatcagagttgagaaagtagtgggtttgctaccactaccaccagcaaaccccatagcaacagtcctctaattggtgggatggttaccatattgcttaggagggtcgagtacgggtntccccaatgtaagggcccattcatttgttcttactgagcctgtactcctataataggttgccctgtctcaagagtcttcatcctatattcgacacatgttaaccaagagttgaaactaatgaacaccttagtaattcacgacttgcttcacttaagttgaagtcgtcaaaacttacaca

SEQ ID NO: 52097 - DNA, 382 bp, Glycine max
  unsure (1)..(382): unsure at all n locations
tttttcttgagaagcctttgcttgtgtctgcaacctaccctttgtgggcgtggaanatgtcagaaaaaccgaagganaccggtcatgaagaatattccagattcgggagttgtatttacgtttgaggaaggtattatcacctctcacgtttgtcccaaaggacaacagccttagaattagaatgtgtganatcatacatcntaaactttatttcttnntttatttttgaagtcgacaaaagcggagctcttgctcctacgtaccctccatcgaagaggaaatcagacctacgtagttctttctaaagggcaaatcaagcgaattctttttcttagaaagaggtccttttaatggcgtggaccttacaatgactccattttac

SEQ ID NO: 52098 - DNA, 318 bp, Glycine max
  unsure (1)..(318): unsure at all n locations
gtcctaatttctctacacttccttacctctcaatgagctagtgaagaagaatgtgacattcacttatggtgaaagacaagaacatgccttcgctttgctcaaagaaaagctcaccaagcttagtccaagaggtgatgaaccttttcaggtcttggagaggatcaataacaatgcctatatggttgaccttccagaagagtatggagtcagcaccactttaacatttatgatntaattccttttgcaggtggagataatactgaggaggaggaactaacagatttgaggtcaatcctcttcaaggaagctttctttctc

SEQ ID NO: 52099 - DNA, 518 bp, Glycine max
  unsure (1)..(518): unsure at all n locations
agctgatgatcacattctcccccttctaagaaagtcttctggcattatctttatcttcatganttacattctccccctnttcgatgatgacaaccacctgtaggttaagagcaaaaacaaagaagaatatctatctgcatatnagttactccctctcgattttgcaatgattgcttgtatgagacagctgaagatctcttatttntcatatgtatacaaattgtctcataaagaataaaggactntntcctactaatttatctattatctttctctacccctttgtcaacatagaatacanatcatatatagagagcagaaaaatgttaccactcgttgtaatgtatgagaatcaagtgataccataaggcattaaatcaatcattcaatattgatcaagcacaaacaagtatagtagcacatcaattatanacacaatcgaacacaatcaatcaaatatacatcacaatcatcaaggacatctagactcaagtagataacatgcatcataagtcaat

SEQ ID NO: 52100 - DNA, 252 bp, Glycine max
tctctattgacacgaaactgggcaaaagagggagataggaaaccctgcggatgcatctgacgtcatttcacaccaaaattttactatcataaaactttctacccacccatatccaagcctcttaatacaaagtttcacgacttcatacacccacttaccaacaaacccacatagtgattgacaaaactggatccccaatcaggcttctactctctattctatataaggaccaccttcagtatacctctttca

SEQ ID NO: 52101 - DNA, 149 bp, Glycine max
tcatcatcgtgaagccttacttctacaataaccatccacaactcatcaccacaactgtatttctacataggcatcatataggaaacttataaaacaaaacagtagtcaacacaggactacttctaggaattgatttagaacatgttatg

SEQ ID NO: 52102 - DNA, 366 bp, Glycine max
  unsure (1)..(366): unsure at all n locations
ttaactatatgatatatgcaganttggcacctcatattcaaattatgtgagttaagtcctcttgtattataagcgtgtgtttttctccttcgaatagtcagtcataaatatttaatatattcttgtcaacgtgatactagatgatcacatataaatctcatgagaactgatgaattacttgacatgtatattgatgtgacttaattacacatttggtctctttgttgttcaatatgaagtaccatagaacaaatagctcttgtagtatatttagttattgaccagagcgataaccatctgtccgtgctgcataggatgatttagcttaattatataagtctataacaaaaatattctatcttctta

SEQ ID NO: 52103 - DNA, 431 bp, Glycine max
  unsure (1)..(431): unsure at all n locations
tagagtcctctcactgtgtgtgaggtgtgccatgttctcagaatgtgataaatcagaatgctcaaaatcaagatgttcaaaatcaccaataacagaatgcacagattcactatgtatggaatgatcaggatgatcaacaggtataaaatgatgcctaactaatctatgaaacttcctatctatctcaggatcaaacgggtgtnagtctaataggtctgcctctaggcatacactacattcagcatgcacaactagtngccttgtcatgtaaatgagagtgtaagtttgaactacagctaccctcaaatgatatccaaatgacttgatatattgtgagagaccttataaaatgatgagaagatagcttataatatttctaacataaattcacagtctaactatggaagctaataatgataggtctgagaaaa

SEQ ID NO: 52104 - DNA, 213 bp, Glycine max
  unsure (1)..(213): unsure at all n locations
agtaaatgagataggtaagagagaatgcaaacacagttntatactggttcggcaaatttcgtgcctacgtccagtactcaagcaacccacttgagatttccactctctttgaaaaatctgtttacaagtctgaccacacaggggacacccttccttgtgtcagcattattacaacttaagagaaccctcggtccttnacaaactctttgaatg

SEQ ID NO: 52105 - DNA, 418 bp, Glycine max
  unsure (1)..(418): unsure at all n locations
tgttggagatgatcaagtattggtcaagggtgtggatcttctgcaaactcaaaaaatgtagcttctccttttatgaatggagtcaatgtccatatatgtgcatatcatacttgtaagtggcgagggggttcttatttgatcatgattgtatctatcanagtgttatatggtggcgtggcgttntatgttgtataggattatggcattcttgttgtgctatacgtagccactcggtttagctagttacatcatgtgtatcgggttggtgtacccctagtatccncaaactcgttgcacaattgtgcttcacaaagcatgctcatgcaaaagtccctagagatgtaaaaaaatggtgtgaattcattcctacttgccataattgtgaatatatntgatatatgactatcttatgagaatg

SEQ ID NO: 52106 - DNA, 390 bp, Glycine max
  unsure (1)..(390): unsure at all n locations
ggatcttaagtcaccgcggctgcagcttaacannatattacaattttcttgtgacatggcagccctgngcaaccacanngattanggagaaacatttctatgtggatgctgcttgagagagtgagatttaccttagatggtattgaatgtaacaaatatggtgtcagctatgaagcttttaatcaacaaccaaacttttgctcttctcccttttggacctgcttgcataatcaattgtggatatttcgggagggtgcgtacttcaacaataattttntcttctttaattcttattctcatcttacttntttggtttcatttttgtcattttcttttcacttctatttctgcaaaatggattgggagaaaaacttcattgatagtcattga

SEQ ID NO: 52107 - DNA, 389 bp, Glycine max
  unsure (1)..(389): unsure at all n locations
cacttctctctctttcgaatttgcttggacaaattgtntccgtgaagaanatccaagccgaggcgcttccgaaacgtttccgtaacgttttcgtgaggaatatcgcgaaggtttcgaccgttcttcgacgttcttcattcgttcttcatcgctcttcgatcttcaacgggtaagtaccttcgaccaagcttttcgattcattctatgtacctgcggtggtccacatagagtttcgggtatttttattctcgttcatttactttctatacccccttttgacgtgcttaagccattttcattaagtcatttctcgcttatactaanaataaaataaatntccaccgatcgtttgaattgtattatccgctaacttcgggtaaaatgaattc

SEQ ID NO: 52108 - DNA, 125 bp, Glycine max
tcatatcagtagctagttatagatattggtcaatctatcagctagatgtgaaatcaacctttcttaatggtccactacaagaagaagtatacatcacacaaccacctggttatgcagagattggt

SEQ ID NO: 52109 - DNA, 232 bp, Glycine max
tattattaagtacttgtttcgttaagaaaaatattagttggtccaacaaatatcaatcacgcgtgtacgatacattgttgtcattattgacaacacatattgacatggatgcgttgtatagttaatgcgtgtcaccacataagacgagcttgactactcattgtgaaggaaacataaacacgaaacatgttcactcgtgtttatatttctgttaaaaaagagatcatgctgt

SEQ ID NO: 52110 - DNA, 282 bp, Glycine max
  unsure (1)..(282): unsure at all n locations
actgtatggaaaagactatcctcagtaaagctagacttggaaagcctcctggtgtgatccttattangagtggatcccttggtgcangtcaaggaattagatgatgccacttcctgagatggaagataagtcaagggtaaacgccacaagggttcaaccttgataagtttgaanggtcaacaagaaacctatagagaaactctcacanaatacacacaaattttctcanaatgccaaaagttcattttcttcaaaatgagttcaatacatatagtgtagctg

SEQ ID NO: 52111 - DNA, 362 bp, Glycine max
  unsure (1)..(362): unsure at all n locations
cacctgagctgcagctgaggatatggggacccatacatgtggactatgtggctgtctggcgatagtgcacaacaagatntccacatncacaaatcgcgcataaacccaccatcccctgttgcccacctacaactgagctcacgtactcccacgtagcccatatcatcgtttctctcaacaccgggtccccatcaatcctcccaagcttgccaacatccaattaattcaacatgcagatatcatggactaacaaaaccaagcagaacagggcagaggcagaatactctgccaaaacacaactcanaatcacagctattctcactaaaagaccccagtaacaagttcttctaccaattccttaa

SEQ ID NO: 52112 - DNA, 322 bp, Glycine max
ctaccggattagtgatctttatgggtgattgtgttcttacatggagttctaagaagcaaggcattgtgacacttactacctgtgaagccgagtatgtagatgcaacttcttgttcatgtcatgccatttggctaagaagattgttggaggaacttcagttgttgcataacgaaagcacacagatctatgttgataatagatctgcacaagagcttgccaagaatccggtgttccatgaacgaagtaagcatatagatacaacgtatcagttcattagagagtgcctaccaagaaagatgttaattgctcatgtaatactcag

SEQ ID NO: 52113 - DNA, 336 bp, Glycine max
  unsure (1)..(336): unsure at all n locations
tcccatgctttcaatgtaagacccaagtctcatactctagcaatggatcctacaagaagtgcttgatncattattgccgctattgtcactgtagaagcactttctcaccagtcatgccattacagtgtttctaaaggtagccatataatgcttcattttgctattgatacttgctattattatatcgactcatgatgtttacatttatatggggttntgctcctaatctagcattagttgtatgataataactatacttcccttgtgtgtgtctatatatccttccgttcttgcaagaggaaatcagataagcttagttccaacatcttagatgat

SEQ ID NO: 52114 - DNA, 342 bp, Glycine max
  unsure (1)..(342): unsure at all n locations
agtcacctgcggcatgcagctgttcttaaaacatgcttcttgttcctcanatcactaagaatctaattagtgtaagcaattngctaaagataatcatgttttctttgaatntcatgctaattgttgcttttttaaatctcatgattccaataaaatacttcttcaaggagatcgtggacctgatggcttgtaccagctctttaatcttcagttctgctctattgggtcttctctaagctttagctcttgtataaaatctggttcttctgccgattgattaatactatgcctaattctgtatatacttggcaccttagactangccaccctaactctcaagct

SEQ ID NO: 52115 - DNA, 368 bp, Glycine max
  unsure (1)..(368): unsure at all n locations
tgctgactgcttcgtttgtgtgtggaaaacngaattattctgaagtgtagatgagaccgatgctgccaacgtttgtgataagagataattatcagtactagtgctgtaaatgaagagagtaagacttgttattnttggtatgcttaaattggaagggcgtaatgcaagacaagggtgaaaacgttggcttgctaagctgtgtagtgtgatgaagtcatttgatgcatgcatctatcnttgatntatgtttgggttagaaagatactgaagtgattaggcctttatgtctttcgaacttgtggaagaccacccaattggcaccactttcgtgtgtagattactgaactataatctcaactctattttga

SEQ ID NO: 52116 - DNA, 452 bp, Glycine max
  unsure (1)..(452): unsure at all n locations
actaagctataggctnntgactctacaggcgagntggtcgatcaactatgcggattataacagagactgtatgngaaagactatcctcagcctagctagacttggaaagccttctggtgtgatccttattaggagaggatcccttgggcaggtcaaggaattatatgatgccactctctgagatggaagatatagtctaggtgtaacgccacaagggttcaaccttgataagtttgaagggtcaacaagaaacctagagagaaactctcacaaatacacacagatattctcaaatgcctaagttcatttcttcacaatgagttcaatcatatagtgtagctgaggtgcattgtacaagacaccaattatttcataatattacaataactagaataatatctgatatggatcttcaaactagttaggaacttcaacattcatgatattaggag

SEQ ID NO: 52117 - DNA, 362 bp, Glycine max
  unsure (1)..(362): unsure at all n locations
ctgactatgctcttgtgtggtggaacaagctacaanaggagagagcaagaaatgaagagccaatggttgatacatgggcagagatgaaaaggatcatgaagaagcggtatgtgccgtctaattactcaagggatttgaacttcaagctctcaaaactaacccaaggcaacaaggggattgaggagtatttcaaggaaatggatgtgctcaagatttaagcaaagaatgaagaagatgaggaggtaactatggctcgatntcttaatggtttgactaatgatatccatgatattgttgagttgcaggaagttgttgaaatggatgatttgcttcacaaagcaatccaagtagagcaaccatta

SEQ ID NO: 52118 - DNA, 328 bp, Glycine max
  unsure (1)..(328): unsure at all n locations
tatgatctttcaagcaacagatacaatctatggtggagaactcatccaaatctgagatgggcaagtcctccacaacaacaacagctggtccctcctttccagaatgttgctggtccaagcaagccgtatgttccttctccaatgcagcaacaacagcaactgtcacaacaaagacaacaagtaactgaggcttctnnctcaacctccttataagagttagtgaggcaaatgaccatccagaatatgcaatttcagcacgagataaatgccttcattcagagtctaacanatcagatggggcagatggctactcagttgaaccaagctc

SEQ ID NO: 52119 - DNA, 504 bp, Glycine max
  unsure (1)..(504): unsure at all n locations
gcagctttacatgcatgtgcacaccatatttactatactttgatcaactgatacaatctatttgatcgaaaagatatattatactactcttctaatgtagtggacaactataattaanataatataatagaaaatactgcttaagccattcaaatcaagtcattttgaatctcactattagtatcatgcatgtcaaagataaggagaatcangcatctgtatgcataacacaacctaacattaaaagaaacataaagactcccttcatgatattagcggcttaatcgttgaaccacagccctcaaaatattcccatgcctctatgtcgtttcctaagagaataatataattgagactaactggcacctaactgacaattgtgtaaaataatcccttctcaccttccatgttgaatggaagaaaagatatcaaattatcaatgatataatcaaggaaacacaactcatatgtcttatgaattaaatcatcatctctgcaatatgt

SEQ ID NO: 52120 - DNA, 523 bp, Glycine max
  unsure (1)..(523): unsure at all n locations
tatcttacctatctatctcccagatgtcttggcanagaatcaatggataatatacatgaagttctaattcaagatgttttctttgttgcatgggcataatgcaatcactctatgtctagcaatgattttattaagatgtccctacctttgagttctactaaaaattatcctctctcgagcgactaatccctaaaactgatgcatataaaaccttcaatgtatttctactaagggatacccttctttcaagcgccacaacccctaaagatgatgcaaggatgaagcatantaatacattgttggcattntaggcctgccaagccctaactaaacgggtttagccttttattgtcatgagagactnttacactntagggggttgatatgaatggaagaagatggatggatagaggaagaaaagaggataatggacatatatagaaagagggtttccatgtggagatagtaggttaggatgatcatanagaacttaagcttcggcgggtgtatctagtgatgggta

SEQ ID NO: 52121 - DNA, 432 bp, Glycine max
  unsure (1)..(432): unsure at all n locations
tgcagcttggtatcgataccgagcagtgtaatctactactcataagacatgtttgaacagtaactggttagaagggatttgaatttgaaattcgaacctgtaatcgattactatatgtttgcaatcgactactggcaacagatatcttgaaattcatattcaaaagtcacgacccttcanaatataactatgtaatcgattaccagagatctggtatcgattactagtgaagaatctcagactaagctttttgagaagacacatctcttctcactcatttgaataggcaagaatggcctatatatatgtgtgtctgactgtcaaaagcaagagagagatatttcatagaacttattgtacatgctcttaacactcttcgcaactctgcaatctataagagtcatggactcgatgtatatctctcttaaagag

SEQ ID NO: 52122 - DNA, 289 bp, Glycine max
  unsure (1)..(289): unsure at all n locations
tctggactcatcacgttatctattatccttggtgtggatcctagtgctccgatcatcctattgcatactcatgttatggtggcatactcaccattagttatttctttacgaatttcatcataactaagaaaacaccgaggcaccnctataacactcgatccacataaatggataatgaatatggcgtgcacgaacagatgaacgccgatctatcggactataaagatcaaatgggcttcatctcngaggtcatgttaaaactccacaaaaccatataggataaatccac

SEQ ID NO: 52123 - DNA, 322 bp, Glycine max
  unsure (1)..(322): unsure at all n locations
cataactntgtactctaatgtccgattcatgcgcatcatatatcgagacgctcaaaattgaacaatggaagctctcgagaaattaaaattgtcataacttttcactcgaatgtctgattcaggtggatcacatatcgcgacgctcgaaattgaacaacggaagctctcgagaaattcaaatgggcataacttttcacacggaagtccgattcacgcgcttaatatattgagatgctgganattcaacaacggaagctctaganaaattcaaatggtcataactctgctcgcgggggttagaatcatgcgcataatatataca

SEQ ID NO: 52124 - DNA, 147 bp, Glycine max
  unsure (1)..(147): unsure at all n locations
atcaatatccgngaataatattgtattgccgaggtgggctgatgctctcccggccgaataaatgggaacatgccagatacgggcgaaacgaaacatcaggtgagctcgcacgaaaaaacctagccgacctacattgtaagtgttata

SEQ ID NO: 52125 - DNA, 350 bp, Glycine max
attggtgtctctatcttacatatcttctctactatagaaaaatgctagcaacttttattaaaaaaaacatctcagatgtgtccacttgttgctagtgtctgttaccttcaagctcatataacttctcacatattaaaaaaaatataaaatgattatgcttttgataaactcatgatgttgaatgagtaaaaatttcatataatcacaataaaaatatataaaatctgattttgcaaatatttgttaaaaattttactaaataactatatcctactatgacaagatgactataaagataatttacgatacaaccaaatttatataaaaaattattgaggcaacatctgaat

SEQ ID NO: 52126 - DNA, 429 bp, Glycine max
  unsure (1)..(429): unsure at all n locations
atggagtgttctatccttctctaacctaattcctacctcctatacttctgatgtcaccctagatagagccaaactcatttatggcatcatcatgaagatggatatgaanttggggtacctcatttcccaccagatctccctcatagcacaacatgacaatccagacttggatatcgtgccttgatcacagctntatataaggctanggtagttcagtcatattcgaggtccctagagagcctgagtntgaccattatattggcatatattaagaagaactgttggaatcttgatgatctagcagtaactttcagaggacctangaaagccacgggtaagagatctgangccccttccactttagcaccatcagaggcaccaacaccttcttcttctacagtacttcccctctcatacactcagactcca

SEQ ID NO: 52127 - DNA, 263 bp, Glycine max
  unsure (1)..(263): unsure at all n locations
aaacacacatttcgaacgttctgatattaccaagttatatatgcttaactaaggtggccatctntttatctaagcttccacatanttgaagcatctanatcctttttatatacaaaacatccaagtctttatttcttanatggattttacaaagaacgtcgtattggctatattcgntatatatcaatggatgaagtatacttacactgannaccttaaatgcctnnctcgaaaatgtctaagtggtttccaacatatacatg

SEQ ID NO: 52128 - DNA, 271 bp, Glycine max
accacagagtggtacctggagatatgtcgacggggtcaagagacctctgggacgtcaggtggggtgctattgcccaaaaccaagcttgaccaatcccgacccaacccgggcatagtcggtcagtgagaacctgtgatgtacctaaacaggcgagctcctggcagtcaacagattaaaggagaacaacaccaccaagcactgatgcttgtggtggctggccagctgtgaatattgtgtaatatgtggatggtggcctctggtaatcgattac

SEQ ID NO: 52129 - DNA, 309 bp, Glycine max
tagaaacagaaaactaatccgattcttcttcaatcttgaaagaaactcttcagctgttgccatgactttacaacacatcccaattggcctaattcttctctgagaccgtggcctgctggcgatgaacactggacactgttcttgcccagtgcctatgccagacgaccggccttcgtgtgtaagggtgcactatctctgcgagagagagagagagagtaatgagagagccggatcctgccttaaaaacttgtacatataaacccgtggtatgaacagtccaatcatgctctgaatcatgagagtatattc

SEQ ID NO: 52130 - DNA, 359 bp, Glycine max
tgttatcctctacgagaagataagaagataagatgaattacattttcttgggagctaacttatacactttaatatttatggaaactctctcagctaacttctccaacaatataaagtacatgcgttaatttcaatttatgggacgtttaattcatttaccaatgtatgctcttctcatataattgtgatatactattcctaatcagctgttgtctgaaaaatcaatcctagttaacaacttgatattcattagtgtcttcccatgtgctaaagtcttcacattgtaataatataactcgagactcttgtctgtatgagatgcaacagtgctggcatctcaatatgcagtgagatgtctg

SEQ ID NO: 52131 - DNA, 327 bp, Glycine max
  unsure (1)..(327): unsure at all n locations
atatgtcatgtgcctgaatcggacctncgtaagaaaatttatgaccatttgaacttctctagagcttccggtgtttaatttcgagcttctcgatatctgatgtgcctgaatcggacattcgagtgaaaagttgggacaatttcaatttctccagagctctcgttgttaattgtgagcgtttagatatgtgatgttcctgaatcggacctccgcgtgataacttatgaccatttgaattgctctagatcttctcgggttcaatttcnggcgtctacatatgtgatgtgcttgaatcggaccttcgcgtgataagtatgaacatttgta

SEQ ID NO: 52132 - DNA, 425 bp, Glycine max
  unsure (1)..(425): unsure at all n locations
agtggtccacatggggtttcgtgtttttttattctcatttggttactntntatacccnctgttgancgtgcttaagccgtttacttaagtcatttctcgcttaacttaaaaataaaataaatttccaccgaacgtttgaattatattatccgttaacttcggttaaaataaattccgaccgttcggtcgtgccgtaaccacgttggaaatcataaagagggtaaanataatataataatcaaaaagacatcttttagtaaaataaagcgganaatcaatcggacgttntctctttgggatttctcattcttaatcgaattgattaaataactaaagtgaaactaaggctaaaatcaactcgcctagtcaagcctcgtccacaaaatagggctttgaagttggcatttcatntctcactaagtaaa

SEQ ID NO: 52133 - DNA, 418 bp, Glycine max
  unsure (1)..(418): unsure at all n locations
ctctnttctctatttttctctcatactgtcttcattcttcttcctctttccacttctgttcttcctttntcttgcacaaatttcacgtatcttccattgatgttgatcatggaaggataaatacacaatcaatccaaggatccactccaagcaagactgagtttgagttctggtttagtatttctaatctatgtgaatggtcatctttntcttcaatcctannttttgatntcatgattatgaatatgcttangattganaacgaattagtctanggatntctctcccaatntcaaatntaatcacnaaatttttggatgatacttccaacctaatttttatctcaatgaatntanggattaattcgactganacaactctaatgacattgattgaacgctcacaacatgatcattct

SEQ ID NO: 52134 - DNA, 537 bp, Glycine max
  unsure (1)..(537): unsure at all n locations
tctctcttctctcatttctctctttntctctcaagggttcttcattcttcttcatcttttcacttttgttccaccattccaagcaaagctgaatttgagtcctgggtttggttttctacctcttgggaatgttcttctttctcttcaatcctatnnttcattttcatgattgtgatgatgtttaggatngaaaaaaatattaggttatggattcatttcctaatttcanaaattaatcaccaaatggnttggatgatnctctgacataatttgcgattcaaacaanttagagaattgatggattaactntctcttatgcatttgagtgaactntcacattgaacanccattgtagtaactgtgataattctatntgcatnggtttagtgaattgaattgattnntttaatcttgaatnngcatttgttcttggtntgggttgttcttcaactnntgtntgtgtatnttcgcttttctttactatcacatacaaacctgtcnngataaatcccctctgtctgttataccctgatgaat

SEQ ID NO: 52135 - DNA, 383 bp, Glycine max
  unsure (1)..(383): unsure at all n locations
agctntannactagtggctntgtctataatgcatatgtcttctgctcagagtccaatnngctaatggactcaagtgagaggatntcgtgaatacaggtaatttaactttgcccttcagagtatctggtggtgtggtgattctgtgtttctttctgaagttttgtgactgacagcatagcaagacaaagtaaattgcagcattagttgtcatttatgaatgctaatttcaaagcatcactaattacgaatttctagctntgttaggtntcctgacttctgattggcagtcttattcaggatctcaacaaagtctgatgaattatgtgaacctgcaactgaaattgatcttttgtctttcattaacgcttcactggatgagtttg

SEQ ID NO: 52136 - DNA, 376 bp, Glycine max
  unsure (1)..(376): unsure at all n locations
catgtncanntgaaatacanaaacatttaanagaattgaatacagctcatgcagcctctntgcaagctctntatctgaactctgaagaatgatcaatggacataaaactgattaatactgtgaactattaaggagttactgtagcattgcgcatgctcagcaaagctatcaagttaaaagattgaaatacanagacagcttngtatgtgcataagaactataggatgtcttaatagaaaggtacatcagataaaatcagaataaaggaagggtcttgtntggcattaccgattgagtcacccggaggcaaagttcctaattattctttgttgaaaggtgatgaactntntggatatttgaggaaattgtaacttta

SEQ ID NO: 52137 - DNA, 400 bp, Glycine max
  unsure (1)..(400): unsure at all n locations
ctatcaatagacctccaatctttaatggagagggttaccactactggaanacccgaatgcaatattttatcgaggcaatagatctaaatatctgggaagccatagaaatagggccttatatacccaccacagtagaaagagtntcaatagatggtagttcatcaagtgaaagcataaccatagaaaaacctanagatagatggtctgaagaggatagaatacgagtacaatacaacttataagccaaaaacataataacatgtgccctaggaatggatgaatatttcacggtttcaaattgtaggagtgctaaagaaatgtgggacactcttctattaacacatgaaggaactacagatgtaaaagatctaggataatgcacaactcatantatgaatat

SEQ ID NO: 52138 - DNA, 405 bp, Glycine max
  unsure (1)..(405): unsure at all n locations
tcatcttatatntatatngttatattattagcactctgaatttcagccttgtatagtggctatattattatggtatttgaacaatctactattttcctatttgcatggnagtgttgaacacatattaagtatgttatctgactatatggggtttatagataatctatctatgattgttgcttcatgattcttgcttcatggttngggtggttagttctcaatgaatgttgtatggatgtttagtttatttgattatttcacatttgtacacactttggctctttgttgatgccaaaggcggagagaaatagggattaaatcaagaactcacatgagaacatcaattaattttaagatatgcacacattcaaaaacagagggggagaattatgtgagtgatcgact

SEQ ID NO: 52139 - DNA, 412 bp, Glycine max
  unsure (1)..(412): unsure at all n locations
catattaccttcttatgctcttctccctcctatgagtgtgtctagattagtttatcaaaacaggaccaatatctaacagtgaccagtgcagcaagcatcaatgtagatatggagaacatcagaacatattagcttatgcctcacgtgtatacctccaggttggcaaataggtgcattgcatttaaatataatgaatgagcaaaaattaaacaattcatgcattaaagaaataattgttgataattgttttaattgagctataaatcatttaattggtccctnggttcgtcaagtcagttataggggcctttgaagatctcaatactgagaacaatcacttttaatatccaggggtcctaactcttggaatttaaacacacatgtattacaagataaagatatctacttgtga

SEQ ID NO: 52140 - DNA, 246 bp, Glycine max
tgaccttttgtttgtttttgaaattcagttatacacatactttatttatgaatctgattatttgtgaacgccgcgttagtatatctatactaactgtactcgttatgtgattagcgctacatatatgtataagtgtttatacttgtacaatcagtcatttatacagggcaggaatactgtcaaaggaaaaacaaatttggatatatccttaaaaatactattttttataagtttttttcacccatt

SEQ ID NO: 52141 - DNA, 526 bp, Glycine max
  unsure (1)..(526): unsure at all n locations
atactcagctacccttctggtttaagtgctaagtaacgtgcatttttgaaccattttgctattttgtattttctacacattantaacagaaagttgaaccgatcaagagctgactgacttgaatanagaccaaaagcaacgcaagtaacttgcagatggggatagtacaaaatntgcagtttaatacataatgtttaacaaaggtaacactactacaagactaattcagaatttcagattaatgtagaaacaagatgcaaccagggactgcaaggcataaccttttcaggatctagtcccaactctttcgaaaggctgtccttcacagatcttggaggaagctcattctcttgcaaaactnggcgaaagttctggcatatntcattataaaaacagttaanagaaacannataatgcatgtataactatntatatatgtgttgtcaactggagtttcaaaagaggaggggaggggnngtatgacacaccaaaagatacatcacaattatacaactctcaagtatac

SEQ ID NO: 52142 - DNA, 148 bp, Glycine max
agctgcagctgctattactgaatgaagaatgatttaacctctattgaatctagatttttcctatcttacagaaatattattcacttcaaatactataatgaagagttgatcagttatacagtttatcacaaagtagtcttttcacgac

SEQ ID NO: 52143 - DNA, 317 bp, Glycine max
ctggatcttgagcttcatgaggttcttttatggtgattttccaccatggagatgcagcggaagacatatgagatgaggtgagagacggcgccatccactaaggaataagccatggaagaacgagcttcaccaccaagatgagccttggataaaaagcttggaaggatacttcaatggaggaaaagatagacggagagaaagagagaggtgtgagcacgacatcgaaagaatcaaagacggagagaagtggatacttgaagtatgtctcacatgactctcattcatcaaagttacaacaagtgctacacatgcttcta

SEQ ID NO: 52144 - DNA, 308 bp, Glycine max
aaaaataagaccttgttaacctgatgaaccttagggcattctgtctctacacaatattagaaattccaaaatcatgtattattgaacatcttctatttaaacaaatttctatcgataactagtttacaattcctctattatcttaaggaaaatcgttattcgtgtttgctcaaaattataaaacaaataacttttatatttgaccatgctctattctaatcttccaacattcaacacataataataacaaggaatctatgtataaaatgacgtctcttcagatgaaaacacataatatctgaattatc

SEQ ID NO: 52145 - DNA, 116 bp, Glycine max
gagtactactccccttttatactctctgagtctaaatcagagtactcacccctttatgtactactctgagaactggtctcccccaatgtactcccgcaaaggaatcaaaagctctc

SEQ ID NO: 52146 - DNA, 435 bp, Glycine max
agatactaagctacacaagatcctggttcagtctagcattatattgttggatatataagcataccctatctcttatagaaatggaaaatgaagagttaacaccgcgacccatcccattgccacatatacctaagtaagtaaaaaaagacatgcctgaaaataagttattctatgtggtctcgtggggccattccgcttgctattgtgttagattcttgcctgttgtacttttcaccgatctatgctctgtttcagtgaacaacaacgctgcttcttactctgcccagagacacgcacactgctcagtactctgtacttgactaatcagctataactctctcaaatctctgcttctttagaatcttccacggaactttctaacactgtcactctcagtaacgcaacctcttcaccgggtatgtactctctctctct

SEQ ID NO: 52147 - DNA, 550 bp, Glycine max
  unsure (1)..(550): unsure at all n locations
taagcacctgggctgcagctttatgaagactatgaatcttgaagcacattcattaatgngtcactcttagaggggtgaagcttaaacacatttctcactcanagatcttccacacaatcagtggcatagcttcaactaaaattttgggagagccaannnataaatggctaanatagaaagttggntatttattatnatttanggctntagttggttccttgggtttaaaaagttttattattgcatatgacnaaaaaaatattcattatgctaaattggtcttttttgtgannattgtgcacaaatttgactaacttgatgacatatgacacattgtaaaanatatcatgtcagctaaccttaacacaactagtgtcaaaaatggataaaagaatcaattnggcctaacanagataccataagagattaanatgaaactttntaacttaagagaccanattataactantaatatagacagaggacannanaattattttaaccaataaaagttaatgcatannattaatattacagaatatttctaaat

SEQ ID NO: 52148 - DNA, 448 bp, Glycine max
  unsure (1)..(448): unsure at all n locations
tatgtacccgtagtggtccacattgngtttcgtgtttttgattctcgtttggttactttntatacccnnctgtgacgtgcttaagccattntacttaagtcgtttctcgcttaacttaaaaataaaataaatttccaccgaacgttngaattgtattatccattagcttcggttaaaataaattccgaccgttcggtcatgccgtaaccacattggaaatcanaaagaggtaaaaaataatataatantcaaaaagacatctttaggtaaaataaagcgganaatcaatcggacgttttctctttgggatntctcattcttaaccgaatngattaataactaaagtaaaactaaggctaaaatcaactcgcctagtcaagctcgtccacaaaaataggcttttgaagtttgtcatttaatntctcactaagtaaaatggagtcatttt

SEQ ID NO: 52149 - DNA, 408 bp, Glycine max
  unsure (1)..(408): unsure at all n locations
acgtgatataatagttagtncgaacaaaattagttgggcaattatcttggcatgtatcattagctataaatactgataagcattgtaataaagggcatcagaaatgtaagtcattactggaaggagtttccctccctttctcgaataaaggtgtattctctctctcttcacgtccagattcataccatgagcacgtaaccnncttcccgcctagtctctctaccgcgagccaccgtgcttacttttctgctccccgtgcaacctctaacaactggtccgacctccgccgtctccatctccatggctgaccacggaaccagaaagacaaccactgatcgcctcgaggaagccatcgttngcctctccaatagccaagcctccatcaatgatcgctacaacgacctctct

SEQ ID NO: 52150 - DNA, 399 bp, Glycine max
  unsure (1)..(399): unsure at all n locations
tgcaattccaggacactatatagctttctttatgtgggatgtcccattnttacttttcttgtctnaattgcatctttgaaaatcaaaatctaaaaagcctgggtaagttaaggatgtacctttgggataccataaacctacattggttgtgccttgaagatacttaatgctncttttaatagcagntaattatattccttatgcgtgaactagtatcttgcacataagcaaacacttagcatgatacctggtatactngcagttaggtagagaagtgattcaattatacctgtatatcttgattcatccacttatttaccattcgcatctaagtcaaggtanggctgaagcgagcccattgacacgtagagactaacgtcgtcatctgcacctttgtca

SEQ ID NO: 52151 - DNA, 373 bp, Glycine max
  unsure (1)..(373): unsure at all n locations
caacaagaatcaagccaaggctattgtgcaagcaatcaatggggcaaaacacaccanatgattatantgatggatggctcanattctcacanagggtaaatcatcactttcannattgagctttcaaactatcatgacatgtagagaagaatcaagggattctagntcacaaatgtcaagaactttattttcaaaacaatacccattcttgacatatcctataatcanagaaaacatgcnagtcgacgtcacatganatgacccaaatataaactgaaatccgcgaactaacacataacanataacacactaacaataacaaaccacaaactgcaaaccaagacactcccccatactaacacacatgtctcat

SEQ ID NO: 52152 - DNA, 133 bp, Glycine max
aactagctgacacagaacacctctgttttgacaaagaggacattatctttactataaacatactactaaggaagatgatctgatcagccatctatctattagtaactagtaccaagcacgccattattaagga

SEQ ID NO: 52153 - DNA, 462 bp, Glycine max
  unsure (1)..(462): unsure at all n locations
ataaatgagaagttctggactcattatgttacctattaactcttgggtggatccaagtgcaccgatcanttcattgaatattcatgnttgggtggcatactcacctttgtttatttctntaggaaattcatcataactaagaaaacaccaaggcacccctataacactcgatccaganaaatggataatgaagagggcgtgcangaacagatgaaggccgatctatcagcccttaaaagatcaaatggcttccatctcggaggtcatgttaaaactccagaaaaccatagaggacaaagccacgacaaccgcctccagtacggttagggaagcagagccggtgctgcaacccgctttaaatccgggccgagacaganacacggccgtgtntgatcgaaggtatagtccataagcttatccttatggcttgcctccggacttcactcctcgtgccactccgga

SEQ ID NO: 52154 - DNA, 523 bp, Glycine max
  unsure (1)..(523): unsure at all n locations
acctaatttcatatcttgcatgtacctacatncaataccaaacaacaacatcataaccataaggaccttatacgccanacacaataaanacaacttatngaatagttaaaaacaaaataataataacatgttgaagcaggaatgctctatgcaatacaaacacgggaaataaattccatcgcagaaatcatccaagttcaactaagttcgttcacaccggtcctgtgattttacttctgaatgcgaaaccaacaatggaaaaagaataatggaacgcagcggattaatacctntgggaaagatgaaaattgactagtgcagttgcgtgagatcttcctgcgaaagaagcatagaaccatctgattttgcacaaaaccaactgtgaccactcggtccacanattccgttgtgcagctggggnctcatagtctgacctcatagtctatnataactggcactntncttgagtatacaccanataaattcataagtacatgcatatcaatcgtctaacctcaaatat

SEQ ID NO: 52155 - DNA, 304 bp, Glycine max
  unsure (1)..(304): unsure at all n locations
agcttcatgatggtgctaagagagtcatcaataatgtaaggcttatcccagnattgaagagaaatttgatttctctgagtgagtttgacaaacaaggctatgtgttcanagaggagaatggagttctaaaggttctaaagtgctccataatattcatgaaagggatgcaaaagaatggcttgtattctctgattggagaagtgatgattggatcagctgttgcagtttctgtcaaaagggtgtcaaagactgaactatggcacagaaggttangacatgtgagtgagagggggttgattgaact

SEQ ID NO: 52156 - DNA, 336 bp, Glycine max
  unsure (1)..(336): unsure at all n locations
gtatgagtcatgatgtcttgatgatgaccaacagcccanaagaatgatgtccagattgagtcaacacgttcaagatccagattaatttcaagattcgtcagaagaaatcaagaagattcaagaattaagagaagtttgatttcaagattcaagagaagatgaattcaagattcaagagaagaaaccaagaagacttcacaagggaattattgaaaagaattttcanaaaacaaacagtacaatnttggttttcaaaagagtttttctcanaattttctaagttaccaaagttnttactctctggtaatcgattaccaattacctataatcgattac

SEQ ID NO: 52157 - DNA, 389 bp, Glycine max
  unsure (1)..(389): unsure at all n locations
gctatgctttctctacatattataaacagccccaccatcccaattttgcaagatcgtattcatatatcatagnggcatttcaccgagcacttgatgggcgcatgtttggacataaattgcaagagaatgggggcgatgtggcatgccccatggcttcagaatacaacatatgcctaaggccttctcatgcacattctcaacttcaaaaaaatcaagcataaaaacaacccaatactgccccacaaatataagcacattcttacaatttggagcacctaaagatgaagaaaatataccaatgggaagctaaatacatctaggattgaatacttacttgctggagtgaatagaaacaccaaacacgaaagctaaacgcgatcaaaagtggc

SEQ ID NO: 52158 - DNA, 372 bp, Glycine max
  unsure (1)..(372): unsure at all n locations
atgtcttagatctcaacgacactcttgattgcnaatttacttttcctattatcaattcccatacaaattccttagtcattctactagtatatgtagatgacatcatcctatcagggcccaatattgtcttcgtacaagctgttcagaccaaattacagtctctgttcaattgaagatccatgagcctttgaaatattctcttggcttagaaatagtcaaattcaacagaggcatctcactatcccaacgaanatatgctctatctctttnggaagatacaggtttcttggcctgcaaacctctcaatttaccaatggatcccaatctgagactcaatcttcatgatagagactctactcctgatccatcaat

SEQ ID NO: 52159 - DNA, 424 bp, Glycine max
ctcagcttatcagatgctgcattacggtatcagctcctcttattgaataacgagatgcacttcttgcattgtaaattagctgtatcagcggtgtaactgtcggcattgtgatccttcaacgttagcaagatgtttttcggtttcaccatcgactctgtcatatcagcaataattctcttttcttccttagttcactacacggcgtttggatggacaagttaagacttcgcctattcatgattatgaatcgcacagatcatcttctccgaacaaccgttccctccacgcactggtttcccacgaagcctgaacggacaaccacatttgctactcccggtgtcgttactaacgaattctgtatatctacactagtacgtaccactccttgtgacccaattaacacatatgaacttcttcctctgct

SEQ ID NO: 52160 - DNA, 255 bp, Glycine max
  unsure (1)..(255): unsure at all n locations
ataaactttgatgtaaacttttttntattgaagaaataaattatattattcatagggttaaatcatgtggcagttcactggtagtataagtggaacagaaaaaaaaaattggctacaaagcataattctcgggttgtcttcaaccttatcatgcataatgaggctgttcaagagctagtcttccaaggaacacanaggaaaaagaagagtggtgagaaggggaagaaatggctatgcatactgaagagttaatga

SEQ ID NO: 52161 - DNA, 478 bp, Glycine max
  unsure (1)..(478): unsure at all n locations
tctatggctacagtaaaaggaaatgagacttatgagagcgatcattangagaatccctagagataaccctaccgagtaatatgcgtatgatccattatgctcctcagaagggttgttcatgccatgatcagaattggaagtgttgttcatgatccttttaagtcaatttccctgcacacggatggaatgagggataagaaattaacttcaaaagcaatccaaggcaaagtttcaatgtatggagtggacaaaaccttaattaaaattcaagttccttatattcttgtcttcaagttcttaaattagataataacacgtgggtatacttttttttttctaacgtcaattagcctctatttaaaatatactnggggagatttaaaanattactcgagtatttgatataagtgggtaattaagtttttctcaatatatggngtttgattttggctctacactattttaaaaaagtggtcct

SEQ ID NO: 52162 - DNA, 412 bp, Glycine max
  unsure (1)..(412): unsure at all n locations
agcttgtaagattatggngtacccatcacatgtggtactatgtggcggtcgggcgatggtgcacaacatgtttttcacatacacaaagcgcgcataaacccaccatcccctgttgcccacctacaactgagctcacgtactcccacgtagcccatatcctcgtttctctcaacaccgggtccccatcaatccttccaagcttccacaacatccaagcaaaacaacattcaaacagcacaagctatcacagccaagcaaaacagagcagaggcagaaaactctgctcaacacatcaaccaaaatcacagcttttctcacttaaagaccacagtaacaattcccttcgtcccaattcgtaaccgttggatcgactccannattttactggaagtctctagtacataagcctaca

SEQ ID NO: 52163 - DNA, 328 bp, Glycine max
  unsure (1)..(328): unsure at all n locations
tggtcataactnttcactcggaggtcctattcacgcgtataatatatcgagacgctcgaaattgaacaacggaagctctcgagaaattaaaatggtcataacttttcactcatagatccgattaaggcgtataatatatcgagacactcgaagttgaatagtcgaagctactgagcaattcaaacggtcataactgttcactcggaggtccgattagggcacataatatatcaagacgcccgaaattgaacaacggaagctcttgagaaattcacatggtcatttcttttcactcgaaggtccgatcaggcgcattacatatagagac

SEQ ID NO: 52164 - DNA, 378 bp, Glycine max
  unsure (1)..(378): unsure at all n locations
gcatgcgagctagcacatatataagtatatcagcgtgacattgttcgtctaaatgtgacatgtttggataaattcccaataagcacggataaaagaaaataaattaaattaaatgtttttgacatattaaaattaacttatgcacatattaatttataaaatctctgtcatttaacttcttcaaaagacttttgacttgtttataaactaattntaatttatggaaaaaattaaatttattttactccttattctcttctcttacaaccgnttattgataagtttattcaaataaaacctaaatttacatcttctctgcaattctgaattagtgaatcactgattgaaatgaatntaactacacattactggttttca

SEQ ID NO: 52165 - DNA, 409 bp, Glycine max
attgcatagaatcagtcatgaggaggagttcatctaattctcactcgcttggttggaaggacacaaataagaagaagggaggatcatcaacaatcaatctcaatgttacaactcacagaactcaaaataagttcgatgaggagcttaagaaagcaaggagtgatgagattaagtgcttcaagtgtttgggaagaggtcacatagtttctcaatgttcaactaagaagactatgttacttaaggaggatagagaaataattagtgaatcttcttcaaaatctttcccatctagcgatgaagaggagcatcaagaggaaagagagttagaaggagatttgttcacgattagaaggatgttgggtagccaagcaagtgaattggatgatagtcaaagagaaaagattttcat

SEQ ID NO: 52166 - DNA, 386 bp, Glycine max
  unsure (1)..(386): unsure at all n locations
cacctgcggcatgcaagcttaacgcgacgaaagccggcgaggaagcctatatgtgcacttagcatgaaatcctgcgctaagcgcgtaatcacctcgccaagcccaggcactaccgcgctcagtgcatgctcacctcgctaagcccaaaaggtcatgcttagtgtgaggtcgcatgaattttaagctaccttaggcctataaaaggagtangaagcaaatgagaaaggcatcaagactcggagctctctattgaatacacccaaagcttgagcatctctcataggggaaaccctctctctttagccattcttccctcttcctttatccatccttcttcttcttccatctacatcagcccctaaagtgtaaaacctctcatgactatg

SEQ ID NO: 52167 - DNA, 490 bp, Glycine max
  unsure (1)..(490): unsure at all n locations
ngcatatgacagaagaggttgatattatttgatcttccatattggcccgatctagatgttagacattgtattgatgttatgcatgtggagaaaaatgtatgtaatagtgtcattgacatgtttcttaacattgaaggaaagacaaaggatgatttgaatgctcattaagatctagctgagatgggcatacatgaccatttacatctaaggtctgatggtaagaaaatatacttgcctccagcatgtcataatttgtcaagaaataagaatataagtttttgtcaatgtctgcggagtgtgaaagttccacatggataatcttcaaatattaagagccttgtgcaggtgaaagatatgaaattagttggcttaaagtcttatgatgtccatttcttgatgcaacaactcttggctgtggtgaaacgagacatcttgcctcacatagtcaggcatgtcataactcgcctgtgccatttcgtcaatgtaatat

SEQ ID NO: 52168 - DNA, 440 bp, Glycine max
  unsure (1)..(440): unsure at all n locations
agcttggagaggatgcttcattggaggaaaagaaagagggagagaaagagagaggtgggagcacgaaattgaaggaagaaaaagggagagaagttgaactttgtgttgtgtctcacaagactctcattcatcanagttacaacaagtgttacacatgcttctatttatagactaggtagcttccttgagaagctttcttgagaaaacttccttgagaagcttctttgagaaaacttccttgagaagctagagcttagctacacatacctctctaatagctaagcttacctccttgagatgagaagctagagcttagctatacacaccctataatagctaagctcacccncatgacaaaaaacatganaatacaaaanagagtccttactacaaagactactcanaatgccccgaaatacaaggctaaaaccctatactac

SEQ ID NO: 52169 - DNA, 475 bp, Glycine max
  unsure (1)..(475): unsure at all n locations
tagactaagttcagcctaccatcctcagactgatggccaatctgaacagaccattcagtcattggaggaccttntaagggtgtgtgtcttagagtagaagggaagctgagagagttttcttccattgatagagttcacttacaacaacagttttcactctaccattggcatggctccctatgaagctttgtatggtagaaggtgtaggacacctctatgttggctagagcctggagaagagctcaccttaggaactgaagtggtacagccaaccaccgagaaggtgaagttgatccaagaaaggatgaggactgttcagagtagacaaaaaagttatcaggataagaggaggaaagatttgngaattgaggttggtgatcatatattcttgagaagtcactccatggactggagtggtcgagcatggaaatcccgaaaactcacacctcacttatcggtcctttncaaattctta

SEQ ID NO: 52170 - DNA, 276 bp, Glycine max
agcttgttcacacgcggagatgtacgtcgtcttccacgcagacaacctctgtcgagactaactcgtgaagttagggggcaggcggaattacctaagtggttatccgtataaacattctttcgctatctctaagactcagcgcatgatagcatgcggagacaaacgtcgtcttctgcaccctttgtctatcgcggccaacaagcttgttcacacgcggagatttacgtcgtgttccgcgcagacaacctctgtcgagactaactcgagaagtagggg

SEQ ID NO: 52171 - DNA, 504 bp, Glycine max
  unsure (1)..(504): unsure at all n locations
ntgcatatgcggttatgaggttngattctatgtttatgctngtttgttaaaatttaattaattntcttcaaggcaattatgaggtttgattctacttgttctttggtttgtataaaatttcccttgttttatcctttgaatgtttattcccgtaactctgtcaaatagcatttgtcttttggattgagcgtaactattttccttaaagaaatntttnntattttaatcaccatttatatagctccttaagtgaagagagtattttgctcagtattggaaggtcttaaaaagtgtcaatgtctcgaacaacatctggtgtcattcaacactcttccgaatgatacttgcagtgtgtaagtatattctcttcaactctatggtttccgtgatggtattatgggtttctggtaattattcggcctanaanggaattatacntgttaaatctggctgcatttgattgaattggatagctttggattctgggacatttctcttcacact

SEQ ID NO: 52172 - DNA, 483 bp, Glycine max
  unsure (1)..(483): unsure at all n locations
agcttcaggctattcaattgcgtcatattgttgcacagnaaggcaaaggtctgtgtggtggtcagcaaaagagcataaaccacagagtctggcgacaggtgcagattattgattcatggctagttgggttaccaggttaaccaaggcatctagtttaccttcaagcttcttagtctcagctgatgaagatgaattcgtggctacttcatgcactcctctaatgacaatagcatcatttctggcactaaattgctgggagttggaagccatcttctcaattaaatatctggcttcagtaggggtcatgtctccaagggctccaccactagcagcatctatcatacttctctccatgttactgagtccttcataaaaatattggagaagaagctgctcaganatctggtgggaggacaactggcacatagnttnctaaatctctccccagattcatataagctctctcatcttnctaatatggat

SEQ ID NO: 52173 - DNA, 456 bp, Glycine max
  unsure (1)..(456): unsure at all n locations
tataagaacaaaattgcctcaatcatttctaaatatgcatgtgaattaggacacatcaacaagaatcaagccaaggctattgtgcaagcaatcaatggggcaaaacacaccaaatgattatgatgatggatggctcaaattctcacaaaggtaaactcatcactttcaaattgagctntcaaaactatcatgacatgtagagaagaatcaaggatttcaagtcacaaaatgtcaagaacttttattttcaaaacaattacccatttcttgaacatatcctataattcaaagaagaacatgcaaagtcgtacgtgcacacaaaattgacccanaatattaaactaaaaatccgatgaaactaacaacattaacaaattaacacgactaacaaattaacaaaaccaacaatactagcaaaaccaaagacactaccccctccccattacttaaacacac

SEQ ID NO: 52174 - DNA, 368 bp, Glycine max
  unsure (1)..(368): unsure at all n locations
atgcacagataccttanacctgagaactttctcttcatcaatcagcacgacgattcacttctcaaaaccattgactntggattatctgtcttctttaagccaagtatttccggatggtcttactatatattattgtgattagataaatggttttgttaacattagtctttaaggatggttntaagcaactaaaagtaaaactgttttattgagaaataaaacatttattatgttagaaatacaaaaattttggattaaaacttccaattttagttcattataattagtccttagtgctaatgttaacgatgcccttanataaatacagagaagctaccattntggtcccctaaaagttagtttatctc

SEQ ID NO: 52175 - DNA, 481 bp, Glycine max
  unsure (1)..(481): unsure at all n locations
gctttcacgcttttttctctaatcagttcaangctacacaattcatatactaaaagctaccaaatactcctatgtggcattgctagaaatcgagagcccgcaatcttctacgtgagatgtgcttaccttaccacactaaaactaatactttactgtttctaccatgtgntgtctgactnttctcaatatcctttatatttaactttaatatgggtaacttagtaattttagttaagataacaaatgatgataaagaaacaaattaattaataaataattcagaatggaataaatgttagaaaacataaaatatgatgagacaaatatttgtgaaacataattngtctttggaacttcaatgaatgtcaaattaattggaatgtaactatattggatagtagttggtagaaaattacattatatatttgaatgtcaaattacgcanatggatagaagtttgatatattctatttatatttta

SEQ ID NO: 52176 - DNA, 366 bp, Glycine max
  unsure (1)..(366): unsure at all n locations
tccaaattagtgtaccanactaccacggctccggccatgctatcttgnaaaaagtgtattaatagcttctcgtccttagagtgtgcgcccatcttgcgacagtacatcttgagatggtttttgggataagtcgtccctttatacttgtcgaagtccggtactttgaacttcggggggataacaacatcgggtactaagcaaagatccgtcttgtctgcgaacggatagtccccaaatccttccacgactctcaatcactcctcgaggagatcgagcttcctcctttcttcagtttgccggggtggtccttcctgggacaaaactattggttgtgtcgtgatgttgggctgaggcaacgtgctgtgt

SEQ ID NO: 52177 - DNA, 412 bp, Glycine max
  unsure (1)..(412): unsure at all n locations
ttatcaataaacacaagctgtgttttattcatataattagagtctatctctgttatcttagagagagtgattcaagaacaccctggctgtatcaaaggactttcacaacctttgtgtgtngccctcgccggaaagagtgattctttccttcctttcatcttcaatcttggtctttcaaaccacaattccagaatatccacttctgcccagaattatctcgtggccataactcccagtttacgcactcaaattaagtgattcttgagcctaaattgaatntcaaaatgagacctttcacctcgttntggaatcacctcatttggagccctgtagcttgagttattgtcatttctatatttctgtccagccaccacttaatcaatttgcgcattcattaagaaccacgaaaata

SEQ ID NO: 52178 - DNA, 549 bp, Glycine max
  unsure (1)..(549): unsure at all n locations
tggganattgaacccttgatgantcgntatcctctcagacgacccgctgcatgcangcttcccaacatccaagcaatgaacaccttgatcatcattttctctcagaaccaaagaaaacagggcagaggcatataactctgcccgacacaaaccagtatcacagaattgtcttacttaaatacccgagaaacattcgtgttgctcccaatggttatacgtgggatcgactcgaacattatactggaagtctctaacacatgagactacattgtgaccggtgggatctgctagataacgatcagaaaccactctggtctactcttttcacaacgagacatacgcaccattttctgctcaaagtctacatgttggtgggacatttgacaacataattctgataaagtgcagatattcgagacacacttgccctcatcaaatttgtcccattgatactacaagacaaatggttgtcattatgtgtaacaaagacaagttctgaccgagcatctcaaatctaagatctaaaacgctcaattagtggatttcacg

SEQ ID NO: 52179 - DNA, 425 bp, Glycine max
  unsure (1)..(425): unsure at all n locations
ctgatgatagtgatgaggtacatgccctatggcagagcttttatgagcctatgttgttnaagagaagttcaagtccatagccatcaaagtctgaatagagtatgatgaactaagggatgtctatatggccaccgatgaatccttggaatgagaaaccaagatagcccgaaaggaataacacgatcaaagctaagttttgaggggctttatagggcatcaatagtgagctcaatctccgaagaggtgaaaggaatcatcatgggtcaaaggcatgatcttgaatgacgagctaaatgtttccttatgtcgataagaaatttgtcctaacagctaatcgagactgaatggaatatgtgggccatcatcgataagtgcatagagaagctaaatcgagcggcgactcacgatgcaatgctagaggatga

SEQ ID NO: 52180 - DNA, 557 bp, Glycine max
  unsure (1)..(557): unsure at all n locations
aattgaatcctcgaatgacccgntatactnacagacgacccgccgcatgcaagcttctggtgggacatcttgactngctntcctatctgacattcaccacagattcttgcttcttctattntcagaatgggaatgcctctaacagcacttttgcaaggaatttcttatgcctttaagtgcagatgtcaaacctttgatgccatattctgacttcatcttctttggaggatagacatgtggaggagtagctggtttcttggggtgccataggtaacaattggcctttgatctgctgcccttcattagaacttcactcttctcatttgtcaccaagcattctgactttgtgaaagttacattgaatccttcatcacacnagtgactgatgctgatcaagttgcagtcagtcccttcaccagcagtacttttgtcagactangcagtncatcatgagctagctntcccattcccaatgaccttncttttagagccatctcanatgtacataactagtggagcaggggtcnaatgtcagcangaattcttntgactctgtn

SEQ ID NO: 52181 - DNA, 423 bp, Glycine max
  unsure (1)..(423): unsure at all n locations
tgtcgctggagctgacccatcaactgccctaactctntcatactggtgactcttangctcctgaccttgacttgatagaacctatntttaagcgaaggcacctgactagatcccatgttttactaaagtgaaacaaaacccagtgcgaatcaagactctgacatctatcatgggtggattggatgaatgcatgaagaaatgcatatgacacagtatgcatttatgaatatgggagcccgggaaatngtccccttcttagatacaacattcaggcagcttggcgcccgacgtatgcatttaagaaggcaacacagaccctccatcggtttggcaaagtgaggggatcaagatgcaacccgtgcatgatgcanatgcaaataaaaagcacaacacggnngatgtacatagtatgacaatattcac

SEQ ID NO: 52182 - DNA, 461 bp, Glycine max
  unsure (1)..(461): unsure at all n locations
acccacgttatcaaatgttatgttacaactcttcttcgcccagaaagcacagtgctcaatgtccaccggaaggtggcatgccttaccaaaaaccaacatatagggagacatcaccaaacgtgttcgatacgacgtcctatgagtcatagagcatcttcaaatagctagctctaatcctttctattaagctgcactactttctgcaacacttgcttaatctctntattaaaaaactctatntgcctattagttttgggatgataagttgtagcaactctatgcacaaccacatacttttggagcaaaaattccaaggttatgttatagaaatgacttgtcactgataatggctctaggcacaccacacctacaaaaaatgttagatctcacanaatcccatataactntagaaatcattagtctagtggccttagccaacccatctaganacataatcaata

SEQ ID NO: 52183 - DNA, 459 bp, Glycine max
  unsure (1)..(459): unsure at all n locations
gcccttaccatcagaatcttgacttgttcaacataattgtttngaactgggagaggattattatccacttgcataggctcttcttcaaacttcaacattccttcatcaatagtactttcgtatcatatctctgaaaggaaaacaactatgagtccaatgtccatagacatagttcaaattgcaatatctattatcctttctttgctcaaatgtcgtagatttatgatcatcactaagtgcaatttgtttatcctttaattatacatcacacagtttatcagacttattatcgtcgcaactcatatttcgagttacaaagtacttctcttctggntttaacaacagacaaacgtgaggaggaccatatcgtaactttgctaaataaactggatccgtctaattatcgaaatctatgtctggaagattacgtaatatcagactcatcgtagcctctgatat

SEQ ID NO: 52184 - DNA, 323 bp, Glycine max
  unsure (1)..(323): unsure at all n locations
agcttctggtgactgggaattacgttattcttttgntttccagatcggttgcttcgccaagtatgtgtatatgtgtatatgtgtattatattcgntgttctggttgttgtttgtattttgttctgtgcagaagaaaaaagaagaagtagagatgagagtcgtcatcacggaaagggcaggacggacgaaatcagtgtcctatctttgctttcctcttatctccaatgagaggtaagtaaagagggtcaactgtcataccctaatttcgtccggngattattacttgatgacatgcaacctttggttagccgctttgagatact

SEQ ID NO: 52185 - DNA, 500 bp, Glycine max
  unsure (1)..(500): unsure at all n locations
actctagcttccatcaacctagcctatttatagccctattgatattcctttcatttatgtgtagaccatactcttcttttctatgttcatgtgcctcaacatgagttaaatttggatgaacttataacttactggccaacattnttgcaacccatttcataatagcttgcttattttttaagaccttaccacaaatatgctcctccacaaaggttttaatttgaaatctttntgtaactttggtccatgcataataactctctcttaagggtgtccaaagtatgatttggtttgattnttaaataaaaaaaatcatttgaccaaaggcaaaataaaggtacaattcgatttaaatataacattanttttaatctattatcataatgcanaatctattgactaaacttacgtaattattatgctatattatttntaaaataaaaattatttttcattcaaatttgttaacatatttttgtgaaaatactatttgtacttta

SEQ ID NO: 52186 - DNA, 436 bp, Glycine max
  unsure (1)..(436): unsure at all n locations
agcttctncttcttttccctataataggggttatgttgtgaagaacaaaaatgttcaaccctcctggtatctgagaatcacttaaaattagtgagaaaaattgtttccatgaagaaaatctgagccgaggcgccttcgtaacgctttcgagacatttccgtgagtgatttcgcgaagattttccgncgttctttgttccgtctttgtcgntcttcggtcttcaaccggtaagttcccgaaatcaaacgtttcaattcattctatgtacccttagtggtcctcatttgtttcgccgattnttaatttatttcatttacttttcgcacccctttggacgtgctctaagtaattatataagtcattttctcgcctaatcaaaagatacgataaatttccatcgattattcgaatatgaacatcttttaatttttgtaaa

SEQ ID NO: 52187 - DNA, 378 bp, Glycine max
  unsure (1)..(378): unsure at all n locations
ctcagcttagtaatgccantaaagttgagattgcaatttaaattctttgtnatcttacttgcactggtgcagaaaggaagtggctaaacttttagatgagattcgggaccacgggcatcatgcaaatcatacatggctagaatcagttcgcaggcatctgaaaaaaacattacttgatggaattatggaagcatcaaataaatcaaaactactatcctttctctctcatccagtccctgaatgctcttgttcacgtgattcctttgaagtatcaaagaattcttctagccctcttacttcccaattagtgacatctcttggtgttgctcaccggtgtcctgcatggatggacactggtccaatttctcaatcaaaaga

SEQ ID NO: 52188 - DNA, 390 bp, Glycine max
  unsure (1)..(390): unsure at all n locations
agctngtagagtatgaatcttctntattctttcttctanggaccgnatctgttcggtgatatccatgtctcctgttgagttgatactgtgagcagaacaaatgcatgtttcttcaattgacaaatgaacttgtataacataatgtaattacttggtaaaaactcattntttagtcatatattgataaaaaaatggagacaacaaggttagtgttggcgtaaaggttttgtgcatgattttcctccgaagctttggcttctttggaagcattctcctgtccacttacagctgtagcttttccatgtttgtgaggccaattaaatgttgaatagtgaaatctattgctattcgagtcaaacatgtgcagaaagactcacttatattaaacaa

SEQ ID NO: 52189 - DNA, 522 bp, Glycine max
ctattacgagacacttgaaactcagcttctcaggaggtgagcttagttattagagtgtgtgtgtgtttctaagctctagtttctcaaggaagttatctcaacgaagtttcttaaggaagttttctcaagacagcttctaaaggaagctacctagtctataaatagaagcatgtgtaacacttgttgtaactttgatgaatgggagtcttgtgagacacaactcagagttcaacttctctccctttttcttccttcaattcgagctcccccctgtctctttctctccctctttcttttcctccattgaagcatcctctccaagcttcttatccaaggctcatcttggtggtgaagctccttcttccatggcttattcccgagtggatggcacctcctctcacctcttctcctttgtctgtcgctgcatctccatgttggaaaatcaccattaaaggacctcattgaagctcaagatccagccttcatagaagcctcacaagcaagcttccatcaagtggtatc

SEQ ID NO: 52190 - DNA, 378 bp, Glycine max
  unsure (1)..(378): unsure at all n locations
agcttctagttggcattgattcttggtgtattcttttaacaccttcatgtaccgctcaactggatacatccaccgtaaaaaaaaggaccacataaccaaatctccctaacaagatgaacaattaagtgaaccattatgttaaaaaatgatggaggaaaatacatctctaattgacaaaggacaatgacagcctcattctccanatcatctaattgtcgagggttgatgactntgctatagatagtattaaaaacaaagcacanatgagttatggcaaccctaacgttgttaggcaggataccccgcatcgctacagccaatagttggtgcattaagacgtgacaatcacaagactttcaagccgaccaattgagatca

SEQ ID NO: 52191 - DNA, 389 bp, Glycine max
  unsure (1)..(389): unsure at all n locations
ctcagctttatctnttctttatcttctaattgtatctntaaatatcttatctntacttctaattntatctttaaatatcttatcttttctttaccttatcttctatctttatttatcttttattttaaattcttatctcttgcttttaaattgggtttgcattaatctaagtacaaacaaagtccctgtggattcgacactcggactttcgaanactttattacttgtgacgatttggtacacttgccaatgagttaacactaacagaatcatggcagcatcttcatcctctatcttaacatctatatctcttaattccatcaaaatagaattcaattcatcaagatgatctttaagagatgtaccttctttcatgtgtagaccaaaca

SEQ ID NO: 52192 - DNA, 301 bp, Glycine max
  unsure (1)..(301): unsure at all n locations
agcttctacttatgtggcttgtgcgggcttcttcactttcttgcctcaaccgcgagcnttgaccaccgctctttctttccgcgatgcttctcttcatatccgcctgagtgggtttatagcctaaaccatacttcccacgatttcctttggcatttatcaagctagttatgccgccgttgtctttgcctaaacccattccgggtttgtaaccgttccccaacatcactcgggccatcattactgctgcatcggacaggcaagcttgcccagagaaggagtccacggaggaaatgcttaccac

SEQ ID NO: 52193 - DNA, 471 bp, Glycine max
  unsure (1)..(471): unsure at all n locations
ggtgcanatcaagtcactcncgcattntatctctagcatgtattgtatgttggtctcgtcctttgtcacgggaagccggaaggtccatatcaccttcttaattgtacacatggggcactgcgcccccaaatgcgcaagtaagaagagataattttccgagctctcgtgtccgtaaaatgcattcatatcatgcatcgcataagcatctcttcataacatcataatggacatatcctgcatttgtccgttatcatattccggcctcacattntgcatgagtcatggcatcatcatgcatatgcgttcaacaaactnnttgatctgcaaaattgcataccatntgttttcatgtttgctcatccttgcattttcctctacaaaacanaaacaaanaagggggaagcgtgaaacttcacactacattcttagtntcatgttgtaggcaccacgaagccaaccatgtgggatcat

SEQ ID NO: 52194 - DNA, 415 bp, Glycine max
  unsure (1)..(415): unsure at all n locations
agcttagagcgtggtgtataatagcattgttatatcttgtcaatattttgtctggtttggatatataaatatatggttgatatagtaggctaattattgccaccggtaagaaatatatgcttaatgcttgctttgtttttactgtctatnttgtgtggacagcgtatctctgaaccaaacagacaagtattntgtgttgaattgtttttttgtggttttgtcattccaagcatgaaccttggtaattctaaatcctcttacaatattctcctgttgctttatatggcanatactaatgatatttttttttttttactctatgtttccacacactataacagacaggtaaattattcttggcgatataaattactctaccattctttntctaacaaaatactaaatctcttgaaca

SEQ ID NO: 52195 - DNA, 466 bp, Glycine max
  unsure (1)..(466): unsure at all n locations
ctataaaactcagcttagaaggctcaagacctggctctgtgctttattttnttacggaaataatatatacaaatggtggggcagttggacaaaaccaacattatttcacacgagatttctaggtcttaccacctcttttatttagcttatacagctctataaccacggagagacatgtgacaaatctgattcaggagggttatcgagtaaaatgaacatatttcataggtgaaactcaatttctcatttgataatctcagaaggaaatagacatagacatagatcgaccacatgcaaaccattgttctcaccaagagaagcctgtgttcttgacaatacaggctgaatccataaagtgagaaaacaaatgaattacaggcatagattggaaatttataagcaatatgaagacaatatgagataacatatatgggatatctatgaagggttaacagataaaactatg

SEQ ID NO: 52196 - DNA, 445 bp, Glycine max
  unsure (1)..(445): unsure at all n locations
ctcagcttgcttgagcttcatggagaatgtataaaagaattgttatacgngagggagagagagagctgtctgaaatagtgtggggctgagtgaagagagagaaaagctttttggttttaaataaaagggttttctctttttctattattttatttaagcaatgccacatgtctccatttgagtggagcaaaaagggcccactttccctttttgactgtgacccatactcagtcacaaaagtgaggaaaatctgacctttgaaacgctaaaatcctgcctcggtttgcgtgctgtttctctggttccagttcctcgtgtttctctgcgtctgtcagggccagttttcgaaagtacgcaatatatatatatcaaaacgctcagaataaaaccccgagcgtggatcagaggtttggttcgtaatatctaagtcgcacgcaaacgatga

SEQ ID NO: 52197 - DNA, 202 bp, Glycine max
  unsure (1)..(202): unsure at all n locations
ctttttaacaacttgcaagaccttgtttgatgaaaggccataatcattcaacatgaaacaatttgagagaaactcatagctatcagaactgaaattgggcatgctaactttagatatataaatntgtatatctcgggactcacttcatcagctaatcactttccagctccatcaatcttaataaatgtcttaatggaagtat

SEQ ID NO: 52198 - DNA, 380 bp, Glycine max
  unsure (1)..(380): unsure at all n locations
agctcgctcaggcgagcaaggttgcttcctccattagcaacagtcttctggaggaatcttctggagggcccaagtgggcctggttgctatttgcacccccattnttactaaatacacccccttgcccttattttggtgattctnttttcgtaaagttacggaaacttacggatttcgcaacgatacttgttttctttccgtaatgttacggaacctagcggattacataatcatccccttttttgacttacggaatgttacggaacctcactaattgtgcaacgatgcttccttttgatttccggtgtgtcacggaaccttacaaattgcctaatgatgggtgccaagcacctcaaaaatgaccatatacaagttacatg

SEQ ID NO: 52199 - DNA, 565 bp, Glycine max
  unsure (1)..(565): unsure at all n locations
nttgacccttttgancccgtgatcttcagtcacctgcggcatgcaagcttgcaaaccanatgctcaccattgctatatgaganaccttcangttgtttcatataaacctcctcctctaaatcaccattaagaaaggttgttttcacatccatttgttgcaactcaaggtcaaaatgagcaactaatgctaagataatacgaagagaatatttcttagatacaacagaanaagtatttgtgtagtcaattccttctttttgagtaaatcccttagcaacgagtcttgccttgtatctctcaatgtttcctaatgaatcctttntggtcttaaagacccatttacaaccaatggctttgccccattaggcaactctacaaggtttcaaactctattattctgcatggaattcatctcatccttcacggcatcataccataaatntgactctttacaactcatggctttgataaaaaatntgggatcatnntttagctcaatnattatagtagaatttggaanatatacantataatcactaggaatgggctgatttctactctagtn

SEQ ID NO: 52200 - DNA, 354 bp, Glycine max
  unsure (1)..(354): unsure at all n locations
agtggaactaaactggagtgtacacagctttgataataatcttngcatcaatctctgaatattataatgaaatctataaatgacgacatgttgaaggccatgattgtgcatacacaagcctcttgaccaaaaagctcaccttgaattataattgtatcatttgcaccatttgtgagctgaatgaatttatcaataattgaaccctgaacctgaaagattatctccatataccttgtttagattctaagagagcatatggttcaaggcaaatttaccccagatatgggggaatgaaactaattgtgatgcaaagaaagagagaaagcatcagcactcacaacacatatagttgtg

SEQ ID NO: 52201 - DNA, 496 bp, Glycine max
  unsure (1)..(496): unsure at all n locations
gcttcttagacttgatcacccttcctacactcgttgtangtgtaacctccaagaacacatgatcacccatttctaactctagcggtctncatcgcttatccatataagacttctnacctacttgtcatgctngcatccttttctgaattaagttgatcttctctatagttggttgtaaggactctagccccacaaccatgttcacaccatcttgataccaacaaagagatgtcctacacctcctatctagcatgattgttgtangtgaattccacaacaggtagaacctcttccccactcccaaggtgatcaaagacacaagccctcaacanatcctctaatgataggatcttcctcttggactgcacatncgttgatcgaggccgtacccgaatcanataaaaattaanaatgtagtatctaggaagtgatcctangtcatctcccaacgagcaatggtcaatcaaacattcataacagatagtaataaaatagt

SEQ ID NO: 52202 - DNA, 445 bp, Glycine max
  unsure (1)..(445): unsure at all n locations
ntcgtaggtgaaatcaggtgcatccatttcccgtagagtctctctgacggngtggatgttgtgccatgttctcagaatgttcaaaatcagaatgttcaaaactataatgctcaaaatcaccaataacagaatgctcaaaaggtactaaatgatgtctaactaatctatgaaatgtcatatctatcttangatcaaagggttgtaagtcagatggattgcctctagtcatacactatattcaacatgcacaactagttgccttcttatgcaagtaacagtgtaggtttgaactacagctaccctcanatgatatccaaatgactngaaattntgtgagcaaccttataaaatgatgagaagatagcacanaanatttcaaacgaaaattcaaagtctaactatataagccaaaatgataagttaagaaaaataagagaataatact

SEQ ID NO: 52203 - DNA, 365 bp, Glycine max
  unsure (1)..(365): unsure at all n locations
agcttgagatgaggaagtgttgagggtgatatcttctgcttttattngtgaccacagagtggtacctggagatatgtcgcggnggtcaggagaccttgggaacgtcaggtggggtgctattgcccaaaaccaagcttgaccaatcccgacccaacccgggcataatcagtcagtgagaacctgtgatgtacctaagcaggcgagctcctggcagtcaacatataaaaggaacacataccacaaagcaatgaggcttgtggtggctggccagctgtgaaacttgattgatatgtgagatatggtctctggtaatcgattaccaagggtgggtaatcgattacaatgcttaaaaatgaagacagggg

SEQ ID NO: 52204 - DNA, 460 bp, Glycine max
  unsure (1)..(460): unsure at all n locations
aagcatcaaaccaactgttgttcattgtttcaagtttcatttaaaaataaaaaataaaaaattgactaatgtgactgataaattatagcttcttaaacttatttaaaattttcgtaaatttaaggacttacagaacagcactatataagcagagaaagtaaaaagcaaacatggatatgttgcatacctgcagcaatgagtacaatagttgatgttggaaaggcgttggttgggcaaatgaaacattcagtttcatcttgggtaccattcttccatttacatttctggccttgtgcttcacactgattacagttgggttttgaccatttcaagatagagtntatgatctcctcaccatccaaccactccacggacaagacatcttccaccttggtgcaagatatcaattcaggatcaatccatggaaggtaagatagtcgccaaatcggcacgaaattga

SEQ ID NO: 52205 - DNA, 325 bp, Glycine max
ttatctgagatgagcgcacattctgtcaatacatatctccctttgcttaagggatcacgattctctcttgcctctgcagcatattgacttctggcgttaaagctggaccgttcattatattctctctcaatttaattaccatgctacagctgagtctgaaattcattaattattgttatctctctcaaaatattatctttctttagtcaaaagtggaaaatcatttgtgactctatcttgattataaaacattgagtgtctatgcatactacttatattattctgagtcaaacaaaatagaattctcaattctctattatatctg

SEQ ID NO: 52206 - DNA, 392 bp, Glycine max
ctgatagttaaccctgtctgttcaatgggtgaaaccagttcttaattcttattttctgctagggatgcgcacgactgcgatcagtatttctttaaagcctacggctaattagaagaacccatgatccgtattctaaatcttgcaaagatatcttattgcaatttatacaaatgagacgatgcgtaaacagagtagccgtcaagcttagagaatatacattatgattcagaatcataacatgaacttgcagcgatggaagcatgaatgccatggaacataacgtgctattaataatgacattaaactcatcatgtactaagcgttcaactttttctttatatgcagcaggagaatggtcgttcattacctatactcagagagtgagatgtgaa

SEQ ID NO: 52207 - DNA, 305 bp, Glycine max
gatcttttaaggccgataggtcggccttcatctgttcttgcactccttcttcattatccatttttctggattgagtgatataggggtgcctttgcgctttcttagttatggtgagttccctacagaaacaaacaatggtgagtatgcctccaaaacatgaatatgctaatgaatgatcaaagcacttggatccacctcaaggtcctttttagataacgtgatgagtttcagaacttctcattttataaaaaagaacaaagcttttatctagccaagatcatacaaaagtgttacaacagaaccta

SEQ ID NO: 52208 - DNA, 344 bp, Glycine max
  unsure (1)..(344): unsure at all n locations
attaagagaaaattaaagcaacattgtcgttctctaccaataataaaggaggagagattntcttgaaatgaaaacattcaaacaatactttatcagctgttcgaaggagaagattttgtgagaaggagaaaatcaaaatcacaaatctttgatgaaaaattaaaaaccctggattacccactaccacatcaacaacatgtgtaatgcgtcggagatggtgagaagacaagtcaacgagaaggagaagaaggaaagcattcaatatcagttgtgaaaaggagaacatcataaacgaaaatcagagataaatcaaaaaaaaattcttaccaattatcgtagtagta

SEQ ID NO: 52209 - DNA, 396 bp, Glycine max
  unsure (1)..(396): unsure at all n locations
tgcaagctcgatcttaaagaaatcttgaagcaagactttgtttgttgaaaaaatcttgtattaatcttgaagtaatgcttatcctttgaagtagccttgtttgattcttctttagcatcatcaaaatcatgtatgcatacattcatattcttcccctttttgatgatgacaatcattatcaagtgatttcttttcgatatcatcaaagcatgcatgattcacattctcccactttntgatgatatcaagcaaattctttntgacatcatcaaaatctgcatgattttattctcccnctttgatgatgacaaccacctgtatgataggagcagcaacaacaaaaaatatctatctttatagntnactcccccttgattctgaatgattacttatatg

SEQ ID NO: 52210 - DNA, 459 bp, Glycine max
  unsure (1)..(459): unsure at all n locations
attgtctcggatataaaattccacatagactaataatttcttagtctatgcaatccttntacttttaaaatttgatgtgattgtgtgcttaattctctaacccattaaaagagttagaaaacatagaaaaccacaatatcatcttttttttatcattatttaaaagtactaacatatttcgatacatgtgaaaattttaaaagattatagggtatacactatttatttaaaatataatctttatattacaatacaaacatatcaatatttcatactcgttcaatcaatatgaatataatagaaactataatgtgtctaattattattatatatatcattattatataacaataacatctacaatatttgtatatattactattagactcaaataaaaatcaaaatctcaactatattattcgtgagagaatctttaactaaaattctatgatgtactta

SEQ ID NO: 52211 - DNA, 404 bp, Glycine max
  unsure (1)..(404): unsure at all n locations
agctntgagccanaatccttatctaccatatttcttgacccanggtgagaatgtcaatccttaccctcggaagcaaaaaaagaatagaggggaaatttccaatcaaagaaaaagagaaggaaaatttccaatgaaagcaaaaaaagaaaagaaggaaaattccccaatcaaagagtgggagaaagcaaaaaaagaaaagaaggaaaattccccaatcaaagagtgggagaaagcaaaaagaaaagaaaggaaaattcccaatcaaagaatgagagaaagntaaaaaggaagaagaagaaggaaagaaagctcctgatcagggatcgaaggaanaacagaagaaatgtgcagagaggtctttggaccgcgacatatatgaacaatacagaattgcaccaaatgac

SEQ ID NO: 52212 - DNA, 402 bp, Glycine max
  unsure (1)..(402): unsure at all n locations
nnggacttcctgtgtttgggaacctctccttcctcaggtgttcccaaacccaatcacctggttcaagcacgactttctttctgcttttgttggcttgccttgcatagctcgcattnttcttttcaatttgaaccttcacttgctcatgcaacttcttcacatactcagctttagcctgtgcatccttatgcttaaacatagcaatgttaggcataggcaacanatcaagaggagtcaaaggattaaatccatacactatctcaaatggtgaacaattagttgtgctatggacagcccgattataagcaaactcaacatgaggcaaacaggcttcccaagatntaagatttttctttaaaacagtcctaagcagtgtgcctaaagtcctattgactacctcag

SEQ ID NO: 52213 - DNA, 498 bp, Glycine max
  unsure (1)..(498): unsure at all n locations
agcttgaataaatatattattcaattttaatattatattttcataaaaaagaaaaaaaaagcacatcatcttaatgctttataaacaaatattaaataaataaaatgcatgaattaatattcactatcttaaaaacatttaatatttttatttaataagattaattaaaaaaatgtaactataagtagatntagaattatgttttattagaattatatacaaatccttccaatgaattagaatcataatggcaagagaccaactttngttattttttcttcaaaataataaaatataaaaaattattcaaattatttaaataacatttattgtatttaaaattaanaatngattcaccagttaacccgttattccacagacccacttaacctangagtngcatacatannatattgatccaacgtgtcatatttatatatttgaagaaatatactcatattanaaaatttaattatatctacacttgtgtattttata

SEQ ID NO: 52214 - DNA, 494 bp, Glycine max
  unsure (1)..(494): unsure at all n locations
nggaatatcaagttagaccaaagggttggccaaatgtcaattcctaaataaatgcctgcataaggatgtagccttgtttttacacgctgtcttcaagtacgttctgttttttgatagacagaaattaatatttgtccagaaaatttataggcagtatcgaatcgcagtgcatgtctagatctgcgtcagttttcttccaaaatcacctattcttcttctcccactttaaccccaaaaaaattattgtcagtttccaatttttacatcaactactcatgttttagtctctgagctctaggtgcaaccaacacgcagtagatcatatcnagatttgatgcttcaaccttttacttagtgtgtttcaataatgaatagctaccagagttcattcggactcctaanatcatagtgaaactttggaaagtggaagaactacttattattttaggttcacgtgaaatagattgattctgaaaactgatctatctgacatg

SEQ ID NO: 52215 - DNA, 259 bp, Glycine max
agcttgcatcagtcgccctttaatattatggtgtggcccacaaactgataaaaggaaactactggccccttaaccgggagcgcgagtctcggttaagcatttaagggcagaggaccttaaattatcttaaggtgtggatatggagcccactgaaagtgaagacgcgtagccctctaaaggcgagggcgtgtagccctctgaagttcaggacgtgtcgccttttgaaggcgagggagtgtagtcctatgatggcgaggac

SEQ ID NO: 52216 - DNA, 400 bp, Glycine max
  unsure (1)..(400): unsure at all n locations
tccactgcccanagtggacanacttccagataacgcagattctcccactgatgttccctacgacgtcgttcagtatctcaaaaaagcctacgacgatttggaagaacccttgacccgttttctcgaatcttccaaagttgattggctcttctacgacttaattcccttctgggcaggtactgtggcttctaaacttggtataaagagcgccttttacagcatttgtactccaccgtgtatgggcttccttggtcctccttcagttctcatgggtgaagatccgtaccggacaaaactcaaagatttcaccgttactccgccgtggatctctttttcgactaccgtggcatatcgatacttcgagatgatgagaaactctgacgccgtctcttgatatgac

SEQ ID NO: 52217 - DNA, 277 bp, Glycine max
  unsure (1)..(277): unsure at all n locations
agcttccattgttcaatattgggcgtctattatattatgtgcgtgagtcggacctctgagaganaagctatgaccatttgaatcgctcaatagctttcactatcaatttcgagcgtctcgatatattatacgcctgaatcggacctccgagtgaaaaggaatgaccatttgaatttctcaagagctctcgttgttcaatttcgagcgtctcgatattctatgtgcctgaatcggacctccgagtaaaagtcatgaccattagaatatctcgagagct

SEQ ID NO: 52218 - DNA, 460 bp, Glycine max
  unsure (1)..(460): unsure at all n locations
tctggtgggacatcttgacttgctttccaatctgacattctctcacagattctgccttcttctattttcagattgtgaatgcctctaacagcacctttgtcaatgattttcttcatacctcttaagtgcagatgtccaaatctttgatgccatattttgacttcatcttctttggagaatagacatgtggaggagtaactggtttcttgaggtgtccataggtaacagttgtcctttgatctgctgcccttcattagaacttcactcttctcatttgtcaccaagcattctgactttgtgaagtttacattgaatccttcatcacacaactgactgatgctgatcaagtttgcagtcagtcccttcaccagcagtacttttgtcagactaggaagtncatcatggactagctnttccattccagtgatcttttctttagagccatctccaatatgtacat

SEQ ID NO: 52219 - DNA, 432 bp, Glycine max
  unsure (1)..(432): unsure at all n locations
tatgcctcanatctcaatttataccaactgctaaaggaatttctcgtgaatatttggtcatcctaatagaatcacttgtgtttggcttatgcttctatatatatgaacagctgggtgaataatacaagaatgtttaatcatcctaattagaaatcgatctctcccagaatccatcacccaaattattttccttaatatagggttcaaaacattcttaaaacctcttcgacaagcaaaacaccggttagaaatcaagaacctagcttgatagaattcaaggtcagaaaagaaggctgggagaaaatggggattccctgaattctgaatcccgatggtattgtttttctctattagctagatctgaatatatcagcaaanagagattaagcagacaaataggaagtaagaatccatgatgaaataatatatagt

SEQ ID NO: 52220 - DNA, 119 bp, Glycine max
cttatgttaatactcaacaacctttttgatggatgggacctaatgagatcaagtttggcattgtaatgcttggtaaaatgctttcgatcttgaagatgatgtgctacccgtccgatttt

SEQ ID NO: 52221 - DNA, 466 bp, Glycine max
  unsure (1)..(466): unsure at all n locations
gagaagaganaaatgaaggattgaagatatacaagtagtggagatgtctcctccacctctagaacctcagaatcactcacagactcatttgatgctctaaggatggcctcctcttcatgctcagttctctggcagtcttcgcacagcaaaaagctctcaaaaatctctagaacttgtgtagaagcaagcttcatgatgaatcaagattgattcacagagttatgatgataactaagatgatgacaaaaaagctcaaaagtcaagaacacttcatgttaacaaagatgatgacttcaagaatcaaagaatgagttcaagattgaatcaagaacacttcaaggatcaaaaggaaatttgattcaagaatcaagttcaagattcagttccaagatcaagatcaagatcaagactcaagaatcacgatcaagagaagatcaatcagatagttttaaacgttttctaaact

SEQ ID NO: 52222 - DNA, 391 bp, Glycine max
  unsure (1)..(391): unsure at all n locations
ctgaagttgactattaagtgggttatcatgattgataaggtaaatatatgagntttacaatataaaaaaattaatataataattatgctaataaaaaaaataaatgttattcatatttacttaaataagtcaaccgtgttaggcataaaagacttaccaagtggactaggcttgacttttttttttaaccatatactctttaataaaaatatgggtatagtttatttgctaaaaagaaaatcaagcctgacttgagcatgatataggttaagccataagcctgttggatggacagacttattntcatccttaattgtgagatagtgtgttaattaacctccaaaagataaataanaagacaatattaaaaatatctaattgaaagaatatg

SEQ ID NO: 52223 - DNA, 449 bp, Glycine max
  unsure (1)..(449): unsure at all n locations
tcgcactagcatctntgtgaatcaactaaatgacacacccgaaagttcaacttatgctcatgcaccaactntaacggctactcagtgtcaacaattgatctctttcttaaccaatcacatgaaaaccgaaaacaccattgatgtagtagccacaaatgttacaggtatctgtatgaatgttgatnttaataatgattaccgcactaggattattactctatggatacttctcacattngntgtctcaaagagctgtttgattcatatactaccatttntaactctcatgttcttctgcctaattccacgaaagttaaagtagaaggaatatacagcattaagattaatgaagccatctttcttcatacatgtntgttcatacctacattcaaattaatcttttatcccttgcaccctgataatgctatcttttcgattacaatggacct

SEQ ID NO: 52224 - DNA, 487 bp, Glycine max
  unsure (1)..(487): unsure at all n locations
catgcaactctatttatttttttatcaataaatattagtttattataatattaattatattaatagaaaaaaaaattaaattcataatctttcactctttccattntcctttaaccatctaatccacattatatcccaataatcaatctaatccaccagttgcaagtataattaaattctaaatcttaataaaagcaatcactcatatatatatatatatatatatatatgcagactagtgaagctgtgcttatgtgaatatgagcaaagatttcactaatagaaaaaatgtacaataatttttcaaagagataaaaggagttcttgtacctttttcgcaactatggacttcagttctgccatctgagcataagcacctcgatggcttagtggctggatcgaatatgcaatggccattatactcctcgcacactgcacattcctgagctctcatncaatcaagcacgaatcctttcttcatagcatc

SEQ ID NO: 52225 - DNA, 514 bp, Glycine max
  unsure (1)..(514): unsure at all n locations
tagaganacaggtgacacctcctaactcatcgagcaactcatcgatagtaggaatgggaaaacgagcctgtatagttatggcattcaaagcgcggtagtctatgcaaaatcgccatgtcccatcatgcttcttgaccaagagcatcggagaagaaaaagggttggtgcttggttggatcaggcccttctgcagcatcaattcaacttggagctcaatttcacacttctgaaagtgtgggtagcgatacggacagacatttacatagttggattggggaataaggtgtatatggtggtctgtgtctcgtgccggtggtaaggtgtcagcctgagcaaacaggaagtggaacttggcgaagaggtctctaatggctaaggggagggattcagtgnggtcagggttgtcgacaaggatggagatatggcagtaaatgccagccccttgtgtctgagatagtcgacggaattgcgacgggggtaacacattcatggtggatnnncatttccttacgag

SEQ ID NO: 52226 - DNA, 310 bp, Glycine max
  unsure (1)..(310): unsure at all n locations
aacatctgtcaacaatatctttcatagtgaaggatatcttctctgcccccttgatgcatttctcctcttatctgtctaataaagattctgtttctgttaaagaaaagcctgccaataccctcataggagacatgaatgatntcctcgtgtgtcagataactcggttgatcttaaatttatggaattcgtgcagtgattatgaaatgttaattaatatttcttcatgcaatggggcgcactntccttcttgacttttttttttaantttntataatgagaattaccttgctataataacatcaaactgatt

SEQ ID NO: 52227 - DNA, 365 bp, Glycine max
tgcatgggatctgaagccatctagaatcgatcctacgagttatatattcaatttgttaatatttcttaagtgacaattcaggatagaagattaacaaaatccattctgatttatgtggcaagagtagtttctcacctagtacatactctgtcagtagctgcccaaggggtatatgtacaagaggatgtggtggctctccctcctttggcggaatgacatatgggtaggaaacctgataaaaccaacgtagatagttagggatacaagcccaaggacccctaagtgacacaaaatctctagtggaataacatgttggtgctatggcgtccctaaataatgacgtggttaatagtaatagaataaat

SEQ ID NO: 52228 - DNA, 237 bp, Glycine max
aaactatgttcaaaattcgtcctttaggcttttggaccaacaatatcgttagatgcatcatcttcttataatcgaatagcatgcgaactactaataactcttttctatcggacacatatttctcataggaattacgaccaccttgcactaaatatcctctcatcataatctacagccctccactatctctcatactcaatcgacctccacttcttcctcattaacccaccaccaccc

SEQ ID NO: 52229 - DNA, 382 bp, Glycine max
  unsure (1)..(382): unsure at all n locations
agcttcacatggagctacatcttngatgattgtatatatggttccagaaaccccaattgcaaatcanactacttcaacatagcctttggtgcagcttttgtctacttttatccaagttatccatggaatacttttgaaatttttctatttttggtcttatattgatggcatttggtgcgctgatgatgagtttctgaagagagaagtgctatctttctttaaaaatctttttcaatcctcacatcaatgcaaacctggtagtctacaattgatttccattcctcaagtagaccanaatctgtatgaattataactatctcatatttccatggatgatgttcaaaatgtcactttttntatggattcctacaaagcccttaat

SEQ ID NO: 52230 - DNA, 445 bp, Glycine max
  unsure (1)..(445): unsure at all n locations
actaagcttcttgcatagccgctcttggtgctcagattatcccanaaacaaatccctcttattactagctattttgaattctttagttcctgaatgtacaaggttcaaattgttgctcgttcccctctttgttttctgcaaaaaagaaaatcaatatcaaagaaaacatggatgaagtcctaaggatgccatgtacatgtgtatttctgaagatatagtatttatattccatcaagcatacatttactgttgattacatgtaatagaccttttataacatggttgccccaaatcacaattaanaagcacaactaccaatctttcagagtccctttggtaatatgtcttgtctccttctgtggaggngttttgtttaataatattatactttttcttntcaanaaaaactatgactgatcatgggttctncacccctgcctcattc

SEQ ID NO: 52231 - DNA, 367 bp, Glycine max
  unsure (1)..(367): unsure at all n locations
catgcaagcttgatcaaaacaattatttatccattcctatctattcanatcatacaatggctcattcaaatcattctcaaacactcatttcataccaaacaatccactgcatatcagttttaaagaattcactgttcaaacacacatttggtacaagcaaacaagtcaaagagctgaaattttaaataactaaaacatataaattgaaattaaaataactgaacatatatcataaaataactgaaaataaactaaaatgttcaagatgcacaaatttaaatgtcctgctcatcctgtggctgatcttcattaagatccagtgctgaagctgctgatgaatcctgcataggctgctctggctccatga

SEQ ID NO: 52232 - DNA, 362 bp, Glycine max
  unsure (1)..(362): unsure at all n locations
ntcaagaatatgatttatcttgcggtagctctcanaccagttcatggatgtgcaaatatgacctgtaacctccgaatccattatccatagttgacgacctttaacaatactacaagaaaatgcacaatcagtaccttcattgagccatggaatggggctgccaacacatgcttggttgacttgaacactctgcggatcagcaacagtggatctctgaatgncggnngtatatattattttaaacaaagttctgcactcttcattggcaagacctgaaactggtgaattcttcttgctcacatagcctccttcaagcttctcatcangatcatctccatctccagngatgttatttacagctg

SEQ ID NO: 52233 - DNA, 340 bp, Glycine max
  unsure (1)..(340): unsure at all n locations
agcttgcctgtccgatgcattattaatgagtgttccgagttatgttggggaacggntacgaacccggaatgggtttaggcaaagacaacggcggcataactagcctgataaatgccaaaggaaatcgtgggaagtatggtttaggctataagcccactcaggtagatataaagagaagcatcacgggaaggaagagcggtggtcaaagctcgcggttgagacaaganagtgaaggaagcccgccctgccacataagtagaagctntataagcgcgggtctgggagacgaaggtcaagtggtcgcgatatacgaagatgatgttccgagtacattggattt

SEQ ID NO: 52234 - DNA, 384 bp, Glycine max
tcttgagatgtgaaccgagaccgattaattctaacttgtgatggtgtagaaggagccttccttttcttagatgccatctgcaaagtataagataaaacacaagagattagcataggttattttcaacagaaacataaaaataaaaatgaaattttgactgggtgcttagcgcagcaggctgaccttagcacaccttataaaattttactcaagggctaagcgcaacagactggcgcttagcctgaagacacataaaatattttttctacagattaggcttatggcagcagctaagcttagcctaagtctacaattttcaaaacagaagaaagtcgaagcttatcgcagtatggtgtgcttagctcagtctcatcagaatgacac

SEQ ID NO: 52235 - DNA, 434 bp, Glycine max
  unsure (1)..(434): unsure at all n locations
agctntagttggtaagaatgatggagaaggtatttgaaaagacttacatgatgcttaataatgctcacaaaatgatgacatttctataagctccttttagcttattttagtaagagtttatcatacatgcattttctgtaaaggtttttacaatgtcaatcaataaaaaattattattattacttttaaggtaattattataaaanttggtaaacttatcatacatcacagtttgtgattgaaagatgatataaaagaaaatgctaaccaatgcccttgggtcattgattaagaaactaaagaaaaagatttntattgggatgcgcanaatngcactgctcatgactntntttatagtctcccatgatctccacaataaatactatcttcttttagttcgttaaccaactactatggtaacaagaccctaatat

SEQ ID NO: 52236 - DNA, 421 bp, Glycine max
  unsure (1)..(421): unsure at all n locations
acaagccgacagctgcanagcanaataccgaacatttcactaagattgagtcatgcctaaacctaaatcacttcctatgttgaataacttacactgatctcgcaggcatggggaattcacaaaattgaacaaatttacatgagcactgccaaatgaatcgattcactcccccataaagtcctccaagctgatataattactaaaaacaaagtcttaactataattcagactttgccttcatcaccatgcatcccaatattagttcagataccttatttgtatcacatggaacttagtccacatctaaatcacaacactggaattgagccttgtttcctttcttggatgctgactcgcttctctcatctcttgatgcaatcttctcccatccatcattntctctggacgtccttgcgtcttt

SEQ ID NO: 52237 - DNA, 449 bp, Glycine max
  unsure (1)..(449): unsure at all n locations
agcttgttgaatactcaatgctaaatgtgtttggatgttcgacatactatcatgtaagtgaaggtaagatggagtccacacccaccacaggattctttatgggatatggagatggagtcaaaggattataagtctggtcttcatctgaaagaaaggccattctgagtagagatgtcatctttgacaaactctctatgttgcattcaaaattcaatgaagaattgggcaaagctaacgatgtcattaagcaggtggattntgatagctctacaataaaaaaacataagcaattaggatcttcaaatgcaccttcaacatcaaaacacaacaccagttaaggcgattgactggacgagtcaaaaccattcatagaagctaagaaccacaacacccagatagacataaaggcatatcacagctcttgaaagatatgattctgagatagtgtc

SEQ ID NO: 52238 - DNA, 359 bp, Glycine max
  unsure (1)..(359): unsure at all n locations
agcttcaacatcagactccttncaggtgctttaactacttcacatggacttgatggggcctatgcatgttgaaagccttggaggaaagaggtatgcctatgttgttgtggatgatttctccagatttacctgcgtcaactttatcagagagaaatcagaaacctttgaagtattcaaagagttgagtctaagacttcaaagagaaaaggatcgtgtcatcaagagaatcatgagtgaccatggcagagaatttgaaaacagcaggttcactgaattctgcacatctgaaggcatcactcataagttctctgcagccattacaccacaacagaatggcatatttgaaaggaaaacaggac

SEQ ID NO: 52239 - DNA, 362 bp, Glycine max
  unsure (1)..(362): unsure at all n locations
cnttaactgaattgcaacgttccaattgtattttaaatgatgtaatcgattacaatatattggtaatcgattaccagtgtatctgaacgtcgggacttcaattcaattagtaagagtcacatcttttcataaaatactttgtgtaatcgattacatggttntggtaattgattaccactgacaagttttgaataaaaagtcaagagatgtaactcttccaagggatattatttttttataaggntataactcttccaatggttttcttgaccagacatgaagagtctataaaagcaagatcttgacttgcatttcaataaatttttcacaacaactttgaacacctttttgaacttcttctt

SEQ ID NO: 52240 - DNA, 425 bp, Glycine max
  unsure (1)..(425): unsure at all n locations
agctntaatcaattaacatgatcatgttatctattaccagngntntaaaacaatacgaatntcanaattcanaataaagagtcacatctgttgatgtgtaatcgtttacaccttaatggtaatcgattaccagtgactattttcaaaaaattcatttccaaaagtaacaattcttcaagtgacttgtttctgaagattctttcacaagtcataactttttaagtaattagttttaaagaaatttccaagagttataagttttgacttgagtcatcaagaaattataaatatgtgaccttgccatgaaacaaaaaggattgatcataatcatctatctttcaaaactgtctntcaatcttctttcaacatcattcaatatncttcaactctttctatagaaaatttttattctttttctcttcatc

SEQ ID NO: 52241 - DNA, 416 bp, Glycine max
  unsure (1)..(416): unsure at all n locations
ntactatgcaaggaataaccaaggaaaattccttcatctgtcttagcatcaaactttcctaagttttcttttccattatttaatacaaaacatttgcaaccaaaaacatgaaggtgtgaaatgttgggttttctaccgttaaacagttcatatggagttttctttaaaatgggtcttattaaagccctgttcatgatatagcatgcagtattaacggcttcagcccaaaaatattttggaaaaggagtgtcatttaataaggttctagcaatttcttccaaagatctatttttcctttcaacaactccattttgttgaggggttctaggtgcagaanagttatgttcaatgccatgcttatcacaaaataattcaaattctttattttcaaattcacccncatgatcacttctagt

SEQ ID NO: 52242 - DNA, 373 bp, Glycine max
  unsure (1)..(373): unsure at all n locations
tccacttctggtcttcctttttcttgcacaaatttcacgtatcttccattgatggtgatcatggaagggataatacacaatccattcaaggatccacttcaaaccaagactgagtttgagttctggtttagtatttctaatctatgtgaatgggcatctttttcttcaatcctatttttgattntcatgattatgaatatgcttangatngaaaacgaattagtctagggatntctttcccaatttcaaatntaatcacacattttttggatgatattccaacctaattttttatctcaatgaatttatggattaattcgactganacaactctaatgacattgatngaacgctcacaacatgatcattcttt

SEQ ID NO: 52243 - DNA, 504 bp, Glycine max
  unsure (1)..(504): unsure at all n locations
gctntctctcttctctctnttctctctntntctctcaagtgttcttcattcttcttcatctnttcactnttgttccaccattccaagcaaagctgaatttgagtcctccggcggtttttctactctttgggaatgttcttctttctcttcaatcctatnttcatttttcatgattgtgatgatgtttaggattgaaaaaaatattaggttatggattcatttcctaatttcaaaaattaatcacattttatttgtatgatcttctgacataatttgcgatttcaaacaatttagagatttgattggatttaactttctcttatgcatntgagtgaactttcacattgaacaccatttgtagtaactgtgataattctatttgcattggtttagtgaattgaatatgatttttaatctngaattgcatttgttcttgttttgtgntgttccttcaacttgtttgtgtatttcgctttctttactatcacatacaactgtcgataa

SEQ ID NO: 52244 - DNA, 414 bp, Glycine max
  unsure (1)..(414): unsure at all n locations
catgcacgcctcttctagtgtttaaaaaaattgagttgtactatattatttctagatgtcataaattaatatcagcaagtcattaagataacaatattgtgattagcacttaattaaatttattagccaattttcatctttagcttaattntctgtcaccaatccgcaatcctcctttcaatntgtgtacatttgtattaattgactatcactgcaaatccattaaacaatgtttatagaaatattcaaaaatactttattaatttattcagaaaaaagatgtaatatttttgcatttcataaaggcaattgtcaatagaatntcatgatatatggaaataaaaattagtaaatacataactactaannaattataaaatttaaagtaagtgccaagtttagtataaaaaatac

SEQ ID NO: 52245 - DNA, 432 bp, Glycine max
  unsure (1)..(432): unsure at all n locations
acaaactcgtcaaacaagttctgtgacaataaactataagaatgattcaattactgcatctttataatgttgaacgaangatttaatgggagtaatataaaccacgatcgtgtangcagaaaggagtattatttgcaagggaagggatgtttacccaaatcatgagtcttgatgcagagagcaaataagattttctagagtgggtcgcagtttaaatagaatattattatacttcctttcgtattcactcatccctttgtcgcttatatcctcccagtaaaattgaaattaagagtctattaattacgtggtaaataaaaagaaattgtaaaaacattagttatttttaaaagttaatataatttcttttgctgaataagataataataatatttttaatacaggttatccactaataagattctcgtgtcg

SEQ ID NO: 52246 - DNA, 415 bp, Glycine max
  unsure (1)..(415): unsure at all n locations
agtcacctgcggcatgcaagctngcatacaagattctccttgcctggcacttcaaaaccttcttgttgggtcatatagatgtcttcctctaaatccccatgcaagaatgcagttntaacatctaactgctccaagtgaagattctctgcagctactatgctcagaataactctgatggtagtcatctttacaactggagagaagatctctgtgaaatcaattccttgtttctgctgaaaccctttcaccacaagtctcgccttgtatcttcttctaccgtcagattctttctttagcctatagacccacctattctgtaatgccttctttccttctggcaatttagttaaagaccacgtcttattcttctgaagggatgtcatctcatctttcatcgctagctcccactcaatag

SEQ ID NO: 52247 - DNA, 407 bp, Glycine max
  unsure (1)..(407): unsure at all n locations
gaaacccgctgagttctttgttagcaccgaaactctatgaggaggccaaganactactgtgtaagaattttcttttttccttgttagtgttcttgatttgtgaatctcacttaaattntgagcttaatatgtggcatgcattgtgaatcacatttttaatctttatcagctaagttgagttgtttatgtatgttgtagggcctttcaaggagaaacgaagcaatgagcttaaattctaatagctcanaatcacatataattntcacatttgttattgagtctttgtgtaaggtactgtcaaattttgtaattctacctaacattaccagcagttgtgtatggaaatngttgttntcctaagattcaagccaggtttatattttctctcgtagttctattgctaaaca

SEQ ID NO: 52248 - DNA, 340 bp, Glycine max
  unsure (1)..(340): unsure at all n locations
tttttgcgttncagtgtgcgaagaaatataagatttatttatgtaagataatgacgtcttataaaataactacctacaaaggaaaccatgcatatctcataatatatatggcccccacaaagctaattcaacatctgaaaagatgccacatatgtggtccaaacccttctagttcataaaacaatgaattcatacccatcatgctctcatgttgaggaattcagagaactctccatttattggacagttacgtggtcttcgcttgtataaagaacccacaatccattatggtcattatgttacgtccatccatatatgttagcaccttgcttgtgtgctc

SEQ ID NO: 52249 - DNA, 434 bp, Glycine max
  unsure (1)..(434): unsure at all n locations
gcaagcttgctaaatggaaacatttatgtctatctatggngggcagaatcactctcattaattcagttttatcaacaaagtgtaccataattctatttatcaacatcattttttgattatggtagcagtgcagggttattgtattctatttacattggcacctgattcgtaagacctatgggtctgctagtctgttggattctaccttgtatatttagtacctctggtactcacagttattaatacaaattataattttgctgataaaaaacaaagattatacatgagagagagaacggccgtggcagtcacaacatatatatagagaagggcagcagattatattactacaacatttaacacttacaatgaacaagttctgagagtttaatcacagtaatacttaaagaatcagtcaatgaagaaggcatgta

SEQ ID NO: 52250 - DNA, 361 bp, Glycine max
  unsure (1)..(361): unsure at all n locations
caacttggtccatgcctaacccaattaaatgcaaattctcatcaagatacatacgaaattcaaaacttggattttaaagaanagaagctacagacttatanagaaatcggtggccaagtttcaacttctttttaatgtaccataatccataaaaaaaaattacaagaaaaagaatctaaaaattaagtgaggggtgaaagaaaagggaaattcttcatgtacattacaaaactcttattaaaaacttaatcaattacaatgtaaattattcttatcagttctctctcacgtgtgcagtcatgtaaaaaactctctatanttcataatatataattattcatcgngaataaaagatttcttg

SEQ ID NO: 52251 - DNA, 118 bp, Glycine max
agcttctcaatatattatgcgcctgaatcgtactttctgttgatagctatgaccatgtgaatttcttgagagcattcgttgttcaatatccatggtgtcgatgtattatgcgcctgaa

SEQ ID NO: 52252 - DNA, 222 bp, Glycine max
tactcaagcttctcattattatgcacctgaatcggacttcctattgaatattatgaccacttgaatttctcgacagcattcgctgttcaatttctatcctcggcatgtatgatgcccccgaatcaaacttctctataacaatttataaccatatcatattctctgacacataacccagttcaatttctaacgtctccatatactatcctcctcaatctgact

SEQ ID NO: 52253 - DNA, 410 bp, Glycine max
  unsure (1)..(410): unsure at all n locations
agcttagactgagttcagcctaccatcctcatactgatgcccaaactgaacggaccattcagtcgttggaggaccttttaagagcatgtgtcttatagcagaagggaagctgggagaattttcttccattgatagagttcacttataataacagttttcactctaccattggcatggctccctatgaagctttgaatggtagaaggtgtacgacacccctatgttggttagagcccgcagaaggcctcattntagtgatgtgccatcattttcttctattttctaaaccctttttacaccactttaattactgattggtcttaattgtcaattaattaggcagttttattatttggtctcatntcagctaattgatgttctaatctaatttcacgaattaatgaaacatt

SEQ ID NO: 52254 - DNA, 435 bp, Glycine max
  unsure (1)..(435): unsure at all n locations
tatgggtcatatgatggctacatgcaagatgtgtgtgcattagcctaagcatggagtagaggaggataggcaacaaaaggttttcaagtatgtgttgtaatgcccaaatgaacctttcttggaagatgcacccgcgagccccgcgtcgccctcccgccgaagggtaggttgcgacagttggtggctccactcgggacgaattttagagagttaggccaatcaatcagtgtgctttccttaccacgacttccctttntggtctttttctttgtctttctccttatgttcttgcgtatataaactctnttgatgcttttagtgtgttttaaaatgtatgcatgaggtaaatatttattcatttgatgcacacaaacaccaacactatntgcacacacggtgagttgaaaaaggctctactacccggtccatgggaac

SEQ ID NO: 52255 - DNA, 320 bp, Glycine max
  unsure (1)..(320): unsure at all n locations
gcttggagagatgcttcttgtgagaattattacggcgataaagagagagagggtggagcacgaaatcgcaagaagataatgggacagaagttcagctttgagttgtgactcactagactctcattcatcaaagttaccacaagtgttactcatgctcttttgtatagactangtagcttccctgagaagctctcttaacaaaactttccttgataagcttctttgagacaactttcttgagaagctcgagctcaactacccacacccattctaaaacttagcttacgcttttgagaagctttcttgagaagctagagcat

SEQ ID NO: 52256 - DNA, 407 bp, Glycine max
  unsure (1)..(407): unsure at all n locations
tactaacctcgtgtgtaactgtgttggctccttccactttgctttcatctatgaacgtggaatcacagccattgatttcaatgttggaaagtctgatcgctacaggataaaagtcactgtatagcataataatgcacgtattttccgcaagtatgaaggataacgctctccttctctctgtatctaaatatgtatgaagaattactaatgctgattcctacagttttttggtgcaaaattgaaaaatactttcatatgactcgcnttacgcagaattcaatttatatatagtgagcggcttctgccgtgctaatgatatcctatcattatttctccaagtgaattgacttgcatattctaccaattaataattaaacctgtaaacattacgcacttatccagctcac

SEQ ID NO: 52257 - DNA, 404 bp, Glycine max
  unsure (1)..(404): unsure at all n locations
agcttgatagtattatttatatntgtatgactcatgataagtctttggatttgattgcataggctgtgatatctggtattagacaagagaagttttttcctgtggcaattcttttctctggtggcctggactctatgatacttgcagcattattggataaatgcatggatcccagctgtgagtgatttcaaattaacttaatttacctgctcctatgctgagtatatatggtacaatctctattagttccttgtttggttttgagacgtgaagtacgagaactagttgagttgacatattttatatttggaaccttcagttaagctgttttaaatctatttgaattgcagatgacattgatctattaatgtaagtttgatgggagttagctctgatagaaatct

SEQ ID NO: 52258 - DNA, 439 bp, Glycine max
  unsure (1)..(439): unsure at all n locations
cttgggcgctcttttgcattgaagtgagtagtctctctgggatatgattaagtcatctctgacacgaattgcatgaccattgttgatatggttaattttcctgttactattttttttaactgtgttgagttaagtgagtgtaacaacatcctttcacaccattataacttaaaatgttatctttgccaagaggctaatatggtagctcattcactagctcagcctaccattgattctacttgctccattgattattctagtattcctattagtattcattccttggtttttaatgaaataatattaggtatttctcgtaaaaaaagaaaagataagaaaatcagtgtcacacatttccctagagttgcttattataattcaattatagcatcattgaagttagaccgtatatttacgaacacatagnatatggatggac

SEQ ID NO: 52259 - DNA, 423 bp, Glycine max
  unsure (1)..(423): unsure at all n locations
agctntataacttgctatgagtgcaaaaagtctgggcatttcaagtttgaatgtccacatatggaaaagagtgaagataagaaaaaattcatcaagactagagaaaagaaaggtcttatgggtacctgngaggatcgacatgacaccttgtctggtgaagatgatgaagaagccaacatatgattgatggcagatacaacttctgaggagttgaattaaatcgggaagatgacgtaaattttgaagactttgaatctcttagaaaagattatcattagctnttatctaactcatatattctctttaaagcttagaaaaacctatggaaagaattcaagaatctatccaaagattatntaanacttgagaaaaccctttacgaatcaagtgatgtttcactggatgacgtcactcggacatgtg

SEQ ID NO: 52260 - DNA, 476 bp, Glycine max
  unsure (1)..(476): unsure at all n locations
ngaggactatacctccgaccgaacactcgtcgtgtntctgtctcagcccaagtttattgtgggctgtagcaccggttccgcttccctatctggattggaggcggccgccgnggcattatcttctatagttttctgaagctttagcatggtctctgtgatagaagccatttgatcttttaaggccgataggtcggccttcatctgttcttgcactccctcttcattatccattattctggatcgagtgttataggggtgcctttgcgctttcttagttatggtgagttccctaaagaaacaaacaatcgtgagtatgccaccaaaacatgaatatgctaatgaatgatcagagcacttggatccacctcaaggccctnttttagataacgtgatgagtngcagaacttctcgtttataaaaaggaacannagctttatctagccaagatcataccaaagtgttacaacagaacctaa

SEQ ID NO: 52261 - DNA, 418 bp, Glycine max
  unsure (1)..(418): unsure at all n locations
ngtaatgtattaatgtaatcaagtttgtcacacacacacattacgaaccataagctgtgttacccgtcaacctacatatatacatatcccataaaattcagattcagtgtgttttcttacttactttttttttacgtctaataaaaggtagattaaaaaaataataaattatgtaattattagttaatgtatatacgtttcatatatgacaactttgaaaaatatagaattgttgaattattgaatgaaggctttaaggcataaaattaatttatttttgttcggntngtatttttcgagtacatttaaaggaaggaagaaaccttgccggctataccgcaaagtgcaaacaatggtataaaaactactagaaaataacctagctggtttcatttgtttgaatatatctcaaggtcat

SEQ ID NO: 52262 - DNA, 374 bp, Glycine max
  unsure (1)..(374): unsure at all n locations
tttgcctctcctatgcctttcttacatacttataaacagccccaccatcctaattgtgcacaatcatattcatatatcattggggcatttcaccgagcacttggtgggcacacgtttggacataaattgcaagagaatgggggcaatgtggcatgccccattgcttcagaatacaacatangcctaatgccttctcattcaaattctcaatccaagatatatatattatttatcaaaccaaaactgtcccacatatacaagctatttctcacaaattggagcaccaaaagatgaagaaaatataccaatgggaagctaatgacatgaaggattgaatacttacttcgtggagtgaataataacaccaaaaaatg

SEQ ID NO: 52263 - DNA, 353 bp, Glycine max
  unsure (1)..(353): unsure at all n locations
gcttcatgatgatgaatcaagttgattcatgttgtttgatgnatgaaaagcccaatgaatgatttaaagattgagtcaacaagttcaagatcaagtttaatttcaagcttcaagagaagaaatcaagaagattcaagaatcaagagaagtttgatttcaagattcaagaaaatatgaattcaagtttcaagagaagaaatcaagaagacttcacaagggaagtattgaaaagatttttcanaaaacaaacatagcacagttntgtttttcaaatgagtttttctcanaattttctaagttacaagagtttttactctctggtaatcgattaccagtttactgtaatcgattac

SEQ ID NO: 52264 - DNA, 406 bp, Glycine max
  unsure (1)..(406): unsure at all n locations
tgttgcacgcttagcgagttcataatattgtgtgttaatatgtatgtatttctgggttttcgttctttgtttttttaatcttcatcaacattcatacagatcttgaattntccaaaatctattgctcgctaagcgcacatactcncgaagagagacttgtatttntatattccagtactttggcttagcacctcctacgtgttaagcccacccgccatttcaattttacgttaagtcttttcatttctagatgcacgggcttagcactagctacatgattaaatttaatgtgtnnttggattttgtgtatcaagcttagcacgcgtcgtgtgataagctagaacgttaaataaatgttgtacacccaagctttgtgccctcacttgcaataagccactgaacccat

SEQ ID NO: 52265 - DNA, 358 bp, Glycine max
  unsure (1)..(358): unsure at all n locations
tatgagctacgtgggagtacgtgagctcagttggaggtgggcaacaggggatggtgggtttatgcgcgctttgtggatgtggaaaacttgttgtgcaccatcgcccgaccgccacctagtaccacatgtgatgggtaccccataatcctacaagcttgagatgaggaagtgttgaagggtgaaacttcctgcttttattgttgacctcagagtggtacctggagatatgtcgcgggggtcaggagaccttggtgacgtcaggtggggtgctattgcccanaaccaagcttgaccaatcccgacccaacccgggcatagtcggtcagagagaacctgtgatgtacctaaacaggcgagc

SEQ ID NO: 52266 - DNA, 463 bp, Glycine max
  unsure (1)..(463): unsure at all n locations
gcttcattcatgtacgtatcaaannattgcttaaagttgtcccatgattcctttgtctataaatggtgagctttaagtgcactaaaaaccattatacgtgtatggtattatagggtaaaaaaaaacataagcatgttccagtagaatcacaagcttaaagcaaaactattcaaacacttaaatgacaataaaacttgggaaatggagagactggaactctcaacttctagagcaatagtttgctgaattgtctgagcaatccttttgacaacactcctaatgctatataaaaagattatataatgggttgccatgtcgccaacaaagctgacaatggcattacccataatcctccttttttataatattataattataatatagataatagataataatagagaaatatctatgatgcatcataagatactgatgtacctgaagtcatatatcggatacatgt

SEQ ID NO: 52267 - DNA, 457 bp, Glycine max
  unsure (1)..(457): unsure at all n locations
agcatcgcacaatctgtgtgtccaaaaccctatatttcaatggcttttctagggttgaaaggcggaatttagaatgaggcaaatgtggagcacactctcacctcacacaagtctatgacatcaatctaaacttgctcaaactggatatacacctaaattgccaccgaatcaaaattagactcctcaacacccacatctgccctacagatggctcttggttcactatggacattngctgttctctctagctcaacctaacctttctcacatgtcctaaatgacattgcaagctagtattaactcactctaacctccatttaccacagaatatagacttagccttgcaactctcaaagtctcactctgttttcactcataacatcacattctcactttcggagcctagggtagctctaccctctgtctctaacagaatgtgatcagcaatttcagcata

SEQ ID NO: 52268 - DNA, 343 bp, Glycine max
  unsure (1)..(343): unsure at all n locations
agcttagcgccagcangcacttatcccaacttgactactggaacataattgcattagtgagattggcttgctaagccttattctgaaacagagaagaaattacgcttagcgagcatgactcgcttagcgcatgaacagaatttaagaaaacaaaattgccttgggcttagcgagactgactcgcttagcccaggcttattcaagctaaagaagcatggtggcttaacgagactgactcgcttagccgccaatagaataccaaaagcctcaaacattctgacctaactaaactaactcgtttagcgcggcatgccgacttagcgagttcatacaaactcagaaa

SEQ ID NO: 52269 - DNA, 313 bp, Glycine max
  unsure (1)..(313): unsure at all n locations
ttgcatccatgtttcaaaatatcatatatcattagtgaagtaattgacatatagtacctacaacttgagaatgacccacaaaattgtgcgataactctcaacaatgaaagcaaaaatatttatttatttattaaaatgntttactcaaatgttcaaatctcattttttatgaccangtatacactctatcaattggagacttttcatcaatgaaacctcatgatatatcaaataaatgggcatgtgattatcaatgcaagataaaaataaggttgtccatattctaatctattaatcatgcccccctttttta

SEQ ID NO: 52270 - DNA, 356 bp, Glycine max
  unsure (1)..(356): unsure at all n locations
ggctgcagctgtgttcttatcgtatctccattttcatgcctatcagatactgnaatttttgtatctggcctttattgcgtcccgaatatcgaacttcctggctattgtggaggttttgcaatggaggtatcaacattggcatcagttcttgactttgtcagtttggtcgagctcttctggagttgcttcccacctatgtcgttattatacatgtccttgctattacattcacaaaatacagcttcatcataccttgcttttctttgcaggattactcgaatgaccagccccattattggatatccttaaagaacaatggtcaactttactaccttaactctnttcttgcataacat

SEQ ID NO: 52271 - DNA, 59 bp, Glycine max
cctctaactcactgacactacttcctataagtttttaagtctttctctccacaacactt

SEQ ID NO: 52272 - DNA, 411 bp, Glycine max
  unsure (1)..(411): unsure at all n locations
agcttcagaantattgacattatcccatttgttgatgaagncagngcttcccgatgaaaaacaagtcattcttgatgtatttgcaacatgataagattgagatctttaaaaggaagttttgacttcatcagctgatgagtttctttcaaatcttgtaaaaagcttctcactcgaaagcatagttaagatatccatttagagcttgttttgaacttgctagaatgcttactcttgatctgctctttgtatatcttcaacttccagtgaaacattagtaaatatgttggcttgcatagcattcttgcaaaagatgttcgactttgagagagttttggaatcaacaaagcttagtatgttgtactataagcttggtattcattctatccacacaacttcacatatctcacatgc

SEQ ID NO: 52273 - DNA, 457 bp, Glycine max
  unsure (1)..(457): unsure at all n locations
cttgattntngngttctgatagtacacaatattgtattttttttctcagtcttatttgactgtagttgagtattgttcttcctttgcatttcgtgtttcttttgttctgcctttgttttgttttgttgttctcgcacnaccaaaagatttaatattttgttgttcctgaaccatgttgacctttttggtgttcttgaacatatttcaccatgcttcattttctttgcaggagaaagcttcgttttctttgctcacaatgctgatgaagattgattttacttttggcaatgtcaagagccttcatttccgcccagaaacatcggtgtcaacctccatttattatttttactaattaattaattaatattaatactttntattacatttaatattatcgtgcatttaattctctttgtcttttgcgctgcttcttgcttcggatgtgtttattcattta

SEQ ID NO: 52274 - DNA, 434 bp, Glycine max
  unsure (1)..(434): unsure at all n locations
agctntgtgtattttgcaattttttacttattatagttctgttcttttatcaggatatgtaacttcagttggctatcatagtttgatgttatgattcaatggtttgatatgtttcttagaaagaaagaaaaaattgttgtaaattctagtacagtttgatactaaaactattaatagtaaaattataataaactagaaaatatactggatcttgtgttttcttactatttatgtcagacattgtcagcctgcaaaatgaagatggatccttttcaggggatatgtggngtgaagttgatacgcggtatttttcttaagatcctttttttgtattgattatgtaagaagctactgtattttaactaaatccactgaattatttgcttacgttctatatatcgctatatgtgctataatattacattgcttgataa

SEQ ID NO: 52275 - DNA, 445 bp, Glycine max
  unsure (1)..(445): unsure at all n locations
ntaactnntagttttgtggagactaagaatggagctganttgctggaacattggttgtgtcttaatggttttccagcaactactattcatggtgacaggtcacagcaggttagtctattgcacaaatgtttaatagtagacagcacttgttgtaatgggttgtcatatgtctatgatgattgacgtataacataagagtgctatagtgctatgtgaaaaattgtgtgtattattgttaataattaaattaaaaatatgaaacattttatatacttccaaattccccctttttgaccacatatctctttcccatattgccattgactttttgtttgtagtcacaattctttgccatttgaaatgaatcgcatgttccctgaatgagtatgaactctttgtttaataattctttttactctcacaatctctcaaaccgatgcaacat

SEQ ID NO: 52276 - DNA, 216 bp, Glycine max
gcaagcttattatccaaggcaattcttggaggttattctccttcttccttggcttattccctagtggatggtgcctaccctatactcttctcctttgccttccgctgcatctccatggtgaaaaatcaccattgaaggacctcattgaagctcaaagatccagcctccatagaagctccacaagcaagcttccatcacttttcacacagaggtcag

SEQ ID NO: 52277 - DNA, 236 bp, Glycine max
  unsure (1)..(236): unsure at all n locations
gaatttctcgagagcttccgcggttcaattccgagcgtctcgacatattatgtgcccgaatctgaccttcgtgtgaaatgttatgaccattagaatntctcgagagcttccgatggtcaatttccagcgtctcaatatgttgtaagcctgaatcggagctcaccgtgaaaagttttgaccatttgtatgtctcgaaagcttgcattgttcaatgccgagcgtctcgacctattatg

SEQ ID NO: 52278 - DNA, 254 bp, Glycine max
aatgagtttatgagcaacttaggattcaaaagatgtgacatggaccattgctactatgttgagaaatatactaatagttatgttatccttgtcgtgtatgttgatgacatgttgattacaggatctagtatgatagaaattaatagtttgaagcaatatgtggcagaaaactatgaaatgaaggatcttggtccacctatacaaatccttggtatgagaattcttagaaacagatcacaatgaattttgaagtt

SEQ ID NO: 52279 - DNA, 503 bp, Glycine max
  unsure (1)..(503): unsure at all n locations
gacactatgaaactcagcttgcttcccaatctcccnctttgtgttgatgacaatctttaaatcaagagaatacatgcaggttntgttctatcgttcactcatctctttctacccctttcttttttaatttatgcttaattttaaagctttgaaaatataatatcttgatttctaaaatacccattttctctccccctttggcaaaataaaaaaggccaaagtgcataaaataaaacatacataaatgattctaaaacatacataaagcataatttgaataacacaaaatttaaatacataccactagtcatatatcatcaaaataaccaagtctaagcacaaaacataaacatctacgtgcaaaataaataaaaacatcaagttcagtcataattaactaagtaccaaatacttaaaacataaccaatgttcagagaataatgtcatataacatagcccaatacacgacttaaacttanaatataataataatctacatctat

SEQ ID NO: 52280 - DNA, 442 bp, Glycine max
  unsure (1)..(442): unsure at all n locations
gctgcctaattaacctgaaatgagagaaaatgattattaagctcataaaatgttatttctaagtatttattacctatactcaacagaaaatacttataacactacaggaaaaccataaattggaagagtttgatacaatttacacaagttntatacacaaaagttagtcgtattcaccgactaacaggtaccctatgctgacttgctcccatatctactcgataattcnaatggtgccataattttattcaatgttcctcaacctccatttttccaaggatacgactcaaatgcaacgtgtgcttatcatggaggagccccggngtacccattgagcattgtatggccctgaagcataatgtgtaaggtctaattgatgcgggctggctgaaatttgaggagaaatcgcgtgaatcctgacattgacaagagatccacacat

SEQ ID NO: 52281 - DNA, 325 bp, Glycine max
  unsure (1)..(325): unsure at all n locations
atcaatcatctttgaatcatctatcttccaatcttatagaacatcatctctcaaacatctttcaatcaatctttcaatatctttctacacaatttttctgattcatttctcttcatctttctaaaatnttcttatcaacactcnttcttccgagaaaagttcttcgaccaaaaacttatattattcatctttttcattctctcttccctttgccaaaagaacgaacgactaaccgcctgcattcttttgtgtctctcttcttcccttccccttaagcaaaatatgtcacatgactaactgcctgagatatctttagttcccctta

SEQ ID NO: 52282 - DNA, 380 bp, Glycine max
  unsure (1)..(380): unsure at all n locations
cacatacggaacagagtgaagatagaaaagattcttcttactagagaaaagaaaggtcttatgggtacctgtgatgatcgacatgacaccttcgctggtgaagatgatgaagaagccatcttatgattgatggcagatacaacttctgacgagttgaattaaatcgcgaagatgacgtaaactttgaagactttgaatctcttagaaaacattatcattagctcttatctaactcatatattctctntaaagcttagaaaaacctatggaaagatttcaagactctatccaatgattatttaaaacttgagacaaccctctacgatcaagctgatgtctcactgtatgagttcactccgacatgtgaagcttggatgatt

SEQ ID NO: 52283 - DNA, 415 bp, Glycine max
  unsure (1)..(415): unsure at all n locations
gaggactatacctccgaccgaacaccgtcgngtttctgtctcagcccaagtttattgtgggctgtagcaccggttccgcttccctagctgtattggaggcggccgccgcggcattatcttctatangtttctgaagctttagcatggtctgtgtgatagaagccatttgatcttttaaggccgataggtcggccttcatctggtctagcactccctcttcattatccatttttctggatcgagtgctataggggtgcctttgcgctttcttagttatggtgagtttcctaaagaaacaaacaattgtgagtatgccaccaaaacatgaatatgctaatgaatgatcagagcacttggatccacctcaaggccctcttttagataacgtgatgagttgcagaacttctcgttttat

SEQ ID NO: 52284 - DNA, 518 bp, Glycine max
ttagaggggttgaactgtgaccgtgattcacgaccctgatgccctgagagaacccacgcgtgtgtttatgacctttttaaataaactatgttgtgtccaatgttgctgttgtctcccaaagagcatagcaccttgaagagttcgttgagactgaaacatgtgctttcctacagcgttaggctatgtcacatatatagatgagttctaatatcagtgctcgatttttttaagagtaacaatacgcatgcacatgctttctgtatgtgttgacaactacaccaatgacatgacctgctttatctcgcatcagatctacatgtgtagacatgatgtgcagggacctttcacgcgctctattgtgatgcacacgacaatctatcatacatgttgtttcacactgtgtcgtccactcacactgatatatcatacatgcttgtttagaattgagtaatatcttcgtgtgatgtataacatatatgtgatatacaatccacatgatcagcttataaatttatgtg

SEQ ID NO: 52285 - DNA, 423 bp, Glycine max
  unsure (1)..(423): unsure at all n locations
gactcaagctntaccttagactntgccttttacatacaatgcaatgttcacaaaatttatgcacatcctttttcatataaggccaataaaaatgttcttgtaatgtttctagagtcttttggaccccaaaatgccccattaaacctccttcatgtgctggacaaacaagcaactttcttgtagaacatntaggcacatacaatttgttttctttgaaaagaaagccttcatgtctaaagaaaccattttctgaaaaattttcacaatttttaaaaatttctcaaaaagtttcatcattntcatacatgtttttcaaacattcaagaaccaatcaatttgtttcaagcatagaaagttatgcatgacgccgagaaagagcatcggctacaatattaccttnttcctttnntatgttgataacat

SEQ ID NO: 52286 - DNA, 266 bp, Glycine max
  unsure (1)..(266): unsure at all n locations
agcttacgcgatccgtgagaattccgtaatgtgacggaaatcttatggaggtgtttttcgcaatacgtgagttntcgtaacttcttcgaaagctaaaaaagagtaaatacataatccgtgaagattcgtaaccttgcagaaggaaaataagtatcgttacaaaattcttaaagtttcgtaacgttacggaaaaagaattaccaaaaaaggtaaaggggggtgcatttagtataaaagggggtacaaatagcaataaggcccacttg

SEQ ID NO: 52287 - DNA, 371 bp, Glycine max
  unsure (1)..(371): unsure at all n locations
ccttgaacaggcaactaactcctctntcaaattcatgctatgtgctcgcgactggtccctttcttcctttcgcaacttgagttcactattgctaccccatagagctccgcgaaatttgttccggccatactcttccttgcgagccctcttggtctcttgttcaagggctcttgcggtaatngcattctcttcccgtaacccggcacactccttccgaacgtgtgtagcggccaacttgaacttctccttggcaagttttgcctttcctaactcgcttttgagaagctggacttcttcgtcctcttccggtgcttcaaaactctctttgctgacgactnttaactnggcgagccaatctatacctcgtatat

SEQ ID NO: 52288 - DNA, 341 bp, Glycine max
  unsure (1)..(341): unsure at all n locations
agctntcaacgtattagacagggcaatatactttcttcacagagctgggcaatgtactaagtgtactttgttaaactatttaagtagagttgtaaacgtttgattgctagctgaaaagtttatttagctattcgataaataaatttttagtaacttttaatatttttacacaccattngaagcaatattatctagaatattaatatttaaaatctaactgtctatattgatatatctttattatcaatatatttattcatatgctttgatatctctttaaaaaaaatcatgatatcatttcttgtatcattgcataaatcttaactatcttaataattaat

SEQ ID NO: 52289 - DNA, 488 bp, Glycine max
  unsure (1)..(488): unsure at all n locations
tatatatatacactgagaattctgcgacgtgtgtctcaatttctgtgtaagctaggatantaattttctgtgaaaaggtatccctatctctatggctctagcacttctcttcctctacaattgagaacaaattgacttgagtcaacatggaaaaagcaagaaggaaggttccacctggacaatcttcctgctcaaaaacttgattcggtgtaacctttcattacaccatattatatgttcttgtctcaatttggacatgtttaccacccttgaaatcaatctcaaccccacctgagcaaccaattgctcatgatcaagttgatcctcatnggtgctttggaacttcttaactatgcaattcccggttctcactatgtcctttgagccttctgtccttctgcaacatgaaaaccaagatngtaagcaattgagagcattttgatcaaagagaatgctagtatacacttctagttctacacactctatga

SEQ ID NO: 52290 - DNA, 395 bp, Glycine max
  unsure (1)..(395): unsure at all n locations
gcagatttggtcttcgccagtgaaatgatctatgtgggttcgaaaagaggcaaatntgatcatcctactatgacgactgacaaaactggggcaaatgaagagggtgagaaagagggagaaacccatgttgtgactgccattcctatacggccaagtttcccaccaaacccaacaatgtcattactcagtcaataacaaacctcctccttacccaccacccagttatccacaaaggccatccctaaatcaaccacaaagcctgtctaccgcacttccaatgacgaagaccacctttagcacaaaccanaaaaaaaacaccaaccaaaaggaattttgcagcanaaagcctgtanggttcaccccanattccgttgcatatgctanacttgatccca

SEQ ID NO: 52291 - DNA, 412 bp, Glycine max
  unsure (1)..(412): unsure at all n locations
aggattgatggngacccgtcgttgttatgaacgatgtttatggctacgtgggagtacgtgagctcagttggaggtgggcaacaggggacggggggttatacgtgatttgtggatgttgagaatcgttttgcaccatcgcccgaccgccacctagtaccacatgtgatgggtaccccataatcctacaagcttgatatgaggaagtgtagaagggtgagactttctgattttattcgttgaccacagagtggtacctggagatatgtcgtgggggtcaggagaccttggggacgtcaggtggggtgctattgcccaaaaccaagcttgaccaatcccgacccaacccgggcatagtcagtcagtgagaacctgtgatgtacctaaacaggcgagcttctggcagtcaacagat

SEQ ID NO: 52292 - DNA, 379 bp, Glycine max
  unsure (1)..(379): unsure at all n locations
tgcagctgcagcttacaacagattttgtttgaccctctttcctacaattaaaataactctttttcctctcaagtgtttccctctctttctcactctcaagtgttgtgctcaccttttctttatctcttttctcttgaagaagattctctctcattttcttttgatcctcacacacttctagtggactcaatggcttgagcacaatctctttgtcttgctgcatgaaagagatcttgttggtgtaaccgtcatgattgactcttttatcaaatggccatggtctccccaaaagtaagtgactggcctcataggaacaacatcacanagtaccttatcattgtattcccaatggaaacgtccacttacactgctgcctcac

SEQ ID NO: 52293 - DNA, 368 bp, Glycine max
cgccacgtagtcaacacctttcggggtgcatgtattcgttctgttgcatggccgcgtacacggaattatcagctggtccaaatgattacccaatgggttatcgtacccagataatccaatggataactcgtcgctccttgcggcctcggtcctagcgatgtgcgtggttgactaccgactagagtccgccgtgttgcgaatcatcgggcactgtcggttgtcgccatcgtcgggtgacttgactgacgaagctgccagcggtgtaccgaaacatctgttgtcggagtctatctcctccgacgaccagatatccctccttctccgacaagtgcagctttcggtaccacggtggatttcctctcaacatg

SEQ ID NO: 52294 - DNA, 470 bp, Glycine max
  unsure (1)..(470): unsure at all n locations
agctntgagccaaaatcttgactcaccatattctcttgacccanggtgagaatgtcaatccttaccctcagaagcaaaaaaagaagagaaggaaaatttccaatcaaaggaaaaaggagaaggaaaatttccaatcaaagaggaagcaaaaaaaggaaagaaggaaaatttccaatcaaaggaaaaagagaggaaaggaaattcccaatcaaagagtgggagaaagcaaaaagaaaagaaagaaaattcccaatcaaagaatgggagacagaaaaacagagaaggagaagaaggaaagatagctcatgatcaaggatcgaaagaaaacaaaagaaatgtgcagagaggtctttggaccacacaatatctgaacaatacggaattgtcaccaaatgaacaaaagaaagaaaaggaaaccataacctannagtggtcttctctctttgataccaaccaaaatcctgtgtgtc

SEQ ID NO: 52295 - DNA, 413 bp, Glycine max
  unsure (1)..(413): unsure at all n locations
ntatatggatgaaagtgcanaactcctatttgttggtatgatgatggagaagcagtacttcttggacctgaaatgctacaacagattaacgaacaagtgaagttgattcgagagaagataaaggcatctcatgatatgcggaagagctattatgatagaaggaggaagccactatattttcaggaaggagacacatgtgttttgaaggtttctcccttaaccggagtcggaagggctcttaaagctaggaagttgacacccaagtatctaggtccatatcagattttgaagaagattgggcctgtagcttatcatatcgccttacctccgagtttatncgaattgcatcctgtgttccatgtctctcaactgagacggtacaacccagatccatcacatatactngcagtgga

SEQ ID NO: 52296 - DNA, 410 bp, Glycine max
  unsure (1)..(410): unsure at all n locations
agcttcangctgntctattgcttctgattgttgttagaanggcacaggtctgtgtggtggttggcagaagagcataaaccacagagtctggcgataggtgtagattatttattcatggccagttgggttaccaggttgtcgcaacctacccttccgcgggagggcgacgcgagggctcacgggtgcgtcttccaagaaaggaaaatgcaaggagtcgccaccaacgtttattcgaggaaaacgtcggaaaaaccggaaaagacgtggtctacgaactttaagtgtgaaagggttaggagtttgttttacgcacggcgaaagtattagcaccccacacatctgtcacaagggacgacaacctttaatcaagtgtgcgaatatgactccaatttggtgtattttccctttta

SEQ ID NO: 52297 - DNA, 397 bp, Glycine max
  unsure (1)..(397): unsure at all n locations
taatacaccaattattaattttttttaatagattgtatgtattntatatgaaagataatcttatttaaactggataaataagataattataagtgataaaactctgtctccaaatatttaacgtaattatatatgtaagactaattaatctaaaataactttgcatgattaacatactcagtgctataacactaatagtttggtaataactaattcattgataaatattataaaatcatcaatatttgagagtattagaataaattttacttcgtattagaataaaattaattagatgcaaacctattaacgaaatgctttaacttcaccaaatatgtgattatgaaagcaaagggtagatggcagaagaaagagcaggataaataccatgggacgg

SEQ ID NO: 52298 - DNA, 427 bp, Glycine max
  unsure (1)..(427): unsure at all n locations
acactatgaatactcagcttctaaggaggtgagcttagttatgagaggggtgtgtgtttctaagctctagcttctcaaggaagttntctcanagaagcttctcaaggaagttttcttaagaaatcttctcaaggaagctacctagtctataaatagaagcatgtgtaacacttgtggtaactntgatgaatgaaagtcttatgagatacacttcaaagttctacttctttccctctgttattccttcaatttcgtgctccccccttctctctttcttttcctccattaaagcatcatcttcaagcttcttatccaaggcaattcttggtggtgaagctccttcttccttggcttattccctagtggatggtgcctcccctatcctcttctnctttgccttcgctgatctcatggtganaatcaccat

SEQ ID NO: 52299 - DNA, 390 bp, Glycine max
  unsure (1)..(390): unsure at all n locations
tgtgaagaattcatgtgtatgcactctgacattaatctttattcgcctttgtttttgataagnggaacaataattgacgatgtgagagaatgaaaagagaaatgagtaatggtacgttcaacttagagccttggctggattgtatttatagcacatcgaatataatgaatctgtgatataattgaaacaactattttatcttaagtcgttgcaacacaccggctactggtatttcataattctaatcacttaacagtttgaaattagaaataataatcgatcaagtccaacttgtatgtaacaacattttcatattccatacatgagatcctcctatttgttactattctatcaccgaagttattatatctattatagttttagtactac

SEQ ID NO: 52300 - DNA, 164 bp, Glycine max
ctgtacctgaaacggaccgagaagagagaaaaaaagaaggtgagaattaaaaacgggaaagggaagaaaaatgagcaacaggagaacataaaagaaggagggggggaaaacaactaagggggaagaaacgggggagaattaaaaaagatgggaggaaaaaaaaa

SEQ ID NO: 52301 - DNA, 402 bp, Glycine max
gcttattctagagaccgaaaggcatatatagtctggaattgttgttacgttgtttgtcaatacatgttatgattcgtatcgagagttcacggtgattaattacacaacattttatatgaccattgggtacagaattattttagagataaaaaatgcatatatatagtcttctaataggggtatacgtcgcttgacaatatatgtcatgattagcattcaaagtttacggtgattaattacacacacaacatattttatgaccactaggttccagcttattctatagatcaacaatagtctcctcgatcaacaacagtatattgttgaagggtgggtgggaatgtgggattatattgtataccagcagctatgggaagatggtccttatatcatgcacactat

SEQ ID NO: 52302 - DNA, 349 bp, Glycine max
catcaatgcacatccaagcatcagaagaacttcaaaagcatatgtcctgaagacagagaacagtcacacagataaaagattctggaaacaaaatctccatttgaacacctggtgtgctgaattcaacttgtcatccaagtcccaagctaagaaacagaataaacaatttactttgtgggaggtggccaagataggttcaaattttactttgtaatacaaaagcaaacacacatttcctagtctttagattatacacatcagaaataaaattcagaataaagggaagttgcctttcaaccataagggttcatgatgtagtaccaataaacacggtcatcatcatcaatta

SEQ ID NO: 52303 - DNA, 371 bp, Glycine max
  unsure (1)..(371): unsure at all n locations
agcttcacgntgctcattgactctatattgtttcttagaangacagagatatgtatggtgatatgcagaaaaacatacgccatagactcttgcagcaggtgcagatntctgattcatggcaagctgggttactaggatgaccaaagcatcaagttttccttcaagctttttatttttagtagataaggatgaattcgtggccacctcatggactcctctaagaacaatagcgtcatttcttgcactgaattgttgggagttggaagccatcttctcaattagattcctagcctcaacaggggttatatcaccaagagctccaccactggcagcatcaatcatactcctattcatgtngctaagtccctcat

SEQ ID NO: 52304 - DNA, 236 bp, Glycine max
aaactaacttaaatttctagttggacattttatgaaactttccaaaaacgaaaggttagactaacaagggtgaatttgttactaaatcaagaatctataacagaagtatacaagaaacatatgtcacttctcatacaaaggagaagaaaagaacaacctgtggaagggcaagctgatcaatcagataatagatttggctgagagcaccacatgctttagatactatatcattgcat

SEQ ID NO: 52305 - DNA, 456 bp, Glycine max
  unsure (1)..(456): unsure at all n locations
agcttgtctaccacacttttatgatgaacattctctttagcacaaaccanaacaccaaccaagaaatgaatnttgcagcgaanaaacctgtagaattcaccctaaattccggtgtcatatgctaacttgctcccttatatacttgataatgcaatgatagccataacccctaccagggttccttaacctccatttntctgaggatacgactcgaacgcaacatgtgcatatcatggaagagttccaggacattccattgagcactgtatgacctcgaagcgtaaggtgcanagtgtaattgatgtgggctggttgaaatttgagtagaatcgcttgtgaatcctaaacattgacaagcgacaccacacatggngtaattntgaaagctggttgtagatgtctctaatgactcatcaggaatttcaaaattatgccattattgtaaccacagctaca

SEQ ID NO: 52306 - DNA, 394 bp, Glycine max
  unsure (1)..(394): unsure at all n locations
tgccgactataccttcgaccaaacacggttgtgtntctgttacgtcccggatttaaggtgggctgtagcaccggctccgcttccctaactgtactggaggtggttgccgtggctatatcctctatagttttctggagttttaacatgacctccgagatggaagccatttgatcttttaaagccgatagatcggccttcatctgtttctgcacgctctcttcattatccatttttctggatcgaatgttataggggtgccttggtgttttcttagttatgatgaaattcctaaagagataaacaatggtgagtatgccaccaatacatgaacatgcaaatgaatgatcggagcactttgatccacctcacaggttttagataacatgatgatgtc

SEQ ID NO: 52307 - DNA, 351 bp, Glycine max
  unsure (1)..(351): unsure at all n locations
agcttatcanatcagaatgtatgcacatatattaccactaatcaatcaaagagggtgtgatccagtcgatcagtctgggtcactttcatntttattattttcttattttttaaatactccttgtacaatctgtcacgtacagcctcaccttttttgtgcctgtgatttgactgctgtcagccttttttacctgcaattctctcatgtgaaactcaccattaactaatcttttattatcaaaataaaagtttaaatattntctagttactataatttaatattctttatttttgtcttttcacaataaaaatttggtttatttcttttaaatatgtttgtctctgttttttc

SEQ ID NO: 52308 - DNA, 418 bp, Glycine max
  unsure (1)..(418): unsure at all n locations
ctcgtanaagggtatcactatatctccacctttntaacactggattaaaaaaatcatttttttttttctcaatttttattcaaacccaaccctactaggttttgagtgatcctcgggagagagctatctatgactatgatcatcttggagaagaggatccgaagaagggtactcatgaggtgccatttagtgctgacgatgacatgggaagaggaactgagtacaagttttcctgcactctggaggagttatatacagggaaaaccaagaacattaagatcactagagaaattgctgatgccaaagggtgagttgtttgttgttgctgaattaccagctgcatattattcctgtttgttctaatgctatgctatatatgttggcttantggtnggagtgctttaaaatgctttgattc

SEQ ID NO: 52309 - DNA, 351 bp, Glycine max
  unsure (1)..(351): unsure at all n locations
agcttcatgggttccctcttatcatagtttcttacagggatcctctnttcattagccatttttggcaggatatatttcgattaagcggcactgtcctacgcatgagctcagcttaccatccgcagactgatggccaaactgaggtgctcaatcgcgtgattgagcagtacctgcgtgcgtttgtccacggcagaccaaagaattggggaagattcatcccttgngtagagtggtcgcataactcgtcctggtctgtgtggtccgggtctacaccgtatgagattacatatggacgganaccttttacattttctgactacctcttgngcacatcgagacttgacgcggtgg

SEQ ID NO: 52310 - DNA, 432 bp, Glycine max
acactatgatactaagctttcttgtcagggtttgtagtgtgtggtatggaagatggtacattggcccttatgcattctcacaatttatgggatcataataaaatcctttttaattaggaaaatattcaattaccatgtcgctgacaatttattaacatacaggcatacatgcaagctgtgaacttatcagcatcttcattttatgtacctagtaatgattccatgggttaccttagttatggtgctgcagtaagtgaggtaagatggtttttttttctacgcatatctcaaatcaaaattgtattttctcaagttaattggtagttacttctctcgaatgttaagtgcttatgtcatattctcagacaagccatgttactgaagtaactaaaccaacttatcttatactgccatgctaaatagtggaaatga

SEQ ID NO: 52311 - DNA, 378 bp, Glycine max
  unsure (1)..(378): unsure at all n locations
agctntgcttctacagaggttatcctangctttcttgggccaggaaactcaatgaanagaccctnttgcctcctccttttggtataatccttcattntgtgcagtaactggtgtcaaaccacacagtttggctagcgagaatcaaaagcatctatgaatgatagtccccggatgaaattagggtatgacaaaggtcctattatgtttattacttgtgcactagttttacttgtaggtatggcttatacaagtggaaatgctactccaccatcttcaanaaccgcatggctcatggcanagatgatcaaactntgtgatcaaatgagaagaatgagttatgaaaatgaagaaaggatggagacaatgagaaaagataat

SEQ ID NO: 52312 - DNA, 470 bp, Glycine max
  unsure (1)..(470): unsure at all n locations
ggccttaaactagcttgtgggtcaaaaatcactgttgtcatcatctttttggggagaatgtgaatgtatgtatacatgattttgatgatgtcaaagaagaatctaacaaggctgcttcaaatgataagcatttgcttcaagaataattcaagattgcttcaacaaacaaagccttgttttaagattcactaaagaccaagccttgccttataacanagtgttttcaagacatgcaaggctctggtaatcgattaccagaagacagggttgagaaatagctgttgaaaaagggtttgaatttgaattttcaacatgtaatcgattaccatatgtctgtaatcgattaccagcaacgaaactntggaaattcaaattcanaagtcataattcttcanatataactgtgtaatcgatacacanacattgaatcgataccagtggaaagtttcaaanatctgcaacagcacatc

SEQ ID NO: 52313 - DNA, 441 bp, Glycine max
tgcctgtccgatgcagcagtaatgatggcccgagttatgttgtggaacggttacgaacccagaatgggtttaggcaaagagaacggcggcataactagcctgataaatgccaaaggaaatcgtgggaagtatggtttaggctataagcccactcaggcggatatgaagagaagcatcgcgggaaggaagagcggcgtgcaaagctcgcgttggagacaagaaagtgaaggaagcccgccctgccacataagtagaagctttataagagcgggtctgggagacaaaggtcaagtggtcgcaatatgcgaagatgatgctccgagtacattggatgttgtacgaccatgccctcctgattccagctgggaaattggcgagtggaggaacgctacgcaacgagcataatgtaacctttactgtttaaaagctctatagtggcct

SEQ ID NO: 52314 - DNA, 432 bp, Glycine max
ttagaacactgttgatgtggttactaccattttaataatctctctctctgctattgggagcgctacttgagctgcccgatccctccacctttgtgcatcattctttgaaagattcatgctcttttattgcacatgtctatagttgcatcctatctaaagccatatcagaatcgaactgacactgccttacgaatgctaccattattgtcttccaagaatggactctagaaggttccatgtagtgtacaagtaacacttccccagtagactttcttgaagaaatgtttcacagcgtcttatctttatgtatgccccatattcgacatacatttaagatggtcttgggcaagatcccctgtcttgtaaatccacacttgacttggagggggacatatggtacagaacactctttatgttgtaagcatatttcct

SEQ ID NO: 52315 - DNA, 454 bp, Glycine max
  unsure (1)..(454): unsure at all n locations
cttgcgaanagcttgtcgctagagctgacccatcaactgtcttaactctnttagactggtgatccctaggctcttgaccttgacttgatagaacccttttttaagcgaatgcatttgacttgatcccatgttttacggatgaacaaaaattggtgcgaatcaaaactccaacatctatcatgggtggaatggatgaatgcatgaagaaatgcacatgacacatgcaatttatgaatacgggagcccgggaaattgtctccttcttagatacaacgtcttggggtaacaaagtgcccaacgtatgtatttaagaaggtggcacggaccctccgtctgtttgttatagagaggggatcaagacagaattcgcgcgtgacacatatgcganaggcgcaacatggtatgacaatattcactaaatttaaaaggggacatgatacttatgccttgctgt

SEQ ID NO: 52316 - DNA, 572 bp, Glycine max
  unsure (1)..(572): unsure at all n locations
tggacgcagnnntttgacccctgatgttctgtccntngacnaccaggcgtnctatagagacgacccgcacgcatgctagctgtatgatgagttaatactgagttctatattgttnngacgatcaccaaggtgatgaccctttgctctccgatcatgaacacttcatgataacagagatgatgatctcaggaatcaacattcatgtgccacgagtcaagatcaagattctagactcaagactcccgagtcaagagaagactctttctagagcagctattatgagtgttttcaagaactgagcagcacatgaatgtttctcacatccttttaccaaagagtctttactctctgtgaatcgattaccagattattgtaattgttaccaattgcagaacggctgtcaatagccttcatctgaattacgaccgttcggttgatttcaaaatgctatactcgagtactggtgcgttgaacattgaaattagaactcatatgtgaagagtctcgatcctttccaaataagcttatcgaagcgcttaccagtgtcatgcttgacaagtacccgatgtacg

SEQ ID NO: 52317 - DNA, 460 bp, Glycine max
tataaaactcagcttttatccaggcacatcttggtggtgaagctccttctttctggcttattccctagtggatggcgccgcctcttacctcttctactatgacttccgctgcatctccatagtggaaaatcaccattaaaggacctcattgaagctcaaagatccagcctctatagaagccccacaagcaaggcttcatcatttctccccaatggtctacctctaggatataaaacacttacattttccgcagaacatgaatcatcattttgagcaaactgattaaaatgagtctccaccctagatagatatcttgcacaaaatatcaagtattcatgagctaaatatctttctgcaatagatccttttggatgtgctcaattacaaacaaatatcattcttcccaatggtctatgttggatttaccctgcagtactttttgtccaatttccttatacaa

SEQ ID NO: 52318 - DNA, 278 bp, Glycine max
  unsure (1)..(278): unsure at all n locations
acttcttattgtgttgccatcgccaaagaaaaccatggacaaggaatgntttaaaagttgacgcagtcccgcttcttatcacgctcgccactactgaagcanaaccatggacagggaaagttccaaatttgatgtagcccgtactattgttatggattgccactataaagaattcttgatagcgatgctcgaattggggagtctactctttcgactgccattgctgataaacctgtgatcactctgaatactcggcaatgtctaattcttatcattga

SEQ ID NO: 52319 - DNA, 442 bp, Glycine max
  unsure (1)..(442): unsure at all n locations
ccactataaaccccttcaagtgtgaatatgctatgtacattggacagagaaagctgtttacacctatctgacaaaaggattcttatggtattttgcaccaacaatggtccacacacactatttcacaatggtgaccacaataatgatgaggagcgcacaggaaaatttaacctcacctgtgagaccatcgttacacatgatgattataaagcacaatgaagaccttatgatgaaaaacacatagcggatatatgtgtgggatggacgtatgctatataatctaaatattgtgttaaagcggagaaaaatttaatggagaatgaagcccatggaataaaacgctcgttatgtttattgatntactaagcataacattttgctatatataaagatgaaaaaatctatcagagcactcttcttttctacatattgccttgtcctt

SEQ ID NO: 52320 - DNA, 273 bp, Glycine max
ggggggtgactaatattcctacccttactaatatatttactctcacgcttacttcttgtcaatatgagaatcaaagaactacctaagtttaccaaacattgccgtggaaaaacatgtgggagaggatcccccaacgagtttatcttgttgcacccctggccatatcagcccaaccactgggcctagattcttaccttggaatctttcagctaaccacaggagccctcttgttcttgactatgatgcctcctcactacccagaagtccttttgt

SEQ ID NO: 52321 - DNA, 408 bp, Glycine max
  unsure (1)..(408): unsure at all n locations
tttctctatcatgtaaactggtttatacaaggaaaactagtatgtgtttgtaataatgtttcatcctaacattttgaaaatatgtaacgctcgtcagttttggaagccaaattgaatggttgttaatgggtggtaatggccactaatgaattgtaacagtcaataatgagtgataatggctactaaatgcattcttgatggtagaatgcgtatataagcacatgaattnggtccctaagctcatccttttcgaattcagtctgatacaccatctanagaaaggaagagagagagcttggaaaaccacaacaagaaatcttcatggaatggctgaggataatttgatntatttccgctttcgtataatctgtgttctttgtaattgcatacacaagtaaaggttatcta

SEQ ID NO: 52322 - DNA, 341 bp, Glycine max
  unsure (1)..(341): unsure at all n locations
atgattatttaacacacaaaatggaagtactaagtatttattacctatacttatcagaaaatacttataacactacanaataaccataaattggacgaagttgatacaatntacacaagttttattcaccgactgacacacataacagaaggtacccctaagggtacatagatcacattcaatccctataaataaaactaatcgacggtcgcacgaagaacacanaacaagagaacaatgtatggaatgatcacggtcacaattcgatagcgcctcggctttgttttctcttctttctcaattccctcaagtactaaacctttgaaacccgtaaaacaccc

SEQ ID NO: 52323 - DNA, 518 bp, Glycine max
  unsure (1)..(518): unsure at all n locations
tgcaagcttgttntccattattacaagagagttttcanagattattagtataaggacatgagacaagnnttgcttctttccaaatatcattatctttcttaaatggcaaatattagagtcagagcagatattattaatttgaactttgaaagaacaagttatttgcattgagccaagtgcatggttgaacatccctaattgcttattatttcataaattcgcggaataaagtatatggttacatatacatttcanatatattttgttcatctttataaacaagtgagttcaaatcctttttataaatgtcatgacaaaatacaaaaagatagggtagtattttcaatgagcctccattgccaccaaacatatgtaaataagtaacaaagttaaataataagtaaatacgatgactggacacatatataaagttctaaacctaggtctattcatatcacatacacaaattagagaaacctaagtcttagagtagtcatttatccaagctctatgcaata

SEQ ID NO: 52324 - DNA, 139 bp, Glycine max
  unsure (1)..(139): unsure at all n locations
agcttgacgattttacctgggtggtactggcaagcctttcatatctgtatggagctccagtcttgatctggccctgttaaataatgacataacatgatcaaattatatcagcttaagggaaaanaaagaatcgttattc

SEQ ID NO: 52325 - DNA, 441 bp, Glycine max
  unsure (1)..(441): unsure at all n locations
agctanngagaatatggggtacncatcacatgtggtactaggtggcggncgggcgatggtgcacaacatgctttccacatacacaatgcgcgcataaacccaccatcccctgttgcccacctncaactgagctcacgtactcccacgtagcccatcttctcagttctatcaacacgcggtccccatcaatcctctcaagctttcacaacatccaagcaaaacaacgttcaaacagcacaagctatcacagccaagcataacagagcagaagcagaaaactctgctcaacacattaaccaaaatcacagcttgtcttacgtagagaccacagtaacaacttcttcgatccaattcgttaaccgttggatcgaactccatattttactggaagtctatagtggataagcctgcattttgaccggtgggatatactatcaaaca

SEQ ID NO: 52326 - DNA, 363 bp, Glycine max
  unsure (1)..(363): unsure at all n locations
agctagaacattatctccttttgggttcgcaggttcttccatgcacggaatccagngatcatctcgattacaatgcacccaagagaccatatatctaacgctggttcaatctgaccaacgaccgattctggtgacatgtaaaaaggtgtccctctaaacttgaccttcccatanctcagcattgcatcttctctagtcttggacaacccanaatcagcaatcttcagttgataccttgcatgatcatcaaatgaaagaaagagaagatgttgtccggttgagtcacaatgacgactcctttcgatgaatgcaagaaagccctttgagaacatacgagtgagaactctacttactatccgatat

SEQ ID NO: 52327 - DNA, 456 bp, Glycine max
  unsure (1)..(456): unsure at all n locations
cttctgttcaagatgtatgcagcagtgttcacagcttctccccacaaatattttggtagtttcttgctctttaacatgctcctcaccatgtataacaaagttctattcttcctctcaactactccattatgttgaggagtgtatggaggtgttacttcatgtgtgatgccttctttctcacanaaatcagcaaactcagcagatacatattcacccccaccatcccgtcttaatatctcntaaatttttccacactgtttctccactgaaactttgaatttcttgaatacttcaatcacatcactcttcctcttaatcaagtaaatccaaagttttctactaaactcatctataaatgtaacaaagtatttgttacctccaggagtcatatgtttgaatggtccacatacatcagaaanaacaactngcagcttcctcttggatcttgtggataca

SEQ ID NO: 52328 - DNA, 455 bp, Glycine max
  unsure (1)..(455): unsure at all n locations
gcttaagttaaggagtggccgatcacactgttaatcactttcaaataanaaggaaagaggctgggagggggaattntatgctttcttccatacataaacaaagcanagctaanaaaacaactatacctgtgtccattcaagcttgataaaaagttcccaagttccacatcccatagctttaccgttgaatcaaatgatgcactgcacaataagatgaagtagtagcttaatataaacaaaacaaacttttcatctggtattaagaanaatatnataacacaagcangcatgattgcatgtatatgcactcgcacatgggacattggcaacataaaactgcatgacaacantattntaccanagaaacaacagcaacatttaatagaaaccttgccatatacagtatgtagaatgggtttgactnttatataataaacatgctagaggagcagtca

SEQ ID NO: 52329 - DNA, 171 bp, Glycine max
tttctgacttgaaaccttctatggtgaatatccttcttgctgcagcattatcacaccttgttggagacctccaacattcaaaatttaagggttgcgccaaggattcatatggggccaccctcttctgggtccctaggggggggaacctccccccaaaaggaatttcccatt

SEQ ID NO: 52330 - DNA, 301 bp, Glycine max
  unsure (1)..(301): unsure at all n locations
gcggatntggtcttcgccggngagagggttgaatcagatatgataagaggcanattaatcatcctgcttggacgaatgagaaaactggngcaaatgaagagggtgaggatgaaggagaaacccatgcagtgactgccattcctatacagccaaatttcccaacaatgtcattacttatccaataacaacccttcttcttacctaccacccagntatccacaaaggccatccctatatcaaccacanaaacccaccttcacacaaccaatgctaaacaccacctttagcacgaaccaaaaca

SEQ ID NO: 52331 - DNA, 323 bp, Glycine max
taaaacataataacaacctactctaattatgctatgagactgatagctaaaatgagttgatctaatatcctagatcattatatctaaaaacacatgaagctaattggcagtgtgtctgttgacaccaaacaccctcctacggatcttatgttatgccagactccttgataatctgtgtaacatgcacttacataagaatctgtgcctggcctaatcatcaatacacaatgttataaatatttgtcaccattattcagactacctggtggattaattcctaggaaaaacacacgcgtctcctgatatactactttatacttaaa

SEQ ID NO: 52332 - DNA, 443 bp, Glycine max
  unsure (1)..(443): unsure at all n locations
ctctaagcaccgccgctgcagcttatcagatgctgcatttcgggatctatctctcttattgaagaacgacatgcacttcttgcattgtatatttgctctatcgtggtggaactgtcggcattgtgttccttcaacgttagcaagatgtatttcggtttcaccatccactntgtcatatcaacaataaatttcttttctttcttagtcaatcgccccgcgtatggatgtccaactaaggacttcgcccattcatgattatgaatcccacagatcaactttaccatccaacctttccctccacgcactggntttccactaagcctgaagggacaaccacatctcctactcccggtgtctttttaacgaattctttatttctacactngtacgtaccactcctttcacacacaattaacacaaatgaacttctttctctgctaccg

SEQ ID NO: 52333 - DNA, 446 bp, Glycine max
  unsure (1)..(446): unsure at all n locations
gatttaatatatatcatatgggggagcacagcttctcaaccactgctgagtctgatccaactctcttgggatccatcacatcggctaagtgcatattaccactatctcatagtcaactggatggaataccattcgaagatttatcatccatacaactatcctcaactaggctgggcaaatagcatatctagaatgaatgatcaccatgaaccactgctgaaactacagaccttcctcatgtttgcttatttgaactgatgtaagctataacgttatttngagcatattatcacacatgtgttgaggcaaatgggtnaacatgaccaaacattatgggtgtattataattaatgtgcgaccatattgatcgtatatttctgattggaatttagctactatgtatatgattattaatcagtgttaatatgttaaaaatatgtcagcgt

SEQ ID NO: 52334 - DNA, 520 bp, Glycine max
  unsure (1)..(520): unsure at all n locations
gttatctgccgcatgctagcttgaccagcgaatacatgtatgggttggatgttgaattctggtgctcctggggcggagatgatggtacagcgggtgaaccaaaagcggaagtttctttcggtgaggtagccatggaaaagcagagcgtttggaatgatttcgtaaatctcacaanactatngtgaaatgctggtgaaaacacgaatgccaagcagatataaatttgaatgaagaatgtagaggggcgtgtgaagcaaccgtcaaatttgctttgtggcgaacgcgctattaatgttaagtgaattcgttgggcacgttcagattgctgtagttgctataatttctctagcanacaaatgcccagctagcccctcagttttccaaactgatttgcatccaaagcctctgtgaaaatatctgctatttgttcctcaatggtcacatgcctcagngtgatcactctatcatcaacaagatctttgatatagngatgtcttatgtcaatgtgcttggttctgct

SEQ ID NO: 52335 - DNA, 390 bp, Glycine max
  unsure (1)..(390): unsure at all n locations
agcttgcctgcaccatatgttgtaaggcttgtgtatgttaatcaccgcatcgaatatcgcattcttcataccanagctcgcagtgcctaacacataccacattgcaattcaacgatattcccactgtcttagatatgatatttgtttcttccctcttcaactgatcgatgcatatggcttcaggaattacgattaggaagatctgaataacttagtatatatagtctttgcgtaccaatttatatctacgatcattgtctgccattcaactaaataaatcatgagattaattaatgatcttttaataganagtatacaatctaactaattaaaggaaacgactaacatcattctaatcataattatacaatataataaatatttaatttt

SEQ ID NO: 52336 - DNA, 311 bp, Glycine max
  unsure (1)..(311): unsure at all n locations
gctattaatctaannatttttggcatacttaaaaatagagctaattatagttacatttccatacatntactntaaatatacaggcatcttcttcctttttatagacatttattttacattccctctgtctagatagtggcaacttccattattttttttagagaaacccaaagttacccttacatagttacaattgtttagctaggggttgtgaggagtgtntctggttcaccctcctcagcttgacttagagaaagcgctcggncccgatgcgcgtccaccgcttctacagctggctcctgaccccatgc

SEQ ID NO: 52337 - DNA, 311 bp, Glycine max
  unsure (1)..(311): unsure at all n locations
ttcgtggctacctcatgtactcctctaagaacaatagcatcatttcttgcactgaattgttaggagttggaagccatcttctcaatcatattcctagcctcagcaggggtcatatcaccaagagctacaccactggtagcatcaatcatactcttctccatgttgctaagtccctcataaaaatattgaagaagaagatgctcataaatctggtggtgagggaagctngcacacaatttcttgaatctttcctattactcataccaagtttctccactaagttgcctgatgcctgatatgtcttttctgat

SEQ ID NO: 52338 - DNA, 228 bp, Glycine max
  unsure (1)..(228): unsure at all n locations
tgcagcttctatgccaatggacttaccttgaataaatncctctgatagcccttntgagtctctgttccctttccctggtntgaagctcactacaagccttaagtgaacaaccatgatattaccatatccttaatgaagtttggagctttgtaattgctttgggaataagtgtggnggggtttngtttcattggacaacttgntttgtcgactacgcttcatgatgtat

SEQ ID NO: 52339 - DNA, 322 bp, Glycine max
  unsure (1)..(322): unsure at all n locations
atcatttctatcacaaaatgaatgctctattntatctttcgtcccaatgtccttgacagttctggctccttcaacacttgctgatggaanaacatcagatggaagactagacaaagccttgcccatttcaacttcttcatcaccaagacatctaacttattagaagaatcggatatcagtaatgacactttcctcttatcaaatcttttcttgtgtgcataatcttgaagaaaacaggggtggccatagatcctcctctctttttaagatatgaggtggaacaatgtctggctctacacacatgaatgctgctcttcttact

SEQ ID NO: 52340 - DNA, 473 bp, Glycine max
  unsure (1)..(473): unsure at all n locations
atcttgggttgtcaacaatatgccaattccccaattcacagccaggaggacatggctgcacccaatctggtcagtcttgaggagttccttcgtctatcaccgcaacctaattcttgcgcatccatcctgcgctaacataactttcactaatgtgacaaatggggaccctttccacttgtagtccatgtctctgtagataagccaggcttctcttcttcctttcgaaggcaaccctcctcttttggaatgtgaagctcatagcccaacccgaaccttncatgattctcaacgaactccaccaagcttgtcgtgccattcccgtgtcaacctaaacctattccgtgctcatatccgttcctcancataacccgagccaccatcatagcgacaccagatatgcgtggctcaccagaggagattcacataagcactacttcacaattccagtgcttggaatgatgttccaatgactc

SEQ ID NO: 52341 - DNA, 273 bp, Glycine max
atgcttaatatcacttcacaacttcctcgtagaacttaattcacctctctaaataccaagtctctaagaaaatattgtcagtaaggactttgttgtcatatcctatctgttattgttccagtacatcaatctggagcttaagtggaatggagctccctttgcatcaatgcttcccacacatcaattatattactgcgactcacatgataatgtactgacggttgtttttgttctactgcatcacgttccaatgtaagcaatttatatactcat

SEQ ID NO: 52342 - DNA, 127 bp, Glycine max
atccgattattgattagcttttcatcttatcgactgcccacacaaaggaaacacatctcctgtaatagattgctagagtctacatttcctgcaaaatatgcatacacataacctgtgattagtcgcc

SEQ ID NO: 52343 - DNA, 427 bp, Glycine max
agctactgcatgtgtgaagtttggtggtgtgttgttattcactactatatgatatgctggaaactccttggcatggatgggcaaacaatatctggatatctgaattctctttttctaataaccataagaaggatctatcacgttacatgcaatatacgagagggatatacagacacagcttcagtgcttcccatgttccaacattctaataatgtgcatacatctaataaagtttgctatcagaataaaatgctatgaagcggtgtgaatctgcatgctatattaaagtctctctattgaagatgggatccactttatgatattctcctaccattgcagggagatgactcacatgatgatgatgggaggaagaaacatcaccacaaccatcaccagtacaagagttatgatgatgagtaatcaaaat

SEQ ID NO: 52344 - DNA, 443 bp, Glycine max
gcttatcgtaatcgattacaccagttattttgagacaatggctaagttatttatgagtctctgctctaattgattatcatgtgatataatcaatcacttctctttctataagtgtaacagaagtgaacaagaacactctagtcgattactttgagtatctaatcaattacagtgttcttgaaccgttatcagtttttgaaagaacactctaatcgatttaaaagataatctaatcgattactgtattgaattattcgaatgagttaggatcacttgccgatattagttaaagaaagaagagaagaatagtgcttattaacaatgactcacaacttttaatatttgattatgaagatctctttgtgatatgtgagttgtgatacttctttgagtctaagaagacacctcattcagtcaagcaaggttttgaggagaggatttat

SEQ ID NO: 52345 - DNA, 449 bp, Glycine max
  unsure (1)..(449): unsure at all n locations
actgagatgcagctcctttgttaggtttatatatgctgtatgctgtcactgaatggctgagganactgataagtgaaggtagaataacctatggtaaaaagtgagaatgtagtgatatgagtggaaaagtatgatgctctgaggatntgaaaagccaaatctggatttagtggtaatgggaggttagagtgagtaaatcccagtttgaaatttatttacgactgcnggaaagctttgctgtcaaaggaggaaaatgaataccaaagtgaagcaagaccatctctaggtaattggtgttgggagcaaatttgattggggaatttagcgtaaacacttgaaaagttaattatgtatgacttggtgaggaagttgtccaatacccatctatttactttaacctgaaatcataattgaggttaatccaatttattgttgctgaactgctggta

SEQ ID NO: 52346 - DNA, 313 bp, Glycine max
  unsure (1)..(313): unsure at all n locations
agctatgcgcatacttntnntacaacgttcactngcacaagacattcttataactatagaaaaatgcacccatatacaatcaaggcaccttcgttacctagattatttacatgtacttccaagggtgtatttgtacctacatcacatgcacttccttggctataattacatacatgcatactcaaagcatttggggtaccaaatattgcacatgtgcacattccggtatttctaatatttacgcatatacaaactttgtgaagaatcttggctatctacacaataaggtgatacatttcatgctttattcaag

SEQ ID NO: 52347 - DNA, 387 bp, Glycine max
  unsure (1)..(387): unsure at all n locations
cgttcagaaactgctggtaatcgattaccatgtatgtgtaatcgattacacacgtgcaaatttaatagcttttttaaatcagttttggccactggtaatcgattacatcctctggtgatcgattaccagaaagtaaatttcttgtaaaagactttttaacttaaatttcttggccaaaccttgtgctacttcaattggaattcccttcctatttaatataccttttctaagattctagagactgtcttgatcatccatcttgaatatctttgattttcttgtcttgaataaagctctgtgaaacatgtaagcctttggcatcatcaaaacatcagcttgattcttttgtctacatctcccctttnttatgatgactaatcttaaatc

SEQ ID NO: 52348 - DNA, 335 bp, Glycine max
  unsure (1)..(335): unsure at all n locations
cttcaatgacaacaaagacaactncttttctacttataanagtacttcatagggngttgaacaaacatttcaaataagctatctgtgctgtcgtttctggattataactacaacctccccttttttggatccatctcacatcaataactctacccctaccacctgtagatagtttcagacaagtttcctttgaggtggatacctgaatgtcaagtataacttgtaataatatatctttgagggaatgggaggattctcttgtcatttgacgtgttaatttacccactaaagtatcatccgtttctatccatgacccaaggatcacaattctattt

SEQ ID NO: 52349 - DNA, 368 bp, Glycine max
  unsure (1)..(368): unsure at all n locations
atctcttttatcttagtgagagtgattctcctatattcttgagtgattcaagaacaccttggctgtatcaaaggactttcacaacctttgtgtgatgcccttgctggagagagtgaatctttccttcctttcatcatcacccttgttctttcagaccacaattccagaacactcacctctgcccagantnnngntgtggccataacttccattntacgcaccccaataatcgatttttgagcctaaattgatttcaaaacgagaccttcacctcgtttggaatacctatttagagcctgagctcagtattgcattttatattctgtcagcaccaattacctacgtttccatccattctccatttttgc

SEQ ID NO: 52350 - DNA, 403 bp, Glycine max
  unsure (1)..(403): unsure at all n locations
tcattacatatgtggctctcttataacaataaaaataagttgtaaactaatgttttatgcatggttacgtgaaaaagatgctagactgggagcgggaatcgcatgtagattgagcgggaacagaattttgcagaacttaatagctttagtaataaaagatgataaagaaacatattcttatagaaacacaaatgtataataaacgagttaatagcttacattctacttccatgttctctttaatttcctctatcctaggtcgccttccacaaacaatagttaataaaaagtgaaggaggaacattaaagactgattgtatcagtaattttttaaatatttgatagatattaataatanataatttaaatattttagggagaaaagatagatatatataaacaa

SEQ ID NO: 52351 - DNA, 511 bp, Glycine max
  unsure (1)..(511): unsure at all n locations
gacacctgaggcatgcagtctattgtggcaacagtatatttatttataatctgttgtttaaagatatcatnctgctcanaacacataccatcttatagaatgtcaacatgatagattgatgcacaagagaactgacctttctctcttctaaatcttgtatttgctgactgataaatgctcgcaatgcatacagtcacatgatgagtaggccacagagcactacacatttaatattccttcttgcccgtccagcataagcatactctttataatagccgatcctgatatcttcgtcgaacgagcctacaaaatctcgaccatgtcgacccacattgctgntttgattgctaccgaattggccaccgctgccatgatatatattaacanagtcaattccggtacctgttccattactcggattcgccatggtcttacaggtgctgactactgcaaaatctgctgcaacagaacacactaccttcctactgctgtacgaatcctgcaaactgca

SEQ ID NO: 52352 - DNA, 354 bp, Glycine max
  unsure (1)..(354): unsure at all n locations
cagctttacatcaatataaaaacgcnnaatgttaattcacaatgggatgcacagcagacnatatagcaatatattatgaagcctaatccatcccaccataaatgcgagggtaactggtagagattaagttatttaccatataatgggatgaacaatggctccctataaaagagaaaaatggatatttagacacatctataatctgtctcctcatatgctttgccacgggagcataataatgaatctctccgggtagtcaaataataacacctgtttatatatatatataaaccatgcttcagattctacaaaaatttcactggacagacctgtacccagtatctacatatttat

SEQ ID NO: 52353 - DNA, 382 bp, Glycine max
  unsure (1)..(382): unsure at all n locations
atcctgactcaccataaaccctgacctcaggtgataatgtcaattcttaccctcggaaagcaaaaaaaaggggagagggaatatttccacatcaagacgaagcaaaaaggagagaaggaatatttccaatccaaggaaaaaaagagaggaaagggaattcccaatcaaagagtgggagaaagcaaaaagaatagaaagaatattccccaatcaagaatgggagaaagaaaacagagaagaagatagggaagaaagttcccgatcaaaaaaaataatatgcagaaaggtctttggaccggacaatatctgaacaatacagaattgtcaccaaatgaataaaaagaaggaaagggaaccatgacctanaatggtcttccccctt

SEQ ID NO: 52354 - DNA, 394 bp, Glycine max
  unsure (1)..(394): unsure at all n locations
gaacgaaactattcaagttcgtcattcaactctaattatcttttaattcgctcctaaagatagagcgcctaatctgttgctgactgcacactaatctgttagagatataacagatatatgtgtccagtattctcgggcaagatgttctggacattgtatccgcattcgtggatcctgcagcttcaattcttcattagacattttatcttgccttgtgcattgtgcaccccgatctgattccctgacataatgttagacataatgagcagcanctccagcttttcttcattgcctaagagctcttgctttacaaaatatacgcaatctttatactcactaaagtaacacttacatctccgctttggcaatttgctacacatcttataacttctga

SEQ ID NO: 52355 - DNA, 507 bp, Glycine max
  unsure (1)..(507): unsure at all n locations
tcagagtcacctgacgcatgcagcttgggaagatttggggtgaatgattctcacttctctcttctacgtctcnggancagacatcctcgcctaggcgagcccagctcgcctaggcgagctaacctgaccatttctatcttcaaaatttctttgcataaaattaaatatcctcttcgtatgctagtatatttgcttaattcctacgactgcaaataaactatgcatactctaatataacttatcataatatacgaatggatacatagtacaaacattaatggtactatgctgcctcctagtagcgcttctttaacgttttgagttggacgcgggatgatgtgtgatngattaccgccctaccacttgctcatacctgcccataatctctagtaaatgaaatgacatcatgcagtataacgctaatcaacaccacaacctactgatatcacctttcgttcactttgtctgaatttgtgtctactgaaatgaattccatgatctcccact

SEQ ID NO: 52356 - DNA, 394 bp, Glycine max
gcacttctctctctctcgacatagttgaggaaaatcagttctgtgataataatccatgccgaggcgctttcagaacgttttcgtgagtaattacgcgaagattctcgaccgttctctaagagtcatcgttcgatcttccgtttcttcagtcttcaacgggttagtactcttagacacagcttttcatattattctatgtaccccgagtggtccacattatgtattatgtattattattctcagatgcatttactttttataccccttttgacgtgcttatgcaattatttaagtcattcctcgcttaatctaaaataaataaatttcaccgatctgttgaattgatcatccgttattcctcgataaatgattccgaccgtccgtcggccgtacc

SEQ ID NO: 52357 - DNA, 400 bp, Glycine max
  unsure (1)..(400): unsure at all n locations
agcttgacataatttagtactcggcaatataatattataaccatattagtgcancaagtgattctgatataccttgtatttgtaaacagacacaataaaagatgtcatatgctaactaagcacactcgatagtctaagataacaggaaatgatacataatatagtacagaatgtgaatatatcttttcttctctcaaccctctcctgatactcttttatattagggggtggaattcatttatctacagatgggaaagagcacctntcactcacatgtctaatgttaagggagtagaaaatcttcacacatcagagacagctcaacaggtaccagctaacttatgtgttgtcatgtgtgaatgtgttcaagaagcattcaactgtacatgcacatattgct

SEQ ID NO: 52358 - DNA, 262 bp, Glycine max
  unsure (1)..(262): unsure at all n locations
attctctctaagtctatcagctgggctagcgagcgtccgctaagcgcaacacttctgggctaagcgcgaggaagaatccataagaagatgagttgtacatgtttgccaagcgcaccgcttcatctcactaagcgcatcggttcagttcatccgctaagcgagaaatgcgcgctaagcccaaaatcactaacgtgcgcctagcggtccatatgtgcgctaagtgcacgagcacgaacaatgccacctatntaagcctgaaatc

SEQ ID NO: 52359 - DNA, 389 bp, Glycine max
  unsure (1)..(389): unsure at all n locations
agcttataganatcanacaagataatagattatcctctcattataatagaagcatgtgtgcataaataacaaataagtcataagttatcaaaacataaatcatttgtctaagtcacttgcatctagaagtcctaattctcttctaatggtgtagaaagagtctttggttagtggttntgtaaagatatctacaagttggttnttagtatctacaaatttttaaaacacagtcacanttttcctaagactaagtgctaattgactatcaaccattaccaagatgnagttttattatcatataaggttttatcatatcanaataattttattcgaaatacaatattaataatttgaacagcataaaanaatattttggacaatcaatcaag

SEQ ID NO: 52360 - DNA, 467 bp, Glycine max
  unsure (1)..(467): unsure at all n locations
agacactnctactctcacccatanaagtacttcattgggttntgaacaaacatttcaaataagctatttgtgctgtcgtttctggattataactagaacctccccttttttggatccatctcacatcaataactctacccctaccacctgtagatagtntcagacaagtctcctttgaggtggatacctgaatgtcaagtataacttgtaataatatatctttgtgggaatgggaagatcttttgtcatttgaggtgtaatttacccactatagtatcatccgtttctatccatgacccaaggatcacaattctatttttggtctaaatttctagtacatgggcttctagatgtgaaatattattagtgattctntcagaaccataactggccatatgaagtatgaattcatatttttgtatgtganaagaaatatanatatcttcatagactagatactcactaaa

SEQ ID NO: 52361 - DNA, 333 bp, Glycine max
  unsure (1)..(333): unsure at all n locations
tatagaaaaactctggntatgtgtctactanntatggnagcantnttttctccgtcattgaggtgccacttgagctaccangtctctccacctntgggcgtattcttngaaagatccgtgcncctctttgcacatgttctatagttgcatcctatccataaccatatcaaaantgtactgatactgcctaacgaaggcaaccattatgtcccttcaagaatggacttcggaaggttcaagttagcgtactaggtaacagctacccgtgcccctttttgacatgttctgagttgattctatccaaaccatatcaaattgtactgatactggcta

SEQ ID NO: 52362 - DNA, 387 bp, Glycine max
  unsure (1)..(387): unsure at all n locations
actatgctctcttcatgatgaaaacgttnttcttttcagcaacccgtgtgccttttgtggtcctgtgggtccacatcaaacacaaaataaacaaacgtgcatacattcatggaactaatcagcaaatatgtaaattgtacaaccaattgtgtcacctgaagctaaaggaggactgtattcatggaagaaaaatatctgagagctgtgaatatgtaagcaccggatatctctgactcttgctgatcagngctctttgttcactggaaaaaaaaaagaaaatagacattatctcatacaatatacaaagcctcctacaacaaaaaataatacaaccggggagagtctcctctgcttgtgcgatggatgggaagtaaacactctcaaaaa

SEQ ID NO: 52363 - DNA, 156 bp, Glycine max
  unsure (1)..(156): unsure at all n locations
acctgccgcatgcaagcttgtaacgtggtcaggntaacaagtataatatggtttntcttatattcaaacacttangttcaaggagagcattcacctattccttgtctacttanaggaaccaccttttctttgacctcccaacctttattgacatgc

SEQ ID NO: 52364 - DNA, 359 bp, Glycine max
  unsure (1)..(359): unsure at all n locations
ctaatgactcatctcgcaagtatcacacttcataatcacacaactcatatcacagagagtgatttgagcaacacccagatcagctatcacaacatcagtgccaatatctacatcacacaactctgattgaagtaactcagaagatcttcttcattttcaacactatggctattgtacccttgctgttccccacaatctatgaagatactgttgttgctgtcncactttgtgcttacacagtggaggtacggcatagcacctaatacaccactatgaagaaccaatagggtcctccctcaaaacctcaaatacctttgctctgttgttgttagaatagtagatgttgtttttctcatctc

SEQ ID NO: 52365 - DNA, 453 bp, Glycine max
  unsure (1)..(453): unsure at all n locations
atcctctgagtcacctgccgcatgctagcttcacaacatccaagttattcaacattcaatcatctcanactataaaaccaagcagaacagggcaaaggcagataactctgcccaaaccaatatcacagcttttcacactcaattaccccagtaatattctcttcgttccaattcgttaaccgttggatcgactcgaatatttactggaagtctctagtacgtaagtctatattttgacctgtgggatctattatcaaatgtccagaaccccaagtgtactactcctttcacagccagccatacacaagcatgtttctgcagctttacaaaattctgctgcacatttcaagagcaaaattctgcataaagtgcagattttgaaaaccactcttgccttcatccaattttgcccaattgaattctacaagtcctaaatcatgtatcaatcatgtc

SEQ ID NO: 52366 - DNA, 414 bp, Glycine max
  unsure (1)..(414): unsure at all n locations
cgctcattagnnggattcagcttagcgcgtggctttctcgctcagcggatggactgaagcggtgcgcttcgctggatgacccttcgcttagcgcanatgcacaactcatccttcttccagattcttcctcgcgctcaactgaggagtgttgcgctctgcggatggctcgctaagccagcatattggcttagcgagagggtgaaaatcaacacttcacaaacttgcctaattaacctaaaattgagagaaaatgatcattaaacacacaaaatggacatactatagtattattacctatctttaacaaaaagtaatttcaatactacannaacaccataaatggtaggagtttatatgattacacaagtttatacacaaaagtagtcgtatcatcgataacactaacaaatcttg

SEQ ID NO: 52367 - DNA, 197 bp, Glycine max
  unsure (1)..(197): unsure at all n locations
gaaatcaattgtctggcaacaaccaaaatattgtccattaaagagcctccactggctgcatcaatcatacttctatccattaacatcagcccttcataaaaatactacatcaacaattgctcactgatttgatggtgaggacaggtagcacataactngttgaatactttccagcactcatataatggctctccagg

SEQ ID NO: 52368 - DNA, 345 bp, Glycine max
  unsure (1)..(345): unsure at all n locations
tgatgagatatgccttaattctacgtgttctgtttctagtntggtacgttctctattattttctgatagaataacatcctctatcttagggcggntatagcttagttgttaatttccttgtttgtagtaccacgtagcagtagttgagcctagtgggctgttcctccctccacattgtcgtccttcttgattataattcctgtgtggccatttattttcacaaacaaccgtaaaatctgatttcttaactagttattgtaaaaaaacaactaactcacttcccttcattatgcttttatgcttattaaataataaatatactcctgactacacctacctttatgt

SEQ ID NO: 52369 - DNA, 298 bp, Glycine max
  unsure (1)..(298): unsure at all n locations
attcgcgatcattggatcaacacaagatgattaccctatccctcaatacccaaccattacaaccaattggccataaggaaatacggcacancaaacgcaatgtggccactcatgttagctcctccctctcggtactgctgtacacatagtcactaacataagagggccttgagaggcccctcttattctaactgtatcagcactgctggtctgctaccgacctctgattgtgtgtctgcatctctgcacatgtgcttgtctcttctggttgttctcgcttcgtatcacatattagcat

SEQ ID NO: 52370 - DNA, 347 bp, Glycine max
  unsure (1)..(347): unsure at all n locations
agcttgtgcagagatcttaagggtcttctacataatctanttttcactctggagaactctggtacacttttattgtaatatccacacaaaaccagatcttgagcaagaatcttgagctcaagatttgacactaaagttgctcttaattgtacctcatttatcttaggccatctccaaagtcattatttataaggattactttaagttatataatgttgtttaacaaaatgtaccatcggagcgggatgacatttcaaatatggggtcttggaaagttgatgcagtaggtaaatattcacccaactttcattgcattganaatanaaaataccaattcaatgatgatc

SEQ ID NO: 52371 - DNA, 407 bp, Glycine max
  unsure (1)..(407): unsure at all n locations
atgcagctttcgattcgtntatgtacccgtattggtcctctttgtgtttcgtgcatctttattcntcgtttgattactatttatacccnctgttgacgtgcttaagccattttacttaagtcatttctcgcttaacttanaaataaaataaatatccaccgaacgttngaattgcattatccattaacttcggataatatcaattccgaccgttctgtcgtgcccgtaccacgttggaaatcanaacgaggttaaacataatataattatcanacaatatcttcttattaaaataaagcggaaaatcaagcggacattntctctttgggatttctcattcttaantcgaatggataataactaaagtgaaactaaaggcttaantcaattcgtctagtcaagctcgt

SEQ ID NO: 52372 - DNA, 416 bp, Glycine max
  unsure (1)..(416): unsure at all n locations
atccttaagtcacctgcggctgcaacttaagaggcagggaaatcactattacattcttatagttatatggctaggagatctttctattttagtggattatctccctctcccctctgtcaacttaatagaaattagctatgccttgtgcttttctttttccgtaacttattatggacaattcccacttatacaattaatcactacttgccatgttccacacttatagcagtgttttattatttacttgttctaaagtgagtttgctgcctactcaatgttgcgattgcttataaagacttgtgtgtgaatgacangaaagacaacaaaaggagactagttgtgggtttggagtgtaatgaaaaaagagttaatagagtggttctagaataagctgctcaattacgtaagctacgcct

SEQ ID NO: 52373 - DNA, 415 bp, Glycine max
  unsure (1)..(415): unsure at all n locations
ctctaagcacctgcngctgcaagctataaaaacaaatgcctaatcatttcacattgcttgttgaatangacgcatcaacaagaatcaagccaatgctattgtgcaagcaatcaatggagcanaacacaccacatgattatgatgatggatggctcaaattctcacaaaggtaaactcatcactttcacattgagctttcaaaactatcatgacatgtagagaagaatcaagggattcaagtcacanaatgtcaagaacttttatnttcaaaacaatacccatgtcttgaacatatcctataattcaaagaaaaacatgcatatncgtacgtgcacacaaaattgacccataatattaaactgaatatccgacgaaactaacaacattaacatattaacacaactaacaaattaac

SEQ ID NO: 52374 - DNA, 401 bp, Glycine max
  unsure (1)..(401): unsure at all n locations
ctgcaagctattgtggagagtactactaaacctctggatgtaatactcttactatctatttaatggtatttctctggtgtcataccctaatttcgtccggggacctttgcttgatgacatgcgacctttctttggtccttgcgaggtgctnggcacccatcattatgcatattgtgaaattccaggacatngccggaaaccaaaaaaatattcatgcacaatccgtaagttttcgtgatacaccggaaaccaaatggaacatcgttgcgaattaagtgaggttccgaacatccgtaagtcnaaaggggatattatgtaattcgcaggttccgtaacattcggaaagaaacaagtatcgtacaaattcgtagtttcgtacttacgaaaagaataccaaaaaa

SEQ ID NO: 52375 - DNA, 451 bp, Glycine max
  unsure (1)..(451): unsure at all n locations
agcacctgagctgcagctnntaatctagaatattattnganattaaaatttaatcacatttctctttcaacgatccacaatcctcacactccaatggtccctacgagcaggtagtttggctctactcgaaggtggaagttcaaccaacaactaaggaggggtttggttcaagtcgtgtttctttcattcccaagaatatgagggtgggaatacataaacccgtgtttgctacaaggttatgaaaatatattcttgggtatgctgtattcctangaaaagtacctcttcatgtttcaagcaaattttgttcccatgaggaggggtgggtatctcacattcccatgtctacatgagaatgaaaagtattttctacaataaatacatattcctactacattctactatattttcttntttacttgntaaattttctaccattacantatattcc

SEQ ID NO: 52376 - DNA, 270 bp, Glycine max
agaatcatataggttccgagccatctctccaagccgaacttgtgttgataggtgaagaaccacagtcgccccattcaagtcctcaaagaacttatcaaccacatgcaactcccaattgaactaaccttttctccaaaccaaccttcatattcatctaacatcttctcaacattccacatctcttacacaatcattgtggtgctctgaatttaagaagatccttctgtattctatggctagagtttcaccctgtaatcaacaatgatgccc

SEQ ID NO: 52377 - DNA, 371 bp, Glycine max
accacagagtggtacctggagatatgtcatggcggtcaagagaccttgtggatgttatgtggagtgctattgcccaacaccaagcttggctaatcctgacccacatccggcatagttcgtcagtgagaacctgcgacgtacctaaacaggcgagctcctgtcagtcaaccaataatagcctaagtccacgaaccaagagacttgtgtggtggttgccagctatgtatcttgtgtggtatatgtaaaatagcctctataatcgataccattcatgggtaatcgatacagggttaaaaatgaaacaggatgttatagctactggtatcgataccaatggtgtatcgatacatacttgtatcgatccaaaggaa

SEQ ID NO: 52378 - DNA, 437 bp, Glycine max
  unsure (1)..(437): unsure at all n locations
acgctactagatgagttatgtcntgcgaatcggacatcctgtgtatttgtatgaccattngaatctctcgagtgcttccgttggttaatatcaagcgtctcgatattctatgtcctcaaatcagacatctgagcgaaatgttatgaccatcctaatttgtcgagagctttcgttgttcaatttcgagcgtctagatgagttatgtcaccgaatcagacatctgatgtgaagtgttatgaccatcctgactgtgtggagagcgtcccgtgttcaatttctagcgtctagatgagttatgtcaccgaatcggacatccgtgtgaaaagttttgaccattcggctttgtcgagagccttctttgttcaatttggagcgtcttgatatattatgtccccgaatccgacatccgcgtgagaagatatgaccattggaatttg

SEQ ID NO: 52379 - DNA, 453 bp, Glycine max
  unsure (1)..(453): unsure at all n locations
agcttangaacccaagctcttaacttcacttcttgatatttgacttatgcctcaaaaatctaaactttggttttaaaagtggaaaggcgtgaaaattaggacatngtgtgatgcggttttgctagaaattggctgccccatgagggttactctgcatctacgtagcatggaaaatacatttcaatggtatgtatatatgtgtgtgaatataggtagcatggaaaacacctcttaatatatgtgaatatatggcataatatgccttgcaaagtctgattgagtagcaaaaaaatgcctctcaacatatgcgtattngaggataagtagcattangagcctcttagacaatgtacccgtgtcaaaaatgcctgacgaaagcttctaatggatatatgatgtggaattatccctcaaatgtatctagatggcatggaatttccttttcaatgcaag

SEQ ID NO: 52380 - DNA, 364 bp, Glycine max
  unsure (1)..(364): unsure at all n locations
ccactaaagaaatcttctggntctggatccatcactaggtgtagttaaatgattctcttgcattatattatatcacagctngagctgctcttggtagtggagaagcttcaagagttacacttcataagaatacaaaagttgaaaaaaaaggtatatatataagaaaatcactctgcttctagttaactgtcttatgattctagtgcatattattacttggtctcttattggttngctnggtttctttttctccaccctcgctgccatatataactnttgaactngttatattaatntattaccttanattcacagtcctgaatgcctggttatgattgattgattaatatattttataatatgt

SEQ ID NO: 52381 - DNA, 601 bp, Glycine max
  unsure (1)..(601): unsure at all n locations
actactctcttctcatcttactggantattttcgtattgtctantntttttccatctccagcnnctgttttgatccatgcatacaacacctanatctcaaactgcgcgcagaatggtgcggcnttntctatgagtgtctgaaggtcaataagaccaaaacgttcaagcatttgatgaccctctgattcatagtagagaactattggttttaccctctcaaattcttcacctttcagatctacttctccaacactccctattcgtattccagtctccactcttctttctgcttctagagttagacaatcggtattatacaaacctttattataataaaaaaagaaagaactttaacttgactattccaaaatgttattaaaagctagcgagccacactcgaggagcacctcacatagactcaaaggttaagcttaatatcattttccattaaattttcaatacctttccaaacccctactgtttgtttggctttaagaatcgaattgaatacaacaattgtggtccctcattattacatgttgtgttggactcttaaaatagtgctcgttcagctactaattctgcatgcgtctgttatctt

SEQ ID NO: 52382 - DNA, 384 bp, Glycine max
  unsure (1)..(384): unsure at all n locations
cacatcaatgagagctttgtgagtgcanggtggatgcatgaaagtcanattgctatgctggatgaagagactaatcaatatcagccaaattgggttcagccatgttccccagactttgaattgaaaaattggcaaatcatggagcaaccaaagatttatgtttcgaattcgatgtaatcaagtagtttggatcctattgttgtgcctaggctntangggttaccttttttgttaggcattctcttctttaatgttccaatgaccattaatatacaatccttttattgatatattcccttttcacctttgtccatatcatttctctgcatatntatatntggtgcgattaaatgatatgtcgcagatccgataatgagtcctatg

SEQ ID NO: 52383 - DNA, 366 bp, Glycine max
ttacctctcgtaatttctacgaaatctacgaagatgaatgagggaggttatattctattttccaatgttcaagagtgcaataataagattctgaactacaagtgagaatagagcaagaaaatgaagtgacaatcaagcttagatttgataatagagggcatttaccttatccttattgaaagaagggctcaagaaaaattggaaaaacttggaagaagagtggaaatggtgtttccttccctcttgaccaacttgtgaagaagaggaagaatgataaacttctgtgagttttggagactaaatgaacctatagaataagcttagagcatggtccattggattattgcgaagtttatctaatcactc

SEQ ID NO: 52384 - DNA, 366 bp, Glycine max
  unsure (1)..(366): unsure at all n locations
agctngagactcttagcctctctcttgctttgtctgatgtgtcgctctctctcacagcctccaacgctttgcaaaatggcgaccaactcgttaggccaaagcctagtaagccatccacaaggaccacaactactatcaattcatgttcaaatgattacacagcagcttctgagtgtcactcttactctcaccctttctcacacaaccaaagttgctcactcacccgaaattcgaccgagaatttcgagtactcacacagcaaagatgatcaaatttggcattgtggggaggggactaatggctcggttcatagcatgttcaagccaattggagatggagctgctctggtcaatcattccttcatgc

SEQ ID NO: 52385 - DNA, 440 bp, Glycine max
tacacctatactgaccgctcctttcacaaccaattaacacaaatgaactccttcctccactaccagtctgtgtgtcagaccttataatgactgcaacaaatctatcttcatgagcaactgatcgagcccactgcaatacatcatctcggttatcaaacacctacaacgtaacccatacaattttagttttctacaacacattcattgtatcatatcactcacaataacgaacattattacctaagaagtattatacgcatccgaacaatcaacatgtggttcgttcacaccacattattgttcattatgatcattcatatcaacttcttctgacattatattgtcatacatccatcgaccttccgccatcctataaacaaatatatatttttgtcatcatacacaagtctacatacctctttagtgcacacaatattata

SEQ ID NO: 52386 - DNA, 373 bp, Glycine max
agcttggtgttggagtaagaacaaaataatttttactcaagtccaaatgattcaaatattttagtccaagcaaagaaggactaatctctccactcaactccctatagggagagcccacaggtgtggcaagattgatttccatgacttgaccagtgttgttgcagagaacccctggccatgtacagcaatccgacatgatgaaagcctgtttgaagggtctgctactccatgcttgaagctgaggagtgcattccttttcttctcactgcaagtcatattgagccttgctgccttgcttgcacatgaagtggagagttgttgcagcggacaatatcaagagaacaacatgagttgcaaatagtcctgccatgaa

SEQ ID NO: 52387 - DNA, 416 bp, Glycine max
  unsure (1)..(416): unsure at all n locations
agctttacatgcatgtgcacaccatatntactaaacttagatcaactgatgcaatctatttgattgaaaagataatttatactactcttataatgtagtgtacaactaaaaaaaataatataatagaaaatagtgcttaagccattcaagtcaagtcattttgaatctcatcattagtatcatacatctatatgtgtcaaagagaaggagaaacatgcatggtaatgcataacacaacaaaacattataagaaaacatgctttctaaacccaaccaaggtaaaaatgttttcatatttcatgaaatagcatggcttcctatggtggaacaatgatatntaattggtgagtaagtcttgagaatgtttagttgattgtttttctgaatttgaaaatattactcgaaatacacaaatg

SEQ ID NO: 52388 - DNA, 515 bp, Glycine max
  unsure (1)..(515): unsure at all n locations
actattacccacaaccacccaccagacctatcaatgtttagaaaatgacatcggcagatatgcacttgagaagagaaaggggcctatgctttacttgtgatgacaagttttcccctagccatcggtgtcctaataagcaatattttgttccacagtgggaagaagaggatgaacctgctttacaaccagatccaccagacgaggttgagacagctggtgaccctagtttgcaagatcatcatttgtcttataatgctttataaggctcatcaagtcttggaacaatgaagtttcaaggatcaataaatggattgtgagtgcagattctactagataatgggagttcagataatttcctccagcctagactatctcaatgcctgaagttacctatagaaccaattcctaatttgcaggttttggtgggaaatggaaatgccttgactgctgaaagattaattctagacttggaaggtaaatccaaagcatacactganctaccagtgacctacttc

SEQ ID NO: 52389 - DNA, 396 bp, Glycine max
  unsure (1)..(396): unsure at all n locations
tactaggtggcggtcgggcgatggtgcacaacaagttatccacatccacaatgcgcgcataaacccaccatcccctgttgcccacctccatctaagctcacgtactcccatgtagcccatatcctcatttctctcaacaccgggtccccatcaatcctctcaagcttccacaacatccaagcaaaacaacattcaaactgcacaagctatcacagccaagcaaaacagagcataggcagaaaactntgccaaaacaccaaccaaatcacagctnttctcacttaaagaccccagtaacaattccttcgttctggttcattaaccgttggatcgactcgaaaattgtactggaagtctctaatacttaagcctacattntgacgcgtgggatctact

SEQ ID NO: 52390 - DNA, 226 bp, Glycine max
gtgaagaacatccaagccgaggcgcttccgtaacgtttcacgtgagaaattacgcgaagattctcgaccgttcttcaagattcatcgttcggtcctcgtttcctccatcttcaacgggtagtacctcaaccgagcttttcattgattctatgcacccgtggtggccacattttgttcatgtttgttattctcgtttcattgtcttctataccccctttgacgtgct

SEQ ID NO: 52391 - DNA, 407 bp, Glycine max
ttgaaatacgtgaataatataaaataaaacacgctgttatcttattataaattatttaataactataaggccagtaaacttttataatttcacagattttatcattgatattttctttcacaaattttattatttaactcttaatatttttggaaagcttatcattcaatttttttattttctgtatttttccactaaaattggtaaaaaatgatgtaagaaatcactctgttagatttttgtatattgagtgtagtgataatcgatccaaagtatgtgactttctatgtcgatttgcgattataatgatatacaaattagtttttctacatcaactcagaagtaaaatatatataataaataattttcgaaataacctagtttggtatagtgttataaaatcacct

SEQ ID NO: 52392 - DNA, 540 bp, Glycine max
  unsure (1)..(540): unsure at all n locations
ggcttgttgcctcgatgcatctacgcgcactctagaatactcagcctggagagcactctacttgagtgtctataaatctattatctattaatatgtgcaatattgagtatttcacgaagtggttaaatcattcattactctttacatattctctgaaacatcagaatctaatattaactcaccttcattgtgtgatcagaactcatcccgaagtatcttgaagcacgtctttgaagctcaatagtattaaatgaaatggaggatanttcggcttctcctgttgtctaatggttgtgacctgaaagggtattaatataataattaaagaaattactttaaattcaacatatattcaatcataagcattgagaatcacgattttatctataataatgcgataggatatgggatctaatttataggaaactgacatcctctattatgtgagtcaatactactgtctattaaacagcatttgatggattgtacacccatttcgcgatatccagtaatgatccattaatgcgatccacatacacc

SEQ ID NO: 52393 - DNA, 450 bp, Glycine max
agcttgtgatcgtgaactagctgacattgtctgtgaggtgacagagctcaagatggagagacaaaaaaagaagctgcagatagaagagctggagaaaattgtgaggctgaaaaatgcagaggctgatatgttccaattgaaggctgatgaggctaaacgagaggccgagaggcttcaaatgattgctcttgccaagcaagataaatcagaggaagaatttactagcaactacttgaaacaacgattaaacgaggctgaggccgagaagcagtacctttatgaaaagatcaaattgcaggagagttctcgcgcttcgcagggcagtagtggtggtgacccctctcagatgctgatgtattccaaaattcacgatctgctgtacagtgttccttccaaagcagacagtcagggtaatgagcgccacccttttcggacaaatccctgagagtc

SEQ ID NO: 52394 - DNA, 594 bp, Glycine max
  unsure (1)..(594): unsure at all n locations
tcctataactcgtccgatctgtttgtttgtgacgttatgttttttctaccaggtccatgcgttgtgcgcgataaccacacannatatcagctgatgggatctgcatcaggacaattcactttatatgttgttctcaatggctacctaattcttagcatgctccatacggatgtgagatcatggcacccaagtcccaactttcatcgtggattaagtcacataacaaactagtatatttagacatgtctaacgcacggattatcgattctattcccacacagctgtgggaagcactttcccaggttctcgatttaaacctctctcatacacacatccatggcgagagtgggactacattaaagaatcctatatctatccacgctattgatctaagctcaaatcatctgagtggtaaattacactatctttcaactgatgcgcctcaatgaaaaccttcgagcgattcattctttgaactcatgaacgatctcttatgcagtgatcacgacgaaccaatgctttacactttctgaatcttcatctataattcgtccgagagaacctgatgctgcgtaatgacattcttgcaattcg

SEQ ID NO: 52395 - DNA, 368 bp, Glycine max
tgcttctgattcatcattgtgcagcgtttgttgctgtatgatttgatcagggtcacattggacaattgcaggtgtgggcaagttcggctggacttcttcctctgtcagacctatcattatacatgtgagatgtttttatagctatagcaattctttgttttagtgattctcacatcttttcttgaggattgaaatggaagcctaaagtatctctggtcaaaatgatactaagtcaaaattactaaaaattcatgaagtttgagcacatactttttgttgcagagattatgtactgcactgttgatgcttctacaatcgcttgtgctgtctcttgagtgaattttccatcatcctcaatccctagtttc

SEQ ID NO: 52396 - DNA, 467 bp, Glycine max
  unsure (1)..(467): unsure at all n locations
ataaacttcagatttcagagctcttttagagcacannaattggtgctcttctcttcctctcccttcattcatctccttcttcctccaagttcttatccatggcctcctatggtggtgagcttcttctagactcatcttttccttgaagtggcatctcctctctctcttccttctcgatttctatgccattcatattccaagaagcaaaggaatccattgatgaagaagatcctaggcctacaagctccaatggagcttacatcatgtggtatcaagagcatcttcatctaggtgatgctcttttgcttcctctatctttttgttcggtgaattatctttaattccttgctcttcatcttattctccatgtatatcctccattgtcttgtggtttggtgctatttagagtaaattataaaaaataaaccgattaaatcttagatctacacttgttctngcatttctat

SEQ ID NO: 52397 - DNA, 242 bp, Glycine max
  unsure (1)..(242): unsure at all n locations
acataatgcatatatgatgggcagcttaccaagatgtcttcctcgcctgatacgatgaccaagtgcccttccactatgaatntcaacttttggtggagtgtagagggaacaactcccatagagtggatccacgggtgccccaacatgcagctgtagggggggataatatccattatttggaatgtaacttgacaggtgtgagggcctatctgtacagggaggtcgatctctcccctaacctc

SEQ ID NO: 52398 - DNA, 588 bp, Glycine max
  unsure (1)..(588): unsure at all n locations
gcggtcactcatcagttcgctaaatgnttattttatttnnnncnnccagacncccagttgtgaatcgtgcacttccgtacctaaatataagctgagatgtngacttggggacccgaatatgttgttctatgtacgatcaggcgatggtgcttatcaactctgccacattcacaaatcaaacatgaacccaccatgcccagttgcccaccttcaactgagctaacgtactcccagcgagcccttatcctcgttactctcatcaccaggtgcccatcaacccctccaaccgttcaccgataatcaagcatgtcgatatgtcaacatcatgaactaccctaagccaagaaaacagggcagatgcagaaaactctgaccaaacacatttcaatgccacaacttgtcctactcagatacaccagtaacattctctacgctccgattcgaaaccgctggattgactcnaaagattactggaagtcctagtacgtaagctacattctgaccgcgggatctgcttaaaatgccagaacccatactacatactttccataccgcgatgatagcatttctgccaaaacaaatttatcg

SEQ ID NO: 52399 - DNA, 431 bp, Glycine max
  unsure (1)..(431): unsure at all n locations
agctgtagagaagagtgacttagttatgtctatggaggatttggncgagtacacgaaccaagtgcaggtggatgccatgtcngccagaaatgataatgataagcctagctccaacaaagctcacgacgagggatgagggatgccacctcgaatataatgttatgctgactacattccccttaccgccaataaatctcatatcatggatcaagccttggccatagacattttgactatgctgaanagagctaacaccccaccaaaatccaactactcaaaacgttatcgatatcagcacaatcatggtcactcaacaaaggaatacaacgccttgaaagacaaaatacaagaacttatcctgcttggccatctaaaggagttcatacacgagccacagtcatacacgcccaacaattcgtacacaccatagt

SEQ ID NO: 52400 - DNA, 393 bp, Glycine max
tcagcttctgacctgaataacacatcctcaatcacttcatatggttttgtgacagagcgatcaaccaactggagggtcatgcatgtgggcattatctctatctctccaagtcgtcgacacatggagagaggcattaaattgatactagctcccaagtctatgagagctttacccacaacaacctcaccaatagaacacgatatactgacacttccaggatctttgtgcttcgggggaaggatgcgttgaatgaccacactatagttaccttccacaactattgtgtcactgtggatataccggttattctttgtcagcatgtcttttaaaaatttggcatagagtggcatctgttggagagcttctccaaaaggcaaagtgatcttcatcttc

SEQ ID NO: 52401 - DNA, 293 bp, Glycine max
  unsure (1)..(293): unsure at all n locations
atagggattattgagctcatcacctcacgaacgaattctattaattattatagtacggctaatcctttggacataaaacataataacttgcattgtacatgcatgcgaaggatcacatcattactaagtaagactaaggaacgacaccacgagaaagtgtttatctctgaacgacatagcgagaaattgttgagacaataatcaaatactgctgcgcagctagatactgtgactggccgcccaacaccaattagagtgcatcatcaatttctatntagacttagcgtgcatgt

SEQ ID NO: 52402 - DNA, 303 bp, Glycine max
attctgagaagaagagcaataaaatcttggtcctctaatacaactacatcttcttttgcaaatatgttcttctcttgatgctctctgacgatgtttttcaggaccttgtcgacctgctagtgcaacttactcaatactggtcatcggttcagttatgaacatatactaatggagtcgtatgacagacatcagcaccgtgcaatcctccaccggattctacgattctacggatcaaagacacaacaaactcatcttgctccttgtatatgccagcgaatgctaccctgtaaatagaggcacata

SEQ ID NO: 52403 - DNA, 391 bp, Glycine max
  unsure (1)..(391): unsure at all n locations
cttttcatctcttctctctttgccaaaaagaattctccaagactaactgcatgaaatctttttgggtctctcttctcccttttccaaaagaaagaaggactaacagcttanattcttttgtgtctcccttctcccttgtcaaagaattcaaaacgacacagtctgagaattcttttgattcttccctatcccatatgcaaaagatttcaaaggactaaccgcctgagaattcttttgtatccccattcacaaagtttcaaaggtttaaccgcctgagatctttgtcttaacacatnggagggtacatcctttgtggtacaagtagagggtacatctacttgtgtttgactgagaacaagagagggtacatctcttgtggatcagttctagt

SEQ ID NO: 52404 - DNA, 465 bp, Glycine max
ctcagcttaagccagggccagactctcgtgcatgcagaggctcctttatgttatagtccatactccatttgcaaatctgatttcatgcttaaataggtggccttgttcgtgctcgtgcgcttagcgcacgtatggaccgcttatcgcacgttagtgatttttggctcagcgcgcttctcttgcttagcgaatgagctgaagtggtgcgcttgatgacctgtagcggtgcgctcagtgaacctgatagctcatctttttctggattcttccttgcgcttagccactgagtgttgcgcttagcgaatgctcgctaagccagcatattggcttagcgagaaggtgaaaacaagacttttgcaatttgcctaataacctgaattgagagaaatgattattatacacaaacaaagttaaatattataccttattaacaaaagactatatttacaacaccataattggaag

SEQ ID NO: 52405 - DNA, 463 bp, Glycine max
  unsure (1)..(463): unsure at all n locations
agcttgactgtaaacgcattggcattagtgtgtgttgtaactgatgatggaaatggaaacaccactagaggttcggttggcacaagcgttgggcatggccaacgaggacatggatagttgtactatacatgatggaaggaattttatggatagttgcacactttataactatttttagaccatcattagtgacaatattaactattgattgattatttgtattaactttgtaaaaattgtgacattgtatgaacttgttgtctttatcattaatgaatgtatgaacttattgtctttgacagcttatgcgtatgtagatttttaggggaggttatttcaaattttcaatagaaataagtaactacatgatccanataagtggccaataaggttacataatcctacgacatatagaagtcaaanacatgttgaacagaagtgcccaaatgtacataaataatca

SEQ ID NO: 52406 - DNA, 316 bp, Glycine max
  unsure (1)..(316): unsure at all n locations
tcttgtcctgaatcaacacatcctcaatcacttcatatggtcttgtgacagagcgatcaaccaactggagggtcatgcatgtgggcattatctctatctctccaagtcgccgacacatggagagaggcattaaattgatactagctcccaagtctatgagagctttacccacaacaacctcaccaatagaacacgatatactgacacattcaggatctttgtgcttcnggggaaggatgcgatgaatgaccacactatagataccttccacaactattgtgtcactgcggatataccggttattctgtgtcaacat

SEQ ID NO: 52407 - DNA, 454 bp, Glycine max
  unsure (1)..(454): unsure at all n locations
agctcgtgcanatcacatcactctcacatctcatcnctagcatgcattttctttctttacccactcctcacgtttggttttttagggaaaacaccataactaaacgcgccgcaggggatccctatcgcaccagatccaaatctagaacgatgggtgatcaagaggagacgcaggaacagatgaaagccgacatgtcggctctgaaagaacaaatggcctccatgatggaggccatgttaagtatgaagcagctcatagagaagaacgcggccaccgccgccgctgtcagttcggctggcgaagcagacccgactcccttggaactacgcaccatcctccctcanacatagtatgacggagaagggacgcactgnggcacgatggcagccctcacctgggatacaaccgagcggcttacccttatggattggcngccaactattcaccacccatc

SEQ ID NO: 52408 - DNA, 399 bp, Glycine max
  unsure (1)..(399): unsure at all n locations
tgtattgtcgctcagatcttgactagttataactttctaaatattatgagtttatcccttaattttactccaaagtcagtgcgaatcanatcactcccgcattttatctctagcatgcattcattnttttacctactcctcatgtttggtttttntagcaaaaaaaccataactaaacgcgccccaaggcatccctattgcaccaaatccaaatctagaacgatgggtgatctataggagacacaggaacagatgaaagccgacatgtcggctttgaaagaacaaatggcttccatgatggaggccatgttatgaataagacaacttatggagaaaaatgtggccaccgctgncgctgttagttcggctgtcgaagctgacccaactctcctagctatc

SEQ ID NO: 52409 - DNA, 413 bp, Glycine max
  unsure (1)..(413): unsure at all n locations
agcttagcaatcgtcccanaacgcaatnttttccgaaaccaagtgtcatgatttctatattaccaattttactagctgttaatgttggatcatagttttgctatctcatctacccttagtctcatctctttatcttagaactcagtcaattctatcattaccctttttcaatatgcagaattaccaacatgcaaacatatctaatccagcaaattccaccactaatagttagcctatgatccagaaccaacgaaatgcctcatgtccgatttctttcatcttctaattttattgtagcttctgcagatttaaaacaagcatttggttcttcgtttgaacataaatctattatttagtttataattcactgaattctgcctttagtcattttcaacatgcagaactatcaacat

SEQ ID NO: 52410 - DNA, 440 bp, Glycine max
  unsure (1)..(440): unsure at all n locations
acacacctaatcaanatcgagtcttgctctatactgctcaaaatggtgctacatttgtggaagcaatgtcttccaaggttattntgatgatgtcaaagaatcaagaatcaagcaaaatcctaagattcaagaatcaagtttcaagaatcaagagaagactcactcaagataagtactaaaaaagttcttcaaaaaattgagtagcacaataaggtttcacaaaatcattactaaagagttttactctctagtaatcaattaccagaaggtagtaatcgactaccagtgttttaaaacgttagatttcaaatttcaagagtcacaacttatgtttaaacaagtttaaatcattctaaacttgtgtaatcgattacacaatacttgtaatcaattaccagagcttctaaatgttttaattttgaaatttaaatgaagagcac

SEQ ID NO: 52411 - DNA, 387 bp, Glycine max
  unsure (1)..(387): unsure at all n locations
atattttaaaaagataaaaaaaaaatatatgatttcaatgcattataacaaacttactataataataataataatatcaacaaaaatttataatttatttttacttaaatgagccagtttattagacttaaaatactttgtaagtggcttagttttttttttttttaactaaataagtttttataaaagtgtaagtctagttatttcttaaaaaatctgactgatatgggtatgatgtacactaaagcatagatgataggtctctcggaggatctaatctattttcacctatatgaacacttatctcgttgtggtggataaatcgtgtctaaggctgagctgaattgaaaaattgacagtactatgtcaatcanaatgtcacaatca

SEQ ID NO: 52412 - DNA, 258 bp, Glycine max
actcctattcaaaatcttaagattcatgttcatggatcttctccttaacttatatgatgtctaatcccttatacctgatgttatggtgcttaatctcttctaatcgatgtaaaattgcacttcacactcgtgttagaattatgactaaccaaaagcttcaattatacatcacatgaggaagtcgaaaatctaatcctttaaaatgcgtgaatttaagctattcgacaatcggaagtgaatgtttgcttagtctgtatg

SEQ ID NO: 52413 - DNA, 535 bp, Glycine max
  unsure (1)..(535): unsure at all n locations
ntttatgagctgatgacgntcgcanncanananaantangcttacaatgcgggggtcacactcattcgccgtgcgatcttttttctcttctatcaagcccgctctatggctaccttataagaagttgggcccgccaagaacgtagcagcatagatcctctgagagttatcatctctcgataaaagaccatgatgttaacctctatcaatatattctatatgttttacttcatctaatcatttggtacaataagaatcatgctcacaattcacataagcgttatcttcgttacccatacgccacatcatagtcaacaattagattttgaattgtcatctgacacatgggagaccaacatatttgaattataattcaggggacacaattaagattagctcaatactatgttaagttgaaggatgttttttacacatatcgcactcggatatgaattcactccctacatcgccatttggtattatcttctcacagctattcgtctagtggagaccacacacggactctatataagact

SEQ ID NO: 52414 - DNA, 379 bp, Glycine max
agcttagtggcccatcggagttgctctatttatgaaacacctgtgaaagtaagtgtttgagactcttttgataagtactgattctgaatttattaccaattaagtagtgtctccatttctttacgaagtccgtgattgccaacatctcctgagcataagttgacgtagttttcattttaagcagagctttttgctgaagtaggcaatgggatgaccctgttgtgacaaaactaccccaacaacaaaagaagaagcctctgtctctaagtcgaaaggcaatgtaaaaccgatgtagtagtcatagtttgctttaatgctatgaatgcttggtgggcctttgaagtccattaaaagaagttccttataataagttagtgag

SEQ ID NO: 52415 - DNA, 267 bp, Glycine max
tgactgctggagtcgctgcactagatgtccaacgttatgctaacgaatagatcgggctgcacacatgcacaaggcatagatacagtgtcatgtgaagaattgatgctgcacgattcacgatgtcggataccctgtggaggacatcatgccccaaatactggacatataaatcgtgtgtatttgtaacagatcattgcgcaattagcaccagattagatgatctatctgtacgaacgaattacatgatagttgacgtgtgaagtacaa

SEQ ID NO: 52416 - DNA, 186 bp, Glycine max
gacaagttattctcgaattgatgacatacatacgatgattatgactgattcaagagtatcaaacaggcgttaagagcaccaataagtgagttagaaaagtgatcccaacacctgccactgatcgaatagtgtggattataattgcatcctgcgacttgcaccggctcgatgagatgacgacctttt

SEQ ID NO: 52417 - DNA, 376 bp, Glycine max
  unsure (1)..(376): unsure at all n locations
agctnggtatgaggtatgccaaccatgtttggataatggctaaaggagcttgttgcaagaaacattgaagagatggaagaagatgataaagttgaagctcaacatgagcttgcaccacaatagagtccttttaaatctctcatgattcagaagatggatgccatgcttcacctccatcaatagcacttagccgaagtacacagttccttagagaatatcaacaataggctggaaaacatagaaactaggctcaacctcatcaaccttcctaaccttaatgagggtaattcttagatgtgttgtggtgcatatttctgctgttcggctttcatggtatttttagtgctaatcttgtccttctttatatctagttgtt

SEQ ID NO: 52418 - DNA, 381 bp, Glycine max
  unsure (1)..(381): unsure at all n locations
ctctcgtacttaagaggtattttatatagtcattgaaaattgtgatgttggtnttatggaacaacaatctaattaggagatagagaaaaagatatagaccattaactgcagttattctaaaaaaaatacctctatagtgatcgggattgtagttgttctaaaattaagtattattctatattgatactttagatgttaaatattaatttaaaaatataaaatgtttaaaaattctacattattgttctataattgttagaagataaaactaatttatttaaataaatttcacagtcaaattttcttgaaatgttcctcgatatataaatgtctaataaataaaccaaatacaacaatcaactgcagagaaccccaacaatg

SEQ ID NO: 52419 - DNA, 451 bp, Glycine max
  unsure (1)..(451): unsure at all n locations
agcttgagctctcccttnctcttacattttttgttttatacccattctttctttcacccctagttctaaaaccctcaatggccatgagcggctaatcccctagctagggcctggcaggcctaanaagccaatgatgtatggtgtacttcaagagttatcaaagcaaagaggattcattctaggtttttatgttctaattcttttctttttatcttgcatttatgtcttgaatttcttttaggttttattcgcttgagagagggtatttcctaataagggtttaagaattaatgcatgcaccagttttaggggttatacgcttgggaaagggtaacacctaatagaacacattaagaaaaggatcgtcgggttatcattgctaggcatagaatgatggcccaatgcccatgcatttagcaacatctagaaattaccttaatgcatttaacta

SEQ ID NO: 52420 - DNA, 331 bp, Glycine max
ctatcatcaaagtaagcatactttaaattcgatggcacaggctctaattctggtgtggccggctggatagtggtagaaagagatggtttctcagcctgtacctcataaagaaagtcagaagtatgtgtacttcctaaaacatggatagctctatctgactttataaaatcaatcttacgaggtaaaacatcaccagacatgtaatcaatatcaaattcatattcactctcagcatcaaattcagacatatgatcaagtacatattcagattcaatgcatgaagagtgacagacatgcatattagaatgaagatgagtcatgtattcatcaa

SEQ ID NO: 52421 - DNA, 441 bp, Glycine max
  unsure (1)..(441): unsure at all n locations
agcttctatgtcagtgtatgtctatgatgtgttgtgggatactctgttctagcttcgggtttatttctttcgtccgaggaaggaaacttgggtgggttagtagggtatacatactctaagatcttagttatgctcttatatttgattgctctatctccatattcttctgtgttgtctggactggtgaaataaataaatagtgtaggttttttttttcaaggtatatgatattatgattatattcccaagaagtggcattcctagaatgccatgatcagtaaagttattcttgacttgagtaaaaaaaaaacatgttttgtttgcatttaatattttctaaatgtttttcaaaattcaaatgatgggagtaagaatgtgatacaaacaagtgtgagtggatgttaatagtcggattataacattacttccatccncatttcc

SEQ ID NO: 52422 - DNA, 291 bp, Glycine max
aagagacctattgatgtcatttctcatcatttcattcttaattgagtcaatcatttaccaccctatattatcggttgcgttatatatgtgcatttgcattctcactagcgaacaaagattatatctagagcaatgatatgtgtcttttgtgatacaacaccactcaaaagggatataaggcctatcatccatctacaaaaagatgttctgatcaatggatgttacatttcatgagcatgaaatgttgtttcccttgaaaacacttcattcgttacctccaagagggtgtga

SEQ ID NO: 52423 - DNA, 308 bp, Glycine max
gcttgagaatggctagacatgatacatgtattttttggtttggttcaaggataaaagggatgccccacattatttccatgacacaaatgcaaaaatgatgatttggaaactttatgcaaaactggtcatgcatgcgcttatgcggacgctcaagtgtcaaatttttatggtcaggtgatgctagggttcaagattcatttcctctattttaaatcaacccaatgtttccaaaatatgttcttttatcaatttgtgcattcctccaagtccatttcgggcgtccggtgaaatatttacagcattcaccc

SEQ ID NO: 52424 - DNA, 424 bp, Glycine max
tctccacttgtaactggggcctaaattatatagcatggtttacacttgttgaagagcttccttggccttctttgttctagccctggccataggtcctccaagtccttataaaggttccttgtcttgtcctcatcactctccccctcttcaaaaggatttgtcctcaaatcggcttctccatatacatcaaaaagagttaagtcagacacactaaatattgtactcacattatactcaccgggcaattcaatcttgtacgcattgccatttatcctttcaagtacttgaaatggaccatcccctcttggttgaagcttggattacctttgctccggaaacctctcctttctcatgtgaacccaaaaccaatctttgggttggaaaacaaccattttgcgccccttgttgcatgttagcatactct

SEQ ID NO: 52425 - DNA, 397 bp, Glycine max
  unsure (1)..(397): unsure at all n locations
attaactcactttagcctccatttaccacagaattcagacttagccttccaactctcagagtctcactctntntccactcataacatcacattctcactntctaaccctaggttagttctaccctttgtctctaacagatttctatcagcaatttcagcatataaacatcacanacatcctcacaaaaaccctaaaacagaatgggtatgtctaattcatccaaacatggcgatttcaacaagttttcagcaaatgccttcacaaataatcatcacacagcagagaactaacaaaaccacccatcatatctcccanaaccccatacccacganatntaagagagaaagaagtccacccaaacctgagatntcgaagtcccactcgtagccacgcact

SEQ ID NO: 52426 - DNA, 372 bp, Glycine max
ttcttctttatatcatcaattcttcatgatctacaagaaggtccacctgcatgaaattttctgctaggaagctctctcttttgtgcgactatgtcatcctctttctcacgtgtagaagcaagcttgacaggttcaggtgcaggtgctgctactagtggaggcacttgaatctggttggcagaccttaaggtgatggcactcacattctttggattctgcatagcttgtgaaggcaattcgtcagaatattgggactgagcttgattcaactgagtagccatctgccccatctgatatgtcacactctaaatggaagctcttgtctcttgctgaaattgcatattctggatggtcatatgcctcactaactct

SEQ ID NO: 52427 - DNA, 379 bp, Glycine max
tgcaagctgatgattacatctccccctttctattcttattcttcttgatatcatcaaaatcttcatgatcccgactcgttggtggaggatgcatgaatgacaatcaattcatggggctccgaataaaagtggagaatggaggataggcgaagagcgctacgcaatcaattcgcgggtctcccgactcggtggtggaggatgaatgagtgacattcatctcatggggctccgaataatagtggagaatgcacgataagagaatatcgctaaagcgtcaattcgcggggctgcatactcgactgtgggaagaagcaaaaatgacaatgatctcatatggctactaataaaagtggtcaatggagaataggcgaggagcgct

SEQ ID NO: 52428 - DNA, 431 bp, Glycine max
  unsure (1)..(431): unsure at all n locations
gcttctcctatcttgctataatagggggagaagtgaagaagtatattagttcatttctctttgccacttctctctctctcgaaattgctgaggaaaattatttccgtgaagaanatccatgccgagacgcttccgtaacgtttccgtgagtaattacgcgaagattctcgaccgttcttcaagattcattgttcgttcttcgttttctccagccttcaacgggtaagtacctcaaaccaagcttttcaactcattctatgtacccgaggtggtccacattgtgtttcatgtattattattctcttgtccatttgcttattatacccctttctgacatgcttaagccatttatgtaagtcatttctcgcttaatctaaaaataaaatagattttcactgatcgtctaaattatatcatccgttaattttggt

SEQ ID NO: 52429 - DNA, 474 bp, Glycine max
  unsure (1)..(474): unsure at all n locations
acctgcggcatgcaagcttganacttgagtgctcctgatatgattatttgtgtggattgcctcanaatgtgtttgcaacttatgaaattntatttcgttggcttcttatgttttactttggatcggaatcaattaattatgagttgctttcggaaatgtctttgtaccatttttctgttctgtttgaagtgattctcaacttttatgagatttagttttggttattgtttaaggttatgtttggtttttggttttctaaattccctttcatgaatgtttggttactttgcaagtatgttgtatattaattttttttttctgaaactcaattttataaaatcaaaacttgatttatttntacaatttctatttacaaacttaagtttaatccaactatgaacttagttagaanaaacattaaatatttttagtgagaaaaaatagtctataatatcttcatagaaaaaaatatta

SEQ ID NO: 52430 - DNA, 465 bp, Glycine max
gctttcttgtgaaactactatggaggctgaatctttgagcttcaataaggtccttcaatgatgattttccaccatggagatgcagcggaagataaaagagaagaggtgagagaaggcgccatccactcacgaataagccatgggaggaggagtttcaccaccaacagagtgccttggataagaagcctagagaggaagcttcaatggaggaaaagaatgagagagagaggggaggcggagcacgaaattgatggagaaaaagggggagagaagttgaactttgatgtgtctctcacaagtttctcattcatcatagatacaacaagtgttacacatggttctatttatagcctacgtagctctcatgagaagctctctcgagaaactgccttaagaaacttctttaaagaagcttacttgagaagctagagcttagctacacatacacctctaataactaagctc

SEQ ID NO: 52431 - DNA, 449 bp, Glycine max
  unsure (1)..(449): unsure at all n locations
agctntatcgtcaccaaagattggtattttattcttcatttacaaaagtcttgttatgctctttcaagaccctattcttcgatatttttgggttactttccttgactaaagcttcgtgacgaactatgtacgacataacttcattactgttattcagtatatacaaatgagcttgttgcaattcttctagacttggagtgataacagatagtccccttgaacccttacctctcactctctcgttatgccaagacttcggaaccccaataggtattttcttttccatgtactcggaacaaaactcaatagcttcttccgcaatgtacctttcaacaatagatgcttcaagacagtgtagattctttgtgtatccttttaagatcttcatgtatcgttcaactaggtacatccatcgcaaataaacacgaccacaacatttaatttccctc

SEQ ID NO: 52432 - DNA, 487 bp, Glycine max
  unsure (1)..(487): unsure at all n locations
ttctcggtgggttgatgcactctatcatgtaaaatagcatattgattgttatacatattttcaatcaactcagtntcctcctcaggggtcttcagctttatctttcctcttgctgaagcatctaacaactgtttggtttgtggtctcagcccatctataaacatgttcaattgaattggctcagaggatccatgtgtgggagtctttctcaacataccctagaacctctccaatgcttcactcaaggattcatcagggaactggtgaaatgatgaaatagcagctctcccttctgcagtctttgactcggggaagtatctcttcataaatttataaccaacttcctcccacgtcttcagactgttacctttgaatgaatagagccatttctttgcttctcctgccaaagaaaatgagaatacattgagcctaatggcttcatctggcattactgctatcttcacagtgttacaaatttctatgtaca

SEQ ID NO: 52433 - DNA, 422 bp, Glycine max
  unsure (1)..(422): unsure at all n locations
ataaataaaaaaaatatgaaaatgtttttgaaaaatattatttaactcatcaaaatatttaaataacactaaaaatcaaattaaaatataaaatacaagtttaaaaaatatttaatttcaaaagattatttaaaaaaaagttaatcaatataaaaattttgagccttgaaacctatcatgtccctaatgagaatcttgaaaatccaattcacctaaactatataataaaaaaataaaacactacaacatagtcacgaaggtgaataagttataaggttcttaattttaacataaagtaaagtcattgaaataagattagtgagttgtgaaggtaaaaattataagggattaaggtaaatattagttntaatatattagataagtacaggtaagacacaatatagataataacatactcattc

SEQ ID NO: 52434 - DNA, 534 bp, Glycine max
  unsure (1)..(534): unsure at all n locations
ccacaccacaagtttcgcaatagatgattnccctnnnccccagcncncccatttgactcttacnacgcacaaacaacagcggcaacacggtactgagaaacaattattctgagaagcctagcatccgtgtacccaaaataaatggcaaaagaatgctcatattcaagcagcgtcgccatataaattcttctaggaaacaaatgaatggagtcatatatacctctacgtcgcaactcattgccaactgtctactgaggctacttcaactagccattatgagttaatataaaatgtgataacgagagatatttgagacattgatatgaactgcgcacaaatgcaatcattatgaataagcgtgagtcccacccaacanatcattgatgtgtttttaaannnngnnttggnnngggggnntnnnnntgcgccnnnaggcggttgtgtgtcttctgtcacccccgctcaaaaaggccctgaaaataaagaaaagttnagaagaaaattaggcaggtttttttntgtntatagaagaag

SEQ ID NO: 52435 - DNA, 157 bp, Glycine max
atacaccctacactcccacagtatcacattgtttgcgaacacaaactaacattacaaatatctgtccctaaggtggaattctcattccctatggcctcattcatataaatcatacggggaagacctcaatagccactcttctgttttcccatggaca

SEQ ID NO: 52436 - DNA, 406 bp, Glycine max
acttctttcgaacaagtgagatcgaaattctcaagcacaatttcaaggacaaagtcagccatatcgtaactctgcaagttcgaaatgctagagttattgtatgaagcaacaaggacaagttttgtgtgagattaaatctcgaacagaatcccactaataagtagagctgtcaaccattacagttggatcagccctaccctattttctattttgtgtacgataatattttctttttgtcagcaaaagtagttatatataaatagaagtaccagatgtactacagaacagtatagttgtgtacgataatataaatggttggctatctgtgatcggtcaatgtgttgtctactcattattattctgacccgctaattcattgtctacatctcttccctcatgaaatctg

SEQ ID NO: 52437 - DNA, 374 bp, Glycine max
  unsure (1)..(374): unsure at all n locations
ctgcagcttggagctgaagaaagtttgtcattacatgcccaaccctttgagtggcctttttattgattattgcatcttagtctctatcttttcatgtgtacaccatgcatcatcgtgtataggtaggaagattgtttctaaaagttagaaacttcttcagtgcataaaactctctattttaatcgattaaaaggctgatcgtaatcgattacacaagtgtttgtagcttgcagagttagattttccaaccatagtttgtaattacctgtgtgttanatgttgttgtttggtagttacaaggactcaggcatacaagtcctagtgtcgactagaaccgtgttctagtaggcattgtatgtctcacaagacgtgca

SEQ ID NO: 52438 - DNA, 320 bp, Glycine max
gcactatatcatgcatatacattgcttgtatcttgattgtacgaattaaattgtcatcatcaaagagggggagattgtagaagcaaagcctttgtctttgatgttgtgatgatgactcgtgatgattcgatgagaatgcgcttctcacgctctattcatgagcatgattcatgaatacaagatacaacatctagaagatcactagtattttaggaagggaattcctaattgaaatagataaatgtttggccaagagatataaacttaacaagtctttttcaagagatatactctatggtaatcgattatcagaggatgta

SEQ ID NO: 52439 - DNA, 615 bp, Glycine max
  unsure (1)..(615): unsure at all n locations
ctcccactccgataccatcttattaatcttagttgtcnanntnnacncaaacacaacggggnnnnncaagtgtgacttatgacgctcgcancannnnnannngnnnnaacacnccncgccacacaggaagaggaagcattcttttgtattcttcaacgaggctgaatctacgtgctacaataatgtccttcaatgaggactctccaccatgcatatgcaattgaagataacagagaagaggtgagagaaggcgccatccactcaagaataagccatggaatgaggaatttcaccaatccgaagacgtgactcggataacaaagcctcagacaggatgcctcaatggaggaaaatattgatacatacatgtgaggcggagcacgatattgacggagagtaatggggagagaacgctaactatgaagcggaactggcacgtgtctcatacatcatagggactacacgtgttacacatgataccgattatagctcacgatgcatgcatgataagctgtcttgaaacaatccttataaacaactttaatagctccctgacaactatacgtatctcaaaaacccagtactaactaacacgactctcgagaactgtcttcc

SEQ ID NO: 52440 - DNA, 272 bp, Glycine max
  unsure (1)..(272): unsure at all n locations
atgtgctaattataaacgaataaattaaacaagataggagaacagaaatttatttctttccctncgactagctgggtactgcaattactttttttaattactattattagataaatgatcggaagatactttataaaaactattcgtagtagaaatttgttccaaatcacacatataacttgattcaaacaaattgacgtgcaagctcgacgaaagtcttattttgtacacgctgtgcgcatgacaaatccatgtttaatcattatgattag

SEQ ID NO: 52441 - DNA, 645 bp, Glycine max
  unsure (1)..(645): unsure at all n locations
ctcggctaccttgtcgcaattatctgttttggcttttctactacnttcacacaccanacagccnnnncncggttttgatcatgtttgacnacgcancacaanaaacncaaccgggcaanaaaaacgaacccgcagcgacgaaacctttttgtcagaacgcnngaacacgaaagccgacggacaagaggcgccagcaaccagacgacggaagaacgagncagcgagggagcgccacacagggaaacacaccgccgcgaacgacgagacacncaggccncagacagaaaacacgcagaggagagagcgactcccgacggcacatgagaagatagtagtcatatatgtcttctctcattctactttgaagataatatatatatttctccataactctaatacttaagaaattggtgcaacttataatgtatacgtgttatcctctatccaccagtttatttcgtttatttgcattaatctatttatgatacataattataatcttgtattcactggcgtttatcatcattatggcgatatactatgaccatcatgtctctttacctgttgtgtttattatttgccttggtcatggccttctgtgcttatggtcttgtactaatggttgctacactgtttggcctttct

SEQ ID NO: 52442 - DNA, 345 bp, Glycine max
agctttaacccttatggaggatgtgttattataaatcatacatatggcctcagcttgatcgtgcactctattgtcctctctaatggatgctctcagacccattgcagctaaatgtaatgctcacaaccaagaactacaatatcatcattatccattagtgccgatgagccacaatatgtgagtgctccagagatgcttctacaagtattttttgatgtataacttctctgtgcaacgttctgacacattatacatatacatgaataatataaatgtgccgaactaaaatcatcgcttgaataatcatgtcctcagggagagaagatgatctgaccttgaggtgtg

SEQ ID NO: 52443 - DNA, 292 bp, Glycine max
  unsure (1)..(292): unsure at all n locations
ggacacttctaaatgtagtgcctaagcacttgctttaatttactccctagagcttactaaacatttaaaacaagctcaacaaatatcatggattaacataagatctttntataaaccctctcaaacactcatataagcacttatagcataaaatgagtctcaataagctgctaatatgctcttacacatggagccttaaattgttttggcattcaaaaaactttcttattacaattacaatggtatatttttaacgctaataaaaaaatttaaatcaaattcttgagatgaa

SEQ ID NO: 52444 - DNA, 387 bp, Glycine max
aagagcgacacgatttaaatgatcggaggatctccaagatatccggctcaactgattgccataacacggcacatagttgatagtcaagcttctcccattcaggtcttttatcaactgaaacagaatccgaggttttctccaagtggtcatggtgtccttgaccaaggaaccacaactccacggaagcagaccacgaaggatagtttttccagttcagctttgcagtggtgatagttgaagtcccggaaaacgaaaaaataggtccagaagaggccatttaagagccaaacaacaaaccctaacacacaagagaggaagacactcaagagctgaccaaacggcttgccggaagcgggaggtgaagcctgaaacagaccctggaagtga

SEQ ID NO: 52445 - DNA, 395 bp, Glycine max
  unsure (1)..(395): unsure at all n locations
ttactaaacaagctgaaattaatcataatcacaagctagaaataagaatgaaaagtaggaaagggaaagaaaagctgggttgcctcccagtaagcgctcttttaacgtcactagcttgatgcattgtcctgttatccaggatccaaaagagttcctacttcaaggaccttcttctcaggtctctttttctccatcacatgcactgtaaaacagacattatggctnggtggatctttgtcctcatggaacanatcaaagctgatcttctgatcttctatgcccatctgcaatatcttcttccctatgtccaccatggaacttgcagtagacatgaatgggcggccaagaatgagaagaatgtcagcatcctcttttatatctatgacaatgaaatc

SEQ ID NO: 52446 - DNA, 450 bp, Glycine max
  unsure (1)..(450): unsure at all n locations
tcttaatntatctgagacatatatatatatatatatatatatatatatatatatatatatatatatatatatatatatatatggccacccgcacatacatctgtgagggttttttcacatagtttaatggaattatattatctttattattcacacnccttgtttacactaaactagagataggccattttcaatttcttttgttgatggacaagcacaagctagtgtcattacaattaatgattaagaaattaaaatgcaaaattacttaataagagatataatatntattatatatactatatntaatgtgataccttctattttntaattntataatagcacccacaaagcatgtcatgagaaatataaaattatatatgtctttagcaaggtatctacacacgcacgtacacttcactatagagtataacgcttntattttgccan

SEQ ID NO: 52447 - DNA, 416 bp, Glycine max
  unsure (1)..(416): unsure at all n locations
agacttgtctaatcactntgtctcccagactcaaaatgatggcactatgtgctttgtcgagcaagatcttcttgtctttacgttccatcttgacatcaagattggcttcaccattcagagcatcttcaagaccttgatgcacaagaagagccctcatccttaatcgctaaagaccgaaatcattttgtcctatgaatttcctgacttcatactttgcagatgccatggatgatcaatccacgctcactgcacgcggttgttatgcaaagtatcacataaatgatacacagaaatctcataagttatttatcaagatgagtttcagattacaaggagtntttctagagagaattgtaatagaatcatacacaaactaaacagtagttgagctatttatacttacttgtttaccaatg

SEQ ID NO: 52448 - DNA, 435 bp, Glycine max
  unsure (1)..(435): unsure at all n locations
agctntcataggtganatcaggtgcagccttttttttagagtcctctcacgaggtggaggttgtgccatgttctcagaatgtgcaaaatcagaatgctcagaatcagaatgctcaaaattataatgctcaagatcaggatgttcaaaatcaccaataacagaatgcacagattcaccagttatggaatgctcagaatgatcaaaaggtataaaatgatgcctaactaatctatgaaatgtcctatctatctcaggatcaaagggttgtaagtcagatggattgcctctagtcatacactacattcagcatgcacacaactagttgccttgtcatgtaaataaaggtgtaggtttgaactacaactaccctcanatgatatccaaatgacttgaaaanttgtgagcaacccttataaatgatgagaagatagcaca

SEQ ID NO: 52449 - DNA, 382 bp, Glycine max
ggcttcacgccatctcagtatgatgatcccatcgaaaccttgtgtaaactttcccacagcggtatggttcaacattgttaccttcctcgccaaaatcgcctcccatacctatcaaatgggtgtcaccggaagagatagccattcgtcgtgattgagggccatgctttaattgtgatgagaacgtaagttgagggcataaatgtccctccaagttcttcctcctcatcgccgatacagatgactaactagaaggtgatctctcttccgatatgctggtttcaatggaaccgcaacaggctcagataagcatacatgccctgtctggtcatttggcgcctgagaccttacgattgttgggacgcatcgcggactagaccatggt

SEQ ID NO: 52450 - DNA, 367 bp, Glycine max
agcttcccaagttttaagttattcctcttttctgtcctaagcaaagttccaaaagtcctattaacaacttccgtttgcccatcggtttgtgggtgacaagtggttgaaaataacaatttagtgcccaacttgctccacaaagtcctccaaaaatgcaaatcatcaagcctaggtataggatgcctatatttaatggtgatgttattaagggctctacaatcagaacacatgcgccatgtcccatcctttttagggaccaaaatcactgggacagcacaaggactcatactatctcttacccaacctttgctaatgagttcatccacttgtctttgaatctctttggtttcttgtgaattacttctat

SEQ ID NO: 52451 - DNA, 333 bp, Glycine max
  unsure (1)..(333): unsure at all n locations
cttgagccaattcanacgacaantaacttttactcggacgtctgatttagtcccgccatatatcgagacgctcgaaattgaatgttgaagctctgagccaattcaagcgacaatatccttttactcggatgtctgactgagctccgtaatataacgagacgctcgaaattgattgtcgaacctctgtacaaattcaaacgacaataactttttgctgggatgtctgattgagtcctgtcatatctcgagacgctcgaaattgtatgttgaagctctgtaccaattcaaacaacactaacttgctactcggatgtcagattgagatccgtcata

SEQ ID NO: 52452 - DNA, 379 bp, Glycine max
  unsure (1)..(379): unsure at all n locations
agctcgcctcanagagatctaggaaggacttcgcggttgcagggactagtgccgctcctgagttcgatagccatcgttttaggagcgctgagcaccagtatcatttctaagccatcaagggatggtccttccaccgagagagacacgtccagctcagggacgacgagtacacggatttccaggaggagatagctcgccgacattagacgtcgctggtcactcccatggccaagttcgatccagatatagtcctcaagttttacgccaatgcttggcctacggagaagggcgtacgagacctccggtcatgggtgaagggccagtggattcctttcgatgcagacgccctcagttaggtcctgggatatccgctagtatt

SEQ ID NO: 52453 - DNA, 366 bp, Glycine max
  unsure (1)..(366): unsure at all n locations
acgtggaagagtcagtcttcctacttttgtttgttgaccacagagtggtacctagagatatatcgcggnggtcaggagaccttgtggacgtcaggtggggtgctattgcccaaaaccaagcttggccaatcccgacccaacccgggcatagtcagtcagtgagaacctgtgacatacctaagcacctcagctcctggcagtcaaccaataaaagaacaaagtccacgaagcaaggaggcttgtgtggcggctggccaactatgtatcttgggtggtatccgaaaattaccctctagtaatccgataccattcgtgcgtaatcgaatacagggtttaaaattggagacaggatgttaagtagcttct

SEQ ID NO: 52454 - DNA, 380 bp, Glycine max
tattcagaaaattagagtttatctcttttatcttagtgagagtgattctcctaaattcttgagtgattcaagaacaccctggctatatcaaaggactttcacaacctttgtgtgttgccctcgctggaaagagtgattctttccttcctatcatctccacccttgttctttcaaaccacaattccagaaaatccacctctgcccaaaattagctcgtgaccataactcccattttatacactcaaattaagtgattcttgagcctaaattgaatttcaaaacgagacctttcacctcgtttttgaatcacctcatttggagccctgtagcttccgttattgtcatttctatatttctgtccagccaccacttaacctacg

SEQ ID NO: 52455 - DNA, 593 bp, Glycine max
  unsure (1)..(593): unsure at all n locations
tctaatctctcacgttatttaattattgactattgattatncnacncccccagcnnnncnctgtatggacatgattacggcccatanatacacaacgccacgatccgcaggagactgcacaatatggcgtgatgatacttattatatagctgacataccgacatatctgccagaatcgcataccctcgaaagctagagagtaagaagttcaccctaatctgaaatatcgaagatgntctggtagacacgcacttgacgaatacagaaaatgctccctttcacgatttggagcanaaatgattggccacgggttgaagctttgattggagcttctatggagaatgaaggagaagagaatggaacgtgagggagagagagagctgtctgaaataggtgatgtgtgagtgaagagacagtaaagcttctctggtactaagtaaatgggtacctctttgctctaataggcgataagtcaaagcacatgttttcatatgagggagcaaagggccactttcctgttgctgaaccaataccagccaaagtgggaaagttgccattgaacgcttaaacagctggtatgtggccgctcttcg

SEQ ID NO: 52456 - DNA, 396 bp, Glycine max
aatactcgatacccgaatgaggcccgtaatatatcaagacgcttcaaatcgagaacagaagctctgagcatgttcaaacgacaagagtctcttactcggatgtccaactgcgtcccgtagtagaacgagacgctccgaatagaaaaccgacgctcggagcacaacaaaaggcaaagcattttactctgacgccgattgagcccatacatatccagacgctcgcaatgaaaccgaaagccgtggaacacaaccaaaaacttctactcgatgccgatgagcccgcagaagcgaacgcccaaatgaaacagaggctccaccacagcggccgagaaactatacccgctggcgatgagcccgatacacgggagccgaaagaaacaatgcccggaaaccgct

SEQ ID NO: 52457 - DNA, 628 bp, Glycine max
  unsure (1)..(628): unsure at all n locations
ctgctcaccactcgacatcattcttnttctttgcgtgtatgtnanntaatnttttnnccnnctncactgccnnnccaccagtttgtgacctcgctgtacataccncacacnanannacactcnangccccattnangcntaacacatttatcaatgaacactatttgtattttantcagaacantagagactatgtgtgttatcttcagtgagagcgatcatcctatattcgtgagtgattccagatcaccctggctgtatgataggactttcacaaccattgcgtgatgccctcgctcgagagaatgattctttcctttctatcatctgcacccttgttctttcaaacaaccattccacgaaatccacctctgcccaaaataatgtggagaccataactcccactgtacacactcatattgagagattcttgatcctaaaatgaattataatacgagatctttcacctcgttgtggaacacactatatggagccctgtagcttacagttttgcatatctattttctgtccaccaccatgtacctactgtttccattccatgcaacggtacatgccgaaacaccttatgtgacccacagataacaccttatttcgtccttcctatccc

SEQ ID NO: 52458 - DNA, 260 bp, Glycine max
agtcttctttctattgtatcatcaaagacaaatgatatatatatcacctgcaggtgccaaaggttctgattgcacagtttgtcaccgtacaagaggctcctgattcagacatcatacatctgattgcgaacacgaatatgggaagcaaagcatacatagattgatccctactctctaatgacacacctactgctgcaaataacgatgtctctagggactaaactattggctacaatgtaatgtgtagtactttttctaat

SEQ ID NO: 52459 - DNA, 426 bp, Glycine max
agcttacatatagaccatgttactgcttactatcaatacctccatcacttagcccttaatccttcgatctggatagagatatgctgcatgaatagctgtttctggctgaaagggaaagcgcctttgatattcatccatgacatcgattcccaccaaattggttggattttgatgcaatgaataaataagtgagattcatcttccatagctccactacagagagggcaaagcatattgttgatctgcatgttccttctacgaagattctcttttgtgggaaatctgcccctgcataatctccaagcgaataccacaattatgctaggtatctgtgtcttccatagttccatactccaatcctccttctgaccaccagcagatttcttccatatcagattgagacactgcgagttgagtaattccctg

SEQ ID NO: 52460 - DNA, 450 bp, Glycine max
  unsure (1)..(450): unsure at all n locations
ggtactagtcatatatatgttacataacaatcaaattaatatatttggcagttattggagatatacgaaactacgataaacctgccaattaggggttatgtggatatttgcatattccacccatgtttctggatcaagcccatacttgaccataagatcaaatatttgctgaccttcattctcagcaaagacaaatttagaagtcaacgatgacttaaattgcctccatcttgctacaactattgacatcgcctattttttgcattctcaccttcagggatatcaaacttgtgctgacaacacaaggtgttatgtaacagtacgtcaatgaattctctaaaagtaacttaacaacanaatcatgaatggaactatatntagaatgacttaccaatatatctctccatattaaggtctttagatcatttcggacaacattccagttcacgt

SEQ ID NO: 52461 - DNA, 148 bp, Glycine max
aggggaggcgaaagccggcccagcacaaagactacggggacgtgctgacagggagcagcgaaaggcacccgcaacagcccacaagtcagtcaccagctggcatcgtaaaggacgatgccgaggctgacaatggtgcgagaaatacgac

SEQ ID NO: 52462 - DNA, 471 bp, Glycine max
  unsure (1)..(471): unsure at all n locations
ggatcttaagtcacctgcggcatgcaagcttcttcnaaggagtagttctgtatgttttttacatcattgntctttccttntcattcttgttgctacttcatgcattggatacaatttcatgtacatttggttatcttggtaatgtatctgattatattcttgcttattgaaggttattttcacctggatggaagggagaagtagtgctaacacagttgaaaattgtttagatcattctcaggtgcgatgtagtcctaatcctttaacccatcagaatgggaaaataaaatgtgcatgtgagtccacagcaactgggaaaaggaaatattctggatctagcatagatgtgtctgataccatgagaacacatcctatagatgagatattgctctggcataatgcaataaaaaaagagttaaatgagatagcacgccagtctagaaagataccactctctggagattcactaac

SEQ ID NO: 52463 - DNA, 380 bp, Glycine max
  unsure (1)..(380): unsure at all n locations
ttgcagaaatctctgttaaaggtcaacagaatgctagatcaaaatcatggatatctagtaatttaaaggatagtgcagagtcatagacctcatatataatgaagggtgaagaagcaaactaccttataaagcaatggttagagaagtangacactcacatataatcatttaggtggcattacgtgagctgcaaaaaaggttcatagattcattaattatgatctttaatgtttaatttgtaagtaaagctttaattcccaaactatgaatattaaaaattccctggccacttgcacctatagatcacaaaagctgtgctcccagtgattggattcgtggtgttaaacacatgaatgaatattataaatacagatatggct

SEQ ID NO: 52464 - DNA, 442 bp, Glycine max
  unsure (1)..(442): unsure at all n locations
ggatcttaagcgacctgcggctgcagctaattggtttgtaaatgacatattttgaactaaatatctntatgataacaagatctatttcaaactagttcaatcatatgcatcaaagtatgaaaactttcagagaacatgaaaataattttgtgcatgaaaagcttcaaatagttctgaataatgtctttctgagtaccacaatcagcacaacagatttttgagtgctgaatcatcattacataatctgttttcataacaactaagagacacatttatctatgtaatgatctttgaacatgagaaaatgcacattgacattacgttctcaaaatgatatcaaacatttaatagtgagtggtttgactaaccacttagaaagttgatctctctaagtgcttgaaactctgtcttaaaactttttgaacaccaatggtatcttgag

SEQ ID NO: 52465 - DNA, 239 bp, Glycine max
tacaccccctgccttttcttgggatttttttcgtaaggtactgaaacttatgaattctcgaatcgatacttagttatgcattccgtaaatggtacaagaaccttgtgaaatacataatcatccccctttatgaattacgaaatgttacggaacctcactaattgtgcaacggagctgtcatatgatttccggtgtgtcacggaaccttacggattgtgcattaatatattcttctgatt

SEQ ID NO: 52466 - DNA, 423 bp, Glycine max
  unsure (1)..(423): unsure at all n locations
agctnacagcagattgagtaatgacccactaactctataattaaaataacttaatgccattaacctagggaattaaaacaaacttaatggctgagtgtaactgaaattgtggcaaccaaaagtcacccccaacagccaacaagtcagccaccatttggtctcccaaaaggctgatgcctaggttgccaattgggcccttattacaacttgaactaaagcccttttagttgattaacccaaaacatatttttggccagccaactttacaaggattgggccattatttagacaaactaaacactctaaaattgaaataaagtggtgtcatttagtcctcctccatttgggccatgatacaactcacaaccttggacttttcttcttgaaacttgggcttgtattcaaatagtatggacaacactt

SEQ ID NO: 52467 - DNA, 414 bp, Glycine max
  unsure (1)..(414): unsure at all n locations
ngcatttgaaatagcgacagcgccactccatcattaggatttgttcctgacatctcatacaaacaaatcaaacgtaacaagacaattatagtagctgtttgaatacctcacctcactcaagtgtatcacacagttatggctgttctctaatgaaacactcttgccatttaccactctaattccccttgagttcttatgcaatccaatagattatggtcacaacagagaacaattcaccaatatgtgtatggtaaggctacacaaggaaaaggttaaccaagaaacatgctaacaatgtctttatgcacaaatgaaggaaataaaattcagaatttaggaagttaagtaacaattcttcatgctaccaatatattaacttaaagagtatgttttttctaagttcttcaagcatga

SEQ ID NO: 52468 - DNA, 470 bp, Glycine max
  unsure (1)..(470): unsure at all n locations
agctngctctctggacaatcaatgtatacctttcacggccaggctggggttcgactgcaccaataacatggctgaatacgaagcatgcgctctgagcgtccaggcagcaattgacttcaacgtcaagctactcaaggtgtgcagagactcgacgctggtgattcaccagctgagaggagaatgggagactagggatcacaaactgataccctaccaggcctatatcaaggaattggctaagttctttgatgagatctccttccatcacgttcccctccccgaggggaaaatcaaatggcggatgcgcttgccactttagcatccatgttccagttgacaccgcacggagacctagcgtacattgagttcaggtgtcgcgacagacccgcacatntgttgttggtggaagaggagtgggacggtaagccttggtatttcgatatcaagcgatacgttgaaagcaaagagta

SEQ ID NO: 52469 - DNA, 442 bp, Glycine max
  unsure (1)..(442): unsure at all n locations
aacttgtgctattcatctattcattctcttctncctttgccaaaaaaaattcgccaaggactaaccgcctgaattctttttgtgtctctcttcttccttttcctaaagaacaaagaactaaccgcctgaattcttttgtgtctcccttcttccttgacaaagaattcataaagacatattctgagaattcttttgattcttccctttccctaatacaaaagtgctcaaaggactaaccgcctgagaattcttttgtatccccattcacatagtatcaaaggtttaacagcctgagatctttgtcttaacacattggagggtacatcctttgtggcacaagtatagggtacatctacttgtgcttgactgagaacaagagagggtacatttctcgtggatcagtcctacgtgagggtacatctacttgggtctgactgagaac

SEQ ID NO: 52470 - DNA, 438 bp, Glycine max
cttaagcacctgcggctgcaagctgacatcaaacttgtataattactgttaattggtcactacgtgttttgagcttaaagtttttctgaattttatagacatctggaaaaaaattatgaaaaaagaaccaagcaatttggattaaaggaaaaaaaaagaaaaatcacacaagttggcagataaatcagtgtctatgaaaataaagtgaaagggaagtgtgcttgttgttttggctcaaaatttgttctataattggtgcctattttataccaatcctatttctgaaatttcaattgaaaattactatgaatacaagttccaaaactagaggtttcttgagtcctggtttttaaatagttttttactctactctagagccattctaagtttctctttgagtcttagcttgcttttatgtgctcttcattgctttaattg

SEQ ID NO: 52471 - DNA, 388 bp, Glycine max
tgaggaagtgtagaaaggtgaaacttcctgctattattctttgaccacagagtggtacctggagatatgtcgcggcgtcaggagaccttgtggacgtcaggtggggtgctattgcccaaaaccaagcttgaccaatcccgacccaacccgggcatagccagtcagtgaaaacctgtgatgtacctaagcaggcgagctcctggcagtctacagataaaaggaactaagaccacatagcatggaggcttgtgtggtggctggccagctgtgaactatgattgatatatgggatatggcctctggtaatcgattaccaagggtgggtaatcgattacaaggcttaaaaatgaagacaggaggctaagatggtctttggtaattgattacc

SEQ ID NO: 52472 - DNA, 415 bp, Glycine max
gaactacaatggaaccaccattatatttcgccaagaacacacatcctgagtggaaccaggttttcgccttctcgaaggaccggcttcaggcctctatgctggaggttaatgtgatagataaggatgttctgaaggatgacctcatcggccgggtgtggtttgacctgaatgagatcccgaaaagggtacctccggatagccctctggctcctcagtggtatagattggaggataggaatagcgacaaagcgaagggggagctgatgctggctgtttggatgggtacacaggctgatgatgcttttcccgaagcttggcactctgatgctgcgatggttagtgggagtgatgctcttgcgaacattagatcgaaagtttatctgtctcccacgctttggtatttgaggggtaatgt

SEQ ID NO: 52473 - DNA, 310 bp, Glycine max
  unsure (1)..(310): unsure at all n locations
agctttagccaaacggacttaccttgtatttattcctttgatagcccctgttccnctttgtttgttttgaagctcattacaagccttaagtgaaaaaccatgatatcaccttacccttaaagaactttggaactctggaatttgtttgggaataagttgggaataagtgtggggggtatctctcattggaagatatgatttctggtcatgcttgatgtatctgtatattgcctagttcttgctttaatcttcaaatttggtcttcaaaaaaaaaaaacaaaaaaaaaattcaattgcttctaattcgtac

SEQ ID NO: 52474 - DNA, 638 bp, Glycine max
  unsure (1)..(638): unsure at all n locations
tccttctcactgtattacaactangcagaatatcttgatacttcaattatttctccctccaagcgtccncatgtgtttgttgaccccgatctacgtaccngacactatataatactcaagcctgnccactcgnagcctcaagacttgaagattggtaatattatcaagcactgatggcaacacaccagtcaagtgattctgagctaaatccaacattgtcattttcctgcaagattccaattcaaccggtattgatctggtcaagtcattgttatccaactccaagtatgtcaaattatgaattgctgcaaaagaacctgaaggaatatttccactaagatgattacccctaaaccttaacctgaacaactttggagaaaaaaaccatgcaaaaatgctgactatatcacaacctcactattaaggctacagattatcaaataaataccttcgatagatcaatggcaacatcaagatagtgatccagataattagcattctgctctggatccagaagctctaacatagcacttgctggatcaccagcatgttctctgcgcaactaacgattgaataaacagatantagtcctataaccagcatttctctttgaatattacaagattagaaacatggcg

SEQ ID NO: 52475 - DNA, 447 bp, Glycine max
  unsure (1)..(447): unsure at all n locations
agcttcataaggttatatatggcctcatataagctcctaaggcttggtttgataaactaaatgagactctactaatgtttgaattcaaatccaacaagtttgatccttcactatttgtttattttaaggcttcatccataatctacattccggtatatgttgatgacatcataaaaacatgaaatgatattcctttattacatcaactcatttctaagctaaatatagtattttctctcaaagatcttggatcctcagattatttcttgggaatgaaagtaaagcatctatctgatggttccattgctttaacttacaccaaatatattagagacttaatgggcaaaaccaacatgttagatgtcaaacctatatcttccncaatggtaactggctataagctcaactagaagtggtctaatccctttgttttatccctatatgtat

SEQ ID NO: 52476 - DNA, 352 bp, Glycine max
caattataaccacctgcaatcaattaaatctacaatgctatcgattaattcaatgaagtaattgattaaattatctctttaatcgattaaactgttctttcctaaactcggaaattgctcaagaataatgtaatcgactagatactcaaagtaatcgataaagtgtccttgtcacttctgaaacacttatagaaagagaagtaatcaattatatctcatggtaatcgataaaagcatagactcatgaataaattagtcattgtctcagaacaattgataatcgatacgataaggctataatcgataaaccaatcgagacatactctcaagctaagacacttgtgaattgata

SEQ ID NO: 52477 - DNA, 377 bp, Glycine max
  unsure (1)..(377): unsure at all n locations
agctntgttagctctagaggtattactttataaattccattaacatttatgttaactaacaataagaataattatccttgatccattcaactaaccatgtgcaacaaagtaaataactacattacggcataatacaaagaaattattatgaatttatttattaacaaatgttcacaatatctctcaaacatatgcaactatactacttgttaaataaaaattatatcagtcctctatttgatttacatatactatagagacaagaatcatggtcaacaatttttttccagcattataaacaatcaaaggtatgttcaatcaataattaaatcatagtcaacaacacatgacaagctttgcacaatagaaaacactac

SEQ ID NO: 52478 - DNA, 509 bp, Glycine max
  unsure (1)..(509): unsure at all n locations
atacatgttgatgattatataacacacacacactctcatacacactaaacacacacacacacacacacacacacacacacacatatgtatatgnaattttaaaataaattatgaattaatagttcaaatagtaaaattaaattgaaggaaattaatatattaagattcaacaataaatactcttaatgcatttgtagtttaattatttattcactctcttttaattcaaaataatatagttcaatttaatatatacatgttgtgtgtcatgtaaatattaatactatgtgatgtgtatatgattcatgaggtgtgatagcatgttgatttggaattataacattgtgattgagattgggtgtatgtgataaattgagtatgtgttgaattgtaagatacatgtgtaagaccctttaaccgccgccttccgataaacattgtgatgagattgggtgatgtgaaaattgatatgtgttgaatgaagaacatgtgattgaatgttgacgctt

SEQ ID NO: 52479 - DNA, 404 bp, Glycine max
agcttgtctctcagatagtacaatcttgctctcctgaccttacggtggcttaccactctgatttctttgatgtttggtgagtaactgtaacagtaaatataagcatcatataagaaaactagctcacaagaaaaatctggtaaagactacatatgaaaaattagcttggccttaaacatcaattggtaatttaataaagtgaactgctgggtaatttcttgaataaataaattcagatcttcaaaatgataatttcataaacttttactatacaacatatagacttaagacaaacattgagcataaaactatagaagcatggcaaatgttcatctgcaaccaacaggaatgtaggtcacacattgaaacagatatgtttatctcaatctcatactccattcttc

SEQ ID NO: 52480 - DNA, 207 bp, Glycine max
aatagaggaatttcatttattaagtttaaggttatatattaattaagttagttggaagaatattgaaaaaaaatataagtgttataggagaaactttaagaaagtgtatattttaatgttaagtaaactgtatttgtattaaagggatggtaatttgttgttatttgtgtatatgacttcaagttatagtacatgatgttaaaataa

SEQ ID NO: 52481 - DNA, 371 bp, Glycine max
  unsure (1)..(371): unsure at all n locations
agctngcatccnncattttccttattccttcaagctataacaataaaagtattatcaataccatcaaattaaaccaataattaattaaaatggtcacattaattatatgtcatgccatgttgtcaacaatactgcctgataattaaaatcaaaataaatacaaaactcatggtttttaactattagtatgattatgacggttagaaataatctaagttctacatcgattaaaaataatttcaaattagaatatataagtgagggaaaccctcactccttgaactaacttttgaaattgagttagacttttcacattatttattctaagaatatattagagtatattatcatatcttctaaccatgactatt

SEQ ID NO: 52482 - DNA, 134 bp, Glycine max
ggagctttatatcttatagccccgcgcaagcagccagacataagcatacatagctaaactcttcacattctttatctcacctacataagcacattattgcccggcatactcattcatatatctgatggggggga

SEQ ID NO: 52483 - DNA, 420 bp, Glycine max
  unsure (1)..(420): unsure at all n locations
agctntgaacaatatacttggccttcatttatctgtctntgcgctnggcggccacgctcaacaaagtattttcgacacctactgtacgttgatttgaccaatgctgttatgggaatgtttcgacaatccttcaaaaccttattgatacattctgaaaggttggttgtcatgtggccatatcgacgtccttctctatcataagccatcgtccatttttcctttgaaattcgatcaacccatgtggctatggctggactcagttcacgatatttttgtaaattctgatcaaaaatgtgcttgcaaggagtgtaggctgcataaaaatagttatgaataacaactttaagtatataggaaacttacataaacgtcaccatcaaataggaaatcttacccaactttttcaaccatttcttttgt

SEQ ID NO: 52484 - DNA, 448 bp, Glycine max
  unsure (1)..(448): unsure at all n locations
agctnggaggggttgatggngacccggtgctgatatgaacgaggataagggctacgtangagtgcgtgagctcaagttaaaggtgggcaactggggatggtatccttgtgccttacttgtggaaatgagagagttgatttgcgccatcgcctgatcgccacctagtacaacatatgacgggtgtcccataatccaataagcttgatgtgagaaagtgtggaagagtcagtcttcctacttttgtttgttgaccacagagtggtacctggagatatgtcgcgggggtcaggagaccttggggacgtcaggtggggtgcgattgcccaaaaccaagcttgactaatcccgacccaacccgggcataatcaatcaatgagaacctgtgacgtacctaaacaggcgagctcctggcagtcaaccaataaaagaacanagtccacaaagcaag

SEQ ID NO: 52485 - DNA, 370 bp, Glycine max
  unsure (1)..(370): unsure at all n locations
tattatgactggagaaacaaaggtgatcaaataacaagcagagatttaaaaggtattacggtgcctcctagtagcgcttctttaacgtcttgagatggacatgtgatgacttgtcggtcatgaacctagtactnttgcttatctttggcttttggacttggtcccctgctagtcgaccacaggtcgtatgcaatgcttcagctcttatagatgagctgaggggctttggaggtggcggcggtgcgtctgatgtctgctgacggtcatccccaggctgctgtggtgtctcgccctgcgccttgcctggagcgcagtacttcttgatgaaagctcagttagtatggggcttgatgaccttgcttggagtgat

SEQ ID NO: 52486 - DNA, 414 bp, Glycine max
agcttcagtaaataggcattactcatatactctttcaggacaatatcgcgattcaggtgcagcatacactggtaaatttacaagttcaggaatctttgggtctctcaaacgaagatgaggaggttgatcatgttcatgatttgtgttgctcctgcgatggaactaaatataaatgcctatcgagaaagaaaatgaactgcaaactatatctgttgacaaaatagtcagtaatttctgtcattatttatcaaaaccataaacagagaggctgacacaaattattactacataaatcagtgaacattggctgtatttttcattcacaataaatcggcataaatcaaactgcattcttatataatataagcgtggttcttacacagcgaaatttttcatattgcacattgagtttac

SEQ ID NO: 52487 - DNA, 431 bp, Glycine max
  unsure (1)..(431): unsure at all n locations
atcctctgagtcacctgctgcatgcaagcttgttcacacacagagaccacatggtttctacaccctntgtcgaagagtcaatgtctatcgaccgagactactttagtctccccttcgataacccgaggcaagagagcctgttggtacgcagagaccaacatggccgtctacaccctttgttgaagactcaatgtctatcaactgagactaccttagtcgctagctcatcatgcagaggccatccattgcgatgacacgtagacaccaacattggtcggtgcatcctttgtcgaatactcaatgtctatcgaccgagactactatattcttgacttcgtcatctagaggcaatcaagtccgatgacacgtagagaccagcatagtcatctgcatccttggtcgaagactcaatttctatcgaccgagactac

SEQ ID NO: 52488 - DNA, 409 bp, Glycine max
gataaaagggatgccccacattatcttcatgacacagatgcaaacatgatgatttggaaactttatgcaaaactggtcatgcatgcacctatgcggacactcaagtgtcaaatttttatggtcatgtgatgctagggctcatgactcatttcctcttttttagtcaacccaacgtgtccaaaatatgttcttgtatccatttgtgcattcattcgagtccatttcaagcgttcgggaaaatattcacagcattcacccttcaggtgtatacacatttttcacaaactagtgatgatcagtcaatattttcatagaaaagtcggaagtcatctctatttagaagcatgttggtttttcagctagacaacttatctttctttatttttcttccttcttttatcattatcat

SEQ ID NO: 52489 - DNA, 287 bp, Glycine max
  unsure (1)..(287): unsure at all n locations
agctngccatanagagatgtaggaaggactctcttgatgcatggactattgccgctcctgagatctatagccatagatataggagcgctgagcaccagtaacgtttcgaagccatcactggatggtccttgcaccgagagagacacgtctcaggtgatggacgacgagtacacggattttcaggaggagatagctcgccgacatttgacgttggtggtcactcccatggccgagatctatccagatgtagatctcaagttttacgccaatgcttggcctacagagaa

SEQ ID NO: 52490 - DNA, 551 bp, Glycine max
  unsure (1)..(551): unsure at all n locations
aggtttgcccgttgacggacctaaaatactcagctgacgtggagaacgtggacgagtcagactgactactcttgtttgttgaccacanagaggcacctcaagatagatctcggggatcaagataccttgtggacgtcacgtgtggtgttattgcccaaattcaagatcgttctattatgacgccaatccggacatagttagatagtgagaacctgtgatatacctatagacttcatctactgctggggatctatatatgaactaagaccacgatacatggatgctagagtggcggctgggcaaatatgtatattgtgtgggatgcgaagattacccgtgtagcagtcagtaccattcactggtaatcgagctcagggctgaaaactgaagacaagatgtagaatggctgctggtaattaatagccaatgtgaggatcgattcatagtgttacccccactagtacatgaaacgatttatgagtatctatgatatagtgtatgttgtgaattaattgtgtaagggtgcggcattctctctactactccccccg

SEQ ID NO: 52491 - DNA, 451 bp, Glycine max
  unsure (1)..(451): unsure at all n locations
agcttgaactggtctgctctatctntgttatgttcctctgaattgttatcaggttaccgtcttcaaccagattaccctaaaacttggagaatattagcatatctttttgaactggattagggaaggtacctangtctcgcaaaaaaggttgaggctactatgtgaggggaatatgatccacattctctgtggactctattgctccctcaaattgggtgtcctccacttctgtgtcaggctctatctccacttcaacatcgggctccagtgctgggataggagcagatagcacgcactccccgacttggacaacttgagaatctaaaacaagacttagttacagaactattatagtcacagttgacatcttctaaggcacaatgatgattgtttccatcaatggagtggtcatcagaggcggctactaccttattcttatatgtgacaactg

SEQ ID NO: 52492 - DNA, 644 bp, Glycine max
  unsure (1)..(644): unsure at all n locations
tcgtcatctcccgtgtcgactatctaactcgtgtaatgactaatcanatnttatcatataacntctccatctgantccccgcgtgtttgtgacctcgttctcgtacgcgaacatnaaattctnctgctacctctttcttgtcaatgctgagactcggatcggcatctgatctctatggctaattagatgctcacgatacatcatatatatcacctactccatacatttcggtgctggtccacggttattatgtgtgactcacatgcagcgaggagaactctatacacatctttgtctgctgacaatacatctatcgtgtatactctatcacttctttctcgttatgttatgatctcaaggaattgttgacaattgatttccctgactagactttcatagcaattctctctacttggtgacagttcttaacagtccagcagccttgatgaggtccatgatctccttgcaatctcaaggcatttcttccagttctctttcttaagcaagccttcgttgtatacatatttcaccttttacattgcatggagggaagaaatttgccaatgggcataggacttctcagccctttttctgtatctgcccgttgtgcggacactagtcacaataaccgatcactgagtatc

SEQ ID NO: 52493 - DNA, 409 bp, Glycine max
  unsure (1)..(409): unsure at all n locations
ttaagcaccgccgctgcagcttagtccataaacctgccacttgtattggttanaattattattattatatagaaaactgtatgtttgatttatgggaaaaaagtgtaagaagagaaaaataaggaaggaaaaggaatagaaaatatataaatgcttttttttcaaattgtatgataagaaagaaataaaagataagaaaattagtattgttctcttcttgtttagttgtatagaaagaagaataaaaaatgtgtttaaaattataaaaaaaattaaaacaaaaaagataaaaaaaaaaatgagaaaacaattgtttaatttgtgcatgagagagtatattttttctggtttccatcttctttgaacagaactaatttttagttcgattcccacacaaatgttgtcagtc

SEQ ID NO: 52494 - DNA, 263 bp, Glycine max
agctgcgtagtttatcaacacgagacacgagcaacttgttaatttttctgagacacaagtgggcactcatccctcatatcagcccacgcagccaaaacagaaaacacagaacgcctaaacgcagaaagtactttggaacaaagaaaagcttcttaaaatagagggcaccccacactactcccaagaaccaccgcgagaatgaaagaatgaaagcctcgaaacagcagagccctgaaccagacaatgtcctgaaaaagagggag

SEQ ID NO: 52495 - DNA, 444 bp, Glycine max
  unsure (1)..(444): unsure at all n locations
ggatccttgagtcacctgcggcatgcaagcttattcaaatgagttctgtcataatttacttaagcagtaactaatgaaatgcaactaaaagagtgtaataacaaatttggaatttacagctggcaaaatctggatacttttaatttaaatagtaatgacacatgtacctatagacatggattggtaagattgataaggaacttcatatcaactatgttgcgagcaatagaagtagggttcattcattgataaaatatttagcctcagcttctttaaagtcatatcttgtataatatttaaaaagttaacgacattacatgatgaatacatgacagccatatttgtttcttcttgtatacatgcggaactggataccagattttggctgatacatatgataaattgacttanattaaattaaacttaggctattaagctcgatac

SEQ ID NO: 52496 - DNA, 327 bp, Glycine max
  unsure (1)..(327): unsure at all n locations
attgccattccttggatgattgggttgaaccatgctcatgcttttacaccacggttcatgccgtccagttgaaatgtggacgtaaccgccctgctaaactgccgcaaacgatgatgtgagtcacatcactgcttgngctagtgacaactgtattaggattgctgatgcgcttgtaacttccagcttcagctcgacaaagatgtcttggaccatgttgaaaatctcgatcgattggaccacatatactgcgaaccaattagcagttcttagactgtacatgcttcccatgcatgcatgcttgacatcggttgcatggctcatctgtat

SEQ ID NO: 52497 - DNA, 441 bp, Glycine max
  unsure (1)..(441): unsure at all n locations
agcttatattaactcttcttctagatgttattgttacgccaaacactcaaaatggaaatgctcttttgcacccaacatttaacttcctccattacatgccgtagataaatataacaaaattcaatcttagtcttactcacttatcacatgacataataaaatattggagcatatattcgactacctaacaagttgcctattttatatgatagtattgtttttctaccaatagaaaagatctacgtattatgttaagtaatttcaaattatgtcttatttataattaaaaaaatttatttcttgtctctatcaaaataattgaacttaaatcttaattgaaacataagtaagtgataataaacagtataaaactgtgtgtctttgaaaagtctctaanattaaatcattaaagtaacatgtgtatgagttggctttataccg

SEQ ID NO: 52498 - DNA, 638 bp, Glycine max
  unsure (1)..(638): unsure at all n locations
cacgacaccactcccgacanaatagccgctgacgtttncttcctacccaagtcacccctggattagcgtcttgcacngcgcaacatananannnagcnngagcccgaagaaaatagatgaacaggacgatgntctagtctttangacatcatagcttgtctcactcacgatttcatgtgcgaacaataccagacattatagatttttcgtgtctacctaacatatatcaggtattattccactggctattaacaaattataaggtggtccagcacaatgatgtgcatgaggctcatacagtatgacgaatatgtctattggaatagtgtcagcaaccacacaatcgctaaagcgattgggtatatattgccaccggacnatatgaacggatctgaatgaagatacctccaatgacgagtcacactccaaccatataacttactttgaccttatctcaaaatgtgttttaatggcaatcatggccacactgaagcaacctcaaattacaattcattattcgctggaagacaatcactaccaagatgttcttcaaatacagacgtgacatcactcgtacacacactatactacatatgctacaccttagcatncagtaagctctatcccgatggcaatct

SEQ ID NO: 52499 - DNA, 311 bp, Glycine max
agcttctagccaaatggacttaccttgaattatttcctttgatagcccttttgagcctatgttcccctttctttgttttgaagctcatcacaagccttaagtgaaaaaccatgatctcaccttaaccttaaggaattttggagctttggaattgttttgggaataagtgtggggcggtgggttgttggataacatgtgttgttggctatgcttcatgatgtatttttgggccataatgatgtacatcgtatatgggttaaatgttggacatgttgctgaatgatatgctagctctcatatgctactgtgca

SEQ ID NO: 52500 - DNA, 393 bp, Glycine max
  unsure (1)..(393): unsure at all n locations
gctttcgattcattctatgtacncgtagtgagccacattgtgtttcgtgcatttntattctcngattgattacttcttataccccctgttgacgtgcttaagccattttacttaagtcatttctcgcttaacttaaaaataaaataaatttccaccgaacgtttgaattgtanttatccgtaacttcggttaaaataaaattccgaccgttcggtcgtgccgtaaccacgttggaaatcaaaaaagaggtaaaaaataatattataatcaaaaagacatcttttagtaaaataaagcggaaaatcaatcggacggtttctctttgggatgtctcattcttaatcgaattgattaataattaaagtgaaactaaagggctagatcaattcgcct

SEQ ID NO: 52501 - DNA, 466 bp, Glycine max
  unsure (1)..(466): unsure at all n locations
agcttgcttgagaaacttccttgagatacttctttgagaagcttccttgataagctagagcttagctacacacccctctaatagctaagctcacctccttgagaagctagagcttagctacacacacccctctaatagctaagctcgcctccttgagatgagaagctagaggttaactatacacatcccctataatagctaagctcaccccatgccaaaatacaagaaaatacaaaaatgtccctactacaaagactgctcanaatgccctgaaatacaaggctaaaaccatatactaatataatagccaaaatacaaggcccaaaagaaggaaaaacctattgtaatatttacaaagaagagtggacccaaccttggcccatgggctaaaaaatctacccttaggttcatgagaaacctagagccttctntagcagctctagctcaattctctgggagtcttcta

SEQ ID NO: 52502 - DNA, 360 bp, Glycine max
  unsure (1)..(360): unsure at all n locations
atgttgaaaaagctcaaggattatatctggaattggtccaaaaaagtcccaccactaaaggaaccaatttggaaaattgtacaccgtgttagtcttgaagtagattaaccatgagcttgtatttgttgttttgatgccaaaaaactttggtccagacatccatatagtcctaataggtataaccgattggatcanaaggtacaaatttttttttgtattcattcagattggatccaaaatgtctaggttgtaaaacctttaaaanttggattgcagaatgagtatttaaaagagggtcatttgggtctttgaaatgtttaatagatactgagtttgaatctattaanatgaactcataaa

SEQ ID NO: 52503 - DNA, 426 bp, Glycine max
  unsure (1)..(426): unsure at all n locations
agctngtactcgaagccctctntctattgttgaggctccacaccgccagcggatactagctgctgagtctgcttccttcaatcgactttttgtggagcgggcatacaagtatcgccctgttaatgtggtggaatttgaacttccgcggcagcagtgtgtggtttacttggatctgaagcgggaggagtgcaccaatttgttcccatctggccgagtatattcacaggcattccatttacgtggacaagggtttttcttatcagcacattgcaacatggaccaacagagctctttccattgctttggcctgttcttaggaatgcaggaaaagggctcagttagctatgccgctgactatgagnttgctgctaggtcaacgccaacagaggaatttgttatcaagcacaaaggcaattatgtattcac

SEQ ID NO: 52504 - DNA, 499 bp, Glycine max
  unsure (1)..(499): unsure at all n locations
tggnaatattatgaataaaaggagatctttgcttataacttactcgaagaccttatttggttagacattaaatagatggagacggcgaagatatatatgtagcactagaagaatttgggcattgcagtcttgcagacataaaaatggcaaggaggacctaataacatttgtgaatggaaagtaatgtgtttgtgggctgggtttaaccacgtctagtccaatcctaatattttggacatgtacatggaccaggttgagtatgataatacgtacatagaggacatatcttatgaaagaaaacatcttatatgagagtgagagaattaaatttggaccgtataaccaaacatggagggttaagatttaacggtaaacagtcacatgactntttaagtggtacatgacattaacatctgagcgttctagttggtatacccgccagaataaacttgcactcattaaaaaccgactctcatatagatgcctctctctctctctc

SEQ ID NO: 52505 - DNA, 367 bp, Glycine max
  unsure (1)..(367): unsure at all n locations
agcttgcatggttcacacggtgatagtagttattacttgtcattgcaattggaatttcagcaaacagtactcaaagcttggtgatactgagtcacgtcccagaaatttcacaatgatgtgctgtagaagtgtggatcaccaaaacagtaactatgaaaataaataaataaaacaaaacgtctttattttattttattttttggagaagtaaaacaacgtctttttttttaagaggtaaagcaacgtctttatttaacctgttgcaaactggaaagcatcgatttttagtactttntatcagaatttaattgagtcaatcctcaatcggttctctggtttaatggacaggataaaaaactaatttacc

SEQ ID NO: 52506 - DNA, 406 bp, Glycine max
  unsure (1)..(406): unsure at all n locations
cgcctacttcaatatcctgtaagtttcacttcttattgttaatatcattacattaacagtttcataaaataatcaaatggggataatgaagacttgtcgcaagtattagtgcaggcaaagcaaatgcatttggtggtcattaaaaataaacctcatgagaatcatcacaagcaagaaaagtagagggcttcttagttaactatgcacataatgttgataagggttctacaccttctatctactggtttaatattagtatttccagagtctccttatcaatattcgctgttctttttaattattttcacatacgaaacagaanaaggattatgagatcgacatatcttatantaaagaataatcacctgcaaacatattgcacagcaagtattatctgccttcatat

SEQ ID NO: 52507 - DNA, 432 bp, Glycine max
tcttaagtcacctgcggctgcagcttgaggagaagtgggaaagcatgttctctacttttattcgttgaccacagagtggtacctggagatatgtcgcgagggtcaggagaccttggggatgtcaggtggggtgctattgccaaaaaccaagcttgaccaatcccaacccaacccgggcatagtcagtcagtgagaacctgtgacgtacctaaacaggcgagctcctggtagtcaaccaataaaagaacaaagaccacaaagcaaggaggcttgtgtggtggctggccagctatggattttgagtgatatctagaatatggcctatggtaatcgattaccaagggtgtgtaatcgattaccaagggtgtgtaatcgattacaaggcttaaaaatgaagacatgaagttaatatggcctctggtaatcgattac

SEQ ID NO: 52508 - DNA, 477 bp, Glycine max
  unsure (1)..(477): unsure at all n locations
tcagctgangatatggtgacccatacatgtggactaagtgtttgttttcgatggtgcacaacanatnttacacatgcacaaatcgtgcataatcccaccatccgctgttgcccacctccaattgagctcacgtacttccacgtatcccatatcctcgattctctcaacaccgggtccccatcaattctcccaagctttcccaacatccaagtaattcaacattcaaacatcacaaactatcacagccaagaaaatagggcaaaggcagaatactctgcccaaaacaccaaccaaaatcacagcttctctcacttaaagaccgcagtaacagtttcttcgttccagttcgttaaccgttggatcgactcgaaaatttcactggaagtctctagtacataatcctacattatgatccgtgggatctcaananaacacccagagcttattgtgatcactctttcacatccacatatacat

SEQ ID NO: 52509 - DNA, 246 bp, Glycine max
  unsure (1)..(246): unsure at all n locations
agctntcactcgcatgtccgattcaggcgttttctgttcgagacgctaganatctaacaaaggaagctctcgagaaattcaaatggtcataacttttcactcgcatgtgcgattcaagcgcataacatatcgagacgctcgaaattgaacaacgggatttttcgagaaattcagatggtcgtaacttttcactcgcatgtgctattcagcacattgagtattgagacccttgaaattggaccaagg

SEQ ID NO: 52510 - DNA, 381 bp, Glycine max
tctagtcgtccatagacctcctcataggtacggtccagcatacgttgcatctgtgcattcatcgcatccagtaacagacgttgaacgccgtcctactgatgatactcgtcaccaccaccacctgctccagccataattcaacaggaaaaaaaatgtgcaataaaaattattaaggtttcaggacctcacaacactctactcacgtgtttaactcttagatggtagtacactcgtgtttaatgctctcaataggcttttgtgtaatgtattccctcttgccttttaccactcgtgtttcctcttaagttcctggatggaccaaattagacacacaaggtaatataaaataaaaggaaagacaatataatgatcacaaacaga

SEQ ID NO: 52511 - DNA, 444 bp, Glycine max
atcctctgagtcacctgccgcatgcaagcttcaagaattatggcctcatcaaactacttgtttcctgagggaaattctataaatagacctcccatctttaatggagtgggttatcactactggaaaccccgcatgcaaatctttataaaggcaatagatttaaatatttaggaagccatagaacaaggaccttatgttccccatataatagccggaagtgcaacaatagaaaaacctatagcagattggactgaggaagaaagaagattagtacaatataatttaaaggccaaaaatattattacatctgccttaggaatagatgaatactttagggtttcaaattgtaaaagtgctaaggatatgtgggatacactacaagtaacacatgaaggcacaacagatgttaaaagatctacgataaacactctaactcgtgaatat

SEQ ID NO: 52512 - DNA, 481 bp, Glycine max
  unsure (1)..(481): unsure at all n locations
atgatagaatatctgatcttatattctgataatatatcctatcacatacaaactgattagctaggctaagaatactgatcgaatatcttatcatatattctatcataccccgcagtcgaagcgagagatcgacgaacacgaacactgagactatctcgaactggacccaagaccaccatcactaacttttcttttccagaattcttgtgatatccaaacggcttcccacgttgttgttggtctgaatgagagaaatttgagtcataaatggattgtgaggcagccaacattgccgatccggcttcctcaagtgtgagcatcgatcgagcctgataaaacggaggttgatgatcactctgctgaattaacgtccctacacctcgatatgcacttgcgagacccgaaacacgttgaatgatgaggtagctcttcgattgacattctccctttcaagagcgatgaagatatggtntcttatatt

SEQ ID NO: 52513 - DNA, 334 bp, Glycine max
  unsure (1)..(334): unsure at all n locations
cataactccatatcatttagaattgtacaccatttatatagttntcttctacactttcaaaaaccgaaataatcatcgatgatggaaaggaaataccttgcccctcccaatgatggaactctcgaaggcccccaacagttgaaatgcacatagtccaacatggcctttgttgtgtgcacaacatttggaaacttcatccaatgttgtttcctatagaataaccaaacctttttcactcaggtgacctagatgcagatgccatagagaattatcaaacgaaccattggacacatggagtccttgtccacattgagagaactcataaattcttata

SEQ ID NO: 52514 - DNA, 130 bp, Glycine max
tctagcgtgtacttaagatctgaactccacctttttgactcaaaggtacagaacacctcaataataattgattgctgaagaagtgccaaatttaaaaaacaatgaatagtcagatcgaaagacattatca

SEQ ID NO: 52515 - DNA, 428 bp, Glycine max
  unsure (1)..(428): unsure at all n locations
aagcttgaggctagcggcgtatttctttttatnagtataaatataagaaacataaacaagaagctttcttgttttggctggccattttgacatattcgtgcatatttacatagagactaacccattgctaatagtctatattgagacgggtcaatggggttttatataactatgttaattgctaatagtcaatgcctatcagtatcatcacataatccaatgaccttagacttcattgtataatagtaacacaatcatattaacataataatttacataatatggttgtcattatgaggatcaatctctcagacaaaagtcaaaaggaaggggggacacacggacagatgcaatttataatcccaatttgtttttatatctttccaatgagaaagagatgatatttcatcactctgagtttcaatgta

SEQ ID NO: 52516 - DNA, 278 bp, Glycine max
  unsure (1)..(278): unsure at all n locations
tatatttatttaattatttcaaaataatctatttctattgctaagcataagatggataattagagagcatcgcataatttttattggataaattaattattaggtaatagtattaatataggagaatatttatcaaccgaatatcaatactaattgtattaatgataagattnctagtagatttatttttacaaaatgttcgcttcgtatatcgntaagacttagtaacgcgtgattaaataatatctaatacaattcaatcatttagttcatattca

SEQ ID NO: 52517 - DNA, 339 bp, Glycine max
acaaagtggtacctggagatatgtcgcggtggtcatgagaccttggggacgtcaggtggtgtgctattgcccaaaaccaagcttgaccaatcccgacccaacccaggcatagtcggtcagtgagaacctgtgatgtacctaaacaggcgagctcctgtcagtcaacagataataggaacaaagaccacaaagcaaggaggcttgtggtggctggccagctgtgaaacttgattgatatgtgagatatggtctctggtaatcgattaccaagggtgggtaatcgattacaaggtttaaaaatgaaggaggctaagatgagctctggtaatcgattaccac

SEQ ID NO: 52518 - DNA, 422 bp, Glycine max
gcaagcttgagaagtcatattctgccaaatctgttttgattgcatcaggtaaaaaatggaaccgtgaattgaatgcttcttcgcttgatattacgagtgcagcctcattgatggcagatggcattgcatgtaataaaaaattgcgggcaggaagctcacttgtgggtggatatggtaaagtgaagacgtataggggtgaggacttcatagagaaatcaagcagttttgacattcttgtggatgaaagagagactgctgctgcagctgatgtattggctggtatatgtgggtctctatcatctgaggctatgagttcctgcataacaagttcagtggatcctgtataaagtaacagggataggaagttgctgaaagtaaaccctctatgctaactggccatgacacctgatgttactcaagat

SEQ ID NO: 52519 - DNA, 470 bp, Glycine max
  unsure (1)..(470): unsure at all n locations
agaggaatagctgtgacgaagaagagggacttgtatcttatttatagaccaactcatagnttggattgatgaatataaccttcatttttacttcgtaacttatacgaatttaagtataataatatcacatgaatccaagacaaaaaataagaactttctggagacttacaccttccaaatctcaaatataaacaaatgaataaatttcatatattaaaatcttatttaataagatgatcttaaaaataattttcatttaataagatcaattgttttatatttaatatcaagcttaaataaaaattaattaaaacattataaataactcaatttaataaaattaactaatttctttaataaatataaataatggtgttttataatcgagatgtagctaatatcttaaaaaacatatgagactcatttgagtttctcataatgtttggataagaattaattaatatgacaat

SEQ ID NO: 52520 - DNA, 364 bp, Glycine max
atgcttgatggtgtcgagaagaactatctttcttgtcatcatcaaaaagggggagagtgtgactgtatgtatacatgatgttgatgacgtcaggagaggactcaaacacagttgcttcacaagataagcatggcttctagattaataccatatagcttcgaccatctgagccttgcttcatgactaactctacatcaagccttgccttatagccaagtgctttcagagacattctaggctttggtaatcgattaccggaagatagggtagagaaatacctgttgaaaagagtgttgaatatgcattatgcacatgtaatcgactaccatatgtctgtagtcgaataccagccacgaaactcttg

SEQ ID NO: 52521 - DNA, 402 bp, Glycine max
gcgacaaggctcgggtcatctaagagactacgcatctattacggcacaaatagatgatcataacaacgaatctccaatcccatattctttaagagattgcgacgaaaaaaaaaatacagaggacaggaatccctaggggaaaccactaaaatataataacatgcagcgacttcattaattgccccaagtcttaagtgtagtatcgcttgatgacgtcggagattacgggtgaaggtagtaccttgtcatccatgttggtgagcacaacggcccctccggagagagccttctttaaggcgagaggcacttcataatacaggtcccactttcctctatcgtctttcacggcttgtgagaccttcttcagaaccaagtccccttcgctaaacctgtgcgagcgta

SEQ ID NO: 52522 - DNA, 322 bp, Glycine max
  unsure (1)..(322): unsure at all n locations
ggcagcaagcttaataatcttatatnggtttattatgccttccgtcagaggcaccttatgtctcatgggataatttcttcatttggcctgatgaaaacactatggatcaatgcatataccacgaggcttgtatgagtcacctatgtcntcctatattatatgtagatgatattctactagcagccaatgattgagatttgctacatgaggtgagaccacttctctgttagaatttntacatgagagatctggatggcgcatattatgtcatgggcgttcacactcatagagatacacctcggcgtattttatgtttatctta

SEQ ID NO: 52523 - DNA, 641 bp, Glycine max
  unsure (1)..(641): unsure at all n locations
catctacacacagatcgtggaatcgctatatatcactgatattcactgctntatcngnacaggcancncacaagatgattcttgcatcccgtgcanaaccgacanatanaananacaagcnntgannntaacacgcaagtagctngntgaatatttctcttctatgntnaaggttacaantatcatagattcatagatatgtgataatgtagatcagccacttcgataaacactattatgaggcaagtatatacgtgcttttattgcatgcaaagactaactcatcagattaaagactactaccactatatacgtttaacggctgtacatttgatcaatagtaataaaatacgatgagaacaccaactctaacgtagtttgcaagctcgagagcttcttgaccatatttagggataacgatctacatgccattgatataattattctgtaagaagcgactatagctcgcatcattaaacacagattataactaactcgatacgacttaagaatattttgaaatacaatacagaggagaaggngtggcgggaatccacaattatgagatccagaattatatatgttgttaaagttttgttggtgtggggtgacacctactctcgcacaccaccacacccccg

SEQ ID NO: 52524 - DNA, 417 bp, Glycine max
  unsure (1)..(417): unsure at all n locations
agcttctacatatatattttcaaggatgattattgtaaaaatgtatatatgcaaaagggngattaattgaacaatgcattggcattgctcttatttccaacattcatctaaatgagggacattgtgagtagagtgtaaaaaacgcggttttgtagattaaaacaaatgccattggagctaacgagaagaaacaaataaattaacagagtcttccttattagttctgcatataaaaggggtttctgttggtacacaagattaattgtattggaggaaaagaccttaatttgaagtgaacatggtgtccaaaactgtggccaactcgatgctatntctgaggattgttgctctcgcagcctcagctgcaactgtggccctgctatttacaaacaacggtcaaattgatgatggaacaaa

SEQ ID NO: 52525 - DNA, 560 bp, Glycine max
  unsure (1)..(560): unsure at all n locations
ctcacctccgtccacgantctctccagtgtgntgacacctctcactcttcncaaacagcacccaccagatgtgcatgatacatgcantccggcacaacaaaccagctagtaccacagcaaagacgagaatattttattttgccacgtaaactatcacatctataaaccgaaagtcgaagccactcgataaacactagtagcgcaaggattcgtgctctctagcatgcaaagacaacctcatcaatataaatacaatctctattatatagtgtcaacggccatagacttgatctgaatgaaatataatatgatgaaatctccaaatctaacgcgtctgacacgcaggagtgcttcctgaccattttacggataccgatccgcatgccattgatataattattcgtatgaagcgattacagcttgatcagcaacatagatagtactaactcgtcaacttagaaattctgattaaataagacggaggcgcgggggactcgtcgtaagagctatgtatgtacgattgaaccatctgactccttacagagatcctacaccacgcc

SEQ ID NO: 52526 - DNA, 427 bp, Glycine max
  unsure (1)..(427): unsure at all n locations
agcttncatgtaagggtgcacttattttctatacaattggtttgcatcaagggtcaacccttagcccctacctttnntaccttaatttggatgtcctcacggaacaaatccaagagatagcgccgagatgcatgctntttgcagatgacatagtcctccttggagagttgagggaggagttgaatgagaggttggaaacttggagacgagctctagaaacacatggctttcgcctaagcagaagcaaatcggagtatatggaatgtaagttcaacaaaagaaggagggtttctaactcagaggtgaaaataggagaccatattatccctcaagtcacaaggtttaaatatctcgngtctgtaatacacgatgatggagaaattgaagggatgtgaatcatcgcattcaagcaggatgaatgaaatgg

SEQ ID NO: 52527 - DNA, 339 bp, Glycine max
  unsure (1)..(339): unsure at all n locations
agcttctatagatgctagcatttaccattctccaccatcgtcgttcttcaactatccattcacaaccaatggtatatcggatggcttgtagtcaaacatcccatacttttcaatactcttccaacatctttcttttgacacataaaaactacatcatcctctggtgaatttctattctaagaaaatgatgtagcaagcccaaatcattcatctcatatctcatcatcatcgtcttttctacaatcttcaatcaactttgacatatttccaaataagactaaatcattcacataaagtgaaacaattaacatatcagccacaccttgtctctngacatac

SEQ ID NO: 52528 - DNA, 423 bp, Glycine max
agcctaatcgctaagcgacaacctattatgtctaagcgagacctattgccaccaagcgcaattccttacggacttaattgtggtccaagacactaagcgccagtcatggcagctaagcaagattcattgcggcaatgtgagcactaagcgagtccatctcagctaagcgcatgctcctctatacttaagatgcatcattttagctaagctagccagagccaggcttagtgagagttgcaagttttttaatctgcagacctcgctaagcggacgtaccctcgcgctaagccgagtctctgtgctaaaaaaaattggatttgaatttgaaacgtctgctaagcacacatgttcgctaagcgagcttggatgagagaccaaacgtctctcttgctccttagcgcagcagtctgctaagcgaaagta

SEQ ID NO: 52529 - DNA, 447 bp, Glycine max
  unsure (1)..(447): unsure at all n locations
tacacttatttggaaatcgataaccagtgttcttgtctgcaaaatctaaagatgtaactcttccagaaggattgactattacaaatgggttttaagtatctctaaaagctataactcttctgaatggccttcttgaccagacatgaagagtctatactagcatggctctgttctgcatcttaaatcaatccttctgacaacaatcttgtacacttattcactctctacaagccttgaatctctttaaacttcttcttctatttttgtaccaaaagacttctgaagttctctggctttctcaaccttgaaaacttgagctattcatctnttcattctcttctccctttgccaaaaagaattcgccaaggactaaccgcctgaatcttattgtgcctctctttcttttttcaaagaacaacggataaccgcctgattcttttgtgttcc

SEQ ID NO: 52530 - DNA, 460 bp, Glycine max
agcttggaggactatgttcggagttgttgttgaacttgcacctacacctaaacctccactttttgagctgacaccacgcctgttgaaccaatacctccacctattccttcttcacctccatttactcaacctccaccaccatcattatttctctcttcaaacccatcgcctttttgcttatgacaaaaaaggagagaaggagttttgattgtaagagcaaactctcgatagatgaaaaaatggccttggagtatcttgattttttcactaccatatattagcattttttagttctttgatttacacatatatcatcatcatgctatgctaaactcaaggggagtttaaatgcattacacatcatactgattatggtttcgttactcaaaatttatattatttgtcattataaaaaatggggagattgtacgtttggatgaccatttctacatattaatga

SEQ ID NO: 52531 - DNA, 325 bp, Glycine max
agctcgtaggattatggtgtgcccatcacttgttctactacgtgtcggtcgggcgaggggtcacaccaagtctctacctattcatccttgcgcgcgtgatgtcctccatgcactgatgcccaagatagcccgcgcatgcatgcttctcgcagacgatatacttctctttggagagttcacggaggacttgaatgataggttggtaacttgcatacgagctctacaaacacctggctttcccctatgcccaagccaatcggagtatatcgaatgcacattcaactgttgaacgacggtttctaactcacaggtgatattatgagac

SEQ ID NO: 52532 - DNA, 427 bp, Glycine max
agcttcaggctgctcaatagctccaggttgttgtatggaagggcaaaggtctgtatggtggtcagcagaggagcacaaaccacaaacccttgcgacaggtacagatttctgattcaaggccagctgggttaccaagttaaccaatgcatccagtttgccttcaagcttcttagtttcagatgatgtagatgggtttgtagctacctcatgcactcctctaatgactatggcatcatttctggcgctaaactgctgggagttggaggccatcttctcaattaaattcctggcttcagcaggagtcatgtctccaagggctccaccactggcagcatctatcatacttctctccatattactgagtccttcataaaaatattggagaagaagctgttctgaaatctgatggtgagggcaaatggcacat

SEQ ID NO: 52533 - DNA, 216 bp, Glycine max
cattatcgacctaatgccgctttgatgtgttcaaagctcctctcaggatttaattatagcacgctggtgaaccgatcaccctagggagtgttgaggctggattattagcattagaatatgtgttgaacgcttagaactggatagagcaaggctggataactgtctgtctggacactgagtgcaccgatttagtttttaatatgctggaatcataat

SEQ ID NO: 52534 - DNA, 610 bp, Glycine max
  unsure (1)..(610): unsure at all n locations
acacgattcactacacttttctcctgtttaccttntctcgctacccccaaaggggnnnaagtgttcttgagccctccnnacccncnannaanatnancctantgaagaacaaaaccaagggacaatttatatatatctatgctcatcatgccaacatagggagaaataatgttgtcttctcncccggagattgcgtttgagtgcacatgataaaagaaaggctttcataacaaaggagatcatagcttctaccaaagggagatggaccatatctagcgcttgaaagaatcaatgacagtgctacaaacgtgagctgctcggcgagtatgatgagagttccaccttcaatgtctctaacatatctctcttttatgccgatggagaatccgatttgatgacgaattattcttaagaatgagagaatgatgatgacatgaccaagagcaagggcagggatccactcgaagcacttgtaggacctataacactggctagagacatgagagctcaagaagctcttcaacaacggcgtgtcctactatttgagtacaaagccacgttcaaggagagaagtccacgttgtgagntgaacatgactcaacggaggtcg

SEQ ID NO: 52535 - DNA, 455 bp, Glycine max
  unsure (1)..(455): unsure at all n locations
agctntgaacattgaagcattgatcttgtattaatattttcatctcttcttcttcaaccagtatactcttgaaaaactagaaaatgctctcaaaacaccttaaacactttaagagaaaaagactaagcatcgatttgtatattcatctataaaacgattctagttttagtctctgacaaaaatttaaacaataaaacgcattgatttgtatcttttctgatttgtttagagccagtagagacttggtaagacaaagaatagtggttgttgatcaagcttggagtagagcttgatttgtaaaatcaaaaagtgattgtggcattaatacttgtaatttgtgagaagttaatggaacctggtgttttaccaagaactggacgtagtctcagtggtagagatgaaccaatataactttgagtctggtatttcttcgctttctctctatggtcaactga

SEQ ID NO: 52536 - DNA, 429 bp, Glycine max
  unsure (1)..(429): unsure at all n locations
tactcagcttctaaggaagttntctcaagaaagcttctcaaggaagctatctagtctataaatagaaacatgtgtaacacttgttatnaacttgatgaatgagagtcttgtgagacatacttcaaagttccacttctctccctcttttattccttcaattttgtgctcccccctctctctttctctccctctctcttttcctccattgaagcattctctccaagcttcttatccaatgctcatcttggtggtgaagctccttcttccatggcttattacttagtggatggcgcctcctctcacctcttctcctttgtcttccgctgcatctccatggtggaatatcaccattaaaggacctcattgaagctcaaagatccagccctcatagaagctccacaagcaagctttcatcagtcgggatgaatc

SEQ ID NO: 52537 - DNA, 417 bp, Glycine max
  unsure (1)..(417): unsure at all n locations
agcttcacanattattatgtgttccttctatttctgaaaatntgttaagtgagttaatttgccaaagataactctattttctttgaatttcatcctcacttatgtcttgtgaagtctcaagagaccaataagatcctttttcaagaagttgttggtgctaatgtactttactccttacataatctcaagcttcaagacaaaccttctctgctgatgtctacctcaacctctgtttcaaatacaaacttccctagttcagctgcaactattaataataactctagtatagtttctaattctgttctttcttcttccagtattactaacctctggcatgctacgtcatatgagttgagagagagaaanagaagaagacagctggcagatattattattgatttagcaggaatatgatac

SEQ ID NO: 52538 - DNA, 350 bp, Glycine max
  unsure (1)..(350): unsure at all n locations
ntaagtctatgaagcgctntcttgatctcttctctcccattcacttacacctcactcctcctgatgccgaaaggttgtacttcttttcccttttcctcactctttctcacacaccaaccaacattgattgatgcttctaattttctctcacttgccacaagattagatactgaatctcaaattcctaatctatataaagcttgtgagttttggttagctttgaattagtagtactcatgttgccattggatgtttctcctattcggcatccctgatgatttatgcgacaaggtttctaaataccctaatctttcaatattgtggttgaaaacaacgagaggagggtgctg

SEQ ID NO: 52539 - DNA, 394 bp, Glycine max
actcaagcttcttagtttcagatgatgcagctgcattcgtatcttccttatgcactcctctaatgactatagcatcatttctggcgctaaactgctgtgagttggaagccatcttctcaattaaatttctggcttcagcaggagtcatgtctgcaagggctccaccactggtagcatctatcatacttctctccatattactgagacctttctaaaagtattggagaagaagctgctctaaaatctgatggtgagggcaactggcacatatgtttttaaatctcttccagtactcatacaggctctctccactgagttgtctaatacctgagatatccttcttgatggctgtggtcctagaagcagggaaatattttctaagaatactctctta

SEQ ID NO: 52540 - DNA, 369 bp, Glycine max
  unsure (1)..(369): unsure at all n locations
agcttggtgcatatgatttatatgcttcatcttgagggggagtgttgaatatccttgtattntatctatatttggtagcttagttggtaagcttgttcagaagggcagcagtgagttgtcactgtcattgcccttctctctctatcttgtattctatatatatgtaactttttgaaattaataatgctaacagagaaaggagggtgtttctccttcagtttcaagtattgtcactggaaacaatcccacattcatcaagtccttagttaccaaactcaactctgagttctcacttaaagacctaacgaatcttgactatttcctgngaattgaagtaggatcctaactcaatggtgcactcattcacac

SEQ ID NO: 52541 - DNA, 324 bp, Glycine max
tcttagtttcagatgatgcagctgagattgtagctaccttatgcctcctctgatgactatagcatcatttgtggcgctaaactgctgggagttggaagccatcttctcaattaaatttctggcttcagcaggagtaatgtctccaagggctccaccactggtagcatctatcatacttctctccatattactgagtccttcattaaagtattggagaagaaactgctctaatatctgatggtgaaggcaactggcacatacttatttaaatctcttccagtactcatacaggctctctccactgagttgtctaatacctgagat

SEQ ID NO: 52542 - DNA, 620 bp, Glycine max
  unsure (1)..(620): unsure at all n locations
ccgcttccgctcnacaatanatagagcgacggtcttncgtcacatgcttcncgcgaccgannncgnnnnnacnccacccccntnaatnnaataggttgagaccctcgtagancnccacctntanagncgaactgcacgcatgcaagctnttacacgcatgagcacaccatactttctatttttagatcaacngacgcaatctatttgagtgaaaagataattaatactactcatataatgccgtgtacaactaaaaaaaataatataataaaaaatagtgctcaatccaaacaagtcgagggagctagagtaccatcattagtatcatacatctatctgtgacacagagaatgagagacatgcatggccatgcataacgcaacaaaacataataagaaaacatgctgtctaaacccaaccaaggaaaaaatgttatcatatcacatgaagaagcacggcttcctatggaggaacaatgatagtaactaggtgagaaagtctggagaatgcttagccgacagcaattcctgattagataaaatacacgaaaacacacatggcccatgaaagcacgacttctatacttcctcttgcagagagaagcactacccggacttaag

SEQ ID NO: 52543 - DNA, 439 bp, Glycine max
  unsure (1)..(439): unsure at all n locations
agaagctcatgacgctgcctcggtnanacgctgtctagttctcattaaccgatggatcttctcgaaatgtggtctgctacttcacaaaacacttctccatgatctgaccgttgggatctttgagaagatgactgccgtgtgctacaagcctcttaataaagcttaacaggaagcctcttaatgaagcttctatagaaaactacatgaagctgcctctgtagaaacgctctccagccttcgttaaccgattgatcttctcgaaagttggtttgcaacttcacaagacactctaccatgatttaaccgttgggatcgttgggacaatatctggagtgtgctagaagcttccgttcccacagcatcatttattaagcatttactctttgcttcttgtacttacgagaatgtcattactcttcttttttctatcaatgcattc

SEQ ID NO: 52544 - DNA, 421 bp, Glycine max
tcacatcccatccatcatgtactatcatattcaatgaatacagggcggaggcagaatactctgttcaacacaaaccaatatacagctttttcacttaaaccccagtacattccctcgtccaattgtaaccgtggacgactcgaaattctactggaggcttaacacatatgtctacactgtgccgtgggatctgttaaacgtcagaaccaactgtctacttttcacaaccacaataccacatttctgcctagccaaatttgtgacatattgacacaaatttgctatgtgagattcgaatacactgctccccattgccaatgaactcagtctaatatgataactgttaatatgaagctctacaagcactatattagtttaaccccattatgatttacgttggaagaatgaagggaacttgaca

SEQ ID NO: 52545 - DNA, 339 bp, Glycine max
  unsure (1)..(339): unsure at all n locations
ctcgcccaggcgagctcggtggcatactgtagaactttctataacgcccanacgggccttgttgctattcgcactcccctatttactaaatacaccctctgccttgttatatgaatacttttccggaacggctcaacacttacgaattacataacgatactcgtgtctattcgatatgctatgataccttaccgatcacataaatatcccttctttttggcttccacgatggtacaggaacattacagtatgcgcactaacacttactttaatcttcggcttgcacggaatgtacaaatgtgctacatgcttctttgactctgcatggtcaaacttatg

SEQ ID NO: 52546 - DNA, 125 bp, Glycine max
tcactctgaggtcggatatattcgcataatatatcgagacgctacgaattgaacaatggaagcacttgagcaactctaacggtcataactgatcactctgatgtactaatcatgcgcagaatata

SEQ ID NO: 52547 - DNA, 448 bp, Glycine max
  unsure (1)..(448): unsure at all n locations
acgactgagaaaactgangcacatgaagagggtgagaaagatggagaaacccatgctgtgactgccattcctatacggncaagtttcccacctacccaacatgtcattactcagccaataacagacctccttacccaccacccatgtatgcacaaaggccatccctataattaccacagagcctgtctaccgcacttccaatgacgaagaccacctttagcacataccaataaacaccaacataaaggaattctgcagcaaanagcctgtacggtcaccccaaattcctgtctatgctaaactcgacccatatcactcgaaattaatggtgccatacccaaccaagtcctcacctcattttctatgatcactcgacgcactgtctatatggtgaccctggcatcatgacatgatgaccaacataagggagttatgaacgctgctgaat

SEQ ID NO: 52548 - DNA, 113 bp, Glycine max
actcgctgctgactatattcgcggaatacacttttatttgtaccggttagggaaatgaccatcctgagcagactcaaaagctacctctcgacaatggagcatggtcggcactc

SEQ ID NO: 52549 - DNA, 436 bp, Glycine max
  unsure (1)..(436): unsure at all n locations
tatccttatggcttgcctccggacttcactctccgtgccaccccantatatttaagccaagcctctactatcgaggggcagtctccaccttatgacgactatcccgggctagacgatgaggaaggagatacccatctcggtcccctgctccacctcaaagatcttctccccatgaactaccccaaccaaacatagttcgccatatcccgacttcacccacacttcgataagaatctgtctccttcgtggaagataaagganagatngaggtgcttgaatagaggttgagagcagtcgagggcctccgcaattacccattctcggatctagcggacttatgtctcgtactctatatcgtcattcctcccaagttcaaagtaccagactttgataagtacatacggatgacatgttcganatggcatcttcggatgta

SEQ ID NO: 52550 - DNA, 286 bp, Glycine max
gctgtgaatgcctgctgatagtagacataccctttgtttttttttgcgagagtcggagtcatagcgaacactattgcactgtagaacaaagtaagtccctaggtccaaggaggaggagttatctgtaacaggagcttggagcggaacgtagctgatctgcgaaacgagtttagcggcaacctacctgaatgtcttaggcttaacgaatgctgcatggctaaggaaaacaatgcctacgtgaccagaccttctggcaacttgggttgagagcaatttgatcgcgcat

SEQ ID NO: 52551 - DNA, 383 bp, Glycine max
  unsure (1)..(383): unsure at all n locations
tatgcacatttgatatcctgcttcgatgaataagaagcctgtggcatatggagagaataataacgaangacgaacccatgtngtgactaccgatcctacatggtcaaatttccaccagctcaaatatcaatactaaccaatatcaacccttcttaatacccaccaccctatcattcaagaacacccaatcatacacaatagtcaccgctaaatcagccacaaagcctgcctgtcacatatacgatacctaacaccacccgcaacactaaccaatacaccaaccatggaatggattttcatatagacgcctgtataattcacctaatatcggtgttgaagctatcttacactatatctactcaataatgcgacggtagctataa

SEQ ID NO: 52552 - DNA, 166 bp, Glycine max
  unsure (1)..(166): unsure at all n locations
ctaagcttcattgacaatntcgagcgtctcgaatattacacgcttgaatcttacatccgngctaatagntatgatcattcgacattgccgagagctttcgtcgctcaaatccagtatttctatatgtgatgacctgctcgtacctcctacgcgtaaattatgaaca

SEQ ID NO: 52553 - DNA, 483 bp, Glycine max
  unsure (1)..(483): unsure at all n locations
tatgctccgctgtgctcagctctgatttcgtgagtatatatacaatatgacttattgttttctattatatgtatcggtaatcgatatcatggncaataagccatctggctaatgattacaggatgttgtaatctattacaggctgcctgttcatgtgtaaacgattacactggatggtatcgattaccagagcctattctatgctagtttctaatagaaatttaatgtgttgtttagaacattctatctactatatttccgtctaatcactatattcctgcttcattctattacactagaatcttaatgtttcagtaacatgattcttacagactaacgtatatctcactcaatgtgagataattactatgacacctatattctatttctaaattttcattagagacgtttcttttaataaacacacttctggggagtgagtgaatatgcaattgtttattcaatatttaatcaactcttaaa

SEQ ID NO: 52554 - DNA, 422 bp, Glycine max
  unsure (1)..(422): unsure at all n locations
cttctttgtgtgatgatgaactctatcgtgcagaatatcatgatcattgtatgacatantctctatcacctcaattgcctctctaagggtcatcaactatattactccacctgctgaatcatctaacagttgcttggtgtgtggtctcaatccatctataaacaattcaattgaatcgactcagacaaccgatgggtgggagtcactctcagtaaacctctaaaccattccaacgcttcactcaaggactcgtcaaggaactgatgaaatgaatagagctttccctttctcaatcttatactctgggaaatatttcttagaatatattaacatcttcattctaatgtttcagactgatacacttaaatgagtatagccacccttttggcttctcctgccatcgaaaatgagaataggctgag

SEQ ID NO: 52555 - DNA, 328 bp, Glycine max
ctaagctgactggctcaagacaacaatgatctattgtcagatctttctaggcaacttggcgtcgggagcaaatttgattcgtggattcatgcgtaatacatttgatcatctatattgacgtgatggacttgtgtgaggtgagagtcgcttcaaattacctcatctaaattcactttcaacctataaacccatgaagtgcgtgtgtggacacctaaatttgcgtgccgtcttttagcatgaattggttatacaaaatgaacatgattggactcgttgaatgattggcaaatgtagagaagagtgtatttcgaactgcctatgcaaatat

SEQ ID NO: 52556 - DNA, 415 bp, Glycine max
  unsure (1)..(415): unsure at all n locations
acttaattcacccctcctcttaagttatcgataccacttcgccaacaaaatataatatattaaatataaataacacttatataaatatgcatattctaatttatgtgacaataacatataatcctatgcatcatattctatacacaatatataagactatacaaatataataaattataaagaataaacattctacttttgaagtatttttcccatcaaatatatattaatactatatttcacatacattattcaaatgagtacttgagtgtaccgataaaaaagtatcgttcttactcttatacttttatatctttaatttattatattcttatgaccttatatattaactcttacaatanaatatataagagtgaattctactctcacataacatagagnagtatatctatat

SEQ ID NO: 52557 - DNA, 367 bp, Glycine max
tctgaactgccctgtactgtgaagagctgggctatgttctctctgacaccgacaaactatgtcttattgacaattggagcatgaaaactgaccatgcgcaacattatataaccccttagcggaaccacaacagagaatatatgatttcagaataatgtgcatcctaatcgccgagctatgctgtggagcaccttgttggcgttgaaactggaccttgtgacattggaatccgaaccccggaataaagaacgggtaccatctgtgaaatcgtaggcaaaccaatgagattgtaccatcggagttcctactttcaagctaaagaaatactaccgatgtcgaccttaaaaaaaatgctacaatctatgtt

SEQ ID NO: 52558 - DNA, 401 bp, Glycine max
tgtatacaacatactcgattaggttatgtgccttatcgtgtagtatatacactgctcattgcacacatcagtaaaccttgaattgctttgcctcattatcatacacattaacatatatgacaatgaatgacagaaatattctatttataatgatagacaaaatgagatccgcttcctggggttggtgtgtctccattaaaatgaatttacctgttaccactatactgttacttaaggcacgatgttccgagatagagaagacaccaccaagccataagtggacaggagtttgtcttagataatgctgcaggacatggttatttcattttttcacttttaaccagctatccataaccccttatctgttaaacactcgtactgttaacaactttatatacatg

SEQ ID NO: 52559 - DNA, 261 bp, Glycine max
  unsure (1)..(261): unsure at all n locations
gatgaccaacagctcacaggtcaatccaagaacgagctctagatgttcaaacactgaatcatgaacacttcatgattcagaggagaagtgaattcagaatcngatcatgattatgagacaacgttcagactcagattcaaatcagaaggctttcatatcaaaaaaacttatcctgatagtttgagaggtttttaatactgatacacatggattttctaaaactgttacaaagagtttactctctggaatgataccacatat

SEQ ID NO: 52560 - DNA, 153 bp, Glycine max
gaacactggtctattgtacgctctattttatgcgttaataacatgtacaaactttatactatattgtttagaactatggtaagttttggtgttcctgataaaatatacatggacaccgctcatttattgtatacttccatggatgtcattgtt

SEQ ID NO: 52561 - DNA, 422 bp, Glycine max
gctatgctcaacatttatatagacctccacagcagctataccaacattagtataatacttatgacctttcaggcaacagatacaatccaggttggaggaatcatccaaatctgagatggacaagccctccacaacaacaacagcctatccctctcttttataatgccgtggtccaagcacgccatatgtttcttctccaatgcagcatcatcaatagtagcatcaaccacaaagacaacaagcaactgatgccccttcttaaccttccttataagagttagggaggcaaatgaccatccagaatatgcaatttcatcatgagacaagagccttcactcatagtcagacaaatcagatggcgcagatggctactcagatgaatcaagctgagtcccaaaatctgacaaatcgtcttacaaact

SEQ ID NO: 52562 - DNA, 85 bp, Glycine max
  unsure (1)..(85): unsure at all n locations
gcttgcatcatactgangcatcttacgaacactctcttgtgccgttgtccaacaaacacttccctaaaaaatgcgttcgtcgcgc

SEQ ID NO: 52563 - DNA, 146 bp, Glycine max
ctgaccacacagtggtatctgtagatatggctggggaggcatgagaccttgatgacgtccggtgcggtgctcttgcccaacaccaagcttgaccaatcctgacccatcccgggcatagtcggtcagtgagaaccagagatgtacct

SEQ ID NO: 52564 - DNA, 546 bp, Glycine max
  unsure (1)..(546): unsure at all n locations
cgctggntttgttcatcattacggccttgatactaagcttactcgacaccacagccactatgcccgcgagattgaccttatgtgaaatgtacctcagcagaccacaaacaccacggtctaccaagtcaatgttcctcaggtgaccaccaattcgccaatccttgcaccagaaaccaaaaaagcttcttagcttaaccaagggtttcagaaacagacctagcacgaaagggagaacaacaaccttcgatagaacaacacangtagatgaagcgtacctgtcacggtcttcagtgcaatggagaacaacagctcttcgatgtttacagtgcaatggagaagagagcgcgaaagggttcacaataaaagaaaaaagcgagagaggctacgggtaacgaagaagaaaagagcgcgagcgaaatatggtcgttcanatacaatntataatgtaagttaacatcgatgtaacgaaatgctatacatncgtntttcaaaacgatgttacaatgctctacatcgtttatgaaaccgagtacgtcgctcgtacat

SEQ ID NO: 52565 - DNA, 241 bp, Glycine max
tgatgtttgtacaagctgccaatgaaagttagatgcgttttgtctctatacatgtaacatgtgcattagctactttgtagtctataccttcttgtatgagtatcctttagcaacttaccttgtctttgtgttttacaacctttccattatcatgcaccttgttgcgaaagacctacttcactccaactgctttcttccttttggtaagttgactaactgatgtaagctccattggagcttg

SEQ ID NO: 52566 - DNA, 485 bp, Glycine max
  unsure (1)..(485): unsure at all n locations
agcttgttcgcatgtttagtgaaggaataccgatacttgtgggccgttgcacctatttagtctcacattntttctatccaacaacccaagagtccgatggcatgcggagccaccttacgcttatccgcacctcctcattcggagaccccaagttcgatgacacgcagagaccaatgtggcaatctgcaccctttatcgagatgtcagcgtcttccggtcgagacaattttagtctcacattgttgctatctggcgacctaagagtttggtggcttgcagagaaaccttacggttattagcacctcgtcattcggagaccccgagtctaatgacacgtagagaccaatgtggtcatctgcactcttcccggagctgtcagcatctttcggccgagactatntagtgtcaccttcttgctgtccagcgacccaagagtccaatggcaggtagagtaccttacgggtatccgcacctcgtcactcgga

SEQ ID NO: 52567 - DNA, 323 bp, Glycine max
agagaagttcaagtccatatccatcttgtctgaagagagtatgatgaactaagggacgtcaatatggccacagctgaagccttggaacgagaaaccaagaatgcccgaaaggaagaacacgaccaaagcaaagttttgaggggctttatatggcagcaatagtgagctcaagctctgaatatgtgaaaggaatcatcacgggtcaaaggcatgatcttgaaggacgagctaaaggtttgccttatgtcgaaaagaaatttgtcccaacagttaagcgagactgaagggaatatgtgggccatcatctataagtgcaaagagaa

SEQ ID NO: 52568 - DNA, 471 bp, Glycine max
  unsure (1)..(471): unsure at all n locations
gcgcacaagataaaaaggtatgggtatatacctctctatagttngaactccttagatggatgcccattcaccaagactgagaatgtaattgtagagacacacctcanaatcaaatccacctaatgagttgggatacccaattgttctagaactctcctcaagatgatccattctaccctgccataggctntagacatgtataacttgaaagccattgaacatttcctccccatgatctttttcttcatataataaaagcactcaaatgccaccaaagcattattagtaatcaatctatcaggcacaaaagcgttctatgtttctcgcccaatatgtggaaggatgatcttcaatttatttgccatagtcttagtcaccaattagaagaccacattacatagactaattgacatcaactcactagcatgtgtgagaattttcacctttggaatcaagggaatccaagtctta

SEQ ID NO: 52569 - DNA, 377 bp, Glycine max
  unsure (1)..(377): unsure at all n locations
atgccctgtacgtgtntcctcgtggcactggttttgttgttgagatttcctatagtagtttaatatatatatnggagcattaagaaacatttggaagtatacaagatgggttggtaccatgattatntntgtcttagagtatttcaagtatgcatcttcactgtgatgtgtnataataataagaataagaataaataanataaggttgttatagaaattattgtttcatagtgattatttttgttactttataaattaattggtgtagaagtttttttattntattctgttgaattaatatatntcaatntaaattatatttttgttgtgtcaaagaaatgttactattgaatgatatgtgtaggatgcatgggatg

SEQ ID NO: 52570 - DNA, 477 bp, Glycine max
  unsure (1)..(477): unsure at all n locations
agcttatcctgatgccaagaaccagccacatgttcttgttagtccaagctatttccattntgttgcttgaaatagtctgatctatgtttccttttgctgtgatctactcgatcctgaggatgtttttcttgatcaataggtggcacaaagattgaagcaacaaggctactcttctggttgctctgttggtgatacaatcccttatantaattgctatgagcaggtttgtcatttagtcactctcccaatcaaaggccaaatagtgcaactntgggaaattntttgcatcgagtatttggtgtatatgtntgtctcaattgtatttttaatattatgttctgctntgattagggtggtagtccaggcagtgcagctggcattgctcaacgtgccagacatcctgatgaacttaaacgagatcaagggacctggctgatngacattgattactatntatcacaacaggtctttatattt

SEQ ID NO: 52571 - DNA, 346 bp, Glycine max
  unsure (1)..(346): unsure at all n locations
ctagtgcgcgagtctctctcccttatacccttcttccactttcgtgtcttttacgagttagatttctcattcgtcatggaacaacacattcactctctctctctntagtgattttttcgatttgattgacaaacacaacgaaccaaagttaactactttagagagagagagagagagagagagagagagagagagagatggagagtgaaggaagaagagaaggaggagagagagaaacaacagcagcgacgaggaaggtggagggtgctgagagaagatacaaaggaataaggatgaggaagtggtgcaagtgggtcgctgaaattagagaacccaataagcgttc

SEQ ID NO: 52572 - DNA, 555 bp, Glycine max
  unsure (1)..(555): unsure at all n locations
ccccgtcnnnnacnatgannatgaatccattagacnccgtatcctctcagtcacctgaggcatgcatgcttgtccgctatcttgctatgaatagggggttataggaaaaatancatggttcatccccttacgcacttttgtctctctcgaaattgctgaggataattaataccgtgaagaaatccgagccgaggcgcttgcgctacgtaatcgtgacgtttccatgagtaatcacgcgaagattctccaccgttaatcaagattgatcgttcgttcgtcggtgtcttcagtcttcaacgggtaaggacctcaaaccacgcttttcagttcattctatgtacccgtggcggccacacttcgttgcatgtatatatattctcgcttgcatttgcttaccataccccgctttgacgtgcttaagccatttattgaagacatgtctcgcttaatctataaagaaatataaatctcaccgatcgttgaattgatcatcgataatgtggtaacgaattcgaccgttngtcgtctgtaccgcgttgaaataaacagaggtan

SEQ ID NO: 52573 - DNA, 570 bp, Glycine max
  unsure (1)..(570): unsure at all n locations
gccctatgccntttgattccccttgcatagacgtgacgcgacacantagaatacctcagctttgaaagtgcccaatagatggctcttctactagactttgctgtctacccaactcatccaatcgaggcaaaagtgtaaaatggagaatattctagtgaattttgcagccactcaaacaactctttctacttcactacaaaactttggaaccttctcctcttcagcacttttgtcctcgattcggatgagtctggtaggtggctaaggctggcataagagaccattttcaaccactctttgaagctcatggtggatgtttacctctttgatagtctccgggttatagatgatgacgattataaagaatcatcgggtaaagtgatatttacaaaaggaggggcanacattcccacccatcacacccacatgtgtgcatgtngtgttataatgatgtactagatcaatgcatctatatatgcctcatacctcataatattaaacaataagtagggacatatcccttcgagggcanagatcttgctgagcttgacttntaggtnaaaatcgtan

SEQ ID NO: 52574 - DNA, 453 bp, Glycine max
  unsure (1)..(453): unsure at all n locations
tcttaagtcacctgcggctgcagctgcaagctgcatactcaacagagcgtgtttatctttctttcaatatagagacggtggcttggataatggtgccaaccctcttgggatccttatctagcctgcgtcagaattggnggtgctaaccatgttaagatgcctaaatttgacaggttattccctccaaaacatttgttggattcatgtcctttntcttttaataagatgagtcatgcaagcatgttttgattatcacttacttgtacatggtcagcatcgacatgaataacattactatcttaccaccatgatacttatggtacattgtcagcatcaacacgaatgatatgactatcttaccgccatgatacctattgtacatggtcagcatcgacacanatgacacgtctatcataccattatgatacttgnggacatagtcgacattgacac

SEQ ID NO: 52575 - DNA, 245 bp, Glycine max
  unsure (1)..(245): unsure at all n locations
tgtcgagagcttccgttgctcaatttcgagtatctctatatgtgatgcacctgcatcggacctcctagtgaanaattatgaccatttgaatttctcgagagctttcgttgttcaatttcgagcatctctatatgtgatgcacctgcatcagacctccgagtgaaaagttatgagcaattgaatctctcaagatcttccaatgttcaatttcaagcatctcgatatattatgcgcctgaatcggac

SEQ ID NO: 52576 - DNA, 309 bp, Glycine max
  unsure (1)..(309): unsure at all n locations
agcttgatatagtctgggtctgtcacttcccgctcctacgtacagtcctcaagcaacccacttgagattgtccactctctgtgtaaaactccttttacaaagtctgaaccacacacggacgacccttgccttgcgttcgagaatcctctacaacaagagactctcagtctcttaatgccttttgagaagtaagaagatgagaagaagacctctctcttatnagggatagattgtcaatgaagaccaatcanaattccttattgaatgtgcaagtggttgaccaaggaatcttattgagaggataagaca

SEQ ID NO: 52577 - DNA, 423 bp, Glycine max
  unsure (1)..(423): unsure at all n locations
ccttctggtcctcctcatagttgttgcatgagaaaacatggtctatnttcatctcccactccaagtaggcctccggatcattctttcctttaaatggaggaatgttgagtttaataccatcaattcggttntgtctaggaacaccatcattccctcttctcctcctttcttcttcattatgatctctattctccatttgatccaacctctcatggagcgcatcatctcgttgtttcattaacctctccaaatgttgcatcaaagcttgcatttggaattgcgaaagccccactccatcattaggattagtacctgacatctcaaacaaacaaatcaaacgtaacaagacaattatagttgctgtttgaatacctcacccactcaagtgtatcacacaattatgggctttctctaatgaaacac

SEQ ID NO: 52578 - DNA, 411 bp, Glycine max
  unsure (1)..(411): unsure at all n locations
agcttccatgagtgcagtttgagacactacatttggtacataaccattcttattcatcaatcctaagaccttctcggcaccattgaagtctactagcttcccataagccgtgataagcatgaagaaatccatcttcccaaaatcccaccagttctgagtccgaagccagtcaagaatctaaagaatcacacaataaagcagttagaatcaatagttcactatcaaaagcaaacagataacagttgtatgtattggtaatggtatatacctcaacaacaaggtgccactctttgagttgcttanacctaatcaaggtaccaacaagaaggtctttaagaaatatttggttattaatcttctcagaagagagaacagagacagcagaacccgattcttcgaattcagtcatga

SEQ ID NO: 52579 - DNA, 312 bp, Glycine max
  unsure (1)..(312): unsure at all n locations
gttacagatacttactggatcctgctcttctttgtcactactcaaccacaacatcgaagcagagtanaactttcttttccttttcagaccattatctaattttattatgaaatattgacagggttaccaatacgagagattctatgtttcatgcagagtatattcagttgcgaacaaactaggaatgaatacaggtagttcttcacaaagagtccacgaacatggagagtatgcttgtaagaccgagacatgtttgcaagacaaatattgatggtactggtgatgaactattaataacatcatgcctaattt

SEQ ID NO: 52580 - DNA, 341 bp, Glycine max
  unsure (1)..(341): unsure at all n locations
agctngcgatgaggaagtgttgaagggtgaaacttcctgcttttattggtgaccacagagtggtacttggagatatgtcgcggnggtcaggagaccttgnggacgtcaggtggggtgctattgcccaaaaccaagcttgaccaatcccgacccaacccgggcatagtcggtcagtgagaacctgtgatgtacctaagcaggcgagctcctggcagtcaacagataaaaggaacaaagaccacaaagcaaggaggcttgtggtggctggccagctgtgaatattgtgtaatatgtggtttgtggcctctggtaatcgattaccaagggtgggtaatcgatta

SEQ ID NO: 52581 - DNA, 322 bp, Glycine max
  unsure (1)..(322): unsure at all n locations
tatgctgcanatatntacaatagacctcctcaacctcagcatcaaaatcaaccgcagcagaacaattatgacctctccagcaacaaatacaaccctggatggaggaatcaccctaacctcagatggtccagccctcagcaacaaccacagcagcctgctccttccttccaaaatgctgctagcccaagcagaccatacattcctccaccaatcgaacaacagcaacaaccccagaaacagccaacagttgaggcccctccacaaccttcccttgaagaacttgtgaggaaaatgactatgcagaacatgcagtttcagcaag

SEQ ID NO: 52582 - DNA, 198 bp, Glycine max
tgacatctcagacaaacaaatcagacgtaacacgacgattatgggtgctgtttgaatacctcacccactcaagtgtgtcacacaattatggctgttctctaatgaaacactcttgccttttaccactctaattccccttgagttcttacgcgattcaagagaatatggccacgacaaagaacaattcaccaatatgtg

SEQ ID NO: 52583 - DNA, 189 bp, Glycine max
  unsure (1)..(189): unsure at all n locations
gcttctttactgctcatggcattcccaaaaatcatcaacaagtatgacaaagctctcattggntctaaaagattaaatatggctacaagctttttcaggtgcggtctctactactaactatntataaccgttaactaatgactaaatctgtaataacataattctttctcttatgatgggttctggtaa

SEQ ID NO: 52584 - DNA, 359 bp, Glycine max
  unsure (1)..(359): unsure at all n locations
agcttnacgctcaatcctacaagagagcgatgtggttgactcaattgtaaaaaacgaagatgatgatcttattctatctgtaaaaagattcaaccaactctcgagagtaagaggaaatcacagaagatcatactttataccacagacaagggaacaagattcattctctactctaagatgncatgaatgccactaacctcgacatctaagggctgatcgtccactcttccataacacgaatacacaaatcacaactgactgatcttgatgaaaagaaggcacagaaggccttacatgggatgacaatgatatggactcatctgaagattcagaacacgaagttatgaaagcgatgaaga

SEQ ID NO: 52585 - DNA, 390 bp, Glycine max
  unsure (1)..(390): unsure at all n locations
nnttacccacatgaattggttatatgtatttttatatgtttttcttatttatatgcatggcgaggtagagggtgtcacatttagtggtatcagagcaggtcgaaccttttggccagtgtgttatgtgcttaccatattccggtgtgtgctctgtatgattacttatgaatgctnttgttgaacatgcttaccattatttgtattttcttctgcatgattaaatgagacttaataatgcttgtgatgtgtctcgcatccttaatgtttgctatagcataattccactgttgagtcacgagttatgagactggccatctttataattcgtgaagtgtagtatgatgtcatggcaagctgntaagtgatacaagtggtcttgaaaacttgatg

SEQ ID NO: 52586 - DNA, 195 bp, Glycine max
atctcacgactggcgaatcagacgtaacacgacagttatggtgtgtgagggagtgccgcaccctctcgagtgtgtcacgcaagaatgggtgttctctattgagacactgttgcctgttaccactctaattccccttgagttcttacgcaattcgtgagattatggccacgacttggaacaattcaccattatgtg

SEQ ID NO: 52587 - DNA, 126 bp, Glycine max
gatgtccagcttgtgacaacttcagtctggttcgggatgagaagcacatctgcttcagtttatgttgtcatcaaatgggctgtactgtcttcttttctgtataaattattctagctactaggattc

SEQ ID NO: 52588 - DNA, 374 bp, Glycine max
cgcttcatctcggtctactaactcggcagccttttctgcaccttagtatctccttgcgtaggaagaattatggcgggaggatctctaccgtaaactacctgaacaggtgtaattccgatacatacatggtaggaagtattataccataattcagcccaagacacccaatacgaccagtttttgggctgctcctatgcgaaacaacgcacataagcctcatgagatctatgcaccacgttggtttgaccatccatttccgggtgaaaagaggaactcatcttcaaggttgctccttgtagccgagatagctccttgcaaaacatactaatatataggatctaggacactagcaatggagtgtggcactccatgta

SEQ ID NO: 52589 - DNA, 362 bp, Glycine max
atctggaaactgatgagatgaagaaattctattcttgtcttatgccgccttggatgtcggaaagtatttctgcaagaatttctccataacctcttcccattttcttaggctatttcccttgaacaagtgaagccatctattaacttcactggcaagggaaaaggagaatatgttgaggcgaatagcaccttcacgaacaccaactatcttgactgtattacatatctctatgtaagtggccaagtgggtgtaaggatctttatatggcaatccttataataggtagctctgtattatctatattagagaatgtgggtaacagaatgttgcaacattgtacctctagccacacaatacttgtg

SEQ ID NO: 52590 - DNA, 472 bp, Glycine max
  unsure (1)..(472): unsure at all n locations
cctctgcgtcacctgcggcatgcaagcttcatcttcaatccaaaaagagagcgataatgaggactcaattgaaataaacgaagatgatgatcttagtctatttgtaaaaagattcaacaaattcttgagagtaagaggaaatcaaagaagatcaaactttaaaccaaagaaaagggaagaagattcattctctactctaagatgttatgaatgcaatcaacctggacatctaagggttgattgcccaatcttcaagaaaagaatagagaaatttgaaaagaaagattntaatgaaaagaaggcaaagaaggccttacatgggatgacaatgatatggactcatctgaagattcagaaaacgaagttatgaaagcgatgaagaggtaacatcttcagataacaacttatccatttcatttgatgaaatacaagatgcatttgctgatttgcataaagaatcaattaaacttac

SEQ ID NO: 52591 - DNA, 280 bp, Glycine max
  unsure (1)..(280): unsure at all n locations
tctaatgactatggcatcatttctggcgctaaactgctatgagttggaagccatcttctctattaaatntctggcttcagcaagagtcatgtctccaagggctccatcactggtagaatctatcatacttctctccatattactgagtccttcataaaaatattggagaagaagctgttctgaaatctgatggtggnggcaactggcacatagtttcttaaatctctcccagtactcatacaggctctctccactgagttgtctaatacctgagatatat

SEQ ID NO: 52592 - DNA, 377 bp, Glycine max
  unsure (1)..(377): unsure at all n locations
agatgaggaagtgttgaagggtgaaacttcctgtcttttttgntgaccacagagtggtacctggagatatgtcgcggnggtcaggagaccttgnggacgtcaggtggggtgctattgcccaaaaccaagcttgaccaatcccgacccaacccgggcatagtcggtcagtgagaacatgtgacgtacctaagcaggcgagctcctggcagtcaacagataaaaggaaaacaagaccacagagcaaggaggcttggtggtggctggccagctgtgaatttgtgtaatatgtggattgtggcctctggtaatcgattaccaagggtgggtaatcgattacaaggcttaaaaatgaagacagggggctaagatggtctctg

SEQ ID NO: 52593 - DNA, 452 bp, Glycine max
  unsure (1)..(452): unsure at all n locations
gtgaagttaggtgcagccatttccctaagagtcctctcacgtagaggaggttgagccatgttctcagtatgaaaattggtagtggaatgctcaaaatccgaatattcagactcactagcaacgaaatactcagaatgctcaaaatgctcaaaatgtacaaaatgcacagaatgatcaggatgcacactatgcctaaataatctatgaaaggttctatctattttatgatcaaagggttgtaaatcacctggattgcccctagtcatgcactatatgcagcaaataatgtgtttctcaacaagcatctaacaagggggtaaaactacaactatagttaaacgatatccaaatgagctgaaattntgtgagaaacaccctataatcatgaagagatagcacaaaaaatttcaaacaacaattcacagtctaactatgancactacctaagaaaa

SEQ ID NO: 52594 - DNA, 298 bp, Glycine max
aacataagcacttatactatttatgaaagctggagttgctgcacatgatgtccaacgttatgtcaaagaataagatcgggctgcacaatgcacaaggcaagataaagtgtcaaatgaagaattgaagctgcaggattcacgatgtcggatacaatgtccaggacatcctgcctgaaaatactggaattgctaatagcattgaagctgcaggatccacgatgtcggatacaatgtccaggacatcctgcccgaaaatactggagttgctaaaagcattgaagttgcaggatccacgatg

SEQ ID NO: 52595 - DNA, 365 bp, Glycine max
  unsure (1)..(365): unsure at all n locations
agctngcttgcggngcttctatggaggctggttctttgagcttcaatgaggtcctttaatggtgatattccaccatggagatgcagcggaagacaanagagaagaggtgagaggaggcgccatccactatggaataagccatggaagaaggagcttattccatgttgtcttagagtcatgtgtagcaataatatgtgtcacattttgctctaagcttgtgtggaattctgactctggcgattgaattctagataccattgatcatgtattcttgtcattcttagcctatctnttgaattntgagtctaattcatgcatgttatntagctcataacatgttctaaatcaattcctagaagtagtct

SEQ ID NO: 52596 - DNA, 244 bp, Glycine max
gatgcatgggagatcctgaaaatcactcatgaaggaacctccatagtgaatatgtccagattgcaactgttggccacaaaattcgaaaatctgaagatgaacgaggaagaatgcattcatgacttccacatgaacattcttgaaattgccaatgcttgcactgccttgtgagagaagatgacagatgaaaagctggtgagaaagatcctcagatccttgcctaagagatttacatgaaagtact

SEQ ID NO: 52597 - DNA, 484 bp, Glycine max
  unsure (1)..(484): unsure at all n locations
catgcaagcttcatctcggtctactaactcggcagccataacttcaactcttgtttcttcttgtgtaaaatgaattatggtgggaggttntctaccgtaaactacctcanaaggtgtagttccaatagatacatggtaggaagtattataccataattcagcccaagacacccaatacgaccagtttttgggctgctccgatgcaaaacaacgcanataagcctcaagacatctattcaccacttcggtttgaccatccatttccgggtgaaaagaggaactcatcttcaaagttgttccttgtagccgaaatagctccttccaaaacatactanaatagaggatctaggtcactaacaatggattgtggcactccatgtaaccagacaatctctntggtaaacacctcggctattttcttggctgtataagggtgctngaggggtatgaagtgtccatactttgataatctgtccacaacaac

SEQ ID NO: 52598 - DNA, 273 bp, Glycine max
  unsure (1)..(273): unsure at all n locations
taatatatgataggtgagaatgttagaagcatcatctttattatgttggtatgaaggcatgttgatctgaatttctgaaaataaaagagatatgttgttcatttntcccttcaaataatggatctaatatctatttgctttggtttattgagagatgagtcttctaataagcaacaaacaaaggatgaagcaaaccttatgggatatgttcaaaataagaaagactgtattggggaaatttgagacaaatgcacatatgcgaagtccattcat

SEQ ID NO: 52599 - DNA, 414 bp, Glycine max
  unsure (1)..(414): unsure at all n locations
agacttggataagatggtactactctnggtttttttntcgcgaganaggatgtcattctaatatgtcttttagaggctngatatcaaattccaaaacaatggaaaacctgtgattaaaaacacactatggaaatgtataaattgaaattataaaagtcgcgttctaatgtaaatttaatatataaaactaaaaataaaagtcttgattnttgacaaaattactttctcacctgannaataaacatgaattaaaggttgacaaacatattacatttatgatttagaacaccaccttttcttcaaccacacatgtaactggttaaaccaatcttaccatgactaaaaaggctngtgagttctacatcttgtttgggtnttttaaatataatatgcaataattattcttttttatat

SEQ ID NO: 52600 - DNA, 436 bp, Glycine max
  unsure (1)..(436): unsure at all n locations
agctngccacccagctcgcccaggcgagcatggttgcttcttttataagcaacagccttctggaggaatcttctgagggcccaagtgggtctggttgctatntgcacccacatttatactaaatacacccccttgccctctttatggagattctttttttcgtaaagttacggaaacttacggatttcgcaacgatacttgttttctttccgtaatgttacagaaccttgcggattacataatcatgcccttttttgacttacggaatgttacggaaccttactaattgtgcaatgatgcttccttttgatttccggtgtgtcacggaaccttacggattgtgcatcaataccttcttttgatttccggcatgtcccggaacttcacagattgcctaatgatgggtgccaagcacctcacaatgaccaaacaaaag

SEQ ID NO: 52601 - DNA, 336 bp, Glycine max
  unsure (1)..(336): unsure at all n locations
cattctatgcacncttaggggtccatcctttctatgcatgtcatcatcnttcatttcctaccatctacaatctttttctctagtttaagcaacgtttgattgatcgttcgtttaagccgtaatctcacttaatcaatgttaaaattaatttcaatcaattgtttgtgttgtgatctcgtttaatcaccattaaaataaacatcaactgatcgttngtgttgtaacctcagttattcatcaaaaaaataagtttcaaccggtcatttactttgaaagttctcttttaatgagttggaaaataaccaagtgaaaccaaagctaaaatcaactcataat

SEQ ID NO: 52602 - DNA, 374 bp, Glycine max
  unsure (1)..(374): unsure at all n locations
accttagagtcacctcgcngcatgacagctcggacgcatgagtggtatgttgaggtcttagtggattggacctttagcagctactaatgcttttccttatggtatagttgatatcaaaagcgactccacaaacaagagcttcaaggtaaatggacaccgacttaagccattcctcacaaacccttctttagtggacgtagtggtggaagagacttccttactccaccctanctcttctccaccatgacttaaggagtttttcttttcctatctgcttctttacttttattacatttgcccgattctatttgatggctcaattgcttataatcttttaattgtggtacattgaggacaatgtgttcgttaagtat

SEQ ID NO: 52603 - DNA, 279 bp, Glycine max
atctccttcttcactacatcaataatcaccttgtttatgtcttctctgggctgtcttactggtttagctccatcttctaaatatattcgatgcatacatgtggatgggctaataccacgaatgtccgccagggtccagcctatagccttcttatgcttcttgagaactgacaacaacttcttctcttgctcaatcagcaggggaggcagatataatcactggagaactcttgctatcatccaagtaagcgtattttaaatttgatggcagaagcttcaa

SEQ ID NO: 52604 - DNA, 304 bp, Glycine max
  unsure (1)..(304): unsure at all n locations
cttgctacaccataatgcttctggttgtgtagaggatttctcttgctnggaaggtggcgtggatggtccctttggtgttctcgaaacaaaatgtgttttgatgggagtgttntcgatttcaatgttgtggttgagatcatcaagttcaaagcttggtcttggatttcagctaagtggagaatccatcgtgttgcttacaaatgttgaggtaacatgtgcaaaggtggtggtgatatccgatcatgcaaagcatgttgtggattgctacaaaactacagatcatgtatgtgtaatgttatattta

SEQ ID NO: 52605 - DNA, 348 bp, Glycine max
  unsure (1)..(348): unsure at all n locations
agcttcagaaagaaaatttggcactacagactgataanagagttgtaaggagcttgtatganaattcctatgaaaagcactgggaaattgaagaccagattacacaaatgcagaanagggtttgcagcttgcaagatgagtttggaattaatacattcatagaagataacgatgcacgagctctgatggctgcaacagctctgaagtcatgcaaagagaccctggctaagttgcaagaggcacaggcacaatcatctgaagaggctaaagaatcataccaaatggttaaggaagctcacagcaagtttgaaacccttagagacctattcattntctaacataagagtc

SEQ ID NO: 52606 - DNA, 307 bp, Glycine max
  unsure (1)..(307): unsure at all n locations
tttttatagctgtgccaatttccaccgctgacatctttctctgccaatagcatgaaacaattntttttttgctcagcaaaaataatatggtatattaattgagtaccaggggtactagtaatacatattacagttcagattgggccccataacaatgcattataccatagatataaactatatgtagaatattacagaaatccttattactagaaaatgctcgaataatctatcctactctattgagaaaccctgctctaacattggaagaccagtagttatagtgagtgttgaagaaataaatatt

SEQ ID NO: 52607 - DNA, 301 bp, Glycine max
gagacacctgaggcatgctagcgcgagatgacgaggcgttgtttggtgatacttcctgtttgtatgcgccgaacacagaccggtatctgtagatatgtcgcggtggacaggatacctcggggacggccggtgtggtgctattgcccaacaccacgctagaccaatacccagccaagcctagcatagtcagtcagagagaacctgatgggacctgatgcggcgagctcttggcatgcatcgtacaatgggaaccaagaccacacacttatgagtcgcgcaacggctggacagatgtgaactt

SEQ ID NO: 52608 - DNA, 567 bp, Glycine max
  unsure (1)..(567): unsure at all n locations
ncgctttgatcatgcattacgcgcactatgantactcaagcctcaccctcctggtcctcttaatagtggtggattgagaaacattggtcttatttcatnnctccactcaagtaggcctccggatcattctttcctttaaatggaggaatgttgagtttaatacccatcattcggttttgtctaagaacaccatcattccctcttctccctctttcttcttcattatgatctctattctccatttgatccaacctctcatggagcgcatcatctcgttgtttcattaacctctccaaatgttgcatcaaagcttgcatttggaattgcgaaagccccactccatcattaggattagtacctgacatctcanacaaacaaatcaaacgtaacaagacaattatagttgctgtttgaatacctcacccactcaagtgtatcacacaattatggcttttctctaatgaaacactnctgccttttaccactctaattccncttgagttcttangggtattcaagagatatggggcacacaaagaacactcaccatatgtgtaggggagggtg

SEQ ID NO: 52609 - DNA, 255 bp, Glycine max
gctggagatggcccactctatctgagagactcctgttacacagactgaaccagactgggacaccccttccctggtgtacaataatcctatacaccaagatggctgtgagactctcagtcccttgccagaagcttgcatatgagatgaagatttctctcttaattgggattgatggaacattgaagaccagatcaaaagtccttattgaatgcgcaagtgcgagagcaatgtgtctttgtgagaggataagacatt

SEQ ID NO: 52610 - DNA, 144 bp, Glycine max
caatcacactgtcacaaacatgtttcttcacatgcataacatcaatacaatgtctaacgtcaagatcactccagtactgaagatcaaagataatggacctcttcttcatatgcaactctgattctatccttcttttggtcttcc

SEQ ID NO: 52611 - DNA, 310 bp, Glycine max
gatgaagatgaatttgtgaccacctcatgcgactcttctatggacaatagcagcatttcttgtactgaattgttgggagtcggaagccatctttaccatcatactcctatgctcagcaggggtcgtatcaccaaggactccaccattggcagcatcaatcatactcctctccatgtcgataagtgcttcatagacatattatagaacgagctgctcagacatctggtggtgaggacaactcgcacacaatttcttgaatcattctcaatactcatacacgcttgctccactaagttcactgatgcctaaa

SEQ ID NO: 52612 - DNA, 548 bp, Glycine max
  unsure (1)..(548): unsure at all n locations
ntgactcactgcctctcgagacccccannantctnaagcttgaaggtgggaacccactattttctcatagtagaacaccttttatctgtttactatcattggtatcatctccttttccgtcattggtggcaccaacttgagctgctagatgcctccacctttgggcgtattctttgatagattcgcgccttcttttacccaagttctgtagttgcatcctatccggagccatatcagaattgtgctgatcctggctaacgaacgcaaccattatatccttctaagaatggacttgagagggtgccaaattattaagtatactaggtgacgactgccccaataagactttgctggaggagatgcgtcaacaattttcatctattgagtatgccctcattctcgctgtatacaccatcaagtgattcttatggcaagttgttctcttatactcatcgaagttcagcaccttgtacttcagaagaatggacacgtcggggactaagcacaaatcttcatattagcaaaggctatatttcggcttcttcacg

SEQ ID NO: 52613 - DNA, 391 bp, Glycine max
attctatgcacccatagtggtccacattgttgttcgtgcattcttattctcattttgtttactttctatacccgctgttgacgtgcttaagccattttacttaagtcatgtctctgttaaactaaaaataagatatatttccaccgaacgtttgaattgcattatccattaactgcggataaaatcaatttcgaccgttcggtcgtgccgtacccacgttggatatcaaaaagaggtgaaaaaataatataataatcacaaagacatcttttagtaaaataaagcggaaaatcaatcggacgctttctctgtgcgatttctcattcttaatcgaattgactaataactaaagtgaaactaaaggctaatatcaattctgctagtcaagctc

SEQ ID NO: 52614 - DNA, 422 bp, Glycine max
  unsure (1)..(422): unsure at all n locations
tactaagctcttatagtatgacgtatgccaatttgctgaaattctcattgccatttttttaattgaattggttgattttggattgatgctatcaggtttactctactaatccccctaccgttttggtggatttactggcgtcgaagtatgtgaagtatatcgatgtccagtatggatattatgcttgctacctttgttcttttaatcatcaagtttttaatgtgactcttaagttttttggtattatcacggtttatggcatatactgtattggtttactattagccccttttttggaagggctgaattatgcaataagatcctcgtcttcaaagaggtaggtactttccactcatcattttactctcaattccaccttcttaaataaaatntattatatgattttgagatgagctgctgac

SEQ ID NO: 52615 - DNA, 348 bp, Glycine max
  unsure (1)..(348): unsure at all n locations
cctcatggactcctctaangacaatagcatcatttcttacactgaattgttgggagttggaagccatcttctcaatcaaattcctagcctcagcaggggtcatatcaccaagagctccaccactggcagcatcaattatactcctctccatgctgctaagtccctcatagaaatattgaagaaggagttgctcagaaatctagtggtgagggcagcttgcacacaatttcttgaatctttcccaatactcatacaatctttctccactaagttgcctgatgcctgaaatgtcttttctgatggcaatggtcctagatgcagggaagaattccncaagaacaccctctt

SEQ ID NO: 52616 - DNA, 351 bp, Glycine max
  unsure (1)..(351): unsure at all n locations
ttggagtttccagtgccaattcgtcttcttctttagtcctgtcttcttctggcttcaatccatcagtgggctttccttctgagtccagcatcttgggatgttcccagcctttgatgacagctttccaggttctgctatccagtgatttgaggaaagccaccatccttgctttccagtattcatagttggntccatccagaattggtggtctgttcactggtcctccttctttctccatgttcatcagaatttatctccctaggtctcactcagtgatttcgagtgcccgctctgataccaattgaaattctgataccaatgccagatgtcgtacaggatgtcacgacatca

SEQ ID NO: 52617 - DNA, 315 bp, Glycine max
  unsure (1)..(315): unsure at all n locations
tacgccagtcctcattcaacccacttgagattctccactctctgtgtaaaactccttntacaaagtctgaaccacacagggacaacccttcccttgtgttcaagaatcctctacaacaagagactctcagtctcttaatcccttttcagaagtaagaagaagagaagaagaaatctctcttaaaagggatagattgtacaatgaagaccaatcaaaattccttattgaatgtgcaagtggttgaccaaggaatctttntgagaggataagacatttcagttcagatnaactctgggactttcgagaggataaaac

SEQ ID NO: 52618 - DNA, 192 bp, Glycine max
  unsure (1)..(192): unsure at all n locations
tgaagatgaattgggctgctgatgacctttttgaatcattatgagcctcgatccaagtagataatgcattaatttgttgattccatttgagcttgntctatctctttctagcttcttttccagatgttctttcaaaaattacagcattggaagtagctaacgaaaataacagttctttttgttcttcattcg

SEQ ID NO: 52619 - DNA, 261 bp, Glycine max
attattggactacatagaacaatgacatgatgccttcatcttcttttgagttgataagggcttgtgacttctccaaatccaaaccacttatcagaagcaaatacccatctatatgagttaagtttatcatcccactttctggcattactctagctttgttgatttatcgaacattgataggtccttcaagttacctataagactagagtacatatgttgttatttcccttcctcttcgctcaccatatctcatttcatatg

SEQ ID NO: 52620 - DNA, 363 bp, Glycine max
  unsure (1)..(363): unsure at all n locations
atgaatcananatctgcacctgttgccagactctgtggtttatgctcctctgccaaccaccacacagacctttgcccttctgtgcaacaatctgaagcaatcgaacagcctgaagcttatgctgcaaacatctacaacagacctcctcaacctcagcagcaaaatcagccacaacagaataattatgacctttccagcaacaggtacaatcccgggtggaggaaccatcccaaccttagatggtcgaatcattcacagcagcagcaacaacaacaacaaccttattttaaaatactgcgggcccaacagacatatgttcctcatcatccacagcaacacagcacaacctagaacagaaacagt

SEQ ID NO: 52621 - DNA, 283 bp, Glycine max
gtatgatagccactgctttaagagcgctgaacaccaacaacgcttcgaggccattaagggttggtcatttcttcgggagcgacgcgtccagctcaagggcgatgagtataccgatttccaggaggagatagttcaccggcggtgggcatcactggttacccccatggccaagttcgacccagacatagtcctcgaattttatgccaatgcttggcctacggatgagggcgtgcgcgatatgagatcctgtgtgaggtgtcagtggatcccgttcgatgcggac

SEQ ID NO: 52622 - DNA, 373 bp, Glycine max
  unsure (1)..(373): unsure at all n locations
atgggctacgtgggagtacgtgagctcatttggaggtgggcaacaggggatggtgggtttatgcgcgcattgtggatgtggaaaacttgttgtgcaccatcgcccgaccgccacctagtaccacatgtgatgggtaccccataatcctacaagcttgagatgaggaagtgttgaagggtgaaactttctgcttttattgttgaccacagagtggtacctggagatatgtcgcggnggtctggagaccttgtggacgtcaggtggtgtgctattgcccacaaccaagcttgaccaatcccgacccaacccgggcatagtcggtcagtgagaacctgtgatgtacctaaacaggcgagctcctggcagtcaacag

SEQ ID NO: 52623 - DNA, 278 bp, Glycine max
  unsure (1)..(278): unsure at all n locations
gagttgcttccatttcaagaagattgatttcttcttttcttgtctntgttcatctaatatcaataatattaggatccataatcaatttccattcaatcatagtgtactgaataaaaactaacccgataaaagcctaacatgtgtagcctttcttgacatgcgtttcttgaaagcctgacagcttgcgcgacttttattcaatgaaatttgcgttagaccaatgaaatttgagtgaatgaaattggtgattgaattngtgtcactcatttgcagatcat

SEQ ID NO: 52624 - DNA, 428 bp, Glycine max
  unsure (1)..(428): unsure at all n locations
agctttgcgcacaagatatatttgtatgggtatatacctctctatagtttgaactccttagatggatgcccattcaccaagactgagaatgtaattgtagagacacacctcanaatcaaatccacctaatgagttgggatacccaattgttctagaactctcctcaagatgatccattctaccctgccataggctttagacatgtataacttgaaagccattgaacatttcctccccatgatctttttcttcatataataaaagcactcaaatgccaccaaagcattattagtaatcaatctatcaggcacaaaagcgttctatgtttctcgcccaatatgtggaaggatgatcttcaatttatttgccatagtcttagtcaccaattagaagaccacattacatagactannatgacatcactcact

SEQ ID NO: 52625 - DNA, 367 bp, Glycine max
  unsure (1)..(367): unsure at all n locations
tggtgaanatgccctgtacgtgtttcctcgggctctgttttgttgttgagatttcctatagtagtttaatatatatattggagcattaagaaacatttggaagtatacaagatgggttggtaccatgattatttttgtcttagagtatttcaagtatgcatcttcactgtgatgtgtaataataataagaataagaataaattaaataaggttgttatagaaattattgtttcatagtgattatttntgttactctataaattaattgttgtagaagtttttctattttattttgttgaattaatatatttcaatttaatttatatttttgttgtgtcaagtaaatgttactattgaatgatatgtg

SEQ ID NO: 52626 - DNA, 481 bp, Glycine max
  unsure (1)..(481): unsure at all n locations
atacttacactatcaagcatagaacgagacacccgacctatattcaatatgtctatgcgcaggccaccactatcaaaatagtacttgaggtacctgctatacgttgacttggccaacgttgacgggcatgtgacgacaatacttcaacaccttatccacacggttgtgcgaggctggatgatacgtaaccatatctttgtacagatgtttggtcacccaagccacattcattctgagatctgcgataaatcaatgtatgtatggatagactcaccagacgagtgtntactcagtcatggccgaacacctgctagcaatgatgagacgactgcactctacgtagtctatgctcaagaaggagtctgttgatgtcacacgagctcttacntcaatgtatagaactgaggcgtgctcaggtactaggacaacatcttctgccttcagggtgtgaatatccataaaatatgctgataagacgggg

SEQ ID NO: 52627 - DNA, 378 bp, Glycine max
  unsure (1)..(378): unsure at all n locations
tgacggcttaagctctagctaagattatcatacaaaaagcaggattctttacatactaagttccattggagtctttttggtttggtcaattntcttcgaaaactcgtgatcataaagtagattaagcgcggtgagatatctactccttttaaaatccaagaattttctggtattaagattacattaattagacattggttgtgaaaacgggcatgatgtgtaactcactcattttaataatcaaagtaataataattcatccaataaatttggaatcaccctgcagttttgggccgttaattatattcatcactactttggatataaagagagctcgatccaaaatggtagaatntaattattcatcacttcgaacat

SEQ ID NO: 52628 - DNA, 294 bp, Glycine max
  unsure (1)..(294): unsure at all n locations
agcttgctcatgtggtctccaataatgagactcatattcangattagtattgttaatttattcgacaaataacccactagacatcaaggaaaatcttcatcttcccataaaagctgttagttataccttgtttatagtcgttagatctaatcaaatcaacaaatggttggtgctgtgagtaatactccaatcgatctttttaatcaagtctaatattcatatgttgtgaataaaagaaactaaataatcatttntgttcttgaatgtgtaaattggtgttaaattcgttcttaa

SEQ ID NO: 52629 - DNA, 569 bp, Glycine max
  unsure (1)..(569): unsure at all n locations
actgagcggttgtactttatataacttctgtananaatctctcnnccagcacggggtgtgtttgatgctttgcattacgngacctatagatactcaagcgttcattaagcgaatcccagtttaggcctacatattatattgatcggctcaaatgatacagcaaagaattccacggtaaactatcttgtagtccctaaacgttatcaaatagatgttattaggtccacaacttgttattactatttttaaactcttaactttgtttctaaactttactttattcctttaactatgttcatacttattttaaatcttgttaaaggactagaagtaatggccaaaaaatagtgtaaatggactaatgagttatgctagataattagttgatagattgaaagtgtgatgaaaatatattaggaattgattttaacaaagaataaggactaatagatataaaccttatactattacaaatatacctaaattgtcattggagcattatagtcctagatggctaacggcaatggactacataatgatgggaatgggcttaaacgtaaccacatatt

SEQ ID NO: 52630 - DNA, 450 bp, Glycine max
  unsure (1)..(450): unsure at all n locations
caacattattgtgacaacatatttaaaaccaacacttaatccatagatccctcatttaagactaagtttaaattctgcttcattccaggtctaagggaacaatacacttgccaatgataaagtcacctaaccaggcacacaaatggtggatcaggccaagaacatacaaaatctaagctctgaaagaagcattgaacacaagaaacacaatcaatntgatattaaagtaattacatcagatgttctttagagatccncaacagaggtgtttagccagccattgcagaanaacccctaacaataatgagattacaaaacctacgtatctatgcanaagttgctcctcttgctgcctccagagctcttttcccaaaataggcactgtggtgtgctctggactatgtcaaatcttctgccttagggctgaatatctatacctaatctgacaag

SEQ ID NO: 52631 - DNA, 286 bp, Glycine max
ccacattatttccatgacacatatgccaaaatgatgatttggaaactttatgcaaaactggtcatgcatgcgcttatgcggacgctcaagtggtaaatttttatggtcaggtgatgctagggttcacgattcatttcctctatttaaatcaaccccatgtttccaaaatatgtcttttataatttgtgcattcctccaagccatttcgggcgtccggagaaaatttacagcattcacccttcacgtgtagaacacgtttttcttcaaaaatcggttattatcaatg

SEQ ID NO: 52632 - DNA, 368 bp, Glycine max
  unsure (1)..(368): unsure at all n locations
gctgggtaatgtgaatgatagtatcaagattgtttgcctgtcatgataatgtcgtcaacatatacgagaataactgtgagatcatgagaatggttagtgtataagaaaagtgagtgatcagcagaggattgatgaaagccttgagaaagaaagaatgacgagagtcgtgtgaacccattgcgactcgcctgggttaggccatataacgaacactgaagacggcagactagattgggatngtccacaattaaacctggaggaagcttcatatatacctcttcgtggaagtccccatgaagaaaggcgttattgacatcgagttgtcgaagatgccagttacggagagcagcgagagcaaggagtaacct

SEQ ID NO: 52633 - DNA, 456 bp, Glycine max
  unsure (1)..(456): unsure at all n locations
gaacaccctcagatagagggagatattgctagtgtaaaagatataatattggtaattaattaaaatntatnataaaaatatgactttaattaaacgttaaaaacatttacaatatcacaagtgtctctctctacctattgaatcatatattaatactnttatcgtacccacatagttgtcactcgtatagctgaattttgcatataaaanaaaattgaacgataatttttactttaaatacatcattttagtacatatgaatgcaatgagannntatagtattatacgaatcctatcatatatgataattataattgaataacaatgtaaatttgtttatatcatcttcttttggttgatgaataattattatatatcaatacataaaatattaccctaattaaataaatactattctgtcacatattatatatatatatataatatattatatta

SEQ ID NO: 52634 - DNA, 472 bp, Glycine max
  unsure (1)..(472): unsure at all n locations
tcatttccaaatatgcatgtgaattattaagcatcaacaagaatcaagccaaggctatngtgcaagcaatcaatggngcaaaacacaccanaaaactctgatgatggatggctcatattctcacaaaggtaaacttatcactttcaaaattagctntcaaaactatcatgacatgtagaggaaaaacaaggatttcaaatcacaaaatgtcaagagacttttattttcagaacaattacccattatttgaatatatccgataattcaaagaanaacatgcaaaatttaacacanaaactaacanaattaaactagaacccaacaaaactaacannnaataaactaattaacacaactatcanaaccaaaaccaaagaacactcccnncccatacttaaacaacacattatccttagtgtagcacaattaanagaataaaaagtattaaaccatcaaatagaatcggacaaat

SEQ ID NO: 52635 - DNA, 184 bp, Glycine max
  unsure (1)..(184): unsure at all n locations
agctctagaggtattactntagaaattccattaacatttatgttaactaacaataagaataattatccttgatccattcaactaaccatgtgcaacaaagtaaataactacattacgggctaatacaaagaaattattatgaattaattattaacaaatgttcacaatatctttcaaacatatg

SEQ ID NO: 52636 - DNA, 451 bp, Glycine max
  unsure (1)..(451): unsure at all n locations
catgcaacccttaaaacacccattcccctatctcatactgcagatctcttcttttcttgtctgcatactnnatcatctgatgctgagcccgtaacaaatgacttttaagctgattcaaagcttcatccctttcagttaactctaaggctacagcagccactntagtctcattacttaaaaacctcaacaaactgggtggttgtctgccatacactacctcaaaaggtgttttccctatggaaacatggaaagtagtgttataccaatattctgcccacgggatccagtatgaccaagtcttgtgctgctcagatgcaaagcacctcaagtaaccctctaagcatctattcagtacctcagtttgcccatcagtttctgggtgggaggcagaactcatcttcaactcggtaccctgtaactcgaacagttccatccagaaatggcttacaaa

SEQ ID NO: 52637 - DNA, 387 bp, Glycine max
  unsure (1)..(387): unsure at all n locations
aagcttaaataggctctgaatntgcgacgttgcacttagtgccattctttctcttagctcgagtaagtggatatgagcttagtgccagtcctgcgttgagcctggatgaagacaattgctgcgcttagcgcactgatctcgcacttagcgcatggccttgatattgatgctctaccagattcttctgtcgcgctaagcgcgctgaagctgcgcttaatcggggatgcgcacttagcccactaatgagctaagctcaaatgtcacttntagcacttcatgaacttacctctttttcacctacaattgcacatatttcatcattaaattcaatggagatattctagagaccaacttaaccataaaacaagattgattaccaaaatacta

SEQ ID NO: 52638 - DNA, 507 bp, Glycine max
  unsure (1)..(507): unsure at all n locations
ctgcagcttgtccccatagccttggcctattacattccttttttctttctttcaaatacatgttgtctgtaacaacaataaacaaaaaaaacaaacctatctgtctgcctgttgttgcttttcattattttattttttttcaagaaagcataaattgttcatattatataaattantaaatttatatgactntcattgatttgatgcaacaaactaatatttccttaatatatttacaaatgtgtttatcaaatccatttcattgattacaaaggtacgaaggtttcctagaatgagcataaaagtttataacagcgttcattgccaccaaaatcacctcacanaanaggtggtaaagggtatccaaagtttttttttataactagttntcaggtttccaacaattgctgctatganacgagtgcacaaatttgatatnggaatactttgttaagatcaagttngaatatggagatatgttaaaacctaagtgttaataatatcttg

SEQ ID NO: 52639 - DNA, 362 bp, Glycine max
  unsure (1)..(362): unsure at all n locations
tgtctcatcttcagataacttatatacataacgacatgtattggcagggtctaccttgcagagcatgtctgttgtgttgtagtaaactcttcataaaagtcttcaacatattgtgttgtagtaaactctgcaaaaagttggtgtgatcatgttgttacaaaatagactggtgttaaaaagtctacaactagaagatacattattattatcaataggatttaatgtcctgatcaattgtataaagactaaaaaagattagcacatactacaaattttgaaatacttccttganaaccacattggtagttatattntgtggttttcatttttntgtcatgaataagaattttcaatcaactttt

SEQ ID NO: 52640 - DNA, 421 bp, Glycine max
  unsure (1)..(421): unsure at all n locations
acattatccaagagaggcacaaagaggcaatatgatcattatactctgatatacgccataaaaacaaaggcaaatgatgatggtgagaatgagggataaggccatgctgagactgccattgatatacagaccagttctccaccaccccagcattgtcattactcagaacaatacacaaaccttctctcttacccaccgcccagttatccacanaggcaatccctaaataacccaaagttgttaccgacttcaatgacacaccactttgcaccacccatacaccaccaagaatgaatttgcgcgacgaacctgttaatcacccaattcatgtctatgcgactgtccatattattgaaatctgggtggcataccccaccaagtcatacctcattctccagatcatatgacgcacagagctggt

SEQ ID NO: 52641 - DNA, 554 bp, Glycine max
  unsure (1)..(554): unsure at all n locations
cgccattgattcctacgatggcatacgcgacacataaaatactcagcctggnggaatatggggtacccgccatatgtgggactttgttgttatcnggcgaatgcgccaatccactttncnnnnncacaaaatacacataaattcacccttcccagttggccaactttaactgaactcacgtacttccacgtagcccttaatctcgttcttctcaacaccgggtccccatcaaatcctccaagcttcccaacatccaagcaattcaacattcaaacatcatgcactatcaataacaagataacagggcagaggcagaaaactctgcccaaaaacaaaccaataccacagctntccttactcagatacgccagtaacattctcttcgtctaattcgttcaccggtggatcgactctataaatttactgggagggtcctagtacataagtctacatttngaccgtngggatctgctataatacgtccagaaccaatatgacaaccctatcacaagcagcaacacaacattnntgacaacacaatttttgtgacaaag

SEQ ID NO: 52642 - DNA, 417 bp, Glycine max
  unsure (1)..(417): unsure at all n locations
agcttcctcctganaagatattcttaagttgttctagcattntggcaaatgctccacattaggattntaacatctggaggagctacaatgctgcaaattgtgagccatagtctttgtgatacactgtgataatcactgtgagattaataaaagattaaattgcactaaccccgaggttttggaaaatgcataaaattcctttcttctacccttacattaatctacgaaaacattatacggacacctcatatacattacaataacccccttaattgtttaaaaaacattaaaccatattcttctgtaagggaagtaattgtaaggaagaggttagtgtaatttcacaaaatcttatggagggtcatgttatttactactaatgaaaagagtaagaaaccttacgtgcttcataacatg

SEQ ID NO: 52643 - DNA, 454 bp, Glycine max
  unsure (1)..(454): unsure at all n locations
attctactctttattttgtattctttattanttncccccnaagactttttatgctctgtctacgcccttaaaaccagctcggaaaggnaggggagaattgccttttttttacactcgagcccaatagtctcatttccaatttttaaaaaaggagaattcctgtgttgtatgaggggaatgaaccaacttatagtcttatttaatgcctcaggacaaaaagtctagttaggggattgaccgtgttgtttaaaaaatattctatgggtgagtataaaatacagatatcttatatatccatatttgaggagatggtgatacaatgctaactaaactacagcatgtgcaaatgtttcatcttgtgattgtatctattcattagtatcatagtaaccaatctcagagacatctctattgaaacaaattgcaaaatcttgtttgcgaacatggacctatc

SEQ ID NO: 52644 - DNA, 404 bp, Glycine max
  unsure (1)..(404): unsure at all n locations
agctngccaacccatggaagctcctaatatctcccacactntatggggtgggccattcttggatggacttgattttctcagggtccacttggaccccatttctaccaactacaaactctaagaaaactatattatctacacaaaaagtacacttctctatatttgcatagagggtgtttttcctaaggactgaaagaacttgcctgagatgtcctaagtgatcatctacgctcctactgtacactaaaatatcatcaaaatagacaactacaaatccacctatgaaatcccttaagacatgatgcataagcctcataaaggtcttggtgcattagtgagcccaaaaggcatcactagccattcatacaaaccaaacttggtcttgaaagcgggtttccactcat

SEQ ID NO: 52645 - DNA, 377 bp, Glycine max
  unsure (1)..(377): unsure at all n locations
tgccacccagctcgcccaggcgagctaggttgctttctctataagcaaccgccttctggaggaattttctggaaggcccaagtgggtctggttgctatttgcacccccatttttactaaatacacccccttgctctantttggtgattctttttccataacgttacgaaactttacgaattttgtaacgatacttgttttctttccgtaatgttacgaaaccttatggattacgtaatcatccccttttttgccttccagaacgttacagaactttacggattgcgcactaacacttccttttaatttctggcaagtcacggaacttcacggattgtgctacaatgctttcttttgacttccggcatatcacaaaac

SEQ ID NO: 52646 - DNA, 472 bp, Glycine max
  unsure (1)..(472): unsure at all n locations
agcttgagctacttccattggcagcatacatgttttgatgaggagaaacataacannaaaacaagctaagttgcaagaaattatggaaatgctttgntttcctcctattagctcttttgttatactctcatcacctgatatatttttcatatatagaanatgttaacatgtaatgaatgtgtgatacttaaattcatatccttaaaatttagaaagaaaacaaaaagacaaataagttctaagcaagggacaactatattgacaagctttatattactatactatgtatttntctagtgtgtaaattccttgattagaattagttcatattcatagaatttgaggtggagaagatatatattcaaggcatgcacgtaccttatgagtagcatatggtacatacaaagatatcatagacttaactatgattaatcatctagtctcatatatttgcaagtaattaattaatacc

SEQ ID NO: 52647 - DNA, 344 bp, Glycine max
  unsure (1)..(344): unsure at all n locations
gagccatgttctcaatatgaaaattagtagtcgaatgctcaaaatcagaatatttagaatcaccagatacagaatactcagaatgctcanaatgcacagaatgaccaggatgcacactatgcctaactaatctgtgaaaggttctatctatntcaggatcaaagggttgtaaatcacctggattgcccctagtcatgcactatatacaacaaataatgtgtttctcaacaagcacctaacaagggggtaaaactacaactatagtcaaatgatatccaaatgagctacaattttgtgagcaacaccctataatcatgaaaagataacagaataaattttagaca

SEQ ID NO: 52648 - DNA, 467 bp, Glycine max
  unsure (1)..(467): unsure at all n locations
ttggtcggcggccatggtgaacatgccaagcaatgccttttatgggtgttattgtttttgaaattnttgccaaaatggctagagtagacataagcgaaaatggtaaaaattgttttttgccaaaactagtaaatcttatcttaaacgtctagattaatgtgataacttcttaaattattgtgttaatctccctaaggatacttgtacttagagtaaacctcacataaagacaaattacattagttcaaacagtttctatttctctatttagtttcaccaaactaatctcacacacacacacacacacacacacacacatatatatatatatatatatatatatatatatatatatatataataagcacggagataagaataaaaacatataatcactggtattaaatacatgcatgcacagatgacacaaatacacatttcttctatcaacttgagatgtatttttg

SEQ ID NO: 52649 - DNA, 346 bp, Glycine max
  unsure (1)..(346): unsure at all n locations
tatgtcttgttcncttactgtggtgcttaacacacttcgtatattgtcttccaaactagatcttaaaccagtagaagacccttctgtcgtgagggagcactgaggtgggttaattctagatgtcaattcttgcagttttttctccaaaagaacacttaaagcatcaccatctattacatgtaacctgngaggagaaaatgatgacttctgaggataaaacttgtcattactactacaagaattgacatcaattttgttccttgttcccatcgcttgctcgctagaggactgtaactcgggcaagtttcttctcaagggagatgtagatgtaaatgaaatcacacca

SEQ ID NO: 52650 - DNA, 250 bp, Glycine max
tcatttgggcgaatgcgccacaatatgaggggccatctggaggagctaccatgctggaaatagtgaaccatagggtttgtgatacactgcgacttatcactgtgatactaatagaagattagggggctcccaccccgaggccctggaatatgcatagaagtcctttcttctacccccacattagtctactgaaacgcctcacgggcatcctcgctacattgcagtaacgccactacccgtggagcaaaca

SEQ ID NO: 52651 - DNA, 462 bp, Glycine max
  unsure (1)..(462): unsure at all n locations
tgatcttcttttggtgctctaaaatgtnggaatgggcttaaatatgttgggccattttgggttggtttcttgcttgaataaattgaattggggggttgtatgaaaatggccttagcctattatgcattttgaaagaatggggcatgccacattggccccggtctctttgtattgatgcctaaacgcgcgcccaccaagtgttcggtgaaatgcctcaaccgcattaacgcgtgaatggtggaaggaaaccacccatggggcaatttgtgttgcacatatttttgggacatgccttctatttcgaaagaactatagatatatccccgcatatgttctatggctagaaactaatatttatgtcaaaagaatccaaaggaggtcctaatgggtaaagtacccttttttgcaagcatagctatgggcacgctcaatattttcctatgctataggtaagaatgtgta

SEQ ID NO: 52652 - DNA, 381 bp, Glycine max
  unsure (1)..(381): unsure at all n locations
atgcccgaagaaacaccatttcctagttaaccatgcattaggtaccatgttcaattattttgtntttaagtgaaacgggtttatgatcccaacatggttggctcgtggtgcctaacacatgaaactaagaatgtagtgtgaagtttcacgcttcccccttttttgtttntgttttgtagaggaaaacgcaaggatgagcaaacatgataacaaatggtatgcaattttgcagatcaaaaagtttgttgaacgcatatgcatgatgatgccatgactcatgcaaaatgtgaggctggaatatgataacggacaaatgcaggatatgtccattatgatgttatgaagagatgcttatgcgatgcatgatatgaatgcatttta

SEQ ID NO: 52653 - DNA, 477 bp, Glycine max
  unsure (1)..(477): unsure at all n locations
gcttgttngacatccaaacttatcttgttagttttatttgatcaaaataaggatgaatttgtttaaacttaanaaaataactntaaaataaatattttttacataagtgtttttttaaaacatagataagatttttttcaacaaataagtgtaaacaaattaatcctaattttgtttggtactcaagtttaatttagtaacttaatttccataagttacttgaagtagcttatgacacacaaattagattataagctactagttnttttcttcttcctcaatttattcttattattttatttgaaattttattntatccttntattcaatntaaaaatcctcttatcttttatgttcattatggngaaaaccctggtatcanattttcatagtcatgtaagtgagagacatacacatctaagttcttaatttacaaataanaaatgaatggttaagaaaaaatataaagaataaaca

SEQ ID NO: 52654 - DNA, 295 bp, Glycine max
  unsure (1)..(295): unsure at all n locations
taatcacanagtctcctctctagctttttcatcaaagaaaaatcaatntgtggggtaagggaagctaaactatgattgattctatgatnttgtattgatccccttcgaatgtcaaatggcttcctnntttaccctttcttccccttttccttttcttgattntgcttcattgtgggtgttttagggattgaaatcttaaacccccaatatttgggaattttttttatataaattcacatgattcgcgaattatttaatgttggtctggtgtttaaaagttgtacggatcatttac

SEQ ID NO: 52655 - DNA, 117 bp, Glycine max
  unsure (1)..(117): unsure at all n locations
cttaaaaaatacgcnccgccctgcactcatcgcagactggtgaattcattaacattctgcnacatggaaccatcacnacggatgatgacctgaatcgcagcgcatcacaccttgcgc

SEQ ID NO: 52656 - DNA, 343 bp, Glycine max
  unsure (1)..(343): unsure at all n locations
tgtatgataattgtcttgtaacaagctaaatcttagtggataactctaatacaataggtgcaactcaaggcaaattgtagacatagctaanaagtgaaaatgatcatgtaggctgagaatgatggctctgaacttaatactacgatttattagcttatcgatggaggacaagactaagcagatgctgacaactatttgccatcggatgatctcctttataaacttactcttttttcctctattatgagtggtgtgtttcctctattcatttagttcattctttgctttcataattaagtagcttgtgctttgaggattcttctaatatatatgaccgacaatg

SEQ ID NO: 52657 - DNA, 433 bp, Glycine max
  unsure (1)..(433): unsure at all n locations
tactctntcaagttgttctgtatttgataagtctaggatctcaaattaagtcttggaagcaataaagatcaattgccattcaacatggaaggttttgtaacagaaaaaatacatcagaatactaaaaaatcattaaattcttactcgttacttttcttgaaaagagaaacctaagcatacaaaaagcacatcatcctagccactaggtgtggattttgtgaatgagctaccagctaccacttagaactctctgtcgtactttagacaccaaaataaaaatgtattatgtatagcccctctatattaaacaaaaataccgcaccacacataaggttagtgtctggtctttgttgaaattgaaaagaacacactattatattgcaagggtgggaaacattcatattaaacaaaaataatcaatccacaataagtc

SEQ ID NO: 52658 - DNA, 299 bp, Glycine max
atagctggcatatagtaaagaaagatcttattgctgcagcgaatgatattttcgagagaggatctttattagaggattctaatactactcttgagactctcattcctatatctattactgctaagactgtcaaggattacaagcctattgcagtttgctctactttttataaagtgatctaaaattttttgactatgaggctagggatagtgatacaggatattgttcatactagccaagcaacttttgttcccggtcaagtcattcacaatcatattcttcttgcaactgagtagatg

SEQ ID NO: 52659 - DNA, 311 bp, Glycine max
  unsure (1)..(311): unsure at all n locations
gacaataacaaatgatgngtgttcgctatttcaattaacaaggctacaatattggtgtgatctcatagacatgagaatagtcttaatttatcattgccaaaaaaaacaaacaacaaagactctgagaatccgacactcaaactctagagaatgtcactatttgtgacgaattagtacacttgccaacgtagtaacatcaataaagtcttaaagttattaaaatgtttaatcgtggaattaactgtatcacatatntcttcaaaagaanaactttatcgcgtacctagctaacaatgacatgatcattacat

SEQ ID NO: 52660 - DNA, 311 bp, Glycine max
tgctgctgagatgcttttgttcttacaatcattgggatctagagcaatcttttctattaccaattctctatgtaccatctgtaacaattacggacgtataatgctgccacttaacatgtcatctgatgatggaccacattacgtaaatgctaagcagtaccatggaatcattatacgtcggcagtcccatgccaaagctgtacttgatcacaaattgactaaacgctgcaaggcatgattcctcatataggagtatctaatatgtattctcatctttaaactaacaaacaaaatgtggcctcagcctcact

SEQ ID NO: 52661 - DNA, 475 bp, Glycine max
  unsure (1)..(475): unsure at all n locations
agcttataagatattatgttcttaattctnttaagccaaaccttngcacactttataagagattctcttaacatataaaggtctattgtaaatcgtttctcttgacttcgtagatcttgacttgaatcaatgatgaatatctctaatcttttggcatcatcaatatcttaatacagcatatgcacttacaaattcaacacaaacttagaacataatgtgataattattatgactaacaatgactctaagacaacatgaatgaagtgatttacacttagaattttgtgttttcttttctaatctatatttngcaagaatattttgactgacaacatgattcaagagtagatctatattatnttgactgaatatctttatgtcttctaatttacaggtttagcacaagactattctgattgaanaatgatagaacctacaatcaacatannaacatgattcaagagtagatctataa

SEQ ID NO: 52662 - DNA, 292 bp, Glycine max
  unsure (1)..(292): unsure at all n locations
ttaacacaatagaattaaccatgacgtatatagctaccataaaggacggtcttcctgaatgggatagggccacacctataataaaaatgtgagattntcatgcatcgaataactttgtgagtatcatggagttattacttagatggatcaaagctggatgaatgaaagtcacatcaacccagaatatgaggaaggcgccgagcagttcttgcaatttgcttcagaaagaagtcgaccagatgaacttgtatcaattgtttgaacggaaggcgacaaatactggacgacatat

SEQ ID NO: 52663 - DNA, 385 bp, Glycine max
  unsure (1)..(385): unsure at all n locations
agctnttatagatcattgattcttcaaattcttatggtctgttctaatatgaaatggatatgtctttatagtattcttttaaaattatatggtccaaggctatttgtttgaaagataaatgctggcatgattaagtggctgaaattttgtaacatgtatattgtaacttagctactgtagttttaagtatgaagaaattgttgaaaacttgatgctctgtgcactatggcaatgtatgtttggtaccttgtttagactaaaatgtgcataacacttttgtgtgttgatgttcaggatttactcttcttgtacatcggacggataacacgttatcagcagttgtgaatgtgcctattgaanactaattatcattaatcattcttga

SEQ ID NO: 52664 - DNA, 443 bp, Glycine max
  unsure (1)..(443): unsure at all n locations
agctnggttgcaattttctagacctggagtgataacatgcaattctcttgaacctttacctccgttcacttccggcaagtgcaccggatcgcacaagtagtataaaacggtaagaaccgagtatcgaactctcagggaacttgtgttacttggtaagctatttcagtgaataggtgtctggtgtgaaaatctaagtgtgaatatgaataggtatgtaaaaacaagtagaaagcgcgctggtcttcctaataggtgcctgatgctaaaaggatattttctatctaacaatgctcatgtgttcctatggtgtctcctgagatgccaaaccctgattcctcatgatagtttagcctaatcctgattaagcatcatcctcagattcctcttggtggactaaactcaaccaggaccgcattaagacanacatactacaactaaattat

SEQ ID NO: 52665 - DNA, 410 bp, Glycine max
tgtcgtggaaataagcatattttgctcgactgtataccctgtatgatcagcacggcttcgtaatacttgttggagaagggcctggtatgtcgtgtcctgcaaacaagtttgctggaactgctccatgaagagtgtgtggggcacaaataaaagtagaagagaggaagtcggaaccctatacaaggcgtctacgactacattatgggcaccgggtttatattgtatagtgtagtcgtaaccgagaagcttatccatgcagtgctgctgctcaggaagttgaataacctgagacatcaactcctttaagctccggtggtctgtcataatgacaaaggagtgcccgagcagatagtggcgccatttacgtaccgcagtggtgatagcatgtaattcgcggacatatgtggatg

SEQ ID NO: 52666 - DNA, 548 bp, Glycine max
  unsure (1)..(548): unsure at all n locations
cacgcgccccccncaatgatcttgtgncatgaacntcgaaccggatcttataacactgtggctgcaagangcacgtgatatccagttatttaacatggacgaagactccgtaattgtgtatcttatccaagagaaagcatgttggtggtttaacgtcagtgcgagggggttcatctactctattactctcctgacactagccctaagttcttgcacaatggatggtaataatctaggtagtctaactgttcagtgaaagagagtcatgttttatgagtaaaagactacaggtgttgtaatactttttcaaagtctactcgagcagtgcctacattgccgtgccttctattcccaaggacgatatcgaatattctagcattccttttctatatagattatacagcggatgcactctgtttatactgactagtatttgacangcatggtcctcaagattaaacggtgtaatggtgattatcgagagtacctcactgtgtcattaagaaatcatatggttgctttgcacttactcacaacactcattctcn

SEQ ID NO: 52667 - DNA, 396 bp, Glycine max
  unsure (1)..(396): unsure at all n locations
actatagaaactaagctatctanaagagttcttcatcttcttccagatgcaataatattaatcttcctaggagcttctcacagaagaacccttccattggccgcaaatgcaccaaattagctaaggaacagatagcaaggttttacatcatgaggaggtgtgttgccatgttggtttgctggcacaagcatggggattcatgaaagaagtgcacagatcttgtgcttagttttattggttatgatcctttattgcccactttgaatactatagattcattgtattacgagttactaaggtgagtataagatttacacattgctggaaatatgtatatgatcaattggactccagattaatgtccccctcctacgtctgatgttatctcttacacct

SEQ ID NO: 52668 - DNA, 288 bp, Glycine max
  unsure (1)..(288): unsure at all n locations
agcttatcaacatatcatgagggacanaaaatgaaacaagaacaaacaaatttatgaaatgtaggacaacaaaggatgaccacatcgcatttctttcctagaaaacaattgacctgttgcatgatgcatatggccaaatgcatccagcataaaaagctaaattgctaacgcatgggaaaaagaatattactagagtcagagacacagatatgataaacatcactgcatgaaaagtgcaatatgatgctccgtgcaagacatactgcagttaatgagcagcagcaaaac

SEQ ID NO: 52669 - DNA, 297 bp, Glycine max
ttccgccccggagtacgacagtcaccgctttatgagcgttgtacaccaccagcgcttcgaagccatcaagggatggtcgtttctccgggagcgacgcgtccagctcatggacgacgagtatactgattttcaggaggaaatatggcgccggcggtgggcaccactggttactcctatggccaagtttgatccagaagtagtccttgaatattatgccaatgcttggccaacagaggagggcgtgcgtgacatgagatcctgggttatgggccagtggatcccgttcgatgccgatgc

SEQ ID NO: 52670 - DNA, 459 bp, Glycine max
  unsure (1)..(459): unsure at all n locations
gtgaagtgttggcaagaaaccattgatatccattattataagagggtgattgggtttgaaattgtggatcttatccaagttaaagcatgttcatggtttaaagccattgcaatggggttcagcgactcttttccaatcctggagtttgtcttaatttcgttcacaatggtttggaataatctaggtggcctaaatggtcaatgaaggagtgtcatcttttgtgagtaaaagactacggntattggaatacgttttcaaagtctagttgaacagtgcctaaattgttgagccttcgattcccaaggataataaaaaagattctagcattccttttctttattgtttagacaatggttgtaactgtattatcccgtgctgtatttgacgtgtatggttntcaagaataaacggtgtaattctcatttatttgagtacctcactctgtcattaataaatcat

SEQ ID NO: 52671 - DNA, 557 bp, Glycine max
  unsure (1)..(557): unsure at all n locations
ctcagggattatcatacatgtgtgtacataaactttcntcnnnctnnnnaagtgagnnnatgatatgatgacntcgaanaacctnnnanannaangccnncaccggtgggcataaaccatgagagaggttgtattttttttttgaaagcagacgccactcgccnggatgaactcgaattagacaccggaggaaccaatcatggattagaaatggtgtacggttactcttgcatatggagggagggattagacctgtgatgctgtccctgagataagattttgaaagaccccatgacattctcataactgaataggcctgagagaagagtgcaccttcttgcgtatactgaacaaccggaacatcttgaagtattctgttgcctttaaggactgacactggtaattctcaaacctatcaacagctgatatgtgatgatgctgctgtgcaccaatgaaggcgataatttggctgaatggcttcattgctggaacataagagaatctaacctcatatgggaattaatttagatcatgtttgtcaaacaaagattagtatt

SEQ ID NO: 52672 - DNA, 453 bp, Glycine max
  unsure (1)..(453): unsure at all n locations
acctgcggcatgcaagcttcgcttagaagaccctcctgctctctcgtcctagggtattgttggaaacttccatcctaggttaagggtgtggaaacaagtcgatgtttgactcanaaggcttgcaaatcgcangacataattggccagacggcttanaaagatggngatgcccanatcatttccacgaaacgcatatcatgatgattagaaattcatgcaaaatttaatcatagcacacatccatgtggacacccaaatataaggttntgtggccatgtaaacactaaggcttagggttcatttccatattcaagctgaaccagtgtttcgacaatttctcttttatcaagtcacacaaaacatccgagtccattttggcattcgggaaagtctttcgttgttctcaccctctcggtgcacatnntatttttcanaaacctttcgtgtttcgat

SEQ ID NO: 52673 - DNA, 599 bp, Glycine max
  unsure (1)..(599): unsure at all n locations
tttcgtaagtccttttgtgtatatngttatatcgactattttttacnntnnatcaggtgtgggnatgaattcctgcatgacctgacctatanatactnagcctgctcttatccctgattaactcgcngatgttgcatgataggtctgatgtctttttcatggctccttttaccatatttggtcttgatataaaacctctacaaatggaacgggaccaatgttatcatgtttgacgatgtcataatcactcaaacctaatattgttattcactcatctcaattataacatctaaattatatattattcctcacatatcagacaactctcttatgtattatacttcaccttaatatcatgtgttcttcatattacgagacacatgtatttaacttgatcaattaaatcatattgatacgtacttattaatatatactctatcaactcatatattgactcctgttttaataaattaaactgaccagagaattctgattctattcgacgatctgatattaccgataatatgaagtttattaccaaaaatatatatcacattataattatctttatacctcaatcataaaattagtcctaatcc

SEQ ID NO: 52674 - DNA, 380 bp, Glycine max
  unsure (1)..(380): unsure at all n locations
atgtgggtctgaaaaaatgcaaatttgatcatcctactaggacgactgagaaaactggggcaaataaagagggtgaggatgagggagaaacccatgctgtgactgccattcctgtacggccaagtttcccaccaacccaacaatatctttactcagccaataacaaaccttctccttacccaccacccagttatccacaaaggccatccctaaatctaccacanagtctgtctaccgcacttccaatgacgaacaccacctttagcacaaaccanaaacaccaaccaagaagttgaatttgcagcgagaaagcctgtagaattcaccccaattccagtgtcctatgctgacttgctcccatatctacttgataattcaat

SEQ ID NO: 52675 - DNA, 288 bp, Glycine max
cacaatgcataaacctagtataactacccatcatatcttccaaaacccaatacccacgagagatatatgagaaagaagtctacccacacctgaaattgtgaagtgccacacgtaaaggtgcgcttcacgactccgaacatggcgttctttcgtaatttggagcataaaaggtgtgcagaggttggagctttgatggagcttcaatggtggaggaagacaacagaatagcatcgagagagagagggagacaagcttatgaattctctgagtgaggagagagaacatagc

SEQ ID NO: 52676 - DNA, 258 bp, Glycine max
catgcaagcttctattttcaattacgagcgtctcgatatattttgagactatgtcagacatccgagtcaaaagttattgtcggttgacttttcttagagcttgcgttttcaatttcgagcatctcgatatattacagggctcaataggacatccgagttaaaagttattgtcgttggatttttctcagagcctcctgtttcaattacgagcgtctcgatatcctatgggacacaatcggacatccgattcaaaagtta

SEQ ID NO: 52677 - DNA, 464 bp, Glycine max
tgctcctttgatctcattctgccttgaaatacctccttgctccatttatataaccacgttttttttttaaaaataagacttatctctttatctagagagagaaatctcctaacttctgagtgattcaaaccaccctttctgtttcaaagactctcacattcttgagtgttgcccttcctatgaaaagtgtatctttacttactattatacttcaccttgttttttcaaaccacaatctcagaaaatccactctgaccaaattatcttctggcattcctcccatttaccactcagatcatgtgattcttgagcctacttgctttcaaacgagacttctctcgtttgaatcccttatggagcctgagctcagtattgcattttatatttgtccacacatctaacacttttcctcccttctccttatgcaaacacctatatacccacaatagccctatttctcttcc

SEQ ID NO: 52678 - DNA, 412 bp, Glycine max
  unsure (1)..(412): unsure at all n locations
ctgaggcatgcaagcttctacttatgtggcagggcgggcttccttcactttcttgtttcaaccgcgagctntgaccaccgctctttctttccgcgatgcttctcttcatatccgcctgagtgggtttatagcctaaaccatacttcccacgatttcctttggcatttatcaagctagttatgccgccgttgtctttgcctaaacccattccgggtttgtaaccgttccccaacatcactcgggccatcattactgctgcatcggacaggcaagcttgcccagagaaggagtccacggaggaaatgcttaccacctcanaagactggagagcggtttctaatgactcctctgcggcttccacataaggcatagaggatgggcagctcaccaagatgtcttcctcgcctgatac

SEQ ID NO: 52679 - DNA, 373 bp, Glycine max
  unsure (1)..(373): unsure at all n locations
atcaagtcactcncgcattntatctctagcatgtattgtatgttggtctcgtcctttgtcacgggaagccggaaggtgcatatcaccttcttaatcgtacacatggtgcactgcgcccgcaaatgcgcaagtgagaagagataattttcgagctctcgtgtgcagtaaatgcattcatatcatgcatcgcataaacatctctttataacatcataatggacatatcctgcatttgtccgttatcatattccggcctcacattntgcatgagtcatggcatcatcatgcatatgcgttcaacaaactttttgatctgcaaaattgcataccatttgttttcatgtttgctcatcctttgcatttcctctacaaa

SEQ ID NO: 52680 - DNA, 401 bp, Glycine max
  unsure (1)..(401): unsure at all n locations
gagggcgagcggncatgaaagcgaggatcttatccaccctaaagcatgttcatggattaaagccattgcaatggggttcatcgactcttttccaatcctgcagtttgtcttaatttcgctcacaatggtttggaataatctaggtcgcctaaatggacaatgaaggagtgtcatcttttgtgagtaaaacactacggctattggaatacgttctcatagtctagttgaacagcgcctaaattgttgagccttcgactcccaaggataataaaaaagattctagcattcctcttctctattgactagacaatgagtgtaactgtattatacgtgctgtatcttgacgtgtatggttntcaagattaaacggtcgaattctcattattgtgagtacctcactc

SEQ ID NO: 52681 - DNA, 397 bp, Glycine max
  unsure (1)..(397): unsure at all n locations
agcttctaattgcggaagtagtgtgcgaaatgtatgtcctttataacagtaatttggaacagtttgagacggatgatcgtggaatttcgtggttagttgcggaagaagtgtgcaaaatgcatgttgagaatgtataatccagaaagtgtgtgcctcactgatcacaatattctaaattctgtaataatttataatatagaagtggattgaaaaggcaatgttggaccttggcacgtctatgaagaggggtagcagccatcaagcatataatggtggagcaattagggttagcaatgagtgcgccctttcccgttccggctttgatgntttgcattgcttcggggttcacttcgggaattaccaaaggcaccttctcgtccatccgaaacgcggagct

SEQ ID NO: 52682 - DNA, 600 bp, Glycine max
  unsure (1)..(600): unsure at all n locations
tctggctagtatngtagactgatnntntnntgtttgtanagtaccantcanatctctcacnaccatacgaggtgannntttggttgcctaccactcgtctntacgtcgcactatanatatactcagcctcagccatacgccgctcttgatatagcttgaacgataagtcttattttatgtgctctctgacaacgctgctggcagtttcactggaaaaattggctaagtacagcatcttcatgcatatctatagaaaaatgtggaaatgaataactggttacaggaactccgattaataatattcacactataatgacaatccttttcaacagaaataccttaaaaccacattgacataatcattcgcagtacagtagcagatacaacatattcagtaatgcttttttggcttgaaaatagagaaagaatttgacaagagagaagatggaaaaaaaggcacaaatcccccatctattttgatctacgaagaaagatatctaatttttcaccattgtttgctaaaaaataatgataaaggacgaggaactgatgaaaattcttttacatacatatgatcgaaacttcataacagcgtatgcg

SEQ ID NO: 52683 - DNA, 356 bp, Glycine max
  unsure (1)..(356): unsure at all n locations
agcttccatcactaccgggtcttgaaccgagccagtcctaaagacaattntcccctgccacgcattgatatattggtagataatacaaccaagttcgcccttttcttatttatggatggtttctcggggtataatcaaataaagatggcacccgaacatgtagagaagaccactttcgtcaccctatgggggacgttctgctataaagtgatggccttcgggctgaaaaatgctggggcaacctatcagcgtgtcatggtggcgttgttccatgatatgatgcataaggaaatagaggtctacgtagatgacatgattgccaaggctcgaactgaggatgaacaccttgtcaatct

SEQ ID NO: 52684 - DNA, 464 bp, Glycine max
  unsure (1)..(464): unsure at all n locations
agctantataaattgtcttttccctaatttatagttcttnttgtaggtttgtacatatttttatgtttagttnttttatgcagtagatattccctgcattatgaattaatgtgttttcaaattcagtttcaggtgaaaagatgaagcataagaaggttgcagcagctgatgtctcgctaagcgagacatatgcacttagcgagcaacatcggctaagcgagacatcagctcgcttagcgagtgaagacaaatctggaagagttaaaaaaaagtaagttacaagccgttntcttccttanataaataagttgaaatttggaagggtccacatgttatatatcctccacaaagacatcatanccaattttctccattcanaanaagagaagcanagggtatgacaagattcttcatgcanattanatatatatagcattgtcatgagatacattacatcaattatg

SEQ ID NO: 52685 - DNA, 262 bp, Glycine max
agattggccgctgaatcaaaaactatcacgcactcacaagctgagataacccaattacaaaacaacaggaaggtatgattatgcccaagccatggacgccactgtttattacagacaaactcccatgtaccagcaacatgggacaccctccccaaaatccgctttacctgcacttaaacatggcttataaacctgatgatgcctcaactctgttacttataaagataccccttccaaacggatagcctcctttttctctgtt

SEQ ID NO: 52686 - DNA, 438 bp, Glycine max
agcttcactgaattactttttttttgaagaatatgcttcctgtagataacacattacccaagaatcattacaaggcgaagaagatattatgtcctgtgggtatggaatactagaaaatacatacatgccttaatgattgtaatttgtatagaaatcagtttgccaaaatgcgtaactttcctacatgtggggtgtcacactacaaagtgaagtatgacgaatgcagtgatacagcctgatcgaggccgtacctgaatcaaataaacattaaaatgcagtaactatgaagtgatcctaggtcgtttcccaacgagcaatgataaactaaatgttcataacagataataggaaaatagtaacgaattggggggggattgtttgcttttgtaaataaacaacgaatagatgtgaattcaaaaatagcaaaaataaaacacg

SEQ ID NO: 52687 - DNA, 383 bp, Glycine max
  unsure (1)..(383): unsure at all n locations
cgtagcccaccatctgttcatagtagtatttttataatgtgtctaccaccacgattatcgtttccctttttgcacatgttctgtagttgcatcctatccggaaccatatcagaatagtactgatactgcctaacgaaggcaaccattaggtccttccaagtatggactcgggaaggttccaagttagtgtaccaggtaacagctaccccaataagactttcttggaagaaatgtattagcggttcctcatctttgcgtatgcccttatcttccgacaatacatctntggatggttcttgtggcaagtagtccccttgtacttgtcaaagtccagcaccttgaacttgggaggtgggatgatattgggtactatgaacaactct

SEQ ID NO: 52688 - DNA, 272 bp, Glycine max
  unsure (1)..(272): unsure at all n locations
ggtttcacaataattctggatcctcctatgaaactccaatctccgcttaagttgactctacttctcacaatgtgttcgtcacacagctcagcaccattacttctgatanggaaagcaaaatgtttccccttcccaacagaaccacaagggtttcatagcctgccccaaatgaaagaaatggaatctcaattgtaagcaataagcataccttttgagcccagaaatacaccttatgcaattccgtagataagaataattaaaccacaatgatt

SEQ ID NO: 52689 - DNA, 342 bp, Glycine max
  unsure (1)..(342): unsure at all n locations
agctntcatatgtaaaatcaggtgcagccatctccctaagagtcctctcacgtggtggaggttgatccatgttctcagtatgaaaattagtagtcgaatgctcanaatcagaatgttcagaattaccagcaacagaatactcaaaatgcacagaatgatcaagatgcacactatgcctaagtaatctatgaaaggttctatctatttcaggatcaaagggttgtaaatcacctggattgcccctagtcatgcactatatgcagcanatcatgtaaaactacaactgtagtcaaatgatatccaaatgagttgtaaatttgtgagcagcaccctaaaatcatg

SEQ ID NO: 52690 - DNA, 612 bp, Glycine max
  unsure (1)..(612): unsure at all n locations
ttagtcatagactacctgtgtctgtgtantataatnanatatctatttacgtactnacanctcaagcnaatttgtttgtttcctccctgtacaacccgcagantttnanagtgccccntnggaataaggaaatgagacaaaatataaattttaattatacaantccgctcccanaaaagagactgatatgaatgcataatgcttctaccatacagttntgtaatataagaatccctgccagacttgatgtgaacattggctctgagtggtaagaaatgagaacaacattacataagaataaggtcatgtatgtcgtattatatgtcttgaaaacactaacctttcacgacatatatttggcttcaatacatatttgttaggacaatctttaatactattagtaaacccgcaattacaaatcactagttagtctacccaagnnnnnnnngttcttcaagttttatataacaaaacaaatgtgatgcaattcaacctcccaagggaattggatagaaaactctcagaagattgggccanaaatgcgactgaggccctatggttctcatgagtctacggtaaatctggacccaggttagctatagcccctctacg

SEQ ID NO: 52691 - DNA, 284 bp, Glycine max
  unsure (1)..(284): unsure at all n locations
tatatcgatacgctcganataattatcggagactctcggaatattcaaatagtcataactattcacacggatgtccgattcaggcttataatatatcgacacgctcgatattgaacatcggaaactctcgcgaaattcaaatggtcataacttttcacacggatatccgactcaggcacataatatgtcgagacgctcgacattgaacaacggaagctctctagaaattcaaatggtcataacttttcacacggatgtccgattcaggcgaattacatatcgag

SEQ ID NO: 52692 - DNA, 259 bp, Glycine max
  unsure (1)..(259): unsure at all n locations
tactaagcttctttcgaccttgaacaagcaatcaattcctctttcagaatcatgctatgtgctcgcgactggtccctntcttccttccaacttgagttcattattgctaccccatagagctcctgtgaaattagttcggccatactcttccttgcgagccctcttggtcttttgttcaagggctcttgcggtaattgcattctcttaccgtaacccggcgcactccttccgaacgtgtgtagcagccaacttgaacttc

SEQ ID NO: 52693 - DNA, 426 bp, Glycine max
  unsure (1)..(426): unsure at all n locations
tgcaagggacttcctgcaatgatgctatatgcattctcagtgcctccacacaanncaacaattggactgtaataagctcttgaagaaagccatagatcatcatcaacatttgatgtttctccagaggaacaaaatgttctgcatataaccatagttcagttcattcttcttagtagcaacttgattatttacactactgagagatattactttatctttgtccaatccaagccctccatgcattgtgtactctntccaagctttactaagcttggaactgttcccagaatggtgacacctgcatcctgaacaattgtagttcaataacgttgcgctttggtgcaagtatcatactcttgatgcagaatacaatacaacatcaaccattgcaattatgatgtcactaattactaatcagcanttaca

SEQ ID NO: 52694 - DNA, 551 bp, Glycine max
  unsure (1)..(551): unsure at all n locations
nttgaccccgtgatanccgcgatgacttcagtcacctgcggcatgcaagctngcanaccanatgctcaccactattagagtatanaccttcatgttgtttcatataaaccttctcctctaaatcaccattaagaaaagctattttcacatccatttgttgcaactcaaggtcaaaatgagcaactaatgccaagattatatgaagagaatctttcttagatactggagaanaagtctctntgtaatctattccttccttttgagtaaatctcttagcaactagtattgtcttgtatctctcaatgttacctaatgaatctcttttggtcttaaagacccatttacacccaatggctnttgccccattangcatctctacaaggttccaaactttgttactctgcatgtaattcatctcatcctttatggcatcataccatannattgactctntacaactcatggtttgatcaannagttcacgatcattcttagctccaatattatagtcagaatctttcacatatacaatataatcattaggaataacg

SEQ ID NO: 52695 - DNA, 354 bp, Glycine max
  unsure (1)..(354): unsure at all n locations
ttatgttgtgtgtggattgatctctataatagaataaagttggaccaattagaaataggcatgactgagatcactctgcatgtaattntcatgtttcttatccatattgacctatgtcattgagtgtactgatgtgctagtcattggggtctaattatttttgtcgtagtgacaaagacacaatgaatccattattgatgcatgaaatgaaccacgttgttaaggtggaagtctaaagggaaatagcatgcagatgcacgcttaaggtattttgataaaattgttacaatatgtagcccaagtgggagattgttagaaatttctatttcaataattaatctgggctaatattat

SEQ ID NO: 52696 - DNA, 461 bp, Glycine max
  unsure (1)..(461): unsure at all n locations
gcattggtcatcagttgtatgtttagcagtcttaagattacatgttatatacgttntttttntaattttcaaacttagtgcaatgaagaaaatatccactactttccaaggcaaggagaatggacctccacctcaatggattgaaccaaaggtatgtcgtaatccctatatttatggaaatttgaaatcagtatcatgtgtaacaaaaaatgaccaagcttaattgggtattttcatattgcatgtagagtcatgtacaagccgaagcctatgagtgtggatattatgtgatgcattagatgtggtgcatcgtcaccgacagtttgaagaatgaatggatcaaggtatgtatactattacactaactaatgaatntacgaagtatgaaatcgtacttgaatgcttcatgtactaaccttatataatttntccaatttgtagtgcttttctgatggaacacc

SEQ ID NO: 52697 - DNA, 286 bp, Glycine max
  unsure (1)..(286): unsure at all n locations
atcttctcatggcaatatcgttacagttagtctganaagacaaaccaatatccatcactacaaagacatgcatttgtaaaatggtggacacaaattgactcatccaagcagattcagaacaagtaaaactctggctccaatcccatccagaattcctcanagcagctaatccagaaacttttgtgtttttgaaccanaagtatcatctggcatcattnttagcaagattgaaatcaaaggaggtcctaactaaaaatttaaaaaaaagttctgcanatgctacagc

SEQ ID NO: 52698 - DNA, 415 bp, Glycine max
  unsure (1)..(415): unsure at all n locations
agcttagagcgtggtgtataatagcattgtgtattcttgtcaatattttgtctggnttggatatataaatatatgggtgatatagtaggctaattattgccaccggtaagaaatatatgcttaatgcttgctttgtttttactgtctattttgtgtggacagcgtatctctgaaccaaacagacaagtattttgtgttgaatcggtnttttgtggntttgtcattccaagcatgaaccttggtaattctaaatcctcttacaatattctcctgttgctttatatggcaaatactaatgaattttttttttttttttactntatgttttccagacactataacagacaggttataattattttggaagnataaattactctaccattactttntctaaacaataatactaaatcct

SEQ ID NO: 52699 - DNA, 252 bp, Glycine max
  unsure (1)..(252): unsure at all n locations
ataatatatacaaatggnggggcagttggacaaaaccaacattatttcacacgagatttctaggtcttaccacctctttatttagcttatacagctctataaccacggagagacatgtgacaaatctgattcanggagggtattgagtaaaatgaacatatttcataggtgaaactcaatttctcatttgataatctcagaaggaaatagacatagacatagatcgaccacatgcaaaccattgttctcacc

SEQ ID NO: 52700 - DNA, 274 bp, Glycine max
tgcttctaaggaagatatctattatagcttctcaaggatattttctcaaagaagcttctcaaggaagatgtcttatgaaagcttctcaaggaagctacctactctataaatagaagcatgtgctacacttgatgtcactttgatgaatgagagttctgtgagacacaactcagagatcaacttctctccctttttcttacttcaatttcgagctcccccctctctctgtctgtgcttctttcttttcctccattgaagcatcctctccaagctt

SEQ ID NO: 52701 - DNA, 337 bp, Glycine max
tcctatagtgcgtacgtctaaaccaagttgatggtggtcgagcccttgacggtagtcggcgggaagtgatgtgggaaatcgacatcccccattcagataggcccccacacttgcaatgtggtttttcaagtgatggacataaatcccgcctacagatgcctcttagggagaccctggattcatgcgctaggagtggtcccttcgacgcttcaccagaaattgaagttcgtggttggtggacttttggtgatagtgtcaggcgaagaggatatgttggtgacctgcccctcctccgcaccatatgtagaagcagcggaagaataattggaaacagttt

SEQ ID NO: 52702 - DNA, 246 bp, Glycine max
  unsure (1)..(246): unsure at all n locations
agctatanagactaaagtagttgatctcccactaatatatcttactntnttccttcaacaagactttttgtatactgatgtagctccatgtggagcttgtacgccttgaatcttcttcatcaatgaagtcttttgcttcttgaagatcaatgacgatggaatggagaacgaataaagatgattggagacaccacttccaggagaatatgagtcaagaacangctcaccaccatatgaagtcatgga

SEQ ID NO: 52703 - DNA, 273 bp, Glycine max
  unsure (1)..(273): unsure at all n locations
gaactcgacacgtactctgctcgtgagatccccacatgcttgactcatggcactttcaacgacctctagcaaacttgggtgtgatgcctaggggagcagtccaccaacgtgactttgaacatcatgtaactaccttcacatctggcatgtatgtatagacccacaaggagatcctcaagtacgtgttactcgtcctagntgtagacatataaacacctcaaagcaccattgactttctcgttggagtcccttntgcaagtacctccccccaca

SEQ ID NO: 52704 - DNA, 370 bp, Glycine max
  unsure (1)..(370): unsure at all n locations
tgttgttgggttggatgagagaaacaatgagatgtggatggtggatcatcaagggggtgtgtctaggtcaaggtcactatgcagcttcaggggtggagggatatttggatctgaggatggtggtgattcagtgttgtcaggtgctagaagctcaatttctgcagctaggagttctggngttaatatgttggaatctgggaggagaagtggatacagtgaagctgagccaagaaggagtggttntgatggagtagagaggagggatttcttgtttgataacaataattatgaaagtggaagtgatcctcagggtggtgtgaacaagggtggtggactaatggatggtgttggtgatggtggtggattctat

SEQ ID NO: 52705 - DNA, 290 bp, Glycine max
  unsure (1)..(290): unsure at all n locations
ctctgnagttggggctctacagaatgctactatcacacatncagaaattagtttctttgtcaacaaagtttgccaatttatgagtcagccaacagaacagcattgggtggctgtcaaaagaatcctcatgtatctaaagggcacacttctatttgggctgaaactggaacccaatttttctacaaagcactactttgttcatgccttttgtgatgctgaatgggcttcagatcctgatgatcgaaggtctacctcaagtgttgctgtgttcttaagcccaaatcttgtct

SEQ ID NO: 52706 - DNA, 284 bp, Glycine max
  unsure (1)..(284): unsure at all n locations
gctagagcgtggngcaaatatcatggtgttatattgtgaacacactggcggggagggagatataaacatatgggagatctagtaagctaattattgccacctgggagaaatatatgctcaatgattgctttgtttttactagactatttgtgagtggacagaatatctatgaaccagacacacaagtatattgtgatgaattgtttttctgtggttatgtcattccaagcatgaacctcggtaatgataaaacccctcacaatattctcctgttgctatatatg

SEQ ID NO: 52707 - DNA, 357 bp, Glycine max
  unsure (1)..(357): unsure at all n locations
cgttctgatcttggtataggactccattagttgaatctatttcaaaagttaggagaagagcanctttaaatcacaaagtctcctctctagctntttcatcaaggaaaaatcaatttgtggggtaagggaagctaaactatgattgattctatgatttgtatgatccttgaatgtcaaatgcttccttnttacctttcttcctttntcctttcttgattntgcttcattgtggttggtttagggattgaaatcttaaacccccaatatttgggaattgtttttatataaattcacatgattcgtgaattatttaatgttggcttggtgtttagaagttgtacggatcatttacattca

SEQ ID NO: 52708 - DNA, 244 bp, Glycine max
  unsure (1)..(244): unsure at all n locations
agctngttcgcacatcgttcgcgtgtatgacttccactccacaagggttgaagtagaggagaccttcaatcctattacgcaacgtggcggacaaaaatgggcaattaactcgaatggtcattattgtcaatgcggaaggtattctgcgcttcactatccatgttcacatattaatgcagcttgtggttacgtgagcctgaactactaccaatatataaatgttgtttatacaaatgagcacatc

SEQ ID NO: 52709 - DNA, 332 bp, Glycine max
  unsure (1)..(332): unsure at all n locations
tctntcattgaagaaatcagtagaacagcaccaattaaatatcttcacaagtatcttgcatccaagggaattgtatcagagacttgccaagaattcaaaagaatgattaccagtctgtggtttgacctttatggccgtggtggcacttctggttcctcttctgcttttgaacatgtttttgttggagaaaccaaacaatggtggtgaagttctggctttcataacatgctgcagctatgacctcgtatttttctttctgcctgtttctaattatccattcacaattcatgccaaatttaaggtgtattaacttgttatattcgaagtcgtat

SEQ ID NO: 52710 - DNA, 469 bp, Glycine max
  unsure (1)..(469): unsure at all n locations
agcttattcatgtcatgggtgtcttaatcatgatctgtcttataaaatcatttgattntaacatcaagcaccccttgacaatctgaatcttgagttgaatcgctggagagtaggatcacagagggattgcttttgtccatgtttaatcatgggatcatttatcctggtgaggcagaagacggacaaaatcacaaggttggggtcatatgatccagtttgggcaaaacccctttttctccttcaaacaatttcctttccatatgtgactatgtgacttctctaacctaatctccatcaattgttttttgaattgtgtgccattggacctctntcacaactgttgaagctntaccttgtgccactattgctactgcgggnttgtggtagtttggactgtcaattgccctctttacctacatcttctttggggctctctactcagcactctcatctattctctgtatatctt

SEQ ID NO: 52711 - DNA, 306 bp, Glycine max
  unsure (1)..(306): unsure at all n locations
tctcnctctnttccctataaatagggggaggaggtgaattattctttatgttcaaccctcctggtatctgagagtccctattagagagaaaaattgcttccgtgaagaaaatccaagccgaggcgcttccgcaacgcgtccgacacgtttgcgtgggtgatatcgcgaagattctccattgttcttcgtcgctctttgctcggtcttagtcggtcttccggcttcatcaggtaagttcccgaaatccaacatcttatattattctatgtactcttagtggttcccacttggatcacgagctcttat

SEQ ID NO: 52712 - DNA, 487 bp, Glycine max
  unsure (1)..(487): unsure at all n locations
agctatgaatgcactattcaatggagttgacattaacatcttcagactgatctacactngcacagnggccaaagatgcatgggagatcctgaaaatcactcatgaaggaacctccaaagtgaagatttccagattgcaactcttggctacaaaattcgaaaatctgaagatgaaggaggaagagtgtattcatgacttccacatgaacattcttgagattgccaatgcctgcactgccttgggagagaggataacagatgaaaagctggtgagaaagatcctcagatccttgcctaagagatttgacatgaaagtcactgcaatagaggaggcccaagacattngcaacatgagagtagatgaactcattggttctcttcanacctttgagctaggactctcggatagggctgagaagaagagcaagaatctggctttcgtgtccaatgatgaaggagaagaagatgagtatgaacctgatactgat

SEQ ID NO: 52713 - DNA, 250 bp, Glycine max
  unsure (1)..(250): unsure at all n locations
tccacttggaccccatttctaccaactacaaaacctaagaaaactatattatctacaccaaaggtacacttctctatatttgcatagagggtatttttcctaaggactgaaagacttgtctgagatgtcctaagtgatcatctangctcctactatacactaaaatatcatcaaaataaacaactacaaatctacctatgaaatcccttaagacatgatgcataagcctcataaaggtgcttggtgcatt

SEQ ID NO: 52714 - DNA, 294 bp, Glycine max
  unsure (1)..(294): unsure at all n locations
agcttgggaggaatgatggtgacccggtgttgttagaaacgattatatgggctacgtgggagtacgtgagctcagttggaggtgggcaacaggggatggtgggtttatgcgcgcattgtggatgtggaaaacttgttgtgcaccatcgcccgaccgccacctagtaccacatgtgatgggtaccccataatcctacaagctcgagatgaggaagtgttgaacggtgaaacttcctgcttttattgttgaccacagagtggtacctgtagatatgtcgcggnggtctggagacct

SEQ ID NO: 52715 - DNA, 247 bp, Glycine max
tcttcttctttgctttgttcatctaatatcaataatattaggatccataatcaatttccattcaatcatagtgtactgaataaaaactaacccgataaaagcctaacatgtgtagcctttcttgacatgcgtttcttgaaagcctgacagcttgcgcgacttttagtcaatgaaatttgcgttagaccaatgaaatttgagtgaatgaaaatggtgattgaatttgtgtcactcatttgcagatcat

SEQ ID NO: 52716 - DNA, 89 bp, Glycine max
  unsure (1)..(89): unsure at all n locations
agctngatatacgcaggtccaggagagaaatgttctgcggacgaactatacgaagacgagggtacgactacatcggatttaggaccacc

SEQ ID NO: 52717 - DNA, 371 bp, Glycine max
  unsure (1)..(371): unsure at all n locations
gtgaagtttataacggttcagccccttaggcacttctctctctttcngaattgcttaggaaaattgtttttgtgaagaaaatccaagccgaggcgcttccgtaacgtttccgtgagtgatttcgcgaaggttttcgaccgttcttcgacgttcttcatcgttcttcagtcttcaacgggtaagtacctcaaaccaagcttttcaattcattctatgtacccgtggtggtccaaatttggtttcatgtatttttagtctcgttttcatttactttntatacccccttttgacgtgcttaagccatttatttaagtcatttctcgcttaacctanaaataaaataaatntccaccgatcatttgaattgatca

SEQ ID NO: 52718 - DNA, 267 bp, Glycine max
  unsure (1)..(267): unsure at all n locations
tcttacacagcagaatctctanaacttctgtaacttggaccttctctctctagaaaccctagacacgcanagctctgaatcccagtccaaactccccttctgaaatctgatttcaggcttaaataggtggccttgtttgtgctcgtgagcttatcacacttatggaccgcttagtgcacattatatgaattcggcttagcgtgttcctttctcgcttagcaaatgaactgaagcggtgcacttagcgaacctgtacatcttatcttc

SEQ ID NO: 52719 - DNA, 495 bp, Glycine max
  unsure (1)..(495): unsure at all n locations
tagctgtatacaagggagcaaatgatacaagtatcattcattgtaagctaagtggtcaaaagagcttgcgtctatacaattcatggccttcatcatgttctgattaattcaaagatttatgcaaagatcattattcacagctagtcatttactcacagagtaaggtcacactctcatcggtttttggttcatgcttttctttcacaaccagtctatgtagtgactaaccattatattataagttcacactcttgttctttctttgttcaacatgcacatttgctcaaattcatgaaaggaaacacacatctcatcttaagcatgcattcaatttagaacaatgcataccaccatnttcacaaaacaaataaactacttcactgccataccatcaaaagttaagttaaactggtcacgatgcttcgagatgagaaactatactactcatgcacaagactatacaaaagtaactaatgtactaacataacaagtata

SEQ ID NO: 52720 - DNA, 346 bp, Glycine max
  unsure (1)..(346): unsure at all n locations
tacttgatgtaaatacctgtatatttatttaatgatngtttgtgtgttcactgtgctatcagaacttcattctaccatgcttttgccttgatcacgtagatgcatgtgtttttaggatcattcaacagtggaaactagtatgattcttagaacttgataggacggngctagtttatcgtattatcacgagggatcggngtacagtaatctagttattgtatgtttgtcttaatgtagttctggtcgagtttagtccaacaagaggaatctgcggaagatgcctaatcaggattaggctagactatcatgaggaatcgcgggttagtgtgacaccctctaccccaca

SEQ ID NO: 52721 - DNA, 389 bp, Glycine max
  unsure (1)..(389): unsure at all n locations
gggcgaaaaaaattgtttccgtgaagaatatccaagccgaggtgcttctgtaacgcttccgagaggtttgcataagcaaatccgtgaaggttttcctccgttattcaccgttcttcatccgttcttcgttcttcaacgggtaagtacctcaaaccgagtttttcaattcgttctatgtacccgtggtggtccccatttgttntgtgtatttntattctcgttntcattcgctttctacccctttntgacgtgcttcaatcatttatttaagttgtttctcgcctaatctaaaaataaaataaatctccaccgatcatttgaattgtatcattcgttaatttctgttaaaatgaattccgaccgttccgttatgccgtaaccacgttgga

SEQ ID NO: 52722 - DNA, 302 bp, Glycine max
  unsure (1)..(302): unsure at all n locations
tcatatctagtcaaggtctgagagaccatacaagtttcctaacgatttctaattatgtgggccattaagtctatcatatgctgacaatagccgagaagcccatgaatctcttcgggggcggagtaggtgtctgccatcgccttggccttggctaacaatcggngaagttcttgactcccgttcaaggtaagagcaaaccgatccatccacatggttgcctcttggtgtaaagagtcgatcacccttcctctagcctctttttccgcatatacttgggcatactcatccgcgattctatgctc

SEQ ID NO: 52723 - DNA, 360 bp, Glycine max
  unsure (1)..(360): unsure at all n locations
agcttacatgaatagcttctctatctaccattgttntagagttataaactatgtatgccttagatgtttcagagtatccaagaaatgttccatcatcactctatgaataaaattntccaagttatctttagtgttaagaatgaagcatttacacccaaagagatggaagtatgatatgttggattttcgtcccttccataattcataaggagtcttcttcattatgtgtcttatgtaaattttggtttgaaataataggttgtattcattgcttcaacccataaatggttaggagtagcattgtcattaagcatggttcttgccatttcttgtaacgtcatgttctttctctcaactaaa

SEQ ID NO: 52724 - DNA, 327 bp, Glycine max
  unsure (1)..(327): unsure at all n locations
gcttactacgcnctttctctcgtgaaccttagtgaatcaatgttgtgccacacgacctcacttcactgttgntttgccgttgctatgccgcctcactctgtctcttagctctctgtcgaggtaagaacccctctctcgcgctatggttntctagggttcataaatttctatgttcagcattggaacttccattgctttcattgccactgctttggttcggtctatgctaggctcttaattngtgatctcaaaatatcaatgacaaattaattaaccaatctgacccacaaacaatgattaatggattaattaatttatagttacttt

SEQ ID NO: 52725 - DNA, 391 bp, Glycine max
  unsure (1)..(391): unsure at all n locations
catgcaagctggtcgcattttagtgaaggaataccgtgacttgtgggccgntgcacccatttagtctcacattntttctatccaacaacccaagagtccgatggcatgcggagccaccttacgcttatccgcacctcctcattcggagaccccaagttcgatgacacgcagagaccaatgtggtaatctgcaccctttctcgagatgtcagcgtcttccggtcgagacaattttagtctcacatttttgctatctggcgacctaagagtttggtggcttgcagagaaaccttacggttattagcacctcgtcattcggagaccccgagtctaatgacacgtagagaccaatgtggtcatctgcactcttcccggagctgtcagcatctttc

SEQ ID NO: 52726 - DNA, 364 bp, Glycine max
  unsure (1)..(364): unsure at all n locations
agagcccgggtagtcaaagagaagttcaagtccatattcatcaaagtctgaagagagtatgatgaactaagggacgtcaatatggccacagctgaagccttggaacgagaaaccaagaaggcccgaaaggaagaacacgaccaaagcaaagttttgaggggctntatagggcagcaatagtgagctcaagctctgaataggtgaaaggaatcatcacgggtcaaaggcatgatcttgaaggacgagctaaaggtttgccttatgtcgaaaagaaatttgtcccaacagttaagcgagactgaagggaatatgtgggccatcatcgataagtgcaaagagaagctaaatctagcggcgactcacg

SEQ ID NO: 52727 - DNA, 325 bp, Glycine max
agcttcaattctgaatctctagcgtctcaatatactatggacacaatcggacatccgagtaaaaagttattgtcattagatttttctcagagcttctattctgaatatcgaacgtctcgatatacaacgggtgacaatcggacagctgagtaaaatgttattgtcgattgattttgcctaaagcttcaattctgaatttcgagcgtctcgatatcctatgggacacaatcggacatccgagtaaaaagttattgttgtttgaatctgcttagagcttctgttctcaatttcgagcgtctcgatatattacgagagtcaatcagac

SEQ ID NO: 52728 - DNA, 322 bp, Glycine max
  unsure (1)..(322): unsure at all n locations
gagcaaatcaaacgataataacattgtactcgtatgttctattgtngcccgtagtatatcgagacgctcgaagttcagaacagaagctcttagaaaaatcaatcgacaataactntttactcgggtgtccgattgtgtcccgtagtatatcgagacgcttgaaattcataatagaggctctgagcgaaatcaaacgattataacttttacaccgatgtccgattgtgtcccgtagtatatcgagatgcttgaaattcataatagaagctcggagcacaatcatacgataataactctttactcggatgtccgattgtgtccc

SEQ ID NO: 52729 - DNA, 481 bp, Glycine max
  unsure (1)..(481): unsure at all n locations
agcttgtagaacggatggacatgatatatgttatggtgttgggctggttcaaggataaaagggaatgtccaccattatttccatgacacaaatgcaataatgatgatttggaaattttatgcagaactagtcatgcatgcacctatgtggacacaaatgtccaccattatttccatgaggtattgtgctacctaaacatatgtatattnttgtgaggtatnttgctatatacatgcgtgtccaaggtatcttgctacctaaacatacatatatatgttttgtgagatattnttgctatatacatgcatatccaaggtatcttgctacctgaacatacacatatatantttgtgaggtatctttgctacatacatgcatatccaaggtatctttctacctaaacatacatatatatatcntgtgaagtattttttngttacatacatgcatatctaanggtatttcactacctaaacataca

SEQ ID NO: 52730 - DNA, 463 bp, Glycine max
  unsure (1)..(463): unsure at all n locations
actcagcttcccaacatccaagcaaaacaacattcacacagcacatgctatcacagccaagcaaaacaaagcaaaggcagaaaactctgccaaaacaccaaccaaaaatcacagcttttcccactcaaagaccccagtaacaattccttcgatccaatttgttaaccgttggatcgactccaaaattttactggaagtctatagtgcataagcctacattttgaccgttgggatctactagcaaacatccagaactcattctacattactctttccacaaccagcaaatacatggattnttctgcacttgtgcagaattctgctgcacaagtttacagcanaatctgcacatagagtctatttcgaanaccacacttnccctcatncaatctggccccaatcaatcctacaagtccaattcatgtatcatatgtctacccaaatcagcttcaaacacagacac

SEQ ID NO: 52731 - DNA, 337 bp, Glycine max
  unsure (1)..(337): unsure at all n locations
agctntgagcttaaatcctgacttttcatataccttggcccagggtgagaatgtcaatccttaccctcggaagcaaaaaagaatagaagggaaatttccaatcaaagaaaagaaaaggaaaatttccaatgaaagagaaaaaagaaaagaaaggaaattcccaatcaaagagtgggagaaacaaaaaagaaaagaaagaaaattcccaaccaaagaatgggagaaagtaaaaaaggaaggaagctcctggtcaaagaaaccagaagaaatgtgcagagaggtctttggaccagacaatatctgaacagtacagaattgtcaccacatgaacaaaaag

SEQ ID NO: 52732 - DNA, 362 bp, Glycine max
  unsure (1)..(362): unsure at all n locations
tctacttatgtggcanggcgggcttacttcactttcttttataaccgcgagctttgaccaccgctctttcttgccgcgatgcttctctttatatccgcctgagtggggttatagcctaaaccatacttcccatgatttcctttggcatttatcaagctagatatgccgccgctgtctttgcctaaacccatcccgggttcgtaaaccggtccccaacataactcgagccatcattactgctgcataggataggcaagctcgcccagagaaggaattcacggacgaaatgcttaccacctcaaaagactggaaagcggcttctaatgactcctctgcggctaccacataacgcatagaggatg

SEQ ID NO: 52733 - DNA, 151 bp, Glycine max
atcttcgaaagaagagatgaatcttctccctcatgtccttcttcaccaacatttctagcacccttcttcacccaagagccatcatgctcctttatataaccaaaggatgctatgactaaagtgcctattaggaatgatcttttgattggaa

SEQ ID NO: 52734 - DNA, 333 bp, Glycine max
  unsure (1)..(333): unsure at all n locations
tgagataaagttggctaacttaattgaatttggaatataataatctttctggctcttccattaaaacaataatgaataatgtgatgttcatcagtgagttggcagaacttaatcatattagtaaggacactggaaggcaactctttgctggtacagatgcaaaacccgcagtattattccctcctctggttacagcacaatgggaggaacaggtaattattattaaccacagtttacattattattaactntccagatatttctgtaacttaagaataattatggctggttcagattagacgtcttcatttactcttgacggtgaaggaatct

SEQ ID NO: 52735 - DNA, 233 bp, Glycine max
tacatctcatcgacatcataaagtatttcgtgaatttcaacttcgattcattcagcattgttatacggctcacaacatcaataagtatgacgtgattgtcaacttcaatcaatcacggtgaaatacgaccgcaactcaataaatatgcgtgaatggaaactcgcttaatcagcccgactatcgactataactcagaaaaggtgcgtgattgcaactcacataattacgttgtt

SEQ ID NO: 52736 - DNA, 390 bp, Glycine max
  unsure (1)..(390): unsure at all n locations
gtgtatggacctatgataccctaagttctcatcgatnatggatccagcttaattgtgatgcctaagagaactttggagacattacctttcaatgcttcccacttaaagccgagtttcaatggggttcgtgctttcgacgacacccgccgagaggttatgggagagatcgatctcccagtacatatatgccctcacacctgccaagtcaccttgcagataatggatattaacctcccctacagctgtctgttggggctcccgaggatccactcagtgggagttgttgcttctacactccaccanaagntgaaatcnctantggaggggcattgtgtcatcgtgtcatgcgaggaagacatcatggtgagctgcccgttctctatgccttat

SEQ ID NO: 52737 - DNA, 305 bp, Glycine max
  unsure (1)..(305): unsure at all n locations
tactatattatttccatagangtattgagaaatgactaattagcggagtcttgcttaatcgataccngtggataatcgatattattctctctcatcagtgtcagaggtaacagaatcactactacaaagcatttctacgacgaccaacaaggacggccacagaaaacaatgagaatcttagattgaagtaaaggatggtatttaaaacccgcttgaatgtattttttctctctttatctatcttccggatactactgcccttcatttctcttcatgtgcctgatcccttttattgcgttctcttt

SEQ ID NO: 52738 - DNA, 324 bp, Glycine max
  unsure (1)..(324): unsure at all n locations
agcctaagaccttctcggcactatagaagtctcctagcttcccataagtcgtgataagcatgaagaaatccatcttaccaaaatcccaccagttctaagtctgaagccattcaagaatctatgtttcaaggaatattttggttattaatcatctgcanttttcaatgttcactcttcanaaatgattatcatcgtttgaggaagaaaagacaggacagaaaaacatacctcgtcttcaaggaccgaagttggagactncggtggagaatcctcgatcttcactttggtctttggcttcatctcaaccctaaacgcagagcacaa

SEQ ID NO: 52739 - DNA, 531 bp, Glycine max
  unsure (1)..(531): unsure at all n locations
tactctganatttgtgattcaatatgatgtatgctagnntatttatatagaggtagntatntatatntaataattatgtaaataatatggtagagtgttatagtatgattccaaaaattattaagtgttggagtttgagaatattatggttaaanttgatgaacatgtgtatgttgtaccttatgaatatcattangaatgttataagatggttgatgtgatgttatgagatgttaaagtgtggacatgatattcaattgtgaataagtggatgtatttaacacttgatgctacattaattatattgtgagctatgaattatacaataacccgaccagtgtttatgcgcaatgttaaagagaaagtgtaggttcctagttaggaagcagtgttaaattgtagcgcaattgtgttaaacatgtntgaaacattagtgtgaggtcgtggtattgataattcatgagcagtgcttataaatgannatatgtgatgaatgtggaataatatgttcgcttgagatataatattgta

SEQ ID NO: 52740 - DNA, 367 bp, Glycine max
  unsure (1)..(367): unsure at all n locations
ctcagcttgctcaagtcttttgcattctatactagaatcaactctctgtatactccaatttccactaaccgcaaacttggcttttctaaccctcaaaatctcacactttttcacctacgacactgccattctcacatttaactctaaggttactctccccatcctctctaccagttttctatcaacattctaaacatacatatttcacacagcattattttaaacccctaatcaacatgggtagttttgctacatcacacatgtcaagtttagcataatttcaacaattccttcaccaaatactaccctaaggcantaacctagttgaactacgcattgtaactcccaaaacccaacaccccagatt

SEQ ID NO: 52741 - DNA, 454 bp, Glycine max
  unsure (1)..(454): unsure at all n locations
actaagcaatcactacgcatagctcttttctctaangtggaggacacatgaacgaagacacaattcatggngctccgaataaggtgttgataatggagaattacacctttcaatcactacgcatagctccaaactcgaagggtgcggacacatgacagataacgcaattcatggggctccgaacagattgagaatggagaattgcactacgcaatcactacgcatagctccaaactcgaaggtggaggacacatgaatgaaaacgcaattcatggtgctccgaanagattgacaatggagaattgcactaatcaatcactacgcatagctccaaactcaaaggtggaggacacatgaacataacgcaattcatggtgctccggaaagatcgagaatggagagtggaactaacaatcactacgcatagcttccaacttgatggtggatgacacat

SEQ ID NO: 52742 - DNA, 318 bp, Glycine max
  unsure (1)..(318): unsure at all n locations
aactgatgagccttggcntttaagctaatattcgtattgctcgcctagcgcacaactgttagtcgatgaatacgactaactcttgtgtataaaacttgtataattgtacacaactctncaatttatgggtattttgtagcgttgtaattactttttggtaaaaataggtaataaatacttagtactttcattttgggcgtgtagtaatcattttctctcaatttcatgttaattangcaaggttgtgaggtgctgattttcattctctcgctaagccaatctgctggcttagcgagccatccgctgagtgcaacactt

SEQ ID NO: 52743 - DNA, 424 bp, Glycine max
gagctccttatcgataatattatttctggtgttgaattgagagggaatggggtctacattcaacaacaaatatcttagtcttctcgaatgattcatttggaaaatctacattgacaagtataaataaataaatctataaaaccaaaatgatatatgaaacagtagtcgttattaacataagcactactagtttgtttctctttacactaaaaggcctcaaactcaaacctacccactttgcctcacatatcaacatatattgaacaccctcaagagagagagagggttctaaaccaattccttcatcggaagaaggagagaatttggttattccactacaacaagaggaggcatccaaagggatcgcatcgatcccaaatccaagcttcaatgttcttctctctttctcactcaaaatgttaat

SEQ ID NO: 52744 - DNA, 422 bp, Glycine max
  unsure (1)..(422): unsure at all n locations
aagacttttcaaagattgccacaccactcagtaattttgctcaacaaggacgttgtgtttttatttgatgaagattgcttgaaagcattcaacaccctaaagactattctagtgtccgctcccgtcattacaacaccagattggggtcaagaatttgagttgatgtgtgatgcaagtgattatgcagtaggtgttgtattgggccagaggaaaggtagagtcttccatgctatntactatgccaacaaagtnttaaatgaggcttagattaattatgctaccacagagaaggaaattcttgcaattgtgtatgctttggaaaagttcagatcatacttagtgggatcaaaagttatagtttacactgatcatgcagccattaagtatttgctggaataagctgactccanacctcgattaat

SEQ ID NO: 52745 - DNA, 343 bp, Glycine max
tcgagacgcttgtttatgatgatccatgctcctagagcatgctttttttaataacattgcactccgagacccgactgaggcgcgcaatttatcgagacgcttgaaattgaaaacagaagctctgagcattttcaaacgacaataacctttaactctgatgggcgagtgagtcccatattcttcctatacgcttgtatctgagaacgaatacttattggaaattctaaagaggataaactatactgcgatgtgagaccgagtaccataatgtattgagaccgccgagatgataacagaagctccgtagcaaatgcagacacaataacaattaacttcgataatc

SEQ ID NO: 52746 - DNA, 390 bp, Glycine max
  unsure (1)..(390): unsure at all n locations
ctatgactttatcttttgtattagtgtagnctataatngtttctggagagagagagctctctnaacaagtaagtgacagctacactcttttctgagtggttaanattatatcttgacctgttgcaaaatttatttataactttgtcttgttatttatggatggnttactcaagagggagtgaaatcaggcataattcatcagtcttataatagaatatgaaaaacttagtcatatttgtatcttgcaagtttctcaattttcctttaatctatattctaatgggctgggatagtcaaagtatcgagtgtatctaacatgcattggatttggtgtctggtagatgtagaaaacgatgtttataataccccttctaccctcagtataaaatg

SEQ ID NO: 52747 - DNA, 485 bp, Glycine max
  unsure (1)..(485): unsure at all n locations
tctctgaagcatgggatgagggaaagaactanaaannatnttattcatccaactcgctcaacgcgccccatgtgcttagcgtgaccncactactgcatcctttaggcatttaatccactgagtgagccatgtcccgcttagtggaagttgcagaccaatcatagttgcataagtcgctaagcgcgcacctgtgcataaagcccaaaacctctcaaggtttttattttttcgaattgggctaagcaagtcagtcctgctaagcacatgagtntaaattctgaaaattaaacgcactaagtgctcacttagcgagtcactcacgcttatcgagcagataaaactgccaaaataaacataaactgcttaagaggtcctttgctatttataacttctacacatattgcatatttgcggacatgcctgtgttcatttattctggtttgctaaaatccttaattaacaatcagaagctcttactttttaat

SEQ ID NO: 52748 - DNA, 275 bp, Glycine max
gacatgcttttgggttttgaagcgagaattgacggcttaagtgatggaagcctttgaatttgataactttgtcttctctgatagacgttacattctatctgctactgcaggcgtgtgcagcacatacgtagtactattgcatatgtgtcacttgtgaagtgagcatgtactggagttgtggtgtgaaattggccacatgattacactagaattagttaaaaggtttcacatattactcttttctttaaaataacaatagtttctctcttcaattt

SEQ ID NO: 52749 - DNA, 530 bp, Glycine max
  unsure (1)..(530): unsure at all n locations
agcctaattaacctganatggagagganatgantattaaacacttattatggaagtactaagtatttattacctatctttaacanannataattacaatactacaaaataaccataaatgggaggagtnttgatacaatttacataagttttatacacaaaagttagttgtattcatcgactaacactcgtccncttaagcgggagtccacttttggcgctaagcgcgacaattcgcgctcaacgcaattccctctcgggttggaattacgcttagtgggcttcatgaactacgcgagaggtcaaaagttgttattntgaaaatctcaacagtcaaaacgtggggcatgtgttaggaacctatagtccannattggagacgatccaacgattaacaaatcacggatcgcggtattaccagaataagtttaggtaaaaatttgaaatctcataatttcaacttaagtcaataanaactcacataattcaacatccacatcgatcaaatcacgcatgactaattcacaccat

SEQ ID NO: 52750 - DNA, 292 bp, Glycine max
ttctcataacaacaacacttattctctctgctaatgttcacaacagactccttattctcataagaaatcataatactgttgtatctagttcttttaaactctggcatcaaagactaagccatcctaacaaggatgcactaaaaattgtactaaataaatgtaatatactcctttatcaataatactaacagggatttttgttatattttgctctatagcctaatctcacaaactactctcttctccctcttacactgtttatactgcacctcttgaaatagtattctttgat

SEQ ID NO: 52751 - DNA, 382 bp, Glycine max
agcacaacactgtacttcatacgaactcaagccactaaatcatattcaatcaattcactattcaaacatgctgttgacaagctactactacatacaaaataactgatatgtaaagactaatcattacataattgaaacataaacataaaataaacttaaatagaataataattaacttctccaatgcaagacaagaagataacaatcctgtcaatcctcctgtgggtgatcctttgcatgctcgttaagatacaacaccggagcagctagtggatcctgaacaataagctgctctgtctccgatgctggcacagatggctgagaatcatcaataactactgctggagagaaaggaattggagaagtatgctcctgagcatct

SEQ ID NO: 52752 - DNA, 391 bp, Glycine max
  unsure (1)..(391): unsure at all n locations
actctnntatgaagctcaaatatatntttcagttgaactttaatttaaacattattcgtcatgacagcagtgggaaaagtgttggagggagaaaataacgtagcattgctagcattggtagaacctgccagtttattacaattgtcataatgagctggcttgggaggagagatgccttggactagatgccattttgtggttgctccatangagttgttgatggttgcatctatgcattagaaggattttcaagatcttcaacaattaaatatgtttggcagtatgatcccattaaaaactcttgggctgaggctagtccaatggtcagtggcagagcctattgcaagacaggtatattaaataataagctttatgtttgtggaggggtact

SEQ ID NO: 52753 - DNA, 353 bp, Glycine max
  unsure (1)..(353): unsure at all n locations
aatcttgaaccaaattgatgcttaatattttttagtgcatcgcattcaataatgaaactcttgtgcgctcttgtcttttgaaggtttaagaccttgatggcaacacctttgtcttctaactcaagagttcctctgtagacagagctaatatttctaaacccaaacaangttgtagatgagaacctgtgggttccattgtgtaggctntggtatgaaactttanggcagcggccaattgttggtgaatccaaatatgtatttttactccttctcctcttccagtggaaaaatagaatgactaacagtatgagaagaaaagaaaccacattaactatcactattatcaatatgat

SEQ ID NO: 52754 - DNA, 347 bp, Glycine max
acacccgtgagttaacgagcaccaattttattacgatcacgacctttctcatggtgaaaatgaaacgctattacacatggaagatgaggacctaagggctgcaattgcagctagtctgatggattcgttcccagctgtgaccaatgctgaagccagcactcctcaaaatgataatcatagtagtagacaagtggcaaccactgaagctacccctctaaacgatcaacactccaaacaagtggaacccattgaatcccttccacctgtccaagctcttagcaacacacatgtgcctgctattgattctgttcttctatgatcaaacaacaagaagtgcgtctactata

SEQ ID NO: 52755 - DNA, 381 bp, Glycine max
taatacattactcaacatgtacatgtatatgtcgagcatccatttccataaccaattccgagaccgactcgcatactcaggatacgagcagactatgaatatatataggctaactcaatcaaactttgcttagtaaataacttatgcaccttgcatctttaaaagcactgtttatattgaaccctaacagagcatacttaatgcaaatctaatagctttcttgtttgtcacccaacaaccaatagcaacactacaactggaaccattgtccacttcaacattctgtcctggatctattttacccaaagcagcgctgtgaaatcccataaacatctctatcctagggctgtggatgaatgaaataatatctacgtgaagcat

SEQ ID NO: 52756 - DNA, 461 bp, Glycine max
  unsure (1)..(461): unsure at all n locations
aaagaataanaaaaattcatgaattgattgtcaaatccaacaacatgtttaccttattcaattaaatatttttagtaccgaccattgcctataaagtagaagcaaataataaccaaaatactttataaattgtttttaaaattaattctatttgaaaatttcactattatatgaggattatgaaaatgtcacaattgaattctagaactatggtaggaaattcacatcttctaaggattgatgacaagtgagagtgaggatttatagtgtggaatgcatcatagagcttatggaatcgctaaatgggttcgtaagtgtattggtaagaaaattgtgaatttatcggtggacttagccctagtggtcaatccattttagactatanttgtatcatgattatggctcggatatatgaggcatgtcactattatgttattagtttatagtatatattgcctcat

SEQ ID NO: 52757 - DNA, 254 bp, Glycine max
gaaaggctttaaggctaccaggatgacaggacgatcgagaaggttttctgcctgggcttccaccagaacctaaagaatttgcccctttaaataccccacatggggggcttaaaaaaaagaatgatgcgcaccaattcaaccatcccaatcaaaaaaaaggacattctccaaaattttttataaaacaaggcaatccccctaaaattgagtgaatatatcctatccatcctaggaaattttttgttattaacatc

SEQ ID NO: 52758 - DNA, 394 bp, Glycine max
atacaactccttataattagtgaatattaaggatgacccttactttcataaatagcaatggatggtcttttgcatcaacacaaccccaatcccaacatttgaaaaccacacctcaattcaaaagaattttgaagattggcaacgcaacgaatgggggcatcagttatctattgcttaagaacattgaaagctttttcttgtttctctacccattagagaccaacatattttcttgagcactttcattgagaggtgctgccaatgtggaacaatccttcacatattgtctatactaactctgctagcccatgaatactcctcacctcggtcacagacttatagtgaggccattcttgataagcctaaccttctctcatcacttgactctattgac

SEQ ID NO: 52759 - DNA, 438 bp, Glycine max
  unsure (1)..(438): unsure at all n locations
caagagccctccatcgcgctggccttttatctcggcttancgcacgaccatcaacaatttcttgatntaagttacctgcgcttagcgattcaacctcgcttagccacaggtagttcagcaagaggatgagtgctcatcctcaaaagatgaactcgcttagcgcggtaagcgcgcttagcgagttcttcagataacgttacatacaatgagcattgatgaactcgcttagcgtatcatgctcgcttagcgagttcatcgcgtnttccagaaaatactgctcattgtcttgcacttttcaagcctctaaaaggcataacagacatccaatgtgtgcctcatactcaatttagtatacaagcttatatagccctaatcttaaactaaatctaacagaacatataaaccctataaatctaaagctacaggtgaagtcttcta

SEQ ID NO: 52760 - DNA, 576 bp, Glycine max
  unsure (1)..(576): unsure at all n locations
tagcacatgcattttttattgnttaatagaataaaagaatttgataatataaacaaaccaatgctggaagagatgtgagcatgggatttgaatcacgcgaagaatgaagaatgaagaaagaatgcgctatggtatgaactttgtgaaaaacacaacatcgggtctcaaagagtcaatgtttacaatctctatttatgtaagagtatgtcatcatacattttttaacatcagttttgataaaaccaatgctaanatgacgatgttaaaaacactctttctattagtgatacttgcaatctcgctcatctggaaactgttggcatgctatatacattgtccaatggtagaagaggttccaaagctattgagctttgtttggacataaatgagaattgattagaaaagaaaatattaaatacttgaattctactntaatcacacatcanatatgannnattagctcattggatcatgaaagattcacataanacctcanaagagccacatttgtntgatannagagagagagagagagagagagagagagaatgactgatgacagagagagagaatgag

SEQ ID NO: 52761 - DNA, 295 bp, Glycine max
catatatatatatatatatacatatatatatatatatactatatacttataatactaatccacataattagatccatcgtaccccctaatagtaattaatagtattataatattatatctgtttaaataacactggtcaaaagactcaaatacataaggcgcaatccatatataataatatagccgaaattcacgctcataactcggaggtagaaattataaattcctattatagactctaagaagaaaactcatatattaataacacgccacataagatatacataacacaaaa

SEQ ID NO: 52762 - DNA, 273 bp, Glycine max
  unsure (1)..(273): unsure at all n locations
aattaagtatgtaaccagttttatctcttatgaaanntctccaactatntatttatagaactaaggggatcttatattattatttaattataaattattgtttaaattattttaaaaataaataaacttattatatataattgatcgcgattaaaagattggatacatttttttatattcttagcatataattatttttctcttatttatatgtgaatctctacggaaaatgatatataacctttttttattttgcaagaactacaaataatc

SEQ ID NO: 52763 - DNA, 479 bp, Glycine max
  unsure (1)..(479): unsure at all n locations
acttccttgagaagcttcttgggacatctttctcgagaagctagagcttagctacacacacccctctcataactaagctcacctccttgagaagcttccttaagaagattcctaaagaagctagagcttagctacacatacctctctaatagctaagctcacctccttgagatgagaagctagagcttagctacacaccccctataatagctaagctcacccncatgacaaaaaacatgagaataaaaaaaaagtccttattacaaagacaactcanaatgccccgaaatacaaggctaaaaccctatactactagaatggccaaaatacaaggcctagacgaagganaaacctattctaatatttacaaagataagcgggctcatacttagcccatgggctcgaaatctaccctaaggctcatgagaaccctaggggcctttcttggatctctagcccaatctatgtggagtcttcta

SEQ ID NO: 52764 - DNA, 412 bp, Glycine max
  unsure (1)..(412): unsure at all n locations
atgtgaatcgatacacagtgcaactttgaattcaaattttaatagctggtgtaaatcaagtttggccactggtaatcgattaccagagaagtaaatttgctgaaaaatactttttaacttacaattcttggccaaaccctttgctacttcaaatggaattcccttcctatttaatataccctttctaagactctagagactgtcttgatcattcatcttgaatatctttaatttctttgtattgaataaagctttgagactctgagacgcatgtgaaactctggcatcatcaaaacattcagcttgatcctttgtctacaatctcccccttnttgatgatgacaatccctgaaatcaagacaagctgtatacaagatgatagcacattcacacanacccttactcccctatc

SEQ ID NO: 52765 - DNA, 417 bp, Glycine max
cgcctaaactattgcacagaaacaatggcatatattaatccattaggacgcatacatatacaataggcataatcaatattaaatatcatccaacaaacaagtacatgtaaattccgcaaagtgaatgagattcaacacggcttactatctatgacacttacactaccccattctccaatggtctttgcacccggaactatcagtaggctaacattgtgctttgcacaataggccttagccagtattacttaatcaggttggtcacaatcttctgctataacgcagttgcacatcatgcttctcaatctctattgcaccttcatgataggcacgcgcaagaccttcatatccaacgattttctaaccatgagttgcaaggcattcatgatatcacaattccaaacctctattagacaa

SEQ ID NO: 52766 - DNA, 343 bp, Glycine max
  unsure (1)..(343): unsure at all n locations
ggcaaattaatcatcctgctttgatgaatgcgaaaactggggcaaatgaagtatgtgagaatgatggtgaaacccatgctgcgactgccattcctacatggaannatccccaccagctcaacaacatcattactcagccaatatcagcccttctcattacccaccacctantcatccatanaggccatccctaaatcaaccacaaagtctgtctaccgcactcccaatgcccaaacaccacctttagtgaaaaccaaaaaggaattttgcaacaaaaagcctgtaggattcaccccanattccagtgtcatatgctaacttgctcccatatctacttgataat

SEQ ID NO: 52767 - DNA, 204 bp, Glycine max
  unsure (1)..(204): unsure at all n locations
cttcattcgttcttcaccgctcttcagtcttcaacgggtaagtacctcaaaccacgctntttaattcattctatgtacccgtggtggtccacattntggttcgtgtattttttttctcccactttcatttactntttataccccctcttgacgtgcttaagccatttatttaagtcattcctcgcataatctanaaataaaata

SEQ ID NO: 52768 - DNA, 379 bp, Glycine max
gcatattaagctggtccatgacacctttatttacctgctccagttggaattaatgcatgttataacgcattaaagtatatctgtatttattcctaatggcaacctaaaaccaagccacttatctacctcaaactcgaagatttaagatatgaacacataatataattttgcatacagaaacttgatcatgatagatattttgacacgccatggtgaaaaaagagctgaactgaatgatcgctcaatttctttcttctttaaagaaaaaagagctccagattgattttaatgtgttctatggaacgatagaatggcacacctgtgctaccttaataccacattaacatttatacttaaatatttttgactataattaaaa

SEQ ID NO: 52769 - DNA, 486 bp, Glycine max
  unsure (1)..(486): unsure at all n locations
tagagatgccactattattgttgtgctacacacataagccttcttagaggtaggttttattntatcgcacatggcgttagaatgaacatgtgtaggaatccttagaaaattaaatgagatttaatttggtatatttattgaagtggaattattcttttacaattntaattacaactatggtgtgtttgatggaccaattgatgtcctaatgcanattggttgataaaattaagtgctcttggtggtttcgtgtctttgacctactgattttattcctttgattctgatatgattatgtgaaaattttttaaggggttttactctccatgttgtgaanatcatttntgtataatttgttcgtgttggacaagatttactacgttagtgtgatacattgtatatcgggatcatgacaatgtgattgaaatatgttaagtgataattgatatgtgagattggagaacatgtgatgaatatattgtttga

SEQ ID NO: 52770 - DNA, 382 bp, Glycine max
  unsure (1)..(382): unsure at all n locations
tttatctcttttatcttagtgagagtgattctcccaagttcttgagtgattcaagaacacccttgctgtatcaaaggactttcacaacctttgtgtgttgccctcgccggaaagagagantttatccttcctttcatgcttaaccttgctcttttccaccacaatatcagaaaattcacttttacccagaattatctcgnggccataactctcgtntacgcactcaaattaagtgattcttgagcctatattgaatttcanaacaagacctttcaccttggtttggaatcatctcattttgagccctttagcttgagttattgtcatttctatatttctggtcagccaccacttaacctacngtttctcatctcattattcc

SEQ ID NO: 52771 - DNA, 310 bp, Glycine max
actgccgcggtaacacgcggacggaaacccgcggacccactaacgctgcagccatctcttcccactggcgaatacaagagccgcacgacgccttcaaagtgccagctgaaggcaaggccctgagcgatttctctaccatcggcggattcacacgaagggccctagacaactgtctggcccataaaagcagccacaccgcacaccgtgaccaaccctgcgcgttaaataatttaatcgagcaccaagtatacaaaccgacccatgtatcccgaagacaaaagaagatgagtaaagtccttaaccgtctctt

SEQ ID NO: 52772 - DNA, 484 bp, Glycine max
  unsure (1)..(484): unsure at all n locations
actctagctagcatggattttaaatgggtatgattcataatcattcaaacacaatgtagatagaaccaacaaaagtgtttcacgatctgtgaatnttgtatacagccaacaacagctgctagaaatctctgtctgtcctagtattaggcctcgccagattatgtgtctgatggctaatatttaccagagccagcttgatggctntaaatcaccccttttcacttgcgaatatttatttggcttctttcatataattaatgtgcacatattatggccgagtttcatataaagcaattcttgatagtgtctatagatntaaaccaataagagagtgtgtggttaaaagagnttgttagaacgggttgctaacatttctcttaaataatatgaagttttactaaagtattttaatattatcttgagttttaattggttgtgctataacatatactcatcaagatcactcatctatagagctatatct

SEQ ID NO: 52773 - DNA, 574 bp, Glycine max
  unsure (1)..(574): unsure at all n locations
gttcgcggcaaaggatcgaagtgcgtcttataagaggcaaacttgattatcctgcattggtgaatgaggaagctgcggcacatgaagagaatgagaaggaggaaggaatccatgttgtgattgctcgtcctacatggctaaatttctcgtaagctcaacaaagtcattactcagccaatatcagctcttctcattacccaccacccaatcatccacaaaggccatccctaaatcagcagcaaggcccgcctgccacacatccaataccaaacacaaaccaaaacaccaaccagggaaggaattttccagcgaagaagccggtagaattcaccccaattccggtgtcatatgctaactngctcccatatctacttgataattcaatggtagccataaccccaacctgttggacaagtagcctcagatatcttaagaaaggggggggtgaagtaagatatttacaacttattcccaattaaaaatctatttactctctatccagttataaantccttataatgaattcttaatatttgatcaatagaacacttgatatgatatatacaatataata

SEQ ID NO: 52774 - DNA, 370 bp, Glycine max
gaaacttcttttttgatatatataagatcctcctaacgacattatttgaatcagaaaccacacgtttcgatcttatactacttttcttcttttagccactcacatttctcattgaattctgataaatagtaaaaggtctccccttttatatattaaatgacaatcaaaccacatataattaaaatcaattatctttaaaaacttttgaatgacctcaacaactccttattgcaagttcataacaatatcttcattcgctcctcattcgcaaaaagataatctcaattgtcaatagcttgtatctggcacaattcttaattggaacaactaaacaagcaattatatgaatctttaataattcttcaatact

SEQ ID NO: 52775 - DNA, 435 bp, Glycine max
agaatgatttcaagattgtttctactagttcaagatcaagattgatttcttgtttaatgacaacaaatcacgatgattctagattcaagagatgtttgactcccagaatcaagagaagatgaattccagattcacgagaataaatcaagaagacttcacaagggaagtattgaatagatcttctacataacaaacatagcacacttttgttctccacaagagtttctctcataattctctaagttaccagagttcttactctctcgtaatcgattaccaattacctgtaatcgattaccagtgtcaaagtttgatttcgaaagcatttaactgaatttgctacgctccaattgtttttaaatggtgtatcgataccagtcatctgcacgtggattacataaattggaagagcaatttttcataatgcttggtatc

SEQ ID NO: 52776 - DNA, 292 bp, Glycine max
gtaaccatggtatctatgcctgcatctttgcctttttctgtgaggatggccatgaatttcaagaagatgtatatacattattgcactgctgattgttatataaccctatgaaccgtgtcatggagtaatctcagatttatattactcgacaggggtcacataattgtagaaggaggaatctgtactcgaaacataagattctacaagatctatacaaataatatatatactcattatataatcagaatatattgagggagaaaatcttatatatgcatcaagaatatattaa

SEQ ID NO: 52777 - DNA, 396 bp, Glycine max
cttacgctacatctacatggtggaaaatcaccaataaaggaccacattgtagctcaaagatctagccttcatagaagcccccaagcaagctttcatcacctacggggacatagaatacacttaaagctctaagaataaaaactacccgatcgatgaatgatgaacgatgaagaatggacgaagaacgacacgacaacgcttctcgagtgttaccgaagcggctcacccatgatattcttcttgttctccttctcccactaatttctccacaaattgatgtttcaggtctggacttatctgagccgatctgcctagtataagaaaaagaagggagttgccagatctacccagccgagagttgtttatcctaacttttaaggcctactggcctaggct

SEQ ID NO: 52778 - DNA, 459 bp, Glycine max
  unsure (1)..(459): unsure at all n locations
ctcaaacagagcnatttatattccanacagccaaagaaagattaagcatcagctgttaggatctgataagagaacgccgaactgagagatgtcaacatagccaccatcaatgccttggagcaagagaccaaaagggcctgcaaggaagaacatggccgaaacaagttctgaggggttctgtggggcagtaacagcgaacttaagctgcatagagaggaaagggaccaatcgcgattagatggtgtaattctgaaggacgaattanaggcttgcctaaggtcaaagaggagttngtctcagtggttatgtgatgtaccatcattttcttctattctctaaaccctttttgcaccactttaattattgattggtcttaattgtcaattaattaggcagctttattatttgcgcccatttcagctaattgatgtnttaatctaatttaaggaataatgaaca

SEQ ID NO: 52779 - DNA, 253 bp, Glycine max
tgttggcccgtattacgtataataacccctaaatattactaatgcctagtgatttgattgtcaacattgcactaaatattcattgatcttgtgggagaaaagcctcttgacatagtatccagattcaccccatccatggcacacaattggttttggtgacatagacaagttcttaccaatttcccaaggataactgcggcactgcttatcatttcacaatgcaccagttggcagagctttggaatctaatgtt

SEQ ID NO: 52780 - DNA, 459 bp, Glycine max
  unsure (1)..(459): unsure at all n locations
ctctagctccaaaggaaganggcttatttaagctnctcaaggaagtcctctcaatatatcttctcaaggaagctacctactctataaatagaagcatgtgtaacacttgttgtgactttgatgaatgagagtcttgtgagacatacttcaaaggtccacttctctccctcttttattccttcaatntcgggctccccccttctctctatcttttcctgcattaaagcatcctcttcaagcttcttatccaaggcaattcttggtggtgaagctccttctttcttggcttattccctagtggatggtgcctactctctcctctactactttgccttccgctgcatctctatggtgaaaaattaccattgaatgacctcattgaagctcacagatccagcttncatagaagctgcacaagcaagcttccattcagtagtggcaactcatatggaccgtgac

SEQ ID NO: 52781 - DNA, 477 bp, Glycine max
cgcgaagcacgcgagacgatttctcttccattgacgggttcctctcggtgtgggatttcaaaggagaaaaatggcggtttgtggtggctactactggctgtgggtgatggagaaaaagcttggcacattggaaatggttttggaagacaggaggagaaggaaatggcctcttttccaaggctacacaaaaagaaaaggctgaaacactcaagtgtttctgctcacaggaaaggaagatttcctcatacaccagacgttgtattgaagatcgcaacggtcagatcatggacatctatcctatgaacctccagaccagatttcatgaagatctaacggttaatgaaggcggtgaagcgttctaccgagacagttatgtagctccttgaaagcttattaaaggtttcttgaaagctttttgaaagctttctaagagcttcttgagagctacgcttaactctacaccctctatactaataa

SEQ ID NO: 52782 - DNA, 532 bp, Glycine max
  unsure (1)..(532): unsure at all n locations
aaaagttngaagaaanatgagatccctataaagacaaccaattgagttgctacatatttccaataaaactgtataacatgcatggtaatttctgctatttagcatgatgtagataagatcgaaaaggagaggaatataatctgagatttaaatgttagctagtctaggataaaatacttcaaagtataaagtgcaccanagcaataaccgaaaataattggttattctcgatcttgtcatcatttatgcatgtctttaatatagatatattgattatgtttgaagctaaaagttaagttaattaatagctaaaagttaaaaanataaattattaaattagaaatgtcgggtaaagctaatagttgaaaagtaaacaatgataaaaataatanaattaacatttattntaaaaagataattggaanaataataaatacacacggataaaatataaaatatanaaaatagagacatcgttcaacaaaaatacttagtagtattcaaaaattaaaatactaaatatatctaaata

SEQ ID NO: 52783 - DNA, 408 bp, Glycine max
ctcatcttgggggagaattgtctccttccatggtctattccctaggggatggcgcctcctctcacctcttctccttgggcttccgctgcatctttatggtgaaaatcaccattaatggacgtcattgaagctcatagatccagcctccatagaagccccacaagcaagtttccatcaagtggtaatcagagcacaagagcttcaagtaggtgctccttaaacctccattaatcttttttctttaccttctcttccattggtgattcttcattattctccatgtatctcctcacatttcttgttctaaatgttgttaacatgattctttatagtttccaccaattaaacttgctatagagactaatttgattttctatggttcaaatttgttcttgttcttgaaccatg

SEQ ID NO: 52784 - DNA, 341 bp, Glycine max
  unsure (1)..(341): unsure at all n locations
aatcacaacaacatattctataccttcacattaatcacatgttcataacaaaacatctcaagtacaacacaacatctctcacacacaattcattacccaccatcacgtagcaagtcacaatgatcattacacagacgttatgcaacatatatactaacacttcatcctatattgaatgtggtatcctgtcagngaaaaataacactagggcacctatgagtacataataaaatacaccacacaatgggtaagcaggtcactcttaataaaagaaatcataaggtgaatcaatatgggtattctggttagcgtgaatggctctaccatatgagatcaacata

SEQ ID NO: 52785 - DNA, 445 bp, Glycine max
  unsure (1)..(445): unsure at all n locations
ctaactaacttccactaatatatatattgactactcagaacgaagggatgagccttgantangtccatctatntctacctaataaactaattacacaaaacanagcccaaactcatagcctaatgattcaagtgcaaaggttatgatttccaagctgaatttgaccctcanaatggcatanatgccccaagcttaattgtgacaaaattgaattttttttcttatctttctagggactactcacatgcttcatttggagttttgtagtgttcttataggtcctgcacaaggcagataggtcaagtaagcacaaaaatccaaaaataagccacaagtatcaattaagctcaattatttgcctaagaccataactaagttaatataagaaaataagggtcanagagatgtcaattgagctaagaagaaatatanaatattaaacaat

SEQ ID NO: 52786 - DNA, 320 bp, Glycine max
  unsure (1)..(320): unsure at all n locations
gaaggaacaaacaagcctagaacctagtacctacacacttcaacaatgcctctgaatgagaagagaaaggcgaaggaattcttgcttaaataactacaacactgaacctgtgtcttgcaatgtctatgagaaagtaattaataaaacaattgcaatttgctaagagataaggagaaactatatcttataagatgtacatgtaactgcggcactaatgtacatgtgctaattttggatagtntttatataatcaaaataaaaactcgatactctatttatgataaccttttaatagaaaatgaggcatttaatctatactc

SEQ ID NO: 52787 - DNA, 182 bp, Glycine max
  unsure (1)..(182): unsure at all n locations
ctcaagaggcttctttgagaagctatattcttatctatccacacncctctattaactatattaacttgcttgaaaataattacgggtgagaataacacaccacataatcaaacatcagacataagtactactaatatatagatatatatatcaaggtgttacagcattgaccctgttggatg

SEQ ID NO: 52788 - DNA, 292 bp, Glycine max
  unsure (1)..(292): unsure at all n locations
taattatgagcagaggatagagtttcttggattaaggtccaagtgtctcctgcgagctactgaagttgagtaaatttgtctccccattttattcctctatcatttgctttaaacactttatttcatgaatactgagcataacagaatcacaatatgctttaacagttttgctaacaattgctaacaaagtgataatagtcctaacaatactagtagntataactaacttctagattattcttttggaagtgtagagaaacattcacacttcaagctntactcataatccttc

SEQ ID NO: 52789 - DNA, 389 bp, Glycine max
  unsure (1)..(389): unsure at all n locations
ttttatcagacggaacaactagancagagtccttgttacgatgatacattccatctgagatcttatgtggtaatcgaagtttcctgttcttataggctacaacaatcacacatgcaaagccagtgagcaagatagtgtgtgttttattctttacataaagcggagaagccaaatagaagaaaaaagtggacaagaacataanngctgctggaactacaaaacccaattttcacccaagatgatcttggatatatacaattccagtgaaggcaattatgactgatatctctgaccaagcatagtaccagctgaagaacatctccaaggccctttggttattgcggtaatctttctattcacctggtcagcaccaaaggctacggaacatg

SEQ ID NO: 52790 - DNA, 425 bp, Glycine max
  unsure (1)..(425): unsure at all n locations
tacacccacctattctcatcataaacacacacacactcaataagaaatgtcacgcgtatctcttattattaaagcgaagaagttctacaaagaaacttttccaccttttntgcatgcaaatcccacccaaatatttacataaatcacataacactaatatcgcaacgtgagatggcttcaagtatccatgcaaataaagaatattgattcttttttttcaatttcatgctccataagatattaattatgaaggatacttcttttaaggtaattatgaaggatacgtaatcccaatcatatatatagaaactctatgcattcttcaatcatgcatgcttatctcttaatatttctatgtatgcattaccacaagaacacataaaccttgtaccaacataaacatattcgtaatttttctcttaaaa

SEQ ID NO: 52791 - DNA, 385 bp, Glycine max
tttcttccatgtataaatatatagcctttattaaagagctgaaaattttcattaaagcagtaatatgtgttgttttaacaaaagatttactgaagtaaaagctgaatacaaaaaattaaactttctttatgataaaaaaataaaagtaattgtaaatattaataaatatgcaaaatatttttaaaaaatcgtaaaaaaactggtgtggttgtatatttttaattaaatgatttataataaaaaaatgagagcggaaacaaagtaggggtaatgagattcattactattcacaagcacaggtctactacaatgacaccgtacttgtttaagtgatttttcattaatcaatttgtgtgctgaagatgttgaaagtggaacgtttttt

SEQ ID NO: 52792 - DNA, 381 bp, Glycine max
  unsure (1)..(381): unsure at all n locations
gctcactacaagccttnatgaatttctgatatccctaccccttcgaattctggagcttcggacttgttttgggaatcagtgaggngggctctgcttcatatgataactcgatctgatggctatgcttcatgatgtattttgggccatacctgatgtacattgtatattggttaaatgttggacatgctgaatgaaatggtgtttctcacaggctatatagtaaaagataattgagaacaataatgaatccctggactttgtacgtagatggatcttcaatgacaaaagaatgatgaaactcttgcgtctactctctatgntcaaacattatctttacttctttcttttttcttaatatgaacatataccccattgctcctc

SEQ ID NO: 52793 - DNA, 293 bp, Glycine max
atattgctcccaatctcacttcactcctaacaatttataccattctacactcacggaaaattatagcaattatatacccgtgggatcggttcccaccatattcccgcgatcaaatagaaagaatttttgtaaaaaatataagattgacttagaaaataatgatgcaacataatttaactgtgattacatagttataacgcatggtcaaatcttaaacagaataatttgaaaatttaatgaccctatataaacttaacaccatgcaactgatctgttagatacagacatagaca

SEQ ID NO: 52794 - DNA, 260 bp, Glycine max
aacataataacaacctactctaatatgccatgagattgaagggttaaaatggagtgatcttaattttcctagaagtggcaagggtgctcttgtgataacgagaccccattctattgagtttaaggtctaacccacactcctagataaatgtgtttcaacatggcacttaacataagaaatcttgtgcattgacttaatcatgcaatacaacatcggttataagttactatgacaatcatatattaagactaacctgattg

SEQ ID NO: 52795 - DNA, 423 bp, Glycine max
  unsure (1)..(423): unsure at all n locations
atcatcactcaaaatgactctccattcatcctcccgatatggcaataagcgactgcntgcatgnttatgatcgaatggtaagtgcactaattataacaagtggaatcgtgttcaattctacataaaagcttacggcacctcactgatcgaaccaaatggctccggattcagtgggcaagatctaaagtgtatgttcttagtgacaatacaaagtataagatacatcacaggaggttgagatgcacatcattgaccctcatatattaatgtcgcgattctgcgttacaaaagaattaagacttggagatccctatgagntcttggtgaacagacgtgcgttgagtctctagttacctaagcttatgcatatatcgctgacatatagaattacaggaaagcaatcttatatcatgctgcagcaca

SEQ ID NO: 52796 - DNA, 193 bp, Glycine max
ctctactccatgatcaaaggaacaactgcttatgatgaactgctctcctagaccaattgcctacaaaactattgacgttattgatttgaccacgaccagacccgatattttgtctgttgttcaacatcttagccaattcatgtagtcgcctaagcaaactcattatgatggcgctgctcgtgtccttcaatat

SEQ ID NO: 52797 - DNA, 507 bp, Glycine max
  unsure (1)..(507): unsure at all n locations
cttttagaagctctatatttctaaacctctccaattgtttttaattnngatattatttatctatttgagatgtttctttgctatcttaagtattggtttcaattgaacttatttaacaaatacataattttaattcaattacgtctatatgatactttnttatattttatttaccataataattntaatctattaacaattatattntaataattatttttcagttgagtattcaatcaactcagcttcaagtacaaagatttatatcaacctaaacaatcctgattntgcaaagttcaagataggataaaatgaacttcgttcttttattnntattttatatacatttngtaacattcaacanacaaaatcattagtttattctaattcttcgatcgatgtagttaaaacattatannatttattctaaataactattttgtagaaaaaaatggaacaacatcaaataaaagaatatcttctctaagtctgctacattgatctaca

SEQ ID NO: 52798 - DNA, 447 bp, Glycine max
  unsure (1)..(447): unsure at all n locations
aactatgccgaggtatgattcatatgctatattaataatacaatccggntggagattgttaatgacctaatgtataattgatctttcaggttatcatggcaaccaaaatggcaactgttgataaagcagaagaacttcttgaaaagcttcgcagggcttcctgngatcctgcagtgcaaggtattgtgtatataagatgtgtttcttatgtgtatttgcattaggctttaaattgtatatatagtttctatttttttattagttatgtatggcgaaaatgcattgtatatgaattttgttttagtcccccaaattaaaaaaaataaaaaagaaagtccttttattagtccctcagattntaaaaaaaacaacacattnttattccctgatcactaaatttgaggcactgaaatgattntttcanaactggtttagtccctagacagt

SEQ ID NO: 52799 - DNA, 353 bp, Glycine max
  unsure (1)..(353): unsure at all n locations
acaagtgctagcaataggaggaccaaaatatgtggagctaagaaaaaggagggagatgcccatgtcgtaaccgcaactctcacatggccaaagtcccaacaaacccctcacaaccccacttaccaaaatctcccgcaccagtacaattactcagtcaatatnggatctcctccctgtctgacacccatccaatagagaattcccactaaaccacaaaggcctcccccacaaaatccatttcctgcatagccttgaccaattggaagatccaaccgcaacacaaacacaaacccaaggaggaacttcccatatagaaaacctgcggagttcaccccaataccgatgccttatac

SEQ ID NO: 52800 - DNA, 315 bp, Glycine max
  unsure (1)..(315): unsure at all n locations
ctacaagattgacttgtctattgagtataatgtaagtgccactctcaatgtgtctgatctatctctttttgatgcagatggaggagccttggatttgaggacaaatccttttcaagaaagagggagtgatgaggacataaccaaggaccatgaagcacttgaaggtcccatgaccagaggcagacttaaacaagcccaacacgtcatagagacaaggctggtcatttgtatagctgccattgatgatgattgaaggcccaagtgcaaaaagatgaaggcccanaggcagaggcactaccaagactactaattgtt

SEQ ID NO: 52801 - DNA, 307 bp, Glycine max
gtatactctcacactgtctcgttctaaatgtggttaacactgattctttaaagggttcacctattaaactcgctatagaagctagatttgagtttctatggttcaaattccttgtcctgttcttgaccatgaattgtgttgagttaggttcctttgagtattgcttgtagttttttgtggctgaacctacccataaattgtacaaaattgatgtggggagcctcaaatctaagtgactggccctttgtagttgcatagagtctgctagctgaactgccataaattctatggtgtgattattcttgtc

SEQ ID NO: 52802 - DNA, 376 bp, Glycine max
  unsure (1)..(376): unsure at all n locations
tcttgtatctgagatcacttataatagtgagaaaaatgtttccgtgaagaaaatccaagccgaggcgcttccgtaacactttcgtgactnttccgtgggagatttcgcgaagattntcaaccgttcttcgacgttcttcgttcgttcttcgtcattcttcggtcttcaaccggtaagttcccgaaatcgaacttttcaattcattctatgtacccttagtggtcctcattggtttcgcgtgcttntattttcatttcatctactttccatacccccttttgatgtgctttagtcatttatttaagtaattttctcgcctaatacaaaataaaataaatttccaccgatcattagtattgtaacatcctttaatttc

SEQ ID NO: 52803 - DNA, 292 bp, Glycine max
ctcttcttcatctatcgagtattagatgatgatgtgttcaagaagaattctgatgcaacattcgctaaggaggcatgggataagcttcaaacctctcacaaaggagaagacatagtaaagactgtgtgtctccaaactctaagagatgagtttaatatcttacatatgaaagagaccgagtccattacccaattatttcaagaatcctcattgttcaaatcaactaaaaagaagtggtgagaagttagaagacgcaagaattatggagaacatattacattcattatatccc

SEQ ID NO: 52804 - DNA, 332 bp, Glycine max
  unsure (1)..(332): unsure at all n locations
ntcttcttgcaattctaaggtacaagtganatacctaagatgttatatgtnctacttgtgcttttcctatctatcttacatcttgtnaagncataatctgaaaaccgaattaaactcaaggaggtacctttgggataccacaaaccaacattggttgtgcccttaaagttcttgataatccttttgacagtagttaaaatggaatatctctgggaattgtttcatatcttgtacataagcacacacttancatgatgtcgggtcgacttgttgtcaaatatangagagaaccaatcatacctctgtactttactcattaccaattacctttt

SEQ ID NO: 52805 - DNA, 313 bp, Glycine max
  unsure (1)..(313): unsure at all n locations
tgatactagcagctaaataaacaataataatcaatgctntgagggttattgttgtaggtttcatttcctcttcatattttacatgttgngtngatcttcttatttcaggaattacagaagatgttggatgtcttaaaacattcacattaattactatgtacacgatcttgtggtggaatttcttagtctcatggtgaatgagatgcaagacaacactttccttgtatcaatttctagttgactggcctcataggtttgtccctttgaactctanacatgtactttaatttagatgtcttcctcatattcaaaa

SEQ ID NO: 52806 - DNA, 193 bp, Glycine max
  unsure (1)..(193): unsure at all n locations
atgaagaacgtcgaagaacggtggaaacctttgcgagattcctcacggaatacgttacggaaacgtttcggaagcgcctcggcttagattttcttcacggaaacaatttttccaagcaaattcgaaagagagagaagtgcctaaggggctggaccctttccttcttcatttcctcccctatntatagcaaaat

SEQ ID NO: 52807 - DNA, 378 bp, Glycine max
  unsure (1)..(378): unsure at all n locations
cataaaaaccagcactataatatagacatgtgcaagtctcgttttcacaagttccataatgtacaccaatcaacaacagccacattatcgatttaaatacacagtaactgtatgatacaaacttctatgattatttaaatgatgatacatcaattatagtttagtggtaattacactcgtgtaaagtagatactgtacaagaatntctcgttaagtgaaaagctattaagaatgagttttgagttaaataataacgcaagtgttaccgatatgttntaatattatactaatgcattatataaataggacatcaacatgcctagtgagcatggaccctagtattaattaacgcaagttaaaaatagtctcaatctcaat

SEQ ID NO: 52808 - DNA, 509 bp, Glycine max
  unsure (1)..(509): unsure at all n locations
agcccttgtgcctctattaccgcacttanatactcagcctccaatcaaggtcatcattcgaaacataggggagtgtactgcatatatcatgcctataccttggttggatcttgaatttaagaattaaattgtcatcatcaaaaagggggagaatgttgaagccaaacctttgtctttgatggtttgatgatgaacgtgatgaattgatgaaaatgcgcttcttcagtttaattcaagaccatgatttcagaatacaagataccacatccagaagatcactagtattttatgaagggaattcctaattgaataaaaaatgttggcccagaaattaaacttaaaagtctttttcagagattactctatggtatcgatattagaggatgaatcgataccagtgcaaaaatggttacaacgctattanatttgattcaaatttagatgtgtattgataacaatatggtatcantacaacagtaataacgtttattcaatttgaactgtatcgt

SEQ ID NO: 52809 - DNA, 151 bp, Glycine max
gatctttcttcatctgttgctacgtctctacccattctcatccatttgcatgtttatttctttacgtttaacgccagatccgacaacaagtcccttgaaggtactaatacctgggacccgaccatcgatttcgagcaagaaacaaatcaaa

SEQ ID NO: 52810 - DNA, 402 bp, Glycine max
  unsure (1)..(402): unsure at all n locations
gcactctcacccatctacattacaagcctttcttctttctgaacacacatggtcattaattcattgatagaccatctatctntatgtgtgttgtaggaaatcttatatggcccatattcatgcggaagggtgttcaaaatgaaatgcactacgaaggactcacacatatcaacctctagtttcttaagttgagctgaaatatgtcgcattttcatgatgtactcacgcacacctttcacattggtgagccgaagagaagaanacttcatgatcaacgtgcttgctaaagtcttatctgaagtgatgaactggtcatcaatggccttaagcaagtctcggaccttttcatgctggtcaacagaaccacgtatcccagccgagatttagtcttaatgaacatca

SEQ ID NO: 52811 - DNA, 465 bp, Glycine max
  unsure (1)..(465): unsure at all n locations
ttctctacaattgcatcacctctcaatgagctggtgaagaagaatgtggcatttacctgtgatgaaaaacaagagcaagcctctgtttgatcttctcgaaggcctcttggcagccactgttccacaggaccgcctagttcttacgtaatagcttaaaaatgggttcacatgtaggggtgagttgcgagataaatctcgcgatataattcaacctgcccaaaaatacccgaacctgcttctccgtgcgtggttctagcatttcaaggatggccttcactntctcgggatctatctctatccctttctgacttacgataaatcctagcagcttccccgacctcaccccanaggtgcatttggttgcgtttagttttaattggtatttccgcaaccttccaaacagcttacgcagattgacaaggtgttcgtcctcagtccgagacttggaaatcatgtcatctacgt

SEQ ID NO: 52812 - DNA, 359 bp, Glycine max
  unsure (1)..(359): unsure at all n locations
gtgaagtgatggaagcccaaccctccattcgaggntcttgtctcttctgttatcaacatcactacacccgataacttatcgtagctttctctatatcctcaccaatcctgagtattgaattattaatatatcaatttccatgagtaaaaatcatttactaatactttctcagaagtcaagcatcctgaatactgaaagacagtaataatacggtaactacaccactnggacggtatgcaacattgttctacgaagacggacattatgatccaatttacaacgacttcagtcgtactgctcgctcaagttagagaatgatagacagaggaactccactctaaagcatttaagcatatacc

SEQ ID NO: 52813 - DNA, 562 bp, Glycine max
  unsure (1)..(562): unsure at all n locations
cgcgcnattgttgcgtccnctgtctctccgtgacactatanaatactcgagctgtcagacaccaattctagttgaagaaacacaggacttttatctgaattgngaaacgagaatgcacctaaatagaattccagtggtgacaatcttcaaatttgccagtatctgatatgtggaagtgtccacataagtgaagtgagcaaactgaacattgctgtggatcagatatataacctgagggaatggggaacagacacaccgttttccactccgttgtgatcctttgcagaggtgactttctgcattccttccacagtaaccaacttgacaccgcangcttgagagatgataccacccatcanaactcgtgtcctatcgtgcgatattgacacacacacacacacactaagtgttagtttttattcaccttgaaaatctagcgagaaacgggactgggcgtatcatacttgtctctcgttactttggagagggtgggtagtatctctgcacgcgacacctattaacgttgtgttgaatgaacactgaatggctgaatagggtgaan

SEQ ID NO: 52814 - DNA, 433 bp, Glycine max
  unsure (1)..(433): unsure at all n locations
ctacttcacatggacttgatggggcctatgcaagttgaaagccttggaggaaagaggtatgcctatgttgttgtggatgatttctccagatttacctgcgtcaactntatcagagagaaatcagacaccttcgaagtattcaaggagttgagtctaagacttcaaagagaaaaagactgtgtcatcaagagaatcaggagtgaccatggcagagagtttgaaaacagcaagtttactgaattctgcacatctgaaggcatcactcatgagttctctgcagccattacaccacaacaaaatggcatagttgaaaggaaaaacaggactttgcagagggctgtanggtcatgcttcatgccanagaacttnncctatatctcntggctgaagccatgaacacagcatgctacatccacaacagagtcacacttag

SEQ ID NO: 52815 - DNA, 314 bp, Glycine max
  unsure (1)..(314): unsure at all n locations
accctcagaagcaaaaaaagaagagaaggaaaatntccaatcaaaggaaaaaggagaaggaaaatttccaatcaaagaggaagcaaaaaaaggaaagaaggaaaatttccaatcaaaggaaaaagagaggaaaggaaattcccaatcaaagagtgggagaaagcaaaaagaaaagaaagaaaattcccaatcaaagaatgggagaaagaaanaaagagaaggagaagaaggaaagaaagctcatgatcaaggatcgaaagaaaacaaaagaaatgtgcagagaggtctttggaccagacaatatctgaacaata

SEQ ID NO: 52816 - DNA, 555 bp, Glycine max
  unsure (1)..(555): unsure at all n locations
ccatgtacctgctatacggcacttagatactaagcttccaaagtttaagttctttctcaaaactgtcctaagcatattttctcaagtcctattaacaacttccgtttgccatcggtttgtgggtgacaagtgggtgaaaataacaatttagtgcccaacttgctccacaaagtcctccaaaaatggcttaggaacttagagtccctatcactaacaatgctccttggccaaccatggagtctcacaatctcctttgaaaacaaatcagccacatgggaaagcatcatcaattttttacatggaataaaatgagccattttagaaaacctatcaacaaccacaaaaatggaatctctaccatttgcttgttttggcagccccaaaacaaaatccatggataaatcaatccaaggatactccngaantggcaatggagtatacaatccatgaggctttaccttagactntgccttttacatacaatgcaatggtcacannaattctgcacatcctttntcatatgaagcccataaaaatagtcttggtatggttctn

SEQ ID NO: 52817 - DNA, 539 bp, Glycine max
  unsure (1)..(539): unsure at all n locations
cggggcatgaatcctttgtantaactgacactntngantacataagccctggngaagaggtgaacagaaaaagaacttagagaagtgttttgtttgtttactcacttaacgcaacactcgtgcttagctccaagtcttcacgcgctaagcaagcacttgctcatgcttaacgcttaaacccctgactagtggatggatggtagcgctaaacgtgcttcgcggcgcttagcccacatacctctctggattttaatatctggtattgggcttagcgaagggaatgcgctagcgcaatttcctcttgatcgaggccggacccgaattcaaattatattaaaatgcagtaactaggaagtgatcctatgtcattttccaacaagcaatgatacaccaaatgttcataacagatagttcgataatgttactaatggcggggtgtttgtcattaacaccagtaatattaattgaaaattcagaataatacatttgttttcttgattcacaccagttctgtgctagtcccacagttatctgttacg

SEQ ID NO: 52818 - DNA, 511 bp, Glycine max
  unsure (1)..(511): unsure at all n locations
taggattatggnggatncatcacatgtggtactatgtggtggtctggcgatggtgcaaaacaattcttcacatccacaaatcacatataaacccaccattccctggtgcccaccttcaactgagctcacgtactcccacgtagcccttattctcggtcctctcaacgccgggtccccatcaatccttccaagcttccacaacatccacgtaatttcacattcaatcatcatgaactcacaaaacccagaanaacagaagcaaggcagaaaactctggccaaaacacaaaccaaaaacacaagctttcacatncaaaaaccccagtaacattctcttcgttccaatcgtaacacgtggatcgactacaaactttactggaagtctctagcacataagtctaaatcttgaccgttgggatctactagcanatgttcagaaacccatgtgtacttnccntttcacaaccacgcatacacaagcaattntctggacttaatacaaaatactgtgg

SEQ ID NO: 52819 - DNA, 544 bp, Glycine max
  unsure (1)..(544): unsure at all n locations
cctttgtacgtgcatgacgtgcacatagatactaagcttttatccacggctcatctggggtgaagctctttcttgtatatcttatttcttaanngatggcgccttctctcacctcttctgctttggcttccgctgcatctccatggtggaaaatcaccattaaaggacctccttggagctcaaagatccagccttcatagaaggcccacaagcaagctttcatcattatgcttgcaaaaacatatgtgtttggtacttcaatgggcaccggagtgaaaagttggaagtaaaccctactatcattgtgaataatcgatccattaggaaaaatgaaacccaacccttgagttgacaatcgtgactgctagcttctctttaaatgccatactttgtgtatcaattgggagagtatgtgaaagcaaataatgtgtgattaatagcgttgccgggctcatatatatacacgtctcaccgcntattgttactgtctttacaaagacacgcggacatgttcgtgttatgttcctctaaccatgcgagctan

SEQ ID NO: 52820 - DNA, 562 bp, Glycine max
  unsure (1)..(562): unsure at all n locations
nccggatttgacatcgtattacgtacgctatactatananaagtcaaccttatccagtggatgtttctatatacattcacgtctgtttgtttatagccgcctaattaagctctcagttaggcgaaagaagtatgactgctttaccaatagttgaaactcaatcgggagatgtttcagcttatattcctactaatgtaatttccattacagatggccaaatattcttatctgccgatctattcaatgctggaatcagacccgctattaatgtacgtatttccgcctccagagttggatcggcggctcaaattaaagccatgaaacaagtagctggtaaattaaaattggaattagcacaattcgcagaattagaagctngtgcccgattcgcttctgatctcgataaagctactcaaaatcaatgagcaagagggcaacgattgcgcgagttgcttacacaatccctatcacgctctcttaccgtggaagaacagataataactatttatactggaacgacatggtatcttgatcattacaaatagacaggtanggaattctn

SEQ ID NO: 52821 - DNA, 366 bp, Glycine max
  unsure (1)..(366): unsure at all n locations
atctgatcatcatgctctgataaatgcaaaaaaaaaaaactatggcaaatgaagagggtgagaatgagggagaagcccatgctgtgactgccattcctatacagccaagtttcccaccaacccaacaatgtcattactcagccaataaacaaaccttctccttacccaccgcccagttatcgacaaaggccatccctaaatcaaccacaaagtatgtctaccgcacttccaatgacgaacatcacctttagcacaatccanaaacacctgccaagaaatgagttttgcagcgaacaanaaaccctgtagaattcacccaaattccggtgtcctatgttgacttgctccatgtccactcgataatgc

SEQ ID NO: 52822 - DNA, 356 bp, Glycine max
  unsure (1)..(356): unsure at all n locations
cgtaatatatcgagacgctcgaaattgaatgttgaagctcgtagccaattcaaacgacaatatctttttactcggatgtctgattgacgcccgtaatatatcgagacgctcgacattgaatgttgaacctctgaacgaattcaaacgacaataactntttactcggatgtctgatagaggctcgtcatatatcgagacgctcgaacatgaatgttgatgctctgagctaattcaaacgacaataactttttactcggatgtctgattgagtcccgtcatatatcgagacgctcgaaattgaatgttgaagctctgagccaattcacacgacacataacttttactcggatgtctga

SEQ ID NO: 52823 - DNA, 321 bp, Glycine max
  unsure (1)..(321): unsure at all n locations
tctagccaaatggacttaccttgaattaattcctttgatattccttttgagccttggttccctttccttgntttgaagctcactacaagccttaagtgaaaaaccatgatattaccatatccttaaggaattttggagctttggaaattgtttgggaataaatgtggggggtttttgtttcattggacaacttgttttggtggctatgcttcatgatgtattctgggccatacttgatgtacattgtatattggttaaatggtggacatgctgaatgaaatgttgtttctcanaggctaaagagtaaaaaaaaaacaaaaa

SEQ ID NO: 52824 - DNA, 163 bp, Glycine max
  unsure (1)..(163): unsure at all n locations
ttttataanaattcctacttcatctcataaaaaaaaattcatttcatattagataaaatacatattcaataaattaggtaagtctcatgtcattaatcaagaaaacttatatttatattacaagtacaataaccacaaaataaaaaaagtaatttcaccctaa

SEQ ID NO: 52825 - DNA, 383 bp, Glycine max
  unsure (1)..(383): unsure at all n locations
tagatcaggcatccgagtcaaacgttatggttgtntttatatgcatgggcattccatttcaacttttaatcgtcatgatatattacgggcctcaatcggacatgcgagtcaaaactttagcccgtcagaattcacccgagtcttccatgttaaattttgagcgtcgcgataggttacttggcttattcgaagatccggaggaaaagttatggccgtttgtatttgcgatgggcttcaattttatcctaagagcatctcgatatattatgagcttcaatcgggaatccgagccaaacgttatggctgtccgaattagcgtggtcagaccatntctactttcgagggcgatgatatattatgggcctccatcggacatgcgagtc

SEQ ID NO: 52826 - DNA, 365 bp, Glycine max
  unsure (1)..(365): unsure at all n locations
tatcaacatcaaacttggagaaagagttcttggtgtcaagacatgagaagcaatcaagtataatgttacttccttcactaaagcggggatccatctccacacatattttatcaatagcaacataaaaaatctctgcacgggaatgatgaagattagtgatagtcctcccttctgctcttgaacgaccccgaactggtatttcgtcatccatatttggtaccagaatacttttagcaacacaaaatccttggacatcggcaaaaaaattattccagccactctctctcattgtgcccaaccgagctntgacaacatcaactaattccatgacattcacaatattaagatcttttctttgcaatata

SEQ ID NO: 52827 - DNA, 283 bp, Glycine max
agatgagaaacaataaagtgtggtgtttcggacctctatcatttactaacaaggatcatttggataaggctgaaaagagtaaaaggcttcaattgacttgttccacctcaagtgttggattgattgtcaaaagcccaggactataatatatgcatgccttggaagcatatgtaatttaacacaagaacagttgatagaacttggtttagccttggaagcataaataaaaaacccttcatttgggttatcagggaagaaaatcagttagaagccctggagaaat

SEQ ID NO: 52828 - DNA, 340 bp, Glycine max
  unsure (1)..(340): unsure at all n locations
gaattaatcttgaagcaatgcttaacctttgaattaatcttgaagtaatgcttaacatttaaatgtttgttgaagtaaccttgtaagcaaccttgtttgattctactttggcatcatcaaaaccctgtattcatacattcacattctccccctttttggtgatgacaatcattatcaagtgaattctttttggacatcgttaaaacctgcatgattcacaagaatgtttcattggaatcatcataaccaagtttttgatgaaatccctttgctacaagtcaaacaattatactntgtggtagtgccatcannggtttactttaccctanacacccattta

SEQ ID NO: 52829 - DNA, 441 bp, Glycine max
  unsure (1)..(441): unsure at all n locations
tcttctctattaaaaaatagagctatttgtagtcaacatattcacagctaatatgctgtattgctgttcactgccccatattctatcgtagatttaaataaaaatttatagcaggctgtagaattttattttattttcaccaaaataactataatcaactcgaactaaaaaatactaaaagataatggactgtagtacattaagataatcgtattaaatgttgatattgcatattgngtcatggtgatctatggtctatcacaactctgggtgcccctggacacatgtcaggataagaatttaaanaaggcattgatgggtagaggatntcattcacaagagaatcacgacgagaaatgtacctctcaagcatgtgagaagacctgattgataactgaatactggcaatctcacataaatcacatgagctcaacttcacac

SEQ ID NO: 52830 - DNA, 415 bp, Glycine max
  unsure (1)..(415): unsure at all n locations
ctcttctccgaatttccaccgtgatagcctgaccataatccccactggtagaaacaaaatatcaagaaatgtgacactaaaaaatatataatatctatcagtgctgagaacagcagcaaaactttatcaaaccccaacctttcatatcaatattgtcctaaaaaagacccanaatcaatcacttaattctttgcacctcatccttaggcaacttgaatctctcaggtaaagtctacatacctgagttatgaattcaatgggtgtaatgcatcttttntaaacttaattatannatttagctcctgcatgaatccatattatagcaattaaacctgcaggatgacctgtgattattcatgaatggaaatgtctaagacacagatacaacagaaataaaatcagctacaacctgaaa

SEQ ID NO: 52831 - DNA, 285 bp, Glycine max
gcataaattattgcttcaatggacagtagtgttcatttttacatgctccttgatgccaagataggagacagccgaagacaagtagagaggttttaattgataaatgactaaatgagtctacttattaataagaattaaagagcagttacacaaactttggatacatatgaaggagacaaacttcatttgtcatatcaagacatgtggtacactaattacatggtcatccaaaacagaatgtagaccaatccatattaattaactagtatgagtagttctaatata

SEQ ID NO: 52832 - DNA, 415 bp, Glycine max
  unsure (1)..(415): unsure at all n locations
ccactaaccttcattaacagactaacagagacatgtcttcaacatagtttgatgttgtatttgcacttatgttaatttttaagctcaatgaattaggtgtacttgtattgaaattgaactaagactcctcgtttgtttatgtgaaagatgtcaagctggcaggaattgtgcatgtggaatcaattatgaagactcacgaagcctcttatggttactgctctagtgctctatcacaataaacaagcaaggagcagttcttaacaatattaattatcttaaggtgacatactcaatacaagtacaccttgtccaagtgtactgtgcttgtgctaataaataaataacaagcatggctaactttacttgtttgtatcagtntcatcgtttgatcagagaatgatgataaattacatta

SEQ ID NO: 52833 - DNA, 330 bp, Glycine max
  unsure (1)..(330): unsure at all n locations
ttttcggttgcgtcccctatctcaacacttttgtaggacattgggatgcaatatgaccctttcccaaacacttaaagcatttaatggaactagttnttattgggagggggttgagtangagaagtangattacctcttgaagacctccattcaagatgttgtgaagaagaaccctccttcttggaagtgtctttatccttccaagatgaataagtgtatgaagtcttcttgtacgtttggttcctcttcaatagttgctccactttcatagccctatgtataagttcatccattttgggtgatctttaaagctctacaacatcttgagtg

SEQ ID NO: 52834 - DNA, 434 bp, Glycine max
  unsure (1)..(434): unsure at all n locations
ctatgctgcanacatttataatagaaccccttcagtactcattccaacaacagtagaataattatgatctttcaagcaacagatgcaatccaggttggaggaatcatccaaatctgagatggacaagtcccccacaacaacaacagcctgtcccttccttccagaatgctgctggtctaagcaagccatacattcctcctccaatgcaacaacaacaacagcaacaaaaaagacaacaagcaactaaggctcatcctcaaccttccttagaatagttagtgaggcagatgaccatccaaaacatgcaatttcagcaagagacaagagcctccattcagagtttggcaaatcagatggggcagatggctactcagttgaaccaagctcagtcacaaaattctgacaaattgccttcacaaacagtgcagaatctg

SEQ ID NO: 52835 - DNA, 344 bp, Glycine max
  unsure (1)..(344): unsure at all n locations
gataatgcttatcttaacgcacaaaatgtcatgctaatccctccggtttagaacgaactcatgcgcacgtttaaagtaacacatttatgcacatgcgtatgtgtggaatatcctactatcaacatagaggccatccaacacattctaattgtcatacatatatgcatttgaaaagaacatacattctcacgcccaaggcattgtgtcaaaactcacacttaatttatatcctaaacacttgctatttacaaactacctacatatgtttgaaatatatatcatacaaacttttattggttcactcacatttattcatattggcgnagctattacattatgcacac

SEQ ID NO: 52836 - DNA, 403 bp, Glycine max
  unsure (1)..(403): unsure at all n locations
tgtagaatggctagacataataatggcggggtttggtttgtttcaaggataaaagggatgccccacattatttccatgacacaaatgcaaagatgatgatttggaaattntatgcaaaactggtcatgcatgcacctatgcggacactcaagtgtcaaatttttatggtcatgtgatgctagggctcangattcatttcctctattttaaatcaacccaatgtttccaaaatatgttcttttatcaatttgttcattcatccgagtccattntgggtactcgagaaaatntcacagcattcacccttcaggtgtacgtacattntttttttccaaaaactagctatgatcaacgaatntttctttaaagaagaagtggaagtcatctcttttcacaagcatgt

SEQ ID NO: 52837 - DNA, 386 bp, Glycine max
  unsure (1)..(386): unsure at all n locations
ntaggtaggtatgaaagtgctctgagactcggtgtgtctttttcttttgacttgactccttttagcgtgctcttctcgcttagtgcaggtgcctggttttgcgcttagtgcgcgtcttgggctgagcctgatgttgaaatcttcatcttttntcacattctctgcatctttttgcttttaatccctccaacttttatatctgcaagccgtaaacagaaaaccatcaattcctaccaattaagcatggataactgctaaataattatttntaaagatatgttaactctatttttattatcaaaaacaacatttattaagcagctatcacgcctttaggcagtgaggaagttagcaccacaaagagctatcctagtgattgctatttt

SEQ ID NO: 52838 - DNA, 553 bp, Glycine max
  unsure (1)..(553): unsure at all n locations
agtttgttcctgctattactgacctatgatactaagctttaccaaagaagaatgtggtggtctactataccagagtttatgatgtcangangaactcgagagatgccactangatgaggagttgactgattttgctgacggcaacatcgatgttgctattgtgaaggaattctttcttaacctctatgaccccaaggacaaatcacctaagcaggtgagggtgagaggtcatcaaattaagtttgatgaggatactctcaacacattctttgagaccctntgttgtgtggaagaaggggaaacactttgtgcatattccagatttgcactcttgaggcctgacccttangagttagctgctaagctctgtatcctacggaggggattcgagcttaatgctgatggttatccgttgaaaatattgaggaagaacatgaccaccctagcttagacatggagtgttcttttcttctcttacctgattccctacctccatacttctgatatcaccatagacagagccaaactcatttatggcatcatcatgaagatg

SEQ ID NO: 52839 - DNA, 501 bp, Glycine max
  unsure (1)..(501): unsure at all n locations
ntctnncactaagtgcctaatgcctaaaatgtcttttcttatggtngtggtcctagatgcagggaagaatttctccaagaacaccctcttaaggtcatcccaactggtaatggacctgggagcaaggtaatacaaccaatctttcgccactcccttcagagaatgaggaaaagcttttagaaagatatgatctttctggacatcangggggttcatggtgggacagacaatatggaacttcttaagatgcttatgaggatcttcacctgccagaccatgaaacttgggcagcaaatgtattagtccagtcttgagaacatatggaacatcctcatcangatattgaatgcacaagctntcatatatgaaatcaggtgcagcccatctcctaagagtctctcatgaggtggaggtgagccatttctcagtatgaaaatagtantcgatgctcaaatcgaatgtcaaatcaccacaccgatactcgaatgctaaatgacaaag

SEQ ID NO: 52840 - DNA, 316 bp, Glycine max
atgcataagctttaattctagatgtgtgctttgatgcataagcataatgcaatcattctatgtctagcaatgattttattatgatatcttttccttttagttctattagaagttatcctctgtcgagcatctaacccctaaaactgatgcatgcataccttcattatattcttattaaggattaccctctgtcgaacatctaaccccttaaacaatgtaaagatgagtaatgcatgaaattaaaataggaaaagataataggatagcaaacacttggtgcattgataaatatgaagtacatcatacatctgttagc

SEQ ID NO: 52841 - DNA, 279 bp, Glycine max
atcagctcaacgaaaggactggttttcagaaaatatttttctaaggtattttttaatcatttttccatgaaattgaaacccttatggtatgcattcaaagaatggctgatatactcctatgtacagattatatagcaaggtccaaatgatttaaatgcctaaaaaaaataaagataacaaaatttaaaattgggttgccttccaggaagcgcttctttaacgtcattagcttgacgcttttacctcactgggtgatcttatgttttggttcctactttc

SEQ ID NO: 52842 - DNA, 166 bp, Glycine max
ccttagatttgaatcatagtgatgtatggggtccagccccaatcttgtctccatctaatttcaagtactacgttcactttattgatgatttcatcagattcacttggatttttcccttgaaacaaaaatcagaaacaataacggcttttattcaattcaaaaacat

SEQ ID NO: 52843 - DNA, 326 bp, Glycine max
tgatttgagcaagattggatgaggcgaagtgtgattttcgaaatctgcacttatgcagaattttgctgtcaaaataggtgcagcaagatattagcttggtgcagaaaatgcttgtgtgtggttggctgtggaaagagtaatgtaaaatgagttctggatgtttgctagtagatcccaacggtcacaatgtaggcttatgcactatagacttccagtaaaattttggagtcgatccaacggttaacgaattggatcgaaggaaatggtactgtggtctttaagtgagacaagctgtgattctggttgatgtgttgagcagaagtttc

SEQ ID NO: 52844 - DNA, 435 bp, Glycine max
  unsure (1)..(435): unsure at all n locations
aaatgtgttgaccttgaattctattatttttctgttgcttttgttcaattgctntctaacattaatactagttgttggaaatttctagtttggtatacaaatttctactcttactagntatggntactttggatngtgtggttgactataaatttttcgattaaagtccttgtttgttaaaattatgaaatagtcaggaaaatgttcatggtgttgagaaattngtctaactctagaataaatgctaaacttatactttctcacactantttatcaacanatcttttactattagatggacctcacatactgtaagtcctactacacaatanatgaaaacaaataagaaatgaaaagttagtggacttcccttcatttttctctaatanagatattaatgcgactgtagaattngtactttcatanttatatttt

SEQ ID NO: 52845 - DNA, 439 bp, Glycine max
  unsure (1)..(439): unsure at all n locations
caatacgagcgtctcgatgtactacgcgactctttctaacatccgagtaaaaatttattgtcgtttgaatntgctcagagcttctgttttcaatttcgagcttctcgatattttacgggactcaattgggtattggagttaaaagttattggttgttgcatttgctacgagcttctattttcaatttcgagcgtctcgatatactttaggactcaatcggacatcgagtaaaaagttattatggtttgaatttccaacgagcttccgtgttgaattacgagggtctcgatatatcatgggaatcaatcggacattcgagttaaaatttattggtgtttgaattttctacgagcttccgttttcaattacgagcgtctcgatatactacgggacttaatcggacatactgaggaaaatgtattaccgtttgaatttccac

SEQ ID NO: 52846 - DNA, 323 bp, Glycine max
  unsure (1)..(323): unsure at all n locations
tcttgaagctggaatgatatatgccatctctgaaagttcatggtttatccttgtgcaagtagaccccaaaaaaggttgaataacagtgataaaaaaaatgacaacaattagttgattcctacaaggatcatggccagccggagaatgtgtattgattacctccttcttaacaatgcaacaaggaaatagcactttcctcttcccttcatggatcaaatgcttgagaggttagccagtcaagccttctattgctatctatatggatactcggggtataatcaaattcttgttaagttaggggatctagagaaanaacacttcac

SEQ ID NO: 52847 - DNA, 404 bp, Glycine max
  unsure (1)..(404): unsure at all n locations
cttggaatggagaccagctgcacactgtttattcatatgttgatgcattataagcctagcatgtcactactantgttctgcaaaaagtttccaccaactccttctttttggttcctattgctgctgattctgctgagcaatgcttcagctaatggtgtcaaacaaaaggcaatcaatatcttctcctcattcattccttctccgcttgtgtatttatatacacacatagagagagtgtatataaagtgagaggaatatttgtatgagagtgggagagaagtaaatctaaaccatataatcatacatgattaattaggattaacagttactattaattacatgaccacttacaacagattcataactctgtgaattagtcctaaccattcatgtatgatagtatg

SEQ ID NO: 52848 - DNA, 487 bp, Glycine max
  unsure (1)..(487): unsure at all n locations
ngccatttagtaatgaaatcgaatgaatatagtaacttacttattcccaagaactgcatgtaaattgatgatgagttgctcttcttcctcagagaattttcctcttttgatatcaggcctcaaatagttagtccatcttagcctgcaactcttcccacacctgttcaaccctgcatgttttggaagtgctctccaactcccatgcccatgtttctgaatataatccaccaatattctatcctcttctggngtccaaggccccttcttcaaaccattttcatcactgcatggagttctccccatcatcactcactgcataaacatgttagaaattaaatacttctagtataataagaattagttngattcanggtgcagcatgacaacaaaagagggcaaaagaaatcataccttnggattgagtgtatgaagtggagaatgaagatatatatatagacttagaagaatactctgtggaagttgatat

SEQ ID NO: 52849 - DNA, 506 bp, Glycine max
  unsure (1)..(506): unsure at all n locations
ntgtgatttaattttcaccgacgaatggaataaagtatgtattgaaagaggcaaatttaatcatcttgcttggacgaatgagaaaagtggggcaaatgaagagggtgagaatgagggagaaacccatgctgtgactggcattcctatacggccaaagttcccacctacccaacaatgtcattactcagccaataacaacccttcttcttacccaccacctatttatccacaaagatcatctctaaatcaaccacaaaacccacctaccacacaaccaatgctaaacaccacctttagcatgacccaaaacaccaacgaaggaaggaatttngcagcanaaaaaacctattgaattcaccccaattccgatgtcctacgctaactttgctccatatctacttgataattcaatggtagccataaccccagccaagggtcatcaacctcattttctgagatacgactcgngcgtccatttagcatganggccctaagcgtaggtgcan

SEQ ID NO: 52850 - DNA, 369 bp, Glycine max
tatatcgagacgctcgaaattgaatggtgaagctctgagccaattcaaacgaccataactttttactcggatggctgattgactctcgtcacacatcgagacgctcgaaattgaatgttgaagctttgagcccattcaaacgacaataactttttactcggacgtctgattgagtcctgtcatatatcgggacactcgaaattgaatgttgatgctgtgagccaattcaaacgacaataactttttactcggatgtcttgatgagtcctatcatatatcgagacgcctcgaaatgaatgttgaatctctgagccaatccaaacgacaataactttttactcggatgtctgattgagtcccgcatatatc

SEQ ID NO: 52851 - DNA, 378 bp, Glycine max
  unsure (1)..(378): unsure at all n locations
ttcttcattctgaagttaataaaaacctatttattttcaaaaagggtttaaaactatttgaaatcacaattcaatccccccttcttgtggtatgtttgtcacttcatcatcatgcttttggataacctcttaaagctataaaaagaccattgaagtggggtccactcaattgacaaacttttagaggaagtagacagagatgacaggtgtcatgaaataacagctagcagagttattctgaggtggntattcaaaggttcccattttgatgaaccttctgatattagctgaggatccatactngaagtagatccttttgatgaatatcaacaantatgtntntntgaagtagcataacttcatcaatcttaacacatc

SEQ ID NO: 52852 - DNA, 410 bp, Glycine max
  unsure (1)..(410): unsure at all n locations
atttctgatagagtgaattacctcatgtgatgataatattttatccctactatatatgtaggggacaaaaatgcgttgagtanggctgattaatttcaccataaccaatcttaaccttgaagccaacaccttagtaaaagctttgtaggacacattgcatagattgatcagtttcaattgagacaaaacactaacttcatcaaccttaggaatgagagtgatcagaagtttattaagagaattaatgtcagcagggtgcctaaacaaaccttttataagactgcanagaatagaacccaccaacttccattgagtcgggtagaacaaagccttgaaaccatcctctcttggagctntgaaaactctcgtattgagataacattcttcacctccccatcagtgattccact

SEQ ID NO: 52853 - DNA, 302 bp, Glycine max
gaactgcatgtaaattgatgatgagttgctcttcttcctcagagaattttcctcttttgatatcaagcctcaaatagttagtccatcttagcctgcaacttcttccacacctggtcaaccctgcatgttttggaagtgctctccaactcccatgcccatgtttctgaatataatccaccaatattctatcctcttctggggtccaaggccccttcttcaaaccattttcatcactgcatggagttcttcccatcatcactcactgcataaacatgttagaaattaaatacttctagtataat

SEQ ID NO: 52854 - DNA, 263 bp, Glycine max
cctcatcaaaagtaaccttaattccatgcctaataagcacctgctgcgaaaaattctggtaatataagcagcctcaacgcttcacgaatgagcagagttaatgtcatccttcgactcaagcaatggctcctgcgaggtctcgtgaacagagagcaaatcaagctgcgacccatcgcgcttatcgaagaagagcttattccccacacgctgaacgacaatgtcccacgaataaacagacctgtgagcacacatgagagtggaga

SEQ ID NO: 52855 - DNA, 319 bp, Glycine max
tacctggagatatgttgcgggggtcaagagaccttcgggacgtcatgtggagtgctattgcccaaaaccaagcttgaccaatcccgacccaacccgggcatagtcggtcagtgagaacctgtgatgtacctaagcaggcgagctcctggcagtcaacagatgaaaggaacaaagaccacaaagcaaggaggcttgtggtggctggccagctgtgaactttgattgatatgtgggttatggcctctggtaatcgattaccaagggtgggtaatcgattacaaggcttaaaaatgaagacagggcgctaagatggtctctg

SEQ ID NO: 52856 - DNA, 439 bp, Glycine max
  unsure (1)..(439): unsure at all n locations
tcgtgtatggaccaaatcanaattggtcagtttagctcaatgtaaaaccaaacccgtcaactactaatgcttctcgtcattattgcttttagaagacaagaacaattccgaagaatgttaaggtggtgtttntagacaaatctttggttgttaattaaattatctccccatatttaagaataatattntaaagaacatttataaaatatatttggatgttattaattttttaagaatattatataaatttaactaatatttaaaaataaaatagtaagcattttatttattatataacataaattaaatagattaattgaatattaagacaaaaattatagaanaaactattngaatcaagacacataatctttattaatatgatatattaaaacatccttaagatagaataactgagaatataataatcttatatttc

SEQ ID NO: 52857 - DNA, 377 bp, Glycine max
gcttgtggagcttctatggaggctggatcttgtgctttattatgtcctttaatggcggctctccaccatggagatgcgagccgaagacatacgagaagatgtgagaggaagcgccatccactatggaataagccatggaagaaggagtttcaccaccaagatgagccttggattagaagcttggagaggatgctccaatggaggaaaagaaagagggagagaaagagagtggggggagcacgaaattgaaggaagaataaaaagggagagaaggtgaactttgagttgtgtctcacaagactctcattcatcaaagttacaacaagtgttacacatacccctatttatagactacgtagcttcatgagaagctttct

SEQ ID NO: 52858 - DNA, 306 bp, Glycine max
  unsure (1)..(306): unsure at all n locations
attacctatacttatcaaagaagactccttacactccatagtacccataaatcggaagagattgatacagcttacacacctgttatacataaagagcagtcgtgttcatcgactaacagatggcgggaggtttgcgtgcaacatattcaaattcctagcatcatatgcaccaccttgtgaagatgacggcatctgccttgagtgactggcaattataaccactgcatactaccttggttgcacatagagacccccactatgcaggtcgcagtactctttatgcaacttncacatgacatagtctac

SEQ ID NO: 52859 - DNA, 319 bp, Glycine max
taatatttgaagagtatccctgtggaaccttcacccgacgaagacactgacaaaaacttatcttcttctttttggacaaaatatggcaagctgggggcaagtaaattttcttcccatcagacattggatgcaactgtgatcgtatgcccatatcaactagatcttgacgggtattcaagccatccttcgtcttgccttgaatgttaaggagcgtcccaatcacactgtcataaacatttttctcgacatgcataacatcaatacaatgtctaacgtcaagatcagaccaatacggaagatcaaagaaaatggacctctt

SEQ ID NO: 52860 - DNA, 237 bp, Glycine max
ggaaaaaggactatattcctattctctaacatcaatggatccactcataccatgaaaatcggtaagaaactcacactctgattaatgataggacatgtcaaaaattcagattctgccttcattatggactgtatcaactcgcgttgagctggttggaaaccaattttaccagccaccgacgtaaaaaaaattcttagcgcggggtagaaatagattgaggttaactatatatttgct

SEQ ID NO: 52861 - DNA, 165 bp, Glycine max
ccatctcgtttaaacgatgaaatcagacgactggaccctaaaaaacacggctctatgccattacgaatctgcaccgatacggagatctgtatctgtgaccagcctcgaaactttaaaagctcatggcattcctgttggtgaatttatccgcttgatacactcttg

SEQ ID NO: 52862 - DNA, 531 bp, Glycine max
  unsure (1)..(531): unsure at all n locations
cccatttgcgtcgctttacggcactatagatctcaagcttcatatggatctaagccacactaccagaatatatatttcctccttcagaatatttctaatttgagactcttgaggactggttcaccatgtctagtacctaactacctatctttcaatcaaataaatggtaacattaatacctttgattagaattgcttcagaatcatgagaaatcccactttacttccatgacttaatgtattagaaaagtgcaaactcttttcattctattaccttgccaattggacacagctccaggtcatcagctttgggaacttcaagtttcagcttgttagaccatgggtgacttgcacaacggaggaacangaaatagttagcaagagcggccagagcttagcatgaaatatcanatgtgtagtagaagcaccactctacatcatgatgaatggtatagataatacttataatgcaaatangggtcgaatcccgcacaacagagtacatttgatcttgcttataagatgatagaaa

SEQ ID NO: 52863 - DNA, 449 bp, Glycine max
  unsure (1)..(449): unsure at all n locations
aaatagaggaagaaagagaanagagggtagttcactgataccaaaatggtcattggtcgttaggtctgaccgtctgaatattatcacatgaataaggaaaagtgaaaaagtatcatttttctttcggaagggttatgacttcaacaatcctaaaagatctggctttattataatctgatctaataaaaagaaagtatatgtcatcaatctttaaaataattttaatttgtgtgagcttcaattaaaacatatgatatcgttctcgtaaatttaaacgtatacagcgcgttctatttcttttcccacgcagaagaatggccatatcaattatcaaccatcatcttttatttgtacttttctactggcacatatttctgataaaaaatcacccaagaaatatatagtatattttctttacttctgcggcctcctctcgcgggcacttctat

SEQ ID NO: 52864 - DNA, 314 bp, Glycine max
  unsure (1)..(314): unsure at all n locations
cttaaaaagaagtgttctagcaaacagaccacactgggaacgggcacttcttttactcaggaatttgcaaccgtgatgagttcaagggggtgaatcgtgaaacaagttcctcattttaaatgtgtagaagaaaatctttatccttatagataaaacgtattntattctttaaaaagntgataatgtatgtaagtggttttctttctaaaaatcaccgcattgaataaaaatatatattcttttggttattcataagttaaatgaacaacaaataagtaaatatgatgcaatactcaaaaagctatttatcatat

SEQ ID NO: 52865 - DNA, 258 bp, Glycine max
ggcgatggcgcaaatcaactcttccacttccacaaatcaaacatgaacccaccatccccaggtgcccaccttcaactgagctcacatacttctacgtagcccttatcctcggtcctctcaacaccgggtccccataaacccttccaagcttccacaatatccaagcaattaaattccaattaccatgaaactaccctaaaccaagaaaactaggcagaggcagaaaactctggccaaaacacattccaataccacaac

SEQ ID NO: 52866 - DNA, 179 bp, Glycine max
ggtcaatttcgagcctctcgacatattatgcacccgaatcggacatctgtgtgaaaagtcatgatcatttgaatttctcgagagattccgatgtttaatttcgagcgtatcgatatattataaccctgaatcggacctcagtgtgaaaaggtatgaccatttgaatttgacgagagctt

SEQ ID NO: 52867 - DNA, 387 bp, Glycine max
  unsure (1)..(387): unsure at all n locations
tccactcaattcataaaatttctcattcaaatcaatcacaacacttcatttcatacgaaatcaaaccactaaatcatattcaatcaattcactattcaatcatgcttttgtacaagctactactacaaacaaaataactgaaatttaaagactaatatctatataattgaaacataaacataaaataaactaaaatagaataataataaacttctcaaaatgcaagacaagaagataacaatcctgtcaatcctcctgtgggtgatcctttgcatgctcgttaagatccaacaccggagcagctagtggatcctgaacaatangctgctctggctccgatgctggcacagatggctgagaatcatcaataactagtgctggagagaa

SEQ ID NO: 52868 - DNA, 314 bp, Glycine max
  unsure (1)..(314): unsure at all n locations
tcctttgtctacagngaccaccgtgcattcatagagtttgagcttgtctctntattttccgaacatattagatgggatccatctattgtcatacaccgactagaaaggattgtacggtagtttgggtatgtgcagaccattcatccacaccatgttgctccttctctatgtataaaagacattgatgatagatggattcagttttctgaatacattgcatcggtgggttagatatgtgttacgcctggacagtgtttagcagactacatggaatggttctacatgatatctcatcccttcatgagtctaacaca

SEQ ID NO: 52869 - DNA, 473 bp, Glycine max
  unsure (1)..(473): unsure at all n locations
gagttctacactactctagagttctctaggacgttctataaaattctacacttttctagaaagctctagaattttctagaacctctccaattaaggagggatcccaacaaaaagggggcacgttgtcacgtcattcgtgcattntagacgaaaatttgtttcataataaaaagcatttccctttttatttttcaattaagaattatntataaaaagatatccatgccatccacgtttaaaattcgtgcatttcttgctgttntgtttcgtatcaagtagcagtgctcatagtgtangtatgtggtgatctctgttactaaaatgtggtgcgatgaagtgaaataatggtttggcattgcgcagttctattttgtacatgattacataacanaacagcacaaaatgcacgaatttgtaatgagatgactatctttttttattaataatcttaattgaaaataaaattaaataaa

SEQ ID NO: 52870 - DNA, 366 bp, Glycine max
  unsure (1)..(366): unsure at all n locations
cttacagcagccttttatccctcttccattcccacctagagaaattccaaacaaaaagatggaagaagcggaaaaggagatcttggagaccttcangaaagtagaggtgaacatacctctgctagatgccatcaagcaaattccatgatatgccaagtttctaaaggagttgtgcacccacaaaaggaagctcataggaaatgaaaggattagcatgggcaaaaatgtgtcagcattgataggtaaatatattcctcacattcctgagaaatttaaggacccaggtactttctgtataccttgcattattgggaacaataaatttgagaatgccatgctagatctaggagcatcagttagtggcat

SEQ ID NO: 52871 - DNA, 217 bp, Glycine max
  unsure (1)..(217): unsure at all n locations
catgaatgcagattaatctcgtgtagcatttgattgagtattattttctggcattatataataattatgcttagatcaataaaagaataaaagtgattgatcaaggaataatcttgggttaggttaggtccagtgttatgtaattcaaagaatgcttgaatatgtttctcgtccaatactatacctggttcatgatttcagntnttaattatttttt

SEQ ID NO: 52872 - DNA, 275 bp, Glycine max
aatgggaaatatctttcttggaaattccacttaattaatgagaattgaaacacctttttggcagagaaattacctattcttgaaagcagcatagttctcaaaaaggaaaatatctgcatactttggatctggttgtgcaattttttctaaagttggcaacattatgctaacctggtaagcgacattcccgccagtaatattacgggtaaaactacgtagtaaatggaaagaaacaattaaggacttatttcctcttatgtgggttacagacaaaa

SEQ ID NO: 52873 - DNA, 457 bp, Glycine max
  unsure (1)..(457): unsure at all n locations
agtatgtctcatatagttaaccgaatacaagcttatcataatcgattacatagntggttttgagacaacaactaatttattcaggagtctctactttaatcaatatcgattgctcctctttctataagtgtttaagaagtatacaagaagactttaatcgattactttgaggatctaattgattacattgttcttgagttggttccaatttttgggaagaatactttaatcaattgaaaagataatctaattgattagttcattgaaataatcaattacattgtagatttaatcgattacaggcagntataattattttctttataaataagtaccttttgttctcttcaaaatacaatgaaatgaacttctgagtgagctcgagtcacgtgtngatattatntaaagaaataagagaagaaaaatgcttagaaataatgactcaccacttctaatc

SEQ ID NO: 52874 - DNA, 210 bp, Glycine max
gagaagtggaactttgaagtatgtctcacaagactctcattcatcaaagttacaaccagtgttacacatgcttctatttatagactaggtagcttccttgataagctttcttgagaaaacttccttgagaagcttctttgaaaaaacttccttgagaagctagagcttagctacacacacccctctcataactaagctcacctccttgag

SEQ ID NO: 52875 - DNA, 566 bp, Glycine max
  unsure (1)..(566): unsure at all n locations
nccattgtttcccatcgatgtacgtgcactatagatactcaagcttgcagctgggagccataggagagggagatggctgagcttctggttattagtcttctgcagaaatcccttatatacttactttgagtaagaagtagagacttcttgtcaaaaagagttttaacctcaattcaaggaagtagtccaattgaccaagttggttaagagaaaacttggaatgtagctgagtagtaagatgcttgatcaacttagatgaactaccagtaatgatgataccatctacatagactagaagaataacagtgtgagaagtaatctttgtaacanataattttgggtaacacttgctttgcacanagccactcttgagaagagtagactgtagtctttcataccactatctggggatcttgcttaagccatacanagctttattcatcttgcacactatgagngaatcagacttgtgatacccagaggtgagacatgtaacaagctcattangcangcattcagaaatgattattcacatctaattgacaagatccactgattgtatggtn

SEQ ID NO: 52876 - DNA, 384 bp, Glycine max
aaaaaaacccgcttgccaaccatggagggggagtggttaatgccatccacgtaagtaagtcacaccggcccaagattttgaaggacgtaacgacctccataaggtttatcaacaaagccttgcaaaaggcgggcgtgattccccacggagggcactgagaggattcatgtttaatgcatccaggcgtattgcatgacatggaaacatgttcaacggtaagagatctattacaacaaatgatagaccaaggctggcttgaggtcagtaatgaggaggaggaggaacaacatgtatacatgcactcggcagataaggaaggccctatgaagcctaaacccttggaatacactttacattgacacagtcccaagacctaacaccctc

SEQ ID NO: 52877 - DNA, 368 bp, Glycine max
tgacaatgctccaacaaccaaatatgccaaggctcgtcctggtcgacttttcaaacatcaacatgaagctatgaagcaaaagactaagctcactattttggattggtatgtcatgaagaggtattacagactcatggagtgttgctttgatttggaaccttatgagaagccacctgcagatatagtttaccatgaaataaggctatgctattagacctttaaccacacttgcttcactcaagagactcctttcaacatggcctacttatggaaaagggagttatatgttgtgtttgatcgcaccttctcttttatgggggtcttgcctttcttcatattcttcttcactcatcatgtggatcctatca

SEQ ID NO: 52878 - DNA, 237 bp, Glycine max
  unsure (1)..(237): unsure at all n locations
ggatcaacttgatccgtgagaagcttgcagatcaacttgatccataacagnttattttttttttaagaaacgacatagttatagtatgtgtgatttcatactcatagttgcttaagtgaacctaaaaattgaaattgcctactaatagaaatatctaagaagcatattttaacctcagctttaagaaatgctttaacgcttcttctagcgttattcttgctgctgttatgctctttc

SEQ ID NO: 52879 - DNA, 160 bp, Glycine max
tatttgcacccccatttttactaagtacaccccccagccttttttggtgattcttttttcgtaaagttaccgaaacttacgaatttcgtaacgatacttggtttctttccgtaatgttacggaaccttggggattacataatcatcccttttttgactta

SEQ ID NO: 52880 - DNA, 360 bp, Glycine max
  unsure (1)..(360): unsure at all n locations
gatattctgacatgttattaggatctagcttaccaagcatctacttaaccctggcatttatcaagaaatttagggtctattatatttatactgaagacagttgcaagtctgtactttgttcacatttcaaactcagtagatcttcacttcaaaggactttggttagagatataaaactatttttgtacatttcatttatccagaaatttagggtaatattatactaaagacagtcgcaagccagtaggttcatatttcaaactcagcagatcgtaattntttagaagttcacactgagaaaacaaaatgaacaaggccgcctaacttatggatattntcctcaagataaaatccatcaca

SEQ ID NO: 52881 - DNA, 271 bp, Glycine max
  unsure (1)..(271): unsure at all n locations
gtagatatttattttgacttggctcaccttattattttgaccaacaagaaacactcagcttattaaaattgtgcatactaatatttgtggaccttttgatggtagttctttcagaaaggaaggatactttatcactattattgatggttattcacattacggttatgtttacttactgcctgagaattctcagacaatggatgccttnagaaattactagaatgaagtaaaaaggcaattagacagaaatgtggaaattattagatatgat

SEQ ID NO: 52882 - DNA, 282 bp, Glycine max
  unsure (1)..(282): unsure at all n locations
accccctattataactaagctcacccccatgaccaaaaacatgaaaataccaaaaaaaaagtccttactacaaagactactcaaaatgccccgaaatacaaggctaaaaccctatactactaaaatggccaaaatacaaggcccaaacgaagaaaaaacctattctaatatttacaaagataagcgggctcatgcttagcccatgggctcaaaatctaccctaagggtcatgagaaccctanggccttcgcttggatctctagcccaatctacttggagtct

SEQ ID NO: 52883 - DNA, 359 bp, Glycine max
  unsure (1)..(359): unsure at all n locations
acatggatcaatgtaataatggagatatttcggtggaaggaaatatgaaactggatacaggcgatcatgaagcttcagtagatgccacattgttcaagaagctagtgggatgcttgagattcgtctaccatagtagaccagaaatctcatatggatttggtcttgtcagcagattcatgagtaatccaaaacagtctcatttggcagcagcaaaaagaatcttgagatatctaaaaggaacacttaattatggcatattgtgtcctcatcagaaagaanaatgtgagctatacctcgtagcttattctgactcagactggtgangggataaagtggagagaagatctacttctgggtat

SEQ ID NO: 52884 - DNA, 517 bp, Glycine max
  unsure (1)..(517): unsure at all n locations
cctancnaaantntcatgcaggtggaccttcttctagttattctaacttacagcagncttttattcctctttcattcccacctagagaaattcccaacaaaaagatggaagaagcggaaaaggagatcttggagaccttcaggaaagtagaggtgaacatacctctgctagatggcatcaagccaattccatgatatgccaaagttcttaaggaagtgtgcacccaccaaaggaagctcaaggaaatgaaaggttagcatgggcaacaatgtgtcagcattgataggtaaatatattcctcacattcctgagaaatttaaagacccaggtactttctgtataccttgcattatttngaacaatannattgagaatgccatgctagatctangagcatcnagtagtgtcatgcctttattccattttcaatctttatctcttggaccctttgcatctacagatgtggtaatcatttgggcaaagaagtgttgctaccccgacgtttattaggatggtg

SEQ ID NO: 52885 - DNA, 245 bp, Glycine max
atcttctgcagcagtggtggagtatctatgattccaagcctacaatttcacaaacaatacatattcacaggtcccaaaactgcagtgtcaagtaaactgaaacaagacattcattatctgtgtgaaggaatccaactccatctttaatgtaagattacaacttacaagtggaaataaatccatactgacataatttgaaggttccttttctcaacagaactttaatctaaactacaatcaattat

SEQ ID NO: 52886 - DNA, 498 bp, Glycine max
  unsure (1)..(498): unsure at all n locations
ctcagcttctcaggaagctacatgaagctntctcggaaaaatgctttccagccttcgttaaccattggatcttctcaaaattttgtctgcagcttcacaagacaattntccataatctgaccgttgggattttttagaagatgtctcgagggcatgcgacgtttccgtttctgagagcattgctcacttgtgcgttttgagccttgtagtccaagtagcttacgaaaaacgtcatttcttctcctttctttcttccaaaaccatntccaatgtttcaagcttcttctccatcacccacagccaccattagccaccacaaaccgcccgtgttctccgttaaaaccccacaccgagaggaacccttcaaccgaagcgaaatctttcactntgcttgcgatttcggtagagaacgaaaccctaatctgacctttcattntcctttganggaaccatgngtctatgctnngtccctgtagtttcagctggctttcatctttc

SEQ ID NO: 52887 - DNA, 421 bp, Glycine max
  unsure (1)..(421): unsure at all n locations
atcttccacgctcactatatctgtcatactgacttttgcttcacgctgacgggcggaaatacccgagtggttatccgtataaactttntgcattctgtaagacgaaaagcctgataacacgcagagactaacatcgtcttctgcgaccttcgtcaatcgcggccgacaagcccgttgacacgtggagatttacgtcatcttccgcgctcacaagatctgtcatactgacttttgagtcacgctgacgggcggaaatacccgagtgggttatcctataaactatntggtgtctgtaagacngaaagcctgatagcacgcagagactaacgtcgtcttctgcgcccttcgtcaatcgcgggcggacagcccgttgacacgtggagaattacgttatcttccgcgctcacaagatctggcatac

SEQ ID NO: 52888 - DNA, 338 bp, Glycine max
  unsure (1)..(338): unsure at all n locations
aagtgagacagtgtggaagagtcagtcttcctacttttattcgttgaccacagagtggtacctggagatatgtcacggnggtcaggagaccttgcggatgtcaggtggggtgctattgcccaaaaccaagcttgaacaatcccgacccaacccggacatagtcagtcagtgagaacctgtgacgtacctaaacaggcgagctcctggtagtcaaccaataaaagaacaaagaccacaaagcaaggaggcttgtgtggtggctggccagctatggatcttgaatgatatctcgaatatggcctctggtaatcgattaccaacggtgtgtaatcgattac

SEQ ID NO: 52889 - DNA, 306 bp, Glycine max
  unsure (1)..(306): unsure at all n locations
tactcggatgttttattgagtcccgcannatatcgagacgctcgaaattgaataccgaagctctgagccaattcaaacgacaataactttnttactcgggtggctggatgagtgcccgaatatatcgagacgctcggacttgaatgccgaagctctgagcaaattcaaactacaataactttttactcagatgtctgattgagtcccgtagtatatctagacgctcggtattgaatgtgaagctttgtagcaattaaacgacaataactttttactcggatgtctgattgagtcccgtatatatcg

SEQ ID NO: 52890 - DNA, 103 bp, Glycine max
tactgccacgtctatcatatccatagttctctcaacaccgggatgacattaattctgccaagccttcccaacatcctagttactgaacatttctacaacacag

SEQ ID NO: 52891 - DNA, 420 bp, Glycine max
  unsure (1)..(420): unsure at all n locations
tcattggtntgagtagtttctatcaaagaaccgatatctttatatngatggatttcttttagtttagtatgatcagtcatctgacataggttggcttcctcttctccttcttcatcagagggggtgttgtccaaacctgatgtaagctccattggagcttgtaggcctaagatcttcttcatcaatggattcctttgttcttggaagatgaatggcagcggaatggaaaacgaagagagagaggagatgccacttcaaggagaagatgagtctacaagaagctcaccaccatangaggtcatggataagagcttggaggaagaaggagatgaatgaacggagaggaagagaatagcccggcttcttgtgctctaaaagagttctgacatctgacagttaatattcanatgatcaaagttg

SEQ ID NO: 52892 - DNA, 153 bp, Glycine max
acagctacatctatggagaagaatggaaagtcattcccttctcatggacatgaaagagatgtagttctttccattagtcaggaaaagctcatatctcttggttctgaagcaaagggtaaaaataatgcacatcaatcatggagtgaacccact

SEQ ID NO: 52893 - DNA, 503 bp, Glycine max
  unsure (1)..(503): unsure at all n locations
gcaagcttctacattcaatgtcgagctgttcgatatattacgggactcaatcggacatccgagtaaaaagttattgtagtntgaatttgctcanggcttcagtattccatttcgagcgtctcgatatattacgggactcaatctgacatcagagtaaaaagttattgttgtttgaatatgctcagagcttcggtattccatttcgagcgtctcgatatattacgggactcaatcagacatccgagtaaaaagttattgtagtttgaatttgctcagggcttcggtattccatttcgagcgtctcgatgtattacgggactcaatcagacatccgagtaaaaagttattgtcgntngaatntgctcagagcttctacattcaatttcgagcttttcgatatattacgggactcaatcagacatccgaggtaaaagtgattgtcagttgaattngctcagagcttcagcaatccatttagagcgtctcgatatattacgcgactc

SEQ ID NO: 52894 - DNA, 283 bp, Glycine max
  unsure (1)..(283): unsure at all n locations
gcttcaccggatgacgccgatcgaacatttcctaagcgacgtcatgcattttttctntcagggattgaatngagaactcgctaggcgacatctgtcgtgaagtagcgaccgatattgtttcagccgacgattgacaattctgtttataaaaagctcgctgggacgataatggcctttttactgcagaagaaagtcttctcgctttggcgttgcatacacacgttacgatgtacttccgctacgtttttcgtgcgagttcaaccgacgtgagtcctaagtccga

SEQ ID NO: 52895 - DNA, 486 bp, Glycine max
  unsure (1)..(486): unsure at all n locations
agcttgatcttctngatattgtacatgattaactgaatcatttaatccatcaccttgccagtttgagcggttgtctaaagatccatcataaccttgaccctcgtgatattgcacataattacccgaggcatttaagccatcatattgaactgcactatcaggcttcacctcactacttaaattatcatacacattccccgtaaaatccccagactgatctcccaagtcactgaaaaagtcagaatatgatcccaaaccgccgcctccattcaaatcagcatgaaaagaattccaacccacctccttaatcccagaactaccagctgtatcgctcgtgcctacagctgaagctgaagcggacgtgacttctgatcccatcccaatcccatcctcacggggatccaccttaccatcaaacccaactgaactcaccacgggcatcaaattcccctcctgttcaagtcctacatcggattccacaatact

SEQ ID NO: 52896 - DNA, 166 bp, Glycine max
  unsure (1)..(166): unsure at all n locations
ctttaagatgaccttgtcatgagaaaatatcacatgagataatccattcttgatcagagtaatcattttcttcatgggataatgggagtagcttgaccatgatctcatcanacttaatgcacacacagtanaggcattacgtangtaatacatatatatagtcaac

SEQ ID NO: 52897 - DNA, 469 bp, Glycine max
gagcttcaagtctttagacatgagagcacatgctacttcttctgatatagtctgtacagtcctgtgtgaaatgggttattttgaagaggagctgggatccgaggcgcaaatcataatctgctctccacataagtcgccagccgtgagatacatggagttgagcaaactccatgttacaccaatgtgtgttacagaagaaactttttactcataatgaaaagcatctccttatctggctctccttcacgaacagtagatgtattgtcaacatagaggactgtctttcagactatctcacattgcatacaacaactgctgcatccattcctggcacattggcacctatagcaattgaataacaacagaagactgttattactcctctatagttggaaataaaaaatatatgggagaaacatgatatggatccccccctctactaaactaacaaaatgaccttatgccctct

SEQ ID NO: 52898 - DNA, 290 bp, Glycine max
caccaattctaattgaggaaacataaaacatttatctgaattgtgtaaagtgaaggcacctaaatagaattccagtggtgacaatcttcatattgcccagcatctgatatgtggaagtgtccacataagtgagtgtaactcactgaacatggttgtggatcagatatataactgatggaatggtgaacagagacaccgcaattactccgttgaaatctttggcaaaggcgacttgttgcatttcttctacagtgaccaactcgacaccgcccgctgaaaagatgagacca

SEQ ID NO: 52899 - DNA, 457 bp, Glycine max
  unsure (1)..(457): unsure at all n locations
gagaaaattcaaacgacaataactntttactcggatgtctgattgagtcccgaaatatatcgagacgctcgaanatgaataccgaagcgctaagcaaattcaaacgacaaaaactttntactcggatgtctgattgagtcccgtaatatatcgaaaagctcgaatgtgaatgtagaagctctgagcaaattcaaacaacaataactttttactcggatgtctgattgagtcccgtaatatatcgagatgctcgaaatggaataccgaagctcggagcaaattcaaacaataataactttttactcggatgtccgattgagtcccgtaatatatcggaacgctcgaaattgaatgtagaagctctgagcaaattcaaacgacaataactntttactcggatgtctgattgagtcccgtaatatatcgaaacagctcgaaatgaatgctgaagctctga

SEQ ID NO: 52900 - DNA, 493 bp, Glycine max
  unsure (1)..(493): unsure at all n locations
agcttgcacttgtcacccaacctgactttggtgtggcaattatggagtatatcttacatgatgtcgaagagttttgtgtagctcatgttatgcataatgccagtcgtaaagctgttttagttaaccacagttagttatataaggttctaacttctaaggttctgngaattgttgtaacagacttcagacacttacaaatctgacaaatgtctctgtagctatatgtggaacttatgtagtcagataccttatgaatcagttcagaaatacaaaatcacaaattaagtaactttccaaattctctccaaaaaatatctgtatttctaccacccctttccttttatctttctaatttctaatcagcaaggacccagctggaatccataatcaagacaattaacanatcaagtttatacacaggtagaaaataaaaaagaagatacaaatggtgaggaaacttggtaaggactatgcaacatatttatgtccacat

SEQ ID NO: 52901 - DNA, 465 bp, Glycine max
  unsure (1)..(465): unsure at all n locations
gctgtgggatatggggtatccatcacatgtggtactaggtggcggtcaggcgatggtgcaaaacaagttctccacatccacaaatcacgtacaaacccaccatcccctgttgcccacctccaactgagctcacgtactcccacgtagcccttatcctcgttcctctcaacgccgagtccccatcaatcctcccaagcttccacaacatccaagtaattcaacatccaatcatcatgaactaactcagccaagaaaatagggcagaggcagaaaactctgctcaaaacacaaaccaacatcacagctttttcacactcaaataccccagtaatattctcttcgttccaattcgttaaccggtggatcgattcgaaaattttattggaagtctctagtacataagtctacattttgaccgntgggatatgctatcanatgtccagaaccccatatgtactacccttt

SEQ ID NO: 52902 - DNA, 502 bp, Glycine max
  unsure (1)..(502): unsure at all n locations
ttaagtcacctgcggcatgcaagtctttatatatatcacccagatatttaccttatattcaataccagatgcaatggcataagcagtgctatgctctgattgagcatagagtccttcataagaggctagaacgacagcaacactgcttggctgagaagacttggcagtctccacatcggcctcgccaacacccttanaaggtgaatgagtggaaggtgactgaccaacaccaatcaatccaaccctctttgatcctagtcctgtaattctaagaacaggngactgaccaactttgccagagaaatactgttcanaagaggcttctagtaataaaccacccaactgtgagtcgatctttctctaaatcacattctcaaacttcgagtttgcatctctagccatatctttctccgtaacacccactgccagaatgtcccctcttcattccgtcacatcaacatccttagaaccaanagagatcttacacgaagtttcacaaaca

SEQ ID NO: 52903 - DNA, 398 bp, Glycine max
  unsure (1)..(398): unsure at all n locations
ntctcgcatcgagagagaaccacggggggcacttgaagtttttctatggattnntttatacatggcaaccaaattatcatcctgaaagggtaaaaacccagctaggagaacgtagaggattactccgcatgaccatatatcagccttggcaccgtcatagcctttctttgcaataacttccggtgacacgtacgcaggcgtgccgcacgtggtgtgtaacagcccgtcctctttaaggtggtcggagaaggcggtgagtccgaagtcggagaccttgaggttgccgtgttcgtccaggaggagattctccggcttgaggtcacggtggtagacgccgcggctgtggcagacatcgacggcagagattaactgctggaagtagagtctggccaggtcct

SEQ ID NO: 52904 - DNA, 403 bp, Glycine max
  unsure (1)..(403): unsure at all n locations
agctataacctcatcgtctctcacagtctatattatttgngagccaatccagnccttgtgttcagactctcagccacttatgatagccgccgatgatcccattactgctacccctaaactctctgtcctttcttcacgccgcatcccatgcctagcgaactccttggagtaccctctcgtcgtggtcactgaatcctcgtgcgatgaaaagcgagatactttcaaatgatggcgctcctctcatgggacatacgtcgcatgaagacagaattctcgaatctccttccttcttacgagggaaccatctaacagacgcccctccatgcttaccaagatgtggtgcacaacagacaatatttgctccgctctatttacatcccgagtcgaacgtgcagtacatggc

SEQ ID NO: 52905 - DNA, 450 bp, Glycine max
  unsure (1)..(450): unsure at all n locations
agcttcatcctttaatctatgccaatgaatatactaatctcgttcataaagcttcattagatgttgcattntagtatcactgcctcttatgaaagaacggtatgcacttcttgcaatgtatatttgtttgattgttgtacaactattggcattgtgctccttcaatgttagcaaaatgtttcttagtttcaccattgactctgccatatcaacaataattttcttctcatccttagtcaatcgaccagcgtatggatgtccaactaatgacttggtcaattcatgattgtgactcccacacattaacttcaccatccatccttggcctccaaccactgtgttcccatgaagcttaaagggacgcccacattttctactgccagtatctcttctaacaaaatatttctttctagacctatactgaccactccctttcacaaccaataacac

SEQ ID NO: 52906 - DNA, 472 bp, Glycine max
  unsure (1)..(472): unsure at all n locations
tcagaccaaagcagttcagaatctaggtatctaanacccctcaatttagtggattttcaaggtttgagaagtgaaaatgagaatggggtaattttggagcaaactctcatctcaaacaagtctataacattaatttaaactcgctcaaactggttttacggtgaaaactccaccgattcaaaatttgaacccctcaacacccaattaccctagaaatggctcatgctttcacctttgtcactcatttttctcatttgctcagcccaagccttcccacaagtcctaaacgacattttaagctaggattaactcactttagcccccaattaccactaaccccaagtttagcttttcaaaccctcaaatcctcacacttttccactcacatcactaccattctcacatttaaccctaggttaactcttcccatcatctctaccagttntctaccaacaatttcagcccacaagca

SEQ ID NO: 52907 - DNA, 478 bp, Glycine max
  unsure (1)..(478): unsure at all n locations
ctgcactacaccatcataactgaactgtatctannttcacaaatattttacaagaagaaagaatcagaaggtaagatacatacttgcggtattatatgtcatgtggctaacatacgaataaatcattaaatattaatattatcgtgtcatgcacacgtgcggtatgatttgcatgtggtgaagcttacacgcaatccatcaattggaacggtcatcttagtatcatgaatatctcaaaacttaatataaataaaaggtataatatacatacttatgacacaaatatcatggtggtaaacatacataacaatcattaagtgatattggcgcgtcattgcatagttgcgacatgattgtcatatggcacaacttgcacatagtcaataatggtatcttatgttctacaatattttacaagtttataatgagtagaatgtaaatataatactatggggtgtgtgggtgagctacatataac

SEQ ID NO: 52908 - DNA, 477 bp, Glycine max
  unsure (1)..(477): unsure at all n locations
tggaccaggtggtaaataaagacaaaacttagtgttattctttatgtgctgnagaatcgaatggaccattaactatagaattgagataacattaaatgctacttttaatgcaggtcgtttttaataaagatggatattattcaaactagtcagggaagaatattcacccaaaaaaaaaaaaactagtcaagtacaataacagacaagttagaagaaagaatagtaggtggcacgtgaaatggataataactaataggagtctggaattattttttttttaaaaatcatttttcttaaatcatctaacaaatacaattaacaaaaagtgaaaaacaaacaaaatcaaatagtcaaagggtaacataatggaaattaatcatgtagaataattgaggattcaatccttttacaatcatgacaaatggaatcacaaatcctcacttccacagacataatccaccaacaaaagccttaatg

SEQ ID NO: 52909 - DNA, 390 bp, Glycine max
  unsure (1)..(390): unsure at all n locations
agctntnntatttcagcagatgaagatgaatctgtggccacctcatggactcctctaaggacaatagcatcatttcttgcactgaattgttaggagttggaagccatcttctcaatcaaattcctagcctcagcatgagtcatatcaccaagggctccatcactggcagcatcaatcaaactcctctccatgttgctaagtccctcatagaaatactgtagaaggagttgctcataaatctggtggtgaggacagcttacacacaatttcttgaatctttcccagtactcatacaagctctctccactaagttgcctgatgcctaaaatgtcttttctgatggcagtggtcctagatgcaagaaagaatttctccatgaacaccctctta

SEQ ID NO: 52910 - DNA, 460 bp, Glycine max
  unsure (1)..(460): unsure at all n locations
ntaacctcatcgtctctcacagtctttagaattgggagccaatccaatccttgtgtttggactctcagccacttatgatagccgccgatgatcccattactgcttcccctaagctctctgtcctttcttcacgccgcatcccatgccttgcgaactccttggagtaccctcgcgttgtggtcattgaaaccccgtgcgatgaaaggcgtgatgctttcgtctgatggcacttctaatataggcataaagacttccctaaactaccccacacatataagctcattctcacaatttggagcaccaaaagatgaagaagatataccaatgggaagctaataacatcaaggattgaatacttacttgttggagtgaattatcacacaaaaaatgaaagcaaaaggcaaccaaaagtggcttgaggtgagcaaaccacaagccttcgtgttctgtcttttgaatg

SEQ ID NO: 52911 - DNA, 506 bp, Glycine max
  unsure (1)..(506): unsure at all n locations
agctntgagatggtctctggtttgaggatcatattttcatagagtcaatntggagctataggtcaacctgaggactggtgcatctctgctgctgccttccttaatcatgctctgctccagcttcctttttgttatttaagaattccaattggagtcaatcccaaaagaaaggtggtttgggaaccgataataaggaagtttgatgctaaactgagcaagtggaatcaaagaagcatctctatggctgacagaatcactcttatcaatgctgtcctaacagcattacctctgttttatttgtctttnttcacggccccctcagtagtgatcaatangttatctgccatccaaaggcaatttctttggggtggtaatcgagaaaggaagaagattgcttggatatcttggagtcaatgctatgcttctagagatatgggagggttggggatcaaagacattaagatccttcataatgctcttttaatcaaatggaaatggatgatgtt

SEQ ID NO: 52912 - DNA, 309 bp, Glycine max
ctactctgacttatcttccttactggaagtgcgtcatcaaagctctgtagcctatatcaaacgattcgctcctagtcaggatcacatcacaaccccactactgcatcatgaggcattattcgctaagctgaccatgtcccgctaagcaaaagttgcaaaccaatcagagctgcaaaactcgctaagcgcgcctctgtgcgctaagcccaaatccttctcgggttttcaaatttttgaattgggctaagccagtctgtcccactaagcgcatgaatttaaaatctgaaaactcaaacgtcactgagtgct

SEQ ID NO: 52913 - DNA, 482 bp, Glycine max
  unsure (1)..(482): unsure at all n locations
agctgcangctgctcaatagctccaggntgctgcatgtaatggctaaagtctcgttggcggtcagcagaggagcacacaccacatacccttgcgacaggtacagattgatgattaaggccatctgggttaccaaactaaccaaggcgtacagattgtcgtgcaagcttatcatgttcagatgatacaaatggtgttgatgctacctcatgcactcctctctgactatagggatatttatggcgctcaactgctgagagttggaggccatcttcttatcaaaattctggcttcaacacgagacatgtctccaaaggctccgccactggcagcaactattatacttctctccatagtactgagtccttcataataataattgagaagaagctgttctgagatctcatcttgaaggcaactggcacaaaaatgctaaatacctccagtactcatacacgctctcttcactgagctatctaatacc

SEQ ID NO: 52914 - DNA, 324 bp, Glycine max
cctttcttcacgccgcatcccatgccttgcgaactccttggagtaccctcgcgttgtggtcattgaaaccccgtgcgatgaaaggcgtgatgctttcgtctgatggcacttctctcatggggtagccaagctgtcttatggcgaggacgggattataattaatacaaccccttgttcccatcaagagaacatttggacatccttcgcatgaagatagaatcctgattcttccttccttctagcgagggaaccaattaacagacgcccctccatgctagccaagagttggtcccaattcgcctttcctttttcgacgcacgagcg

SEQ ID NO: 52915 - DNA, 430 bp, Glycine max
  unsure (1)..(430): unsure at all n locations
ttaagcaccgcggctgcaagcttaactgaattacaatgttccaattgatttataatggtgtaatcgattacaatgatttagtaatcgattactagtatgtttgaacgttgaaattcaaatttaaatgtggagagtcacatcctttcacaaaaatgctttgtgtaatcgattacaatgatttggtaatcgattaccagtgataagttttgaatagaaatcaaaagatgtaactcttccattggttttcaagcttttctaaaggttataactcttctaatggttttcttgaccagacatgaagagtctataaaagcaagaccttgatttgcatttcaataacacttacaacctttacaaacaacttttccacatattctnttacaacctttgaatctctttgaacattttcttgaacttcttcttcttcttc

SEQ ID NO: 52916 - DNA, 444 bp, Glycine max
ctattacattatagatcgagggtagggttgaaaaattaacaatgtctaatcttctattgtgggaaagtctctttgaccgacagatatgatgatgttaatatcagtggacgacttaatatcatctcctatcgcgcttatataaaaaacctgctatcatgaaaaactagttttgaccgatagatattatggtttcaaatcaatggatgatatatatactttcatttgtcgttaatcctatcttgattgacttattttttcgatatctcttaaacatactttgaagggggaagtaaacataatattaaactgtatttatttggaaacatacttctggaggatcccactattaccatcctattacttaatgagatattaatatatagactttatatattatatccggacatattaatattcaatagaataatactaatagcagatatt

SEQ ID NO: 52917 - DNA, 474 bp, Glycine max
  unsure (1)..(474): unsure at all n locations
tgtctttcacagccttcacatttataaaaaaaaataaggtttcgttttattggaaaaagttttctatattcggaaattatgttacgtgatattcttattaattattttagttatttattacatcaataagaataatctgatatttttattgtaataaaaaaattaaattcaaaaaattaagattcacacttccttaatagggacaatttttgtgaaaaacttataaaaaatcattttcaaaaaatattatttatcacgaattttatttttttagaacgaatattaaacatgaaaaagtaaaattttgaacccaagatttgcaagaaattcaaaatttctcccccaatcaatcacctcctaaaggttaaacatgtacttatacatatatttaaaaaaataatcaatcatctcctanaggttaaacatgtacttatacatatantttaatattaatttttattagtacagttaata

SEQ ID NO: 52918 - DNA, 478 bp, Glycine max
  unsure (1)..(478): unsure at all n locations
ctggctgcgcagcagctatgatttcgtgagtatctatatttgatgacgcattgtaatcgattacaggtattggtaatcgattacaggcccaataagccttctggtaatcgattacaggatgttgtaatcgattacaggctgcctgttcatgtgtaatcgattacactggatggtaatcgattaccagagcctattcgatgctagtttctaagagaatatctattnttatgctcaaatacatcctatatgactaattttcactactaatacactaaattcaatcattcaattactatatacacaagaaatcataaattctatcataaaaacaagaattcaaacaagatcaaacaaaataatctacaatcaaaaggtaaaattaaatcaaccaatcaatcaaccaatcaatccctatttntctaaatctcttacatctaagagacctaattctcttctaatagagaagaacacttccttg

SEQ ID NO: 52919 - DNA, 508 bp, Glycine max
  unsure (1)..(508): unsure at all n locations
agcttcagaccaaggcaactcanaatctatgtatctaaaacccctcaatttagtggattctcaaggtttgagaagtgaaaatgagaatggggtaaatttatatcaaactctcacctcacacaagtctataaccttaatctaaacttgctcacactggtttntcacctaaaattccaccaaatcagaatgtgactcctcaacacctaattttaccctagaaatggcttttgccttcactctggtcttttgtttttctctcttgcacagcccaagctttctcataagtcctaaatgacatttcaaactaggactaactcactntaacctccaatttctactgaatccagatttagcctttcaaaccctcanagcatcacacttttccactcataacactacattctcactgtctaaccctaggttaactctacccttcatccctagcagttgtccatcagcaatntcagcacataaacatcacaagcatcatcatataaacccttaaaca

SEQ ID NO: 52920 - DNA, 470 bp, Glycine max
ggccttggaactaattcattctgccaggcaattacgacaatattttcaaagtcaccaggttatggtgaaaattgaccactccctgaagcaagtactcaaaaagctgagcctcatcggacgaatggtagcatggtcggtcgagctcttcgagtttggcttatgatttgaacctagaggcttcatcaaagggagagttttggatgatttcctaatcaagctcccccttactaagggcatcagtgaaggctggtggacgctgtatgtggatgaagccttcaataataagggcaacgacgtgactgtaaccgttgaaggaccaaataacgtctccatcaagcaattagtaaaatttgactagaaggcttcaaacaaccaagcaaagtatgaagcactcatcgcaagattgaagctagcgatcggggtcagcacaaagaagttgaggacatgagttactctaagcttgtcattga

SEQ ID NO: 52921 - DNA, 406 bp, Glycine max
  unsure (1)..(406): unsure at all n locations
agncttggagattacaagtgccaacttcgtctttcttctntagtccagacttcttctggcttcaattcatcagagggctctccttctgtgtccagcatcttgggatgttcccagaccttgatgacagccttccaggttctgctatccagtgatttgagaaaggccaccatccttgctatccagtattcatagctggtcccatccagaagtgtgggtctgatcactggtcctccttctttctccatgttcatcagaatatatctccctagatctcactcagtgatatcgagtgctcgctctgataccaattgaaattctgatactgcggacagatgtcgtacacgatgtcacgacatctcgcttcacaacatgcagattgttttgactgtatgaacatgttaacaag

SEQ ID NO: 52922 - DNA, 440 bp, Glycine max
  unsure (1)..(440): unsure at all n locations
tgaccaatcccgacccatcccactcatagacagtcattgtttatctgtgatgtacctaaacacgcgagctcctggcagtccacagataacacgaacaaagaccacacagcacagaggcttatggtggctggccagcttatgaactttgatgatatgtgggttatggcctctggtaatcgattaccaagggggggtaatcgattacaatgcttataaatgaagacagaangctaagatggtctctggtaatcgattaccaagaggtgtaatcgattaccaggcttgaaaacgaggtcaggaagccatgaaggcttctggtaatcgattaccaagggggtgtaatcgattaccaggcttataattgaaggcagcaggttgtagaggcctctggtaatcgattaccagtctgtgtaatcgaatacacagaggaatgggtcact

SEQ ID NO: 52923 - DNA, 443 bp, Glycine max
  unsure (1)..(443): unsure at all n locations
taaagcttgagttgtagagttagaagtgacaatgactaattcttgtaactataaaagttagtggagcttgggtggtttgtcaagaacttgatatggtctcaatgatagagacaaaatgtataaatnttatgcctatatgttttctaatatctacttaactgtcctagttgatttaattcttttggaaatcatgtctatttgtaaatatatttcatcgtttaaaagtgtttctgtcaaaaaaatttatgtcttataaagtttttcttcaaacaataacttttgtttcttcaaaaaagtcttgaaaattttctaaaattataattcaatccttcttgtgatattngcctttacaggtggtaagcaacaaaaaacacatttatatttaaatatttatgatacanatctataatatactatnagtatcacaatangaaaatcattta

SEQ ID NO: 52924 - DNA, 444 bp, Glycine max
atcttaagtcacctgcagctgcagcttgagagattcaacgacataacttttactcggatgctgatggagcccgtatatatcgagtcgctcgaaattgaataccgaagcgctgatcaaattcaaacgactataactttttactcggatgtctgatagagtcccgtaatatatcgaaacgctcgaaattgaatgtcgtagctctgagcaaattcaaacgacaataactttttactcggatgtccgattgagtcccgtaatatatcgaaacgctcgaatgtgaatgtcgaagctctgagcatattcaactacaataacattttactcggatgtctgagtgagtcccgaatataatcagacgctctgaatggaatactgaagctctgagctaattcaaacaacaataagctcttactcggatgtctgattgagtcctgtaatatatcg

SEQ ID NO: 52925 - DNA, 419 bp, Glycine max
actcagctctacattcaattcagctttcgaatatacgggactcttttgacatccgagtaaaattattgagtttgaattgctcaggcttcgtattccatttcagcgtctcgatatattacgggactaatcggcatcagagaaaaagttattgtgtttgaatttgctcagagcttcggtattccatttcgagcatctcgatatattacgggactcaatcagacatccgagtaaaaagttattgtagtttcaatttgctcagggcttcggtattccatttcgagcgtctcgatgtattacgggactcaatcagacatccgagtaaaaagttattgtcgtttgaatttgctcagagcttctacattcaatttcgagcttttcgatatattacgggactcaatcagacatccgagtcaaaagta

SEQ ID NO: 52926 - DNA, 456 bp, Glycine max
  unsure (1)..(456): unsure at all n locations
acacatanaaactcagcttgcaataagtgaagcccatctcaaggtcctgtagcttttgatacanttttaagggcatgatgaatagttgaagcattccaaaacatcaacatctagagcaatatctccaagtaagaaatttgcatttctgcttcaaccctttctataagagtgaccaacttttgtattgcgcttacaaatctgtaatattctttagatagaatatgactttcactcacttaaactttcatccacttttatttttagtccctaagcttttatttgacttgactttngtatattattatttcgtatgtgttttagttcccactcttaagtctttccattaacaaagatgtgatagttatggtgtgtgacaactttntttttatgattagaaattatttaaccaatgtatctaataggtattaaataatctttgacaagtttaaaaccact

SEQ ID NO: 52927 - DNA, 383 bp, Glycine max
atgaatatgagcaagatcagaatcctccagcagaggctagaatgtgggtaccatgccataacctctaatattactcccagaagatgatgtcgacactacatgcagcagatagaattgaagaagtgcctcaacaaaagcaaaggaaggtggatcatcagaacccttctatgacaaaatagccctctgaattacattcagtagaatcatgcgcgtccctccagtgaagttcatactagatccactcacgatccgggcccgttcatgagaagatgtgtatgctgctaactgggctcctaatgcaagcattcaatatgttctgatagattcaggatattttttcttataacgccaacatttaacaattctcttgtgactctgggtcg

SEQ ID NO: 52928 - DNA, 453 bp, Glycine max
  unsure (1)..(453): unsure at all n locations
tactcaagctttgcagggaataggtggattgaaagcacctgttatttatgtttatggcgcaaaatttttcanaaatagctggcatatagtaaagaaagattttattgctgcagtgaatgaatttttcgagaaaggatctttattaaaggattttaatactactcttgtgactctcattcctaaatctattactgctaagactgtcaaggattacaggcctattgcagnntgctctactttttataaagtgatctaaaattttttgactaggaggctagggatagtgatacaggatattgttcatactagccaagcaacttttgtacccggtcaagtcattcacaatcatattctccttgcaactgagttgatgaaggggtataccagaaagggtgggacccctatgtgtatgatgcanatagacctccanaaagcttatgatatggttgactg

SEQ ID NO: 52929 - DNA, 404 bp, Glycine max
tgtcctgttacgactatccctattctatctaccaccatatctgaagtagcagcctcatactctcctcttgggcttttacatattctgcacctctgctgaatgttctctctgtacccctactctgagatctgtgttttccctatcataccgcggcccttgggaaatcaccttgtcctcaaggtgatagtcattaagcaaagcagaccaatcctcccaagacgtatcatctggtgataagccatgccattgaaccaagacttcccaagcttctgaaggggttctgcgataatccacaattgctgccggagtgagaaggggttgatcattatgaaattgagcacgtagaggcgcgaacgaagcgatgtccatatgaccatgaaaccggttgagtagagagcaatgga

SEQ ID NO: 52930 - DNA, 402 bp, Glycine max
ttagcagtcataacatcacatgttatataggagtttggtattttcaaacttagtgcaatgaagaaaatatgcactactatgcaaggcaaggagaatgaacctccacctcaatggattgaaccaaacgtatgtcgtaatccctgtatttatggaaatttgaaatcagtatcatgtgtaacaaagaatgaccaagcttaattgggtattttcatattgcatataaagtcatgtacaagccggagcctatgagtgtgaatattatgtgatgcattggatgtggagacggtttgaagaatgaatggatcaaggtatgcatatgttcgaactcaaggacagtcccgaactttatcagaaagtgtactgagtcgctaaagtaataataaaacggtatgaaaccgagta

SEQ ID NO: 52931 - DNA, 457 bp, Glycine max
  unsure (1)..(457): unsure at all n locations
aataaagccaagctagagtatataagtgagggacaaccctcaccccttaagctagctgtggatgttatatttatgttaaactcattctaaaaatctaagatggtattagagtatatctaagcttaatccaaagggccacccacaatagttatccacgcaccacgcctaaaaagtgctgtgcgtgacggagtgtattgggaaaaatctaagtcacacatcaactaaaaataaagtcaagttatagtatataagtgaggggcaaccctcatcccttgagctagcttttggagtcgagttatgtctaaattcacattctaagaatctaagagcttgtcattaggatcacatgaaaaggcattatcctcaatatttatcatactgttccctcttcttcatgtgccatctcgcgcacaaactctttccctctaaatctncttttcataatgtatgggcattg

SEQ ID NO: 52932 - DNA, 459 bp, Glycine max
  unsure (1)..(459): unsure at all n locations
ctaagcttgggcctcatttgattgaaaggtagtcctctggatatgattagtcatctttgaaacgaattgcatgaccattgttgatatggttaattntcctgttactattttttataactgtgttgagttaagtgagtgtaacaacatcctttcacaccattataacttaaaatgttatctttgccaagaggctaatatggtagctcattcactagctcagcctaccattgattctacttgctccattgattattctagtattcctattagtattcattccttggtttttaatgaaataatataaggtatttcttgtaaaaaaagaaaagaaaagaaaatcagtgtcacaaatttccctagagttgcttattataattcaattatagcatcattgaagttagaccgtatattaaggaacacaaagtaaatggatggacatttagtaatatcaaaatcgca

SEQ ID NO: 52933 - DNA, 412 bp, Glycine max
  unsure (1)..(412): unsure at all n locations
agcttgctagattcatgcgcgtatatagatatgccttattagtctgaccactgcnatcaaagcacaagttatcaagggcttagtccatatccatcgttgacattctatatgagagagaagaaaacgcggctagatcacaatggagtgaatatctactcacagtattcacagggccccagactacaaaagggactccctccactggtgtagagaccacaagcccaaacactatagtcttgatgcactgagcatcctaaacgcttccagagtgaacagcatctatgatctttctagtacacgctaacttaatcccatcgcccaatccatttgcgcccaccatagggactaaaaatcagcttaccggacgaaacatgccactaatactttatgcctaaaagaacacaccctgcct

SEQ ID NO: 52934 - DNA, 415 bp, Glycine max
tcaagcttaagtcttcatgatgttccccatatcttcatcatcttcaagctcttctcctagcttcgagctcttctccaatcttcaagtttaagtcaatcatgaaaaaacttaacacttaagaaaagataaattaatatcaccatcatcatcatcatcatcatatatcttactttataatttcactaatgctaatgcaaatgcaaacaataaaagcaataaactggttctttccaaatgcttatgcaatgcaagcaaatatgcagttcatctcccctttttggcattaacaaggccaaaaagtttgaacttatacacaaaacaaaacacaaaaaaattgaagggaaataaatcataacatttccttaatcatgaaacattacaaatcattaatcatagagctctttaaacaaacact

SEQ ID NO: 52935 - DNA, 454 bp, Glycine max
  unsure (1)..(454): unsure at all n locations
agctngcacaacaagtntctaaatctaattttgtacaaaatgaagtaaccaaataactaactaactaactaactccactaatatatccagtaactactcagaaggaaaggatggacttaatcgattaagcccatctaatctacctaattaaactaattacacaaagcaaaacccaaattcgcagcccaattattgaagtgtagtgattcttagttccaagcccaatttgacccgcgaaatggtagaatgtccaagcttatttgcgaaagaaaatacaaaattgaatctattnttctgatctttccaagaactactcacatgctccattcagagttctgtagtgtcctatatgccctgtgcaaggcagataggtcaagtaagcatataattcataaataagcaacaattataaattaagctcaatcatttgcctaagactaaaactgtgagtatg

SEQ ID NO: 52936 - DNA, 472 bp, Glycine max
  unsure (1)..(472): unsure at all n locations
actaagcctggcacacattgtccgcatctatgatatccactccacatgatntgaagtaaaggagaccttcaatcctataacgcaacgtgacggacaaaagtgggcagttaactngaatgatcattattgtcaatgcggaaagtattctacacttcactatccatgttcacacattattgctatttgtggttgttacgtcagcatcaactacttccaatatgtagatgttatttacacaaatgaacacatcttanaagcgtactccgcacaatggtggcccttgtgaatgaagcgacaattcctccttctgatgactcatggacacttatacctgatccaagtacaattcgtgtgaaaggtcgcctaaaatcaataaggataaggaatgagatagattgggtcgaaccatctcagaaccgacaaaaatgtagtagatgtggaagttgttaaaataattgatttatgtattttg

SEQ ID NO: 52937 - DNA, 128 bp, Glycine max
atatgaccatcctaatatctcgagagcttctgatgatcaatgtctacccgctatgacatattatgatgccagagaaagacattcgtgtgaagagttctcaccattctcattccatgagtccttccgaa

SEQ ID NO: 52938 - DNA, 479 bp, Glycine max
  unsure (1)..(479): unsure at all n locations
aagctanggggtanacgcgtagaaacagattctacaccctagattattcatgatctacttgctgagagggtaaacgcgtagatatagattttgcgccctttatcattcaggaacaaacaagctgagtgggtaaacgcgtagaaacagattctgcgccctttatcattcaagcacaacaagctgagtgggtaaacgcgtagaaacagattctacgccctttatcattcaagcacaacaagctgagtggngaaacgcatagatacagattctgcgccctttatcattcaagcacaacaagctgagtgggtaaacgcgtagatacagattttgcgccctttatcattcaagcaccacaagctgagtgggtaaacgcgtagaaagagtctctgcgccctttatcatttangaacaacaagctgagtgggtaaacgcgtagatacagattctgcgctctttatcattcangaacaacaagctga

SEQ ID NO: 52939 - DNA, 522 bp, Glycine max
  unsure (1)..(522): unsure at all n locations
gatccttaagtcacctgcggcatgcagcttctttggaccttgacaagcattcttctcctctntcagaaccatgctatgtgctcgcgactggtccctttcttcccttcgcaacttgagtttattatttctaccccatagagctccgcgagatttgttccggccatactcttccttgtgagccctcttggtctcttgttcaagggctcttgcggtaattgcattctcttcccgtaacccggcacactccttccgaacgtgtgtagcagccaacttgaacttctccttggcgaggtttgcctttcctaactcgcttttgagagcttggacttcttcgtcctcttccggtgcttcanaattctcttcgctgacgactnttaacttggcgagccaatctaaacctcgtatgcgaactatcagccattcgtggacccaccaatgatgccattacgaatgcctctaagctcttgatctttccttaacggagcctcccatgccttatggattctctgtatagtcttggaa

SEQ ID NO: 52940 - DNA, 384 bp, Glycine max
  unsure (1)..(384): unsure at all n locations
ntgagggtgcgtagcccaccatcttttcatagtagagtatctattatgtgtctaccatcacgattatcgtctccctttccatcattgngggtaccacttgggccgccagatccctccaccttttaggcgtgttctttgaaagatccgtccccctttttgcaaatgttctatagttgcatcctatccggaaccatatcaaaattgtactgatactgcctaacaaaggcaaccattaggtccttccaagaatggactcgggaagattccaagttagtgtaccaggtaacagctaccccagtaagactttcttggaaggaatgtattagcaattcctcatcttttgcgtattcccccatcttctgacaatacatctttagatggttc

SEQ ID NO: 52941 - DNA, 476 bp, Glycine max
  unsure (1)..(476): unsure at all n locations
gcttctaccaatggacgaccttgattattttctttatagccctcttgagcctcgttttcctttccttgttctgaagctcactacaagccttaatttatataaccatgatattaccatatccttaagggaatttggagctctggaattgttttgggaataagtgtggcgggtttttgtttcattggacaacttgcttttgtggctatgcttcatgatgtatnttgggccatacttgatgtacattgtatattggttaaatgttggacatgctgaatgaaatgttgtttctcacaggctaaagagtataaaaaaaaaaaaaaataaaaaaattctataaaagaaaaagaaaagcaataaagttgagtgaatattatcttatatggcacaagaatgatgaaactcttggntctactcttcatggttaatatttatctttacttctcttatttacttattnntttcttaatatgcactta

SEQ ID NO: 52942 - DNA, 428 bp, Glycine max
  unsure (1)..(428): unsure at all n locations
tagaattgatttcctcccacttgagaaagcatatgcgggtatattattctccatcccactcccctacccgtcttgctacatatatgtttataattattaataatgtggttatatataattttattattatatattatatttaattattaattacataattatgtaattatttcattttttttataattattaaaatataaatgaattatttcaatagctaaataaataattatagttataataataattataataaaattaaaaattatatatttaaccaaaaatataatttaactcttaaatatgtttgtattatttattttttattaaattatatatattgattaaattaaaatgtcattaataacttaatctataatttatttaaagtatataaaanaataatntctcttacaaaatgggaaatg

SEQ ID NO: 52943 - DNA, 360 bp, Glycine max
agcttctagcctatggacataccttgtattatttcctctgatagcccttatgagcgcttgttccctttccttgtgttgaagctcactacatgccttaagtgagaaaccatgatattaccatatcccttaagaatttcggagctttggaattgttttgggaataatcgtgggggggttctgttcatttgataactcgttgtgctggctatgcttcaagatgtatttcgggccatacttgatgtacatcgtatattgcgtaaatagtggacatgctgaatgagatgtttgttctcacacgcccctacagttcctatacaatatatacattgtatcataactaaatatcatttctcaataata

SEQ ID NO: 52944 - DNA, 228 bp, Glycine max
cgcttatgcaatgcaagcaaacacgcaggggatctcccctttttggcattaacaaggccaaaaagttggaacttatacacaaaacaaaacacaaaaaaattgaagggaaataaatcatagcatttcattaatcatgaaacattacaaatcattaatcatagagctctctaaacaaacacttaatttttatcaaacaaaaacaaacataacaaaatagaccaacaaaca

SEQ ID NO: 52945 - DNA, 410 bp, Glycine max
ctcagcttcatagctcacttgatggcttcatatatattgtgctttattttatcagaccgcttgagaacatggatctgatgatcatctcaagagggcccattgatcgattgattccagatcactggatcacacggcacatggataggtctatgtttctacttgcaaggctagctgcctctgactttgtgccagacttgaactgtgcccagttgtacatgatcatcgccatagaagatacctacatgggagacctacaagaagagctggacgatgtaaatagcacggagtgagagttccattttatgagatctaagcatgcgtgctgagacaatctatttaatctcccccccgccttaattgtactgcatctagtcatgagaaacttggatctctctctgccacaatcgact

SEQ ID NO: 52946 - DNA, 384 bp, Glycine max
  unsure (1)..(384): unsure at all n locations
agcttaagaagatcanatctaatatttctgatattcatcatatatngatatataaataatctttctttgacctaatataactgatttaacgaaagaacttaactgatattaggaaagaacttatctagctagtaactcatttgttacttgcatagctacattctgaagaggaaatgttgcatggatcccgtattattgatcaatatctatgaagataaagagagatgtgataatgagtaacacagaataatgatacatgaatcatcctttactttatacacancattaatatctcttatattatcattttgctatctctctgtctctattaaaacataagtgctattaaatctatatatttcttatcttttcctctacctatgc

SEQ ID NO: 52947 - DNA, 358 bp, Glycine max
tagaaatgcaagccaaggtcttgctctcatagactcttcatgtctggccaagaaaaaccactggaacagttataaccttgagaaaaacctgaaaaccattggaagagctacatctcttgatttcttttttcaaaacttgccactggtaatcgattgccaaaaccatggaagcgattacacaaagcatcttatgaaaagacgcgactgttcacaaccgaatttgaatatcaatgttcacatacactggtaatcgattaccaatatattgcaatcgattacaccatttaaaaatcaatgggaacgttgcaaattcactgaaaagctatagaaatcaaactttgccactggtaatcgacta

SEQ ID NO: 52948 - DNA, 447 bp, Glycine max
  unsure (1)..(447): unsure at all n locations
agctnataagagagatgatgacatgantttatatcttatcacattatgttgaagaactatcgatgaagtttaattattctgatgtgaaacctggttatatattcttatgactcatccattaagttagaaaatattgagtaaaggaatctcttcacataaatattctcaaattattggttctttgttgcatttgacaaacttctctaagcctgatattgcatatngcagtggtagatcaggaagtaattgaggagtttagtgatgcaaatcggatttatgattttgatgaaacanaattgactatgtctttactttagctggtgtgcaatatcatgaacatctgctaagcaaactattatttcacgttctaccatggaagcagaaattattggttagatactgctactagtgaggctgagttcttaaaaaattgtatgtgattagcat

SEQ ID NO: 52949 - DNA, 469 bp, Glycine max
  unsure (1)..(469): unsure at all n locations
tgtcaattaagtgaagcccatctcaatggtctntggagctttatgagacattntttaagggcatgatgaatagttgaagcattccaaaacatcaacatctagagcaatatctccaagtaagaaatttgcatttctgcttcaaccctttctataagagtgaccaacttttgtattgtgcttacaaatctgtaatattctttagatagaatatgactttcactcacttaaactttcatccacttttatttttagtccctaagcttttatttgacttgacttttgtatattattatttcgtatgtgttttagttcccactcttaagtctttccattaacaaagatgtgatagttatgttttgtgacaactctttttttatgattagaaattatntaaccaatgtatctaatagggtattaaataattttgacagttntaaaaccactaaaaattgcaagcactaaaaataca

SEQ ID NO: 52950 - DNA, 436 bp, Glycine max
  unsure (1)..(436): unsure at all n locations
tctctcgccggatcttagcacgagctcagcttgatctattttatggaacacttctgtataataaacgcgactaacatcgacacaatgtctgaccaaggaaaacatatgtaatcaatntatatgggttattagcccttcttcctttttatttntttatgagagatgagaatattatctttatcgcgtccgctatatattatggacttaattccctcttctttatagtaataaattatcttttattacaataaaagaggctttgcctattctgttgaattaagtacaggctgacatgcatgtctcggcgtataacttattctccaaggtttgtcacgggttattcatttatactgaataaggaatctattctaaagtctttataaggaagaaccctattgttngctcctttctagcctttcgttttctaaactacgta

SEQ ID NO: 52951 - DNA, 339 bp, Glycine max
  unsure (1)..(339): unsure at all n locations
taatgctntattattagctcattatacataccanacccaagcctggagagagcttatcaccacctttgatcatgtatctgcatgattaattcatgataagagaagattaattattagctctagaccaaagggtttgttgtggaagatccatagccggtccatgatgaccctgatccatcaagatatcccaatgacactttttcagcaccagagcaaccctgatgatcttgccattcaagggacaacagcttagggtttggcttcacatcaattgaaccattaagggtgttgtcaccttcatcatanggcaacataagtcgctggcaagagtcattatat

SEQ ID NO: 52952 - DNA, 441 bp, Glycine max
  unsure (1)..(441): unsure at all n locations
agcctgagaatggagaattgcactaagcaatcactacgcatagctccaaactcgaaggtggaggacacatgaacgaaaacacaattcatggggctccgaaaaaatgattagaatggagaaatacactaagcaatcactacgcatagctccatactcgaaggtggaggacacatgaacgataacgcatttcatggtgctccgaaaagaatgagaatggagaattgcactacgcaatcactacgcatagctccaaacgcgaaggtggaggacacatgaacgaaaacgcaattcatggtgctccgaaaagattgagaatggagaattgcactaagcaatcactacgcatagctccaaactcgaaggtggaggacacatgaacgacaacgcaattcatggcgctccgaaaagattgagaatggagaattnactacgcaatcacta

SEQ ID NO: 52953 - DNA, 478 bp, Glycine max
  unsure (1)..(478): unsure at all n locations
tcagctntgtccncaaggcttcatgtagacttgtccaaaatcgcgaagtgaaccttggatccctgtcagatacaatactagaaggaattccatgcaaccttactacttccttgatatacaactccactagctnttccattctatacctcatattcactgggataaaatgagcagatttggtgagtcgatctactatgacccacacggcatcatgcccacgactagtcttgggtaaactagatacaaaatccatagatatgctctcccatttccattccggaatctccaatggcttcaattctcccgatggtcgctggtgctcaaccttagccttttgacatgtcaaacatcttgctacatattcggctacatctttcttcatgccatgccaccaaaaacttctcttcaaatcttggtacatcttagtcattcctggatggaaactaagacgactnttatgtgcttcctccaaaatctg

SEQ ID NO: 52954 - DNA, 509 bp, Glycine max
  unsure (1)..(509): unsure at all n locations
gcaagcttagtatttaattnntttttaattatatttagaatatttacaaattaatcataaacattcatcattttatgcattntagaataattaaaggaattaaaacagatcattatagtttaaaataagagtatatcctagtaaattggatattgtatcagtatacatagaagtaacgtcatgaaatacttgttacgcaattgtgcattgcaccaaacctttatctttaggttataatggaagcaaatcacaatagctctagtctaaagtacaaatcacagatgctcaaaatttacaaacccattattcaacaccaaaaataaatgaataaataaatatgattaatccataagcatttaaagacaaatttccttaataaagaccaaaactgagggtggagggtgtaagagacttaatgctatcataatacaagcatgannatttgcttgcatatgcagaatggatctcacacgtctgtactataatataatgatactcataatacttat

SEQ ID NO: 52955 - DNA, 480 bp, Glycine max
  unsure (1)..(480): unsure at all n locations
actaagcttctaggttgagtctgtccacttcaagctntgcaccttgtgatagtcaatcactgctcannaagccattgtcatggatcctttgcaagtctccattctctgccaactctaatattgcagtcgaaaggtcaactgctaacggtgagtctcgaggaaaggcctgaagaataataaaggacgagaaatggtgaaatactactnatcaatgatttccaatgcccacagcttcattaacaacttcaagtgtcaacaactggaatttgataactcagattaagcatggtatattaactagattaaagtgctaacaaacttataaaagcagggaaggtaacaggtttagctcggtggtcgataggcaaaagagcatgctctagcaaaaaataagtaaaagctccattatttgcccnctaatgcttaccctntatttgtgcatggttntataggcttcaaagaactatacacaggccaaaa

SEQ ID NO: 52956 - DNA, 482 bp, Glycine max
  unsure (1)..(482): unsure at all n locations
cttaagcacctgcagctgcagctgctggaggtgattccttttttagtggtggcattggtcgtccacccttcttctttatgtacagatcctgngtctcattntatccttgatcgctnttcagtgtgctctgntagagcacttgaatatggccttttctcaactccacccaaatagttgtgcaatggtccaagcctttgaaattttgtatcctttcttcaacattcggcatattggactagtcttcttatttttcttccaaatgaaaatgagtggcaagattgaatgagactccttgaacaatgtgtctaagaagttggttgagttttattcaaacatctttcgccgactccttgaacaatgtgtacaagaagttgttcgagttgatcanacaactttctcattttaattattatttttcaggcttgctactcgtgcatgatgatggatgccactgatgtcaatgggacnggagtccactttgt

SEQ ID NO: 52957 - DNA, 455 bp, Glycine max
  unsure (1)..(455): unsure at all n locations
tctntcgacctatcgcanaacanaacatacattgaacttgtgttgtgttttatgtntacatgnaattgaaagcagcaaatcatcaaaacaacattttgtttgctctgaaagaaagacatttggacctgatgaaacgtgaaaacaaacatgctattagattgttaattcaattacaccatagtttaccaattggtttattttttaggagagaagagtaatgtaaaaaaaaaaaaaaagttaatgaacctgagattttcctttgacacgattggctatcatggagaggccttgtagccattcctcagggttgaagtgttcatctccaaagaagccattcccatcattgtcgccacaacaccatttagggtcactaacatggttatcagccaacaccatcatcccttgtctcccaaactcatcaatcacagcatcaaaggcttccacaagtgtagcat

SEQ ID NO: 52958 - DNA, 174 bp, Glycine max
ttacaacgacatgcacaattgcatctgcaactctactgcactttaaggataccagaagaattatcattagcttcccactgagattatcttcactacgagcccactttcacatcttgtgaataccatcggtacccacgtgccaaacatcagcaaccacaattttatacagttgcc

SEQ ID NO: 52959 - DNA, 471 bp, Glycine max
  unsure (1)..(471): unsure at all n locations
agcttaagaaatgagggaaggaaaaggtaacccatcaactacttctatttatattatcctccaagctctagcatgattgtaataaattacaaaaattgtcttcttcaattagtcaaataaatttagtaattagtataaagttaactntgaactatatatggttccctactcaaattgtcagcctatggttgtgtagatagatgatagattagaggatgagtaaatgccacatacaactagcatagtactagcaaatgccatttaagggtagtgaaggatcatcatattctaatcacaccatgtactaaactaaacaagacaatgggaaagtggagcaataaaggatcggtacagtaataaggaacattaatcaactaaaactaatcattgcatgaacaagtgggccaattcagtctattccacgactaacnngatttagttattgcatgtaatgaatgaagctgaatcagg

SEQ ID NO: 52960 - DNA, 454 bp, Glycine max
  unsure (1)..(454): unsure at all n locations
gaaactcagcttttatccaggctcatcttggtggtgaagctccttcttctatggtttattccctagnggatggcacctnctctcacctcttctcatttgtcttccgctgcatctccatggtggaaaatcaccattaaaggacctcattgaagctcaaagatccagcctccatagaagccccacaagcaagcttccatcacaagataccttggacacgcatgtatatggcaaaatagctcacaaaatatacgtatgtttcaggagcaaaatacctcaaaaaaaaagagagagagcaaaaagagagcgagcaagaaaagaataagaaaaaaataataataaaaagttgtctagctaaaaaacaacatgcttgtgaaaagagataatttccaacttttctttgacagattatactgatcttaaccagcttcttgagacaaaaaaatgtgctacatat

SEQ ID NO: 52961 - DNA, 436 bp, Glycine max
  unsure (1)..(436): unsure at all n locations
agctntagttacacagacaattgtactcatctatctcaccactcaacctacaattatgcaaccagtgattnttgaagatgctatgactcaaccacattatatttaataactgatggggcaagggtaactattgtggctttgtcttcaacacaaacataaatcctatagggaactctacgcatgcttggatggcgtccatcccaaattaacatggaaatgtctttccagcatattccttttattcaacaatcgatacgatttgttcaagtagatagactangatcttcgtgaatatttaaattcgaacaattaaatcaaacgggagtcaatagagatgttcatttgtacttgaacgatgatcagattctggcaattccaactagaattctgaatctaacattgcctccacttcaacaatcaataaatcatagtaacc

SEQ ID NO: 52962 - DNA, 478 bp, Glycine max
  unsure (1)..(478): unsure at all n locations
agctngtaatatagggaagcaagttataactctcttcaaagcanaaatattgtttctacttcaaaaccccttgaactacttcacattgatttatttggtccctcaagaactacgagtttaggtgaaaattactatggcttagtaatagtggatgattactcaaggtttacttgaaccttgtttttgaaaaccaaaaatgaagctctcgatgctcttcacatacttgccaaggtgattcacaatgaacaaggtctcaacattatttcaattagaagtgatcatggaggtaaatttcaaatgagtcttttgaaaaattctgtcaagaaaatggaattcaccacaattnttcagcctcaagaacaccacaacagaatggtgttgtggagagaaataatagatctcttgaagaagacgcaagaacccttctaaatgagacaagggtacctaagtacttttgggcagatgttgtacatattat

SEQ ID NO: 52963 - DNA, 464 bp, Glycine max
  unsure (1)..(464): unsure at all n locations
cttgaaactcagctgatgcaccagattcttgttctaccagccttgcttttctacacaattgaaagatttgtgttgtgtttgcacaagactaacttgaagcatctaactacagatatacaatctcaactcttagtctattctctaaatatgttcaaggtgttttgagagatcttctaaactttgcaagaatttacagaaaactttctacaaaaataattntgatgaattcacatgaggttcatgatccatttcttcaaagtttttaacatgcgtattcatttgcatttaatcaaaataattagaagtccttattcatctcaattcaaaaatgtcttttaacttaacatgatcttcacactccttcgtagctaaaggtgctttcatggttttattctcccatgaaanatcttagaatcacatttcagaggaaaaagatgnggtttttaagcccacatagtagcatc

SEQ ID NO: 52964 - DNA, 435 bp, Glycine max
  unsure (1)..(435): unsure at all n locations
tgaaagaggaagtgtagaaaggcgaaacttcttgcttcaattcgttgtccacagcgcgcctnactgcggcacatcatcaaaacaacatctcgtccgctctgacagaaagacatctggacctgattaaaccacatatcaaacacgcatttacattgctaattcaatcacaccataccataccatttgtcttatctttcaggagagacgagctgtgtaaatataaaaaaaacgccaatgaacccgacaatctcctttgacacgattcgctataacggaaaggccttgatgccattcctcagggttgaagtgtcacttccaaagaatccattcccatcattcgacccacaacaccatttagggccactaacacggttattatgcaacacctatatcccttgtctcccaaactcattaatcacagcatcaacgcctcca

SEQ ID NO: 52965 - DNA, 475 bp, Glycine max
  unsure (1)..(475): unsure at all n locations
ctgaggcatggcaagctaggatagaggcacttacccgctgtagtctgattattacgaagaacgaacgatgaatcttcgaagaactgtcgagaatcttcgcgtaattactcacgaaaacgttacggaaacgttacggaagcgtctcggcttggattntcttcacggaaataattctcctcagcatattcgaaagagagagaagtgcctaaggggctgaacccttttcttcttcacttctttccctatttatagcaaaataggggagaagcttgccgcccagctcgcccaggcgagcaaggttgcttcctccagaagaaacaaccttctggaggaatctnttggagggcccaagtggacctggttgctatttacacctncccttttactaaatgcacccacttatatatttctctggaattcttttttcgtaacggtacgaaactatacgaatttcgtaacgatacttatttttctt

SEQ ID NO: 52966 - DNA, 451 bp, Glycine max
  unsure (1)..(451): unsure at all n locations
tgcatcaactagtacccaaggtgccacccttatgagatagttagagatcgactcatcgagagggctggtcatcccaaatccacaagatttggacattagatgtaggaaatctatgcagttaacatgatccttagggatgcagatgcatgcaacctttgtcgtgaaacttggtaaatgcggacttcatatgaaacaatgcaatgtaatggaaagttgtacaatgttcatgacattctttccctattttgtgattttgattttgatttaattttttttttggaaaacacagattgactgtccttttgaaagaggtgataattcatgcaacctcatcctatccttttttgcaaatctctccgggaacttcctcagagtgtgtgttctgtttgatttagtcacttgaccgttntggagtgacgggaatggagccgtttgatgcttaatcaatcta

SEQ ID NO: 52967 - DNA, 441 bp, Glycine max
  unsure (1)..(441): unsure at all n locations
gcagtgctaagctttgattgagcagagagtccttcagaagatgcaataacgacagcnacactgcttgcttgagaagactnggcagcctccacaacggtctcgccaagaccctanaaggtgaaggagtggaaggtgactgaccaaaccaatcaatccaaccctctttgatccaagtcctgtaattctaagaacagttgactgaccaactttgccagagaaatcctcttcagaagaggcttcagctaataaaccacccaactttgagtcgatctttctcaaaatcacattctcaaacttcgagttngcatctctagccaaatctttctccgtaacacccactgccagaatgtcccctttccattccgtcacatcaacattcttagaaccaanagagaatctttcacgaatttcacaaacataaaacgccttttcagcatcaca

SEQ ID NO: 52968 - DNA, 359 bp, Glycine max
atacatggcaccaaatatcatcctgaaagggtaaaacccagctaggagaacgtagaggattactccgcatgaccatatatcagcccttggcaccgtcatagcctttctttgcaataacttccggtgacacgtacgcaggcgtgccgcacgtggtgtgtaacagcccgtcctctttaaggtggtcggagaaggcggtgagtccgaagtcggagaccttgaggttgccgtgttcgtccaggaggagattctccggcttgaggtcacggtggtagacgccgcggctgtggcagaaatcgacggcagagattaactgctggaagtagagtctggccaggtcctccttcaagcgtcccttggag

SEQ ID NO: 52969 - DNA, 428 bp, Glycine max
  unsure (1)..(428): unsure at all n locations
atcgatgagctggataataatctgcagcttctggcggagcacgtggagggcttcgaggatgacgctgcataggttcgggacacttcttcgagttcgatttggacgaattggcttacacggaggcaaaggggaggatcataaaggggcacacgggtttggcagaattgcgtttggggaagtgggtttatagtgtaaccagtgcgggtgtgggaggcnngcttagacatagtataaccctctcacccaacacttccnnatgggaaaactganttcatatgggtaccccgttcacattcatacataataattaccactatcgctttcaagagacttccattcatctctaattcatcgccggttcttttaattgaataattgggtcagtcagggaacctctttataanatcagagtcaattattcatttctg

SEQ ID NO: 52970 - DNA, 388 bp, Glycine max
  unsure (1)..(388): unsure at all n locations
ttggtagcagttactctctaaggcgatgtcctaatagaatctatttgcgggtgggacagaagaaatatcttacgatgggtgttttgagttgaggctgatcatttattggtaagctatagtaaaactgtggcacacaaacttgcgttaatgtttccaaaatgatttcaatcatagaatagatatatcaaagcactttcagttggtaaaatattgataggtaggtagttggccaaatgaagtcttcctttatcgatgttgtcaatacattaagaggtattacgttcgacgataattggtaacattaatattatactctnttatccaatgaatttagggaagaaaacaagattttagttggggcggntactangaataccaattaaagtga

SEQ ID NO: 52971 - DNA, 415 bp, Glycine max
  unsure (1)..(415): unsure at all n locations
agctcgtacgcacatcgttcacgagtatgatatccactctattantgttgaagaanangagaacttcaaccttataacgcagcggggcggacaaaagtgggcatctaactagaatggtcatcattgtcaatgcggaaggtactctacgcttcactggtcatgatcacacattattgcagcttgtggttacgtgagcatgaactactaccaatatatagatgttgttatacacacaagcacatcttaatagcttactccgcacaatggtggcctcttgagaatgaagcagctattcctccttctgatgacgcatggacacttatccctgacccaactacaattcgtgcgaaaggtcggccaaaatcaacaacgataatatattatatggattgtgtcgaaccatctgagcaccgac

SEQ ID NO: 52972 - DNA, 461 bp, Glycine max
  unsure (1)..(461): unsure at all n locations
tataagaacaaaattgccttaatcattctcaaatatgcatgtgaattatgtttcatcaacaagaatcaagccaaggctattgtgcaagcaatcaatggggcacaacacaccaaatgattataatgatggatggctcacatactcacacaggtaaaatcatcactttcaaattgagctttcaaaactatcatgacatgtagagaagaatcaatgatgtcaagtcacacaatgtcaagaacttttantttcaaaacaattacccatttcttgaacatatcctataattcaaagaaaaacatgcaaagtcgtacgtgcacacaaaattgacccagaatattaaactgaaaatccgacgaaactaacaacattaacaaattaacacaactaacaaattaacaaaaccaacaaaactagcataaccaaagaacactcccccccccccccatacttaaacaacacat

SEQ ID NO: 52973 - DNA, 358 bp, Glycine max
agcttaaagagtcatgatcgactgttgcacttatatgttctggaggctctatgctatcatgcactactcctgatgcaagctttccaccatggagactacctagtatggtggagcggaggtaaaatagaacgactctggcctcgtaggagggggtgcctctaatagatacctagtcctgtccctgtgggtccctattaaatgtgatatatgggtccgtggggttccaactattctttctaagataagccctattaatgatcagactaagggactcaaaggtaaaagagacaaagacaacccccgggcttcacacagagcagtcatataagcttgtaatcccaacctcgaggagttggat

SEQ ID NO: 52974 - DNA, 337 bp, Glycine max
  unsure (1)..(337): unsure at all n locations
aactatgaatttatatttcgtttgttgacacgcctacccgaataaaatggatacatatatgtggaggctaacggtggcttcatcagcatatgacatcgtggagtgttttctgtacaatctgttttacatatattcaaatgtgcgtaatgtatntntacttgactcatttatattgtgaatgatatcaattntccgtaggtatgcaatgcagntgctggggctggctatctcaatgctacccttgtattccccaactctcattatcatagcatatggaaagatcccaggntgggttgatatgctatcaattntaacttttcaggactagganaatcta

SEQ ID NO: 52975 - DNA, 347 bp, Glycine max
  unsure (1)..(347): unsure at all n locations
agcttgntgcatntcgtatattcttcatgcatggactataagtaagaagacttacaagtcatagcacatggctcgacttcaaagtcgtaacagaggccacgactgtagtactttatgtacgatgggagtggcattctagttcacgagtcgtgggttatggcacaactttaatatcgtgacatttggcacgactctaaagtggcgtttattattatctgttaaaataatacgtcatatggtaatattactttagggttctagataaataaaaatactatatgttataagacaatatgttgctatggttttagttacataaaaatgtcttatgttataaggtaatatta

SEQ ID NO: 52976 - DNA, 470 bp, Glycine max
  unsure (1)..(470): unsure at all n locations
ttccttttcactcatgtgtccaagtctttgatgccacatggttgaattattgacagcctcaataactgctaccatatcctcatctgcaatcatgtaaagagatcctcgcttctttccacgagccacaacgagattgccttttgttaccttccaagctccatctccaaaagtggtgtgatgtccctcatcatccaactgccctatagatattaaatttctctttaaggcaggaatatgtctgacattgtgcaatgtccatagggatccactggaggtcttgatgttgatatcacctcttccgacaatgtcaagagattttccatctgcaaggtaaacttttccaaatcttccagaaacatagttagacaataaatctttagagggagtagtatggaacgacgcacctgagtccatgatccatgaatcaacaggactatccaaactgcaanataatgcatcatcaagttcat

SEQ ID NO: 52977 - DNA, 467 bp, Glycine max
  unsure (1)..(467): unsure at all n locations
agctntactatgcagagaatatccaatgaaattgtcttcttctgacttagcatcaaatattcctaagttatcttttccattattcaatacaaaacattttctatcaatgatatgaagatgtgagatgtttggttttctgccattgaacaattcatatggagttttctttaatatgggtcttattaacgccctatttaaaatgtagcatgcagcgttaacggcttcaacccaaaagtatgttggaagaggagtatcatttaataaagttctagcaatctcttccaaagatctatttttcctttcaacaacaccattttgttgaggggttcttggtgcagaatagttatgctcaatcccatgcttatcacanaataattcaaattctttattatcaaactcacccccatgatcactcctaatagatataatcttgagatctttcttattttgaatgatgtttgcaagtt

SEQ ID NO: 52978 - DNA, 214 bp, Glycine max
tcactacaagaaaaatgacctatgcctacggacgcctgttctctacacacattagttcacgcagcagattctaaaaacttccacctacaagtgactaacgtaggaaaacacacccacctgaccaacccgtattctgcgctagtaaatcataaaaactcgcaaaagacttccaccaccaacacatcgagtagcgagactacaaaaaagtggccta

SEQ ID NO: 52979 - DNA, 139 bp, Glycine max
actcagcttcaccccaaagaggccttggatagagcttatgaggttctttcttgaagaagaaatgagagagatagagtgatgcctcctaccccctaaggcattggatagaagactccaagaagattgggctcctttgttt

SEQ ID NO: 52980 - DNA, 321 bp, Glycine max
cacggcgttattgccttacgataccgttgaagctccatcgccaaaagtggtgtgatgtccctcatcatccaactgccctatagatactccttccattgtagcgctggaatctgaccgacatcgtgcaatgtccatagggatccactggaggtcttgatgttgatatcaccgtcttccgacaatgtcaagagattttccatctgcaaggtaaacttttccaaatcttccagaaacatagttagacaataaatctttagagggagtagtatggaacgacgcacctgagtccatgatccatgaatcaacaggactatccaaact

SEQ ID NO: 52981 - DNA, 424 bp, Glycine max
  unsure (1)..(424): unsure at all n locations
tagccctagatgggatggaccttttcaggtctcagagatgttcattatcaatgcctataggttagacctcccagaagagtatggagtcaacaccacttttaacatttctgatttaattccttttgcaggtggagccaatattgaggaggatgaaccaacaaatttgacaaatcctcttcaagggggaggggatgatgcaaccctcccaaggaatggactagtcacttgagccatgagcaagaggctcctagaggattgggctagggctgctgaagaaggccatanggttttcatgaacctcatggtagatttttgagcccatgggccaaggttaggtccacttatctttgtacatatttttcatactctaatttcatccagggactatcggtcgttgatcttttgatccttgctagncgactta

SEQ ID NO: 52982 - DNA, 246 bp, Glycine max
  unsure (1)..(246): unsure at all n locations
acaagcaagctttcatgcagtggtaatcagagcacaagagctttcagtaggtgctccttaaacctccatataatttntgctttaccttctcttccattggtttttcttcattttttctccatgtatctcctcaaatgtcttgtgctaaatggttgtaacatgattctttanaagtttcaccgattaaacttgctatagaagctagaattaattntctatggttcannattcttgttcttgttcttg

SEQ ID NO: 52983 - DNA, 462 bp, Glycine max
  unsure (1)..(462): unsure at all n locations
cctcagagaggtccaggaaggacaaggcggccgattgatctagttccgctcctgagtatgacagtcaccactttaggagcgctgtacaccaggagcgcttcgaggccatcaagggatggtcgtttctccgggagcgacgcgtccagctcagggacgacgagtatactgatttccaggaggaaatagggcgccggcggtggacatcactggttactcccatggccaagttcgatccagaaatagtccttgagttttatgccaatgcttggccaacagaggagggcgtgcgtgacatgagatcctgngtaaggggtcagtggatcctgtttgatgccgacgctatcggccagctcctgggatatccgttagtgctggaagagggccaggagtgcgagtatggccagaggaggaaccggtctgatgggttcgatgaggaggccatcgctcagctgctatgtatac

SEQ ID NO: 52984 - DNA, 436 bp, Glycine max
  unsure (1)..(436): unsure at all n locations
gactggactaatacanttgccttcccagattcatggcctgaggtgagaacctcattatcatcttaaggagttccatattgtttgntcaccatgacagcccctgatgttcaggaagaatcatatctttcttaagagctctttcctcatttctttggaaggaagtgtgcaaaagaattggttgtactacctttgctcccaggtccattaccagctgggatgaccttatgagggtgttcttggagaaattcttccttgcatctaagaccaatgccatcagaatagacatttcatgcatcatgcaacttagtggagagagcttgtatgagtactgggaaagattcaagatattgtgtgcaagtcgtcctcaccaccatatttctgagcatggagaggagtatgatngatactgctagtggtggagcccttggtgatatga

SEQ ID NO: 52985 - DNA, 439 bp, Glycine max
  unsure (1)..(439): unsure at all n locations
tagaaactcaagctatagatcggataccatgctacagctacaccggtttactattnttgatagacacggaccaactactgttcgttcgcagaatacgctcgcatctttcggcaatacatccggagatgcccntttggacatgtcatccctttgaacttatcaaagtctggtactttgaacttgggagggatgacgatgttgggcacgagacacaaattcgtcaaatccgagaatgggtaattaccaaggccctcgactgctcttaacctctcttcaagcgcctcaatctttcccttatcttccgcgaagggaacatattcttttactggtgtgggtgatgctgggatatggcggactatgttcggtnggcgtagttcatgtggggacagatctttgatgtggagcacgcggccaagatgggtatctcctttctcatcgt

SEQ ID NO: 52986 - DNA, 465 bp, Glycine max
  unsure (1)..(465): unsure at all n locations
agcttgttgattntagtaagagtatcaaatctttcaagtatctataatgataagtaaagtatcatttcctcatagacttatgcgataattgcgtaataattagtaaatttaatagactacaagtgtagaaagattaagtaaccaaattgtatggcagttgcatataaatattagatgaagataaaagagtattatttgagaaatcaatgagataacctaagtgcttttttctaacagttggtatacacaaaaaattgagatgtaatcaatgagagaaatttatcagggtttaactccatataaccatcttaacatgcaatcaatattttcttattaaaaaaaatgttagttaccatcagcccataattttatttaaaccttaatcccataaatgagataacctaagtccttggattctactattaatctcttagattattgtaccaaagtactagctttagaaat

SEQ ID NO: 52987 - DNA, 486 bp, Glycine max
  unsure (1)..(486): unsure at all n locations
acacaacaaactaagcttaacatgaagcaaccagctcacctgggcgagcatgatacttctgttctattccaccagctcgcctaggcgagntgggcagcaagctcctcccctactttggttataaatgggcatgggaggctgaggggaacgggttcagcaaccttgttaagcatatttcacttaaaattagtgaggagaagaagaaagaaggagaaaatcaaggccaaggcgcctccgtaacgcttccgtgaccaattccgtgaatgttcttcgtcgntcttcgtcttttcttcatcgctcgtccatcttcaaccggtttgttttttatcttgaagctttgaattcattatatgcacccttaggggtccattctttctttgtatgttgtcatcttcatctcgtctactatcagtattctttttcttcattttaagcgagtttcgaccgatcgtttaagctgtaatctcagttaatcaatgttaaaat

SEQ ID NO: 52988 - DNA, 448 bp, Glycine max
  unsure (1)..(448): unsure at all n locations
agcttcatcctttaatctatgccaatgaatatactattctcgttcataaagcttcattagatgttgcattttagtatcactgcctcttatgaaagaacggcatgcacttcttgcaatgtatatttgtttgattgttgtacaactattggcattgtgctccttcaatgttagcaaaatgtttcttagtttaccattgactttgccatattaacaataattgtcttctcattcttagtcaatcgaccagcgtatggatgtccaactaatgacttggtcaattcatgattgtgactcccacacattaacttcaccatccattcttggccttcaaccactgtgttcccatgaagcataaagggacgcccacattttctactgccagtatcttttctaacanaatatattttctagaactatactgaccactcctttcacaaccaattaacac

SEQ ID NO: 52989 - DNA, 473 bp, Glycine max
  unsure (1)..(473): unsure at all n locations
tcagaccanagcagttcanaatctaggtatctaanacccctcaatttagtgtgatttcaagggttgagaagtgaaaatgagaantggggtaatttggagcanactctcatctcaaacaagtctataacatntaattaaactcgctcaaactgggtntacggtgaaaactccaccgattcanaatttgacccctcaacacccaatttaccctagaaatggctcatgctntcacctttgtcactcatttttctcattggctcagcccaagccttcccacaagtcctaaacgacattttaagctaggattaactcactntagcccccaattaccactaaccccaagtttagcttttcaaaccctcaaatcctcacacttttccactcacatcactaccattctcacatttaaccctaggttaactctccccatcatctctaccagttttctaccaacaatttcagcccacaagcat

SEQ ID NO: 52990 - DNA, 475 bp, Glycine max
  unsure (1)..(475): unsure at all n locations
taagcttatccttatggctggcctccggacttcactccctgtgccatctgtttattataagccaagcccctactttcgaggggcagctctcaccttatgacgactatcccgggcaagacaatgaggaaggagatacccatctcggtcccctgctccaccttaaagatccatcctnccatgaattaccccaaccaaacatagtccgccatatcccgacttcacccacaacccgtaaaagaaatctgttcccttcgtggaagataagggaaagattgaggcgcttgaagagaggttaagagcagtcgagggcctcggcaattacccattctcggatctagcggacttatgtctcatacccaatatcgtcattcctcccaagttcaaagtaccggactttgataagtacaaagggacgacatgtccgaaagggcatcttcggatgtattgccgaanaatggnggcgtattctgcggac

SEQ ID NO: 52991 - DNA, 434 bp, Glycine max
  unsure (1)..(434): unsure at all n locations
agcttgagatgaggaagtgttgaagggtgatacttcctgctnttattgttgaccacagagtggtacctggagatatgtcgtgggggtcaggagaccttgtggacgtcaggtggggtgctattgcccaaaaccaagcttgaccaatcccgacccaacccgggcatagtcggtcagtgagaacctgtgatgtacctaaacaggcgagctcctggcagtcaacagataaaaggaacaaagaccacaaagcaaggaggcttgtggtggctggccagctgtgaattttgtgtaatatgtggattatggcctctggtaatcgattaccaagggtgggtaatcgattacaaggcttataattgaagacaggaggctaagatggtctctggtaatctgataccaaggggtgtaatcgantaccaggcttaaaaacgaagtca

SEQ ID NO: 52992 - DNA, 460 bp, Glycine max
  unsure (1)..(460): unsure at all n locations
agcttactacacagccacattgcctntcaatattatcttttctttctatttggtcttgcttcctacattagattattcccccttttatacttcctcgttggaatatttatctttacaacccttgtaaatagtgtgcaggatgcattgtcgatccactaatataatggagcgagaggctcacaacttacctcaattatgcactatgaatttttcctatatttactgtaagtattttggcatgctgcactagttccataaatataaaaatcgtaattgaatactacaagatttgtgtcgaaggtgttagaacaaagcttgaagagcatgaagttcctagtgtagttgttggtttgataattctacaatgactaacatatttggatagatgaaacatctgtattcattcgtnttagtctaagcatgagtgtgtgacggatattgtttatcttttacatgctta

SEQ ID NO: 52993 - DNA, 461 bp, Glycine max
  unsure (1)..(461): unsure at all n locations
acctatgaaactcagctttagtttaatgcaggaaacatggcttatgtctaaaaatctataatttggcttgtgaaagtggaaaggcatgaaagttaggatatgtttgtgagagtttttactcgaatttggctgtcccatgaaggatactttgcacctaggtagcatggaaaatacctttcaatggtatgtgaatatgtgtgtaaatataggtagcatggaanacacctttcaataggtgtgtatttatatgaatatatggcataaaagtccttgcaaagtgtgaatgagtagcaaaaaatgtctttcaacatatgcatatctgagaataggtagcattaggagccttttaaaaatgtccaatgtcaaagggctaggacgcttctaaatgatatatgatggcatggaatttcttttcaaatgcaatatgtaatgacgtattagctttcatgtgctataataag

SEQ ID NO: 52994 - DNA, 371 bp, Glycine max
  unsure (1)..(371): unsure at all n locations
acacatagaaactcagcttctcgggccatttttgttgggatgaacaaaagcgcttactttntcaaaatgcgaaaaagatgaccctaaggctgcaaactcgtcaatcccgtgggtatgacttttgaaaggtgggaatagaagtttctgaatgtaaaaacgcccaccctttcgtgattcttataatttggtgcaggggcggctcgccccagcgagctaccctgagctccatgcttccacctttgtctctcattgaggggaacattaaccatgtgccctcccttctgatggattagcatcttgactacctgagaaacactttntagccgcctactaccactaacaccaagattaccttttcctatcaaaacata

SEQ ID NO: 52995 - DNA, 469 bp, Glycine max
tgtaggattatggggtacccatcacatgtgcgactatgtgtttgtctgtcgatggagcacaacaagttttgcacatacacaaagcgcgcataaacccaccatcccctggtgcccacctccaactgagctcacgtactcccacgtagcccatatcctcgttcctctcaacaccgagtccccattaatcctcccaaagctttccaacatccaagtaatacaacattcagacagcacaaattatcacagccaagcaaaacagggcaaaggcagaaaactctgcccaaaacaccaaccaaaatcacagcttttctcacttaaagaccccaataataattccttcgttccaattcgttaaccggtggatcgactcgaaaattttactggaagtctctagtacataatcctacattgtgaccgttgggatctactagcaaacatccaaaactcattctgtactactctttccaca

SEQ ID NO: 52996 - DNA, 406 bp, Glycine max
  unsure (1)..(406): unsure at all n locations
agtaggaatatggngtacccatcacatgtggtactatgtgttggtcgggcgatggngcacaacaacgtttgcacatccacaaagcgcgcataaacccaccatcccctgttgcccacctccaactgagctcacgtactcccacgtagcccatatgctcttttctctcaacaacgggtccccatcaatcctcccatgctttcccaacatcatagtaaaacgacattcaaacagcacaagctatcacagccaagcaaaacagagcaaaggcagaaaactctgccaaaacaccaaccaaatcacagcttttctcacttatagactccaataacaattccttcgttccggttcattaaccggtggatcgactcgaaaattttactggaagtctttagtacataagcctaca

SEQ ID NO: 52997 - DNA, 493 bp, Glycine max
  unsure (1)..(493): unsure at all n locations
agctanagtatgcccgagtcattcatccctatgagatgtngtcgaagtattggcgatcagaattgccattccttggattatagggttgaaccaagctcatgcttttacaaaaaggttcatcaagtcaagttgaaatatggaagtaaccgtcttgcaaaattggggcaaaagatgaattgagtcacatcactgcttcgtctactgccaaacatatttaggattattgatgtccttgttacttccagtttcaccttgacaaagatgtcatggaccatgttgaaaatctaaattgattcaaccccatatcttgcgtaaaaattcgcaatacttcaactgtacatcattcgcatgcatccatgcttttcattggttgcattggctcgtgcattctttcctttgaaaataaaataaaatgaacttaatcatttgtataaaaaagagagggacacgctttacgacgcccttaccgaactcgtgctagagctagaataat

SEQ ID NO: 52998 - DNA, 366 bp, Glycine max
tcaatttcaatgaccacaacaaaggtagggtttatacatattaatgatatccatgccaccaaccagataggcataatcatattttcgcagaagacaaaagtataccgtcaatgctaccaagaagaagaaacactgagtaccgcccatgctatgaagaagaaactattcactttggaagactacaccggtgaaggtttctcgggcgcaaccaaccttggagatgtcaaggaccgtggccaggtgtccagtgtgctgcatagcgaatgtggtgaggtttctcgatgaaaaagactatagaactgagcgccgggtatattgggctggcgttcttatatttgtaaaacgtagcttccacatcagttttca

SEQ ID NO: 52999 - DNA, 491 bp, Glycine max
  unsure (1)..(491): unsure at all n locations
agctngcctcanagaggtccaggaaggacaatgcggtctaatgaactanttccgccccggagtatgacagtcaccgctntatgagcgtngtacaccagcagcgcttctaagccatcaagggatggtcgtttctccgggagcgacgcgtccagctcagggacgacgagtatactgattttcaggaggaaatatggcgccggcggtgggccccactggttactcctatggccaagtgtgatccagaaatagtccttgaattttatgccaatgcttggccaacagaggagggcgtgcgtgacatgagatcctgngttaggggccagtggatcccgttcgatgccgatgctatcagccagctcctgggatattcgatggtattggaagagggccaggaatgcgagtatggccaaaggaggaaccggtctgatgggttcgatgaagaggccatcgctcagctgctatgtataccggngcaggatttngcccggact

SEQ ID NO: 53000 - DNA, 356 bp, Glycine max
  unsure (1)..(356): unsure at all n locations
atactattcttaaaacaaaaatgacatacaacctcctcccataaatacaaacatcaatgtaaatttagagcaagcttatgcgcatatttccttacaaacgttctcttgcacaagacanttctttaactgaaaaaaaaaaatgcacccatatacaatcaaggcagcttcgttacctagaatatntacacgtacttccaaggtgtatttgttacttacatcacacacctccttggctaaattcacatacatgcatactcaaagcatnnntgggtaccaaaaaatgcacatgcgcacatcttggtatttctaatacctatacatacacaaacttcatgatgaatcttgactatctacac

SEQ ID NO: 53001 - DNA, 203 bp, Glycine max
  unsure (1)..(203): unsure at all n locations
aaattatcctgtcataggaacaaaatgggtttttagaaataaattagatgaacatggtataattattagaaataaagccaggttagtagcanaagggtataatcaagaagaaggaatagactatgaagaaacatatgctcctgttgcaagattagaagccattagaatgcctttggatatgcatccataatggattttaactt

SEQ ID NO: 53002 - DNA, 427 bp, Glycine max
  unsure (1)..(427): unsure at all n locations
ttaagtcacctgcggcatgcaagctngaaggtaaactagatgctagttaacctggtatcccagctagcgttgaatcagaaatctatacctgtcgcanaagtctatggtttatgctcctctgccgaccaccacacagatcttttcccttccatgcagcaacctggagcaattgagcagcttgaagcttatgctgcaaacatttacaacagacctcctcaacctcagcagcaaaatcaaccacagcagaacaattatgacctctccagcaacagatacaatcccggatggaggaatcaccctaatctcagatggtctagccctcaacaacaacaacagcagcctgctccttcctttcaaaatgatgctggcctaagcaagccatacattcctccaccaatccaacaacagcaacagccccagaaacaac

SEQ ID NO: 53003 - DNA, 466 bp, Glycine max
tgccgcccagctcgcccaggcgagctcagctcgcccaggcgagcatgtttgcttcctccagaagcaaccgccttctggaggaatcttctggagggcccaaatgggcctgggtgctatttgcacccccatttttactaagtacacccccctctgctgttttttggtgattcttttttcgtaaagttacggaaacttacgaatttcgtaacgatacttgttttctttccgtaatgttacggaaccttgcggattacataatcatcccctttttgacttacggaatgttacggaacctcacttaattatgcaacgatgcttccatttgatttccggtgtgtcacggaaacttacggattgtgcatcaatattttttttggtttttcggcatgtcctggaatttcacaaattgcctaatgatgggtgccaagcacctcacgaggaccaaagaatggtcgcacgtcattga

SEQ ID NO: 53004 - DNA, 405 bp, Glycine max
agctctcaatgaagctacctaggctataataataagcgtgtgtaacactcgttgtaacatatacagaagcatctcacagaagctacctaggatatcaatgaagattctcaagaaagcttctaaaggactaagttcttcaaagtacaacttctcatcctctatcgttctacaatgtcgtgctcccaccttgttctttctctctctctatatattactccattgaagcaccctctgcaaacttcttattcaaggcactctcttagtggcgaagctccttcttccatggcttattccctagtggatggcgcctcctctcaccttttcttcttcgtcttccactacatctccatggtggataatcactattgaaggatctcattgaagctcaaagatacagccttcata

SEQ ID NO: 53005 - DNA, 376 bp, Glycine max
taacgagtttatgagcaactcaggattcaaaacatgtgacatggaccattgctgctatgtgtacaaatatactcatagatatgctatacttgacgggtatgttgatgacatgttgattgctggatctaccctggcagagattaacaggttgaagcagcagttggcagaaaactttgaaatgaaggatcttggtccagctaaacaaatccttggtatgagaattcttagaaacagatcaaaaggaattttgaagttgtctcacgagaaatatatacacaagttgtgtgacaagttgtaccttgaagattctaagaccaggaatacccctttgggatcttgatgtgaagtttcacagaagaaatctttgtagacaaat

SEQ ID NO: 53006 - DNA, 428 bp, Glycine max
  unsure (1)..(428): unsure at all n locations
agctngtatagttccncaatntatggttattttgtagtaaattntgtaaataaatcttgttttatggttaacgctgtctctagaacatttccattggatttaatgatgaaatctgtgcattttcaggtgaaaaagaggctaagttttgaattacaaatagtagcaattgggttaagctcagcggttaggctaagcgcatattcaccactaagcgtagcttcagcgtgcttagcgcanaggagaatcaggcagagcatcagcatcaaagccacgtgctaagcgcgagattagtgcgctaagcgcaacaggtgccttcaaccaggctaagtgcgagactggcgctaagcccaattccacttactcgcactaagcgcgaaggtggcactaagcggagtgtcgcgaattcagagcctatntaaagcctgtct

SEQ ID NO: 53007 - DNA, 297 bp, Glycine max
ctaggtgtgtattagagtgttgtgagactcggtgtgtgttttctccttggcttgactccctttgtgtagttgctggagtgcacatgggcctgtgtactcgcactaagcctacgatgctcgcttaccacaggtgcctgtattctcgctgaacgccgcttgggatgtgccttactcgcgcttagcgtgtgcttctcgatgagccggctgcgcactgaacagacagttctcactaatcctgatgtaaaaccttccctttgtatattggctctattatctacatcattattattcttaatc

SEQ ID NO: 53008 - DNA, 450 bp, Glycine max
gcttggtgcacgtacagcttccgtccgtatgtatgaatcaaggtataatcccacttacccattacccattccatcaccacgcccttcgctttgtacgcatatatgcatccttcctctaccgcgggggctacatgaataagcatgtgtaccaaaccatgctgggtcatgttcctgccactgcacacactgtcctcatctatcactcctaataagttctagcataacacaggtgaatgcttcacaactcaaaaggcgtgtctcagacaagcttagatggcaaataataacacaagggcacgcagcaacattattaattatctcagtctgtgtgcctctactatcccaatgttaattagtgttgttcctattttaagtcatatacttgcctaagagtgacatcgaagagaatctctcattctctctctctctcacatctcagcatgagctgtg

SEQ ID NO: 53009 - DNA, 361 bp, Glycine max
  unsure (1)..(361): unsure at all n locations
gatgaagaanaagaagatgaaagagacntagatgaatacgaagaatatatggaaaagacactcagtgtcatactcggtaaattcataagagatttgtgcaaaccacagcatgacagcaattgggaagaaatcgatttcatctttgctgaacaagatgtctgtttgcagaagtggatttgctccagcaccgagccttatagacacccttcagctccaagaatcaagaatggagaaggtatatatgcagtccatttgatgtatgtatatgtgggtctgcgtctgcctacttaatgcaatgaatattgcctacagcttttaaggactattcgtcacaagaaaatatattcccaacattgttctc

SEQ ID NO: 53010 - DNA, 437 bp, Glycine max
agcagccgcatgcaagcttgggttctcaacatagagcgattcactttatgatctgtcccaatcggacatccgagtaacaactattgtcatttgaacttgacaccaaatgccggtgtcaacttggagcaatttaatatattaagggactcaattggacatccgactaaaaagtaattgtcgatcgaatttgggacgagcttctattttcaatttggaatgtatggatatattacgggactcaatcggacatccgcgcataaacgtatggtcatatgaaaatgctcacagcatcgtgatctcacatttgagcgtgtcgatatattatgggactcaatcgaacatccgagtaataattatagtcgactgaatctgctacgagcattcgttttcaatatggagcgtctcgaatatcaccggtctacatccacattcttgat

SEQ ID NO: 53011 - DNA, 342 bp, Glycine max
gctatcaatagacacgcgtgtagcactgtttgtaactttgatgaatgatagccttatgcgacacacttcatagtaccacttctctacctctattattcttcaagagggctccccctgcttctgttttcctcataaagcatcctttcaagcatcttatgcaaggcacattcttggaggtgaagctccttcttccatggcttattccttagaggatggagcctgccctctcctcttctccttttccttccgctgcatctccatgatggaaaatcaccattgatggacctcattgaagctcaaagatccagcctccatagaagctccacaagccagcttccatca

SEQ ID NO: 53012 - DNA, 404 bp, Glycine max
actaagcttccgattggataccatgctacagttgccccgaccaagctgtcttgttagttatggaccaacaattttttgtccgcagaatacgcctccatctttcggcaatacatccgaagatgccccttcagacatgtcgtccctttgtacttatcaaagtccggtactttgaacttgggaggaatgacgatattgggcacgagacataaatccgctaaatccgagaatgggtaattgccaagaccctcgactgctcttaacctctcttcaagcgcctcaatctttcccttatcttccgcgaagggaacagattcttttacgggtgtgggtgaggccgtgatatggcggactatgttctgttggggtagatgatgtggcgacggatctttgaggtggagcacggg

SEQ ID NO: 53013 - DNA, 492 bp, Glycine max
  unsure (1)..(492): unsure at all n locations
agcttcaagaattcatggcctcatcanactacttgtttctcgaaggcaattcaattaataggccctcccattttaatagagtgggttaccactattggaaaacccgcatacaaatcttcatagaggctatagatnntaaatattgggaagccatagagatagggccttatattcccaccatggttgctggaaatgaaactatagagaagcctaaagaagagtggagtgaggaagaaagaagattagtgcaatataatttaaaagccaaaaacataattacatctgccctaggaatagatgaatactttatggtatcaaactgtaaaagtgcagaggatatgtgggataccctacaagtaacacatgaaggcacaacagatgttaaaagatctatgataaacacattaactcatgagtatgaactatttaggatgaatgcanatgaaagcattcaagacatacanaaganggtcacacatatagtanatcatc

SEQ ID NO: 53014 - DNA, 313 bp, Glycine max
acacaagaaactcagcttacaacctctgacatgggtctaggcaaccagattatccatactttatgaggaaaagttcagcgacttctgccggttggttcgcgataagccgccctccccctccgtcttagcatcgtcttatgtccttccctccactcagagcgcttcatcacctttgctacctttccctcccaagccaccattgattcctttcaaatgactgtctcccgagaagttagcgactcacagtgagaagggtatctatttcaactgtgacgagaagatccggctaggtcacaaatgtgcctccaaggtc

SEQ ID NO: 53015 - DNA, 412 bp, Glycine max
  unsure (1)..(412): unsure at all n locations
ctcgataattgtttctatgataggcatgagatctacatcctacaacactagtgagggactagcttatacaagagtagtaaggttgaaaactacacaattaagggttggcttgagaaaaagtgagtcaagattcanaagttttctgtgctccttgataaacaagatgcaacacctggagaagttatatatttctgcagatggagatgggaacctggatttgcattntgatgtatttgcacctgtacttcagaaggttcgtcttagggggcagttaaaggagttaccaaactgggttggcaagctccaaaatcttgttacgctgtccttgttttccacgcggttgacacatgatccattgccactacttanagatctanccaatttgacgcaccttagtatcaattatgcatac

SEQ ID NO: 53016 - DNA, 307 bp, Glycine max
  unsure (1)..(307): unsure at all n locations
acactataaaactaagctgtaaaatattataacattccaataagaattctgtcctctggttatcgattacagtcactggtaatcgattaccagagagtaaatatcttttaaaagcttttaagaaaaacctttggccataacttatgcatcatcaatctggaaacttctttctaagactctagagactagcttcatcatatatcttggatttcttggagtcttgtnttggatcaaacttgagaaacacatttctttggcatcatcaaaacatcatgatatctttgcttctacaatttttgtataattt

SEQ ID NO: 53017 - DNA, 478 bp, Glycine max
  unsure (1)..(478): unsure at all n locations
agcttaagaggatcacatctaatattactgaaacaaatttatattgaattttttaatctttctttgacctaatataactgatttaaggaaagaacttaactgattntaggaaagaacttaactagctagtaactcatttgtatacttgcatagctacattctgaanaggaaatgttgcatggatcccgtattatcgatcaatatctaggaagataaagagagaagtgtataatgagtaacacagaataatgatacatgaatcatcctttattttaaacacaacattaatatcttntattntatttttttgctatctctctttttctattaaatcataagtcttattaaaactactattttcttttctttccctcntcctatgngnctaataggaatgtgggtattcattgaatatctctctaagtaatatatgctgtaaatataaagggagagagaagtagaaaaaaataagaataat

SEQ ID NO: 53018 - DNA, 474 bp, Glycine max
  unsure (1)..(474): unsure at all n locations
tttggcanaggaagaagaagttcanaaagatgttcanagagattcataggttgtaaaagaatatatcgaaagttattgaaatgcaagtcaaggtcttgcttttatagactcttcatgtctggtcaagaaaaaccactggaagagttataaccttgagaaaaacctgaacaccattggaagagatacatctcttgattntttttttcaaaacttgccactggtaatcgattgccaaaaccatgtaatcgattacacaaagcattttatgaaaagacgtgactgttcacaattgaatttgaatttcaatgttcagatacactggtaatcgattaccaatatattgcaatcgattacaccatttacaaatcaattggaacgttgcaaattcagttaaaagcttttgaaatcaaactttgccactggtaatcgactagaggaaactggtaatcgattaccagagagtaaaaactctgg

SEQ ID NO: 53019 - DNA, 391 bp, Glycine max
  unsure (1)..(391): unsure at all n locations
cttgaatgtcctatcatgtctctcgatgataggttgtctatangtgctcatactagaaacctatatgataccgtgagtcagactgtttctccgtgtaactttcacactcggaagacctacatagggtagacagataataatcaacgaatcttgttatcctcataaatagtgtctgcagctgtaacaggtccataaacactttttatcaccccgctcgtattcattcaaccactgcggctcagctgggtgtgttactatatctggaatacgatcggatggaagaataacagccaagctaccttcttcttcattcccatgagggaaaaagtccgtcctctttttgctgctgacatgagagacgtactacccatccccattactgtggcatgat

SEQ ID NO: 53020 - DNA, 472 bp, Glycine max
  unsure (1)..(472): unsure at all n locations
ggagctttccgaagtagatatgaaaataaacattccaagtttgatttgtatacaaaacacaagcagcaaccattaatcatttcagctgcaatgcaacccaagaaagaaatgcataacaccaatattccaaatcccatgaaattgtagatgaacctgtctcatcaagtgggaaaaaaaaaaggttggcattagcaaggaataataatgaataaccatctaagcatttcaccaaagacattacaatcacatcaaaattaaattaaaaaagaaaaaaaagtaactaagagcatgttnngattttccgccgactcgcagtacacgaattacaagatcaaatctaatagtcgaccgcaaactgaatgcaaaaagaaagagtggtgatgcttttgcaaacttcatttttgccncaccaagcgtctgattgcaacggatatctcaacatgcactatnacagtaatataaaatatagaga

SEQ ID NO: 53021 - DNA, 504 bp, Glycine max
  unsure (1)..(504): unsure at all n locations
gcacctgaggctgcagctaacaaccntanattctgattttaatttatatntagcaacagccataatcacttgacgttaaatntatacattntagatgtatcttcatttcaagttttacaaaaatgagcaaatgctcaaatgcattatagccaaaattaatatatattctttccagcttgatcttttaactcttttggtataattaatattagtcttttatctcttagtaattaaaaaaagaatgtactatgtaatacaattggtgacgtattctataaacataaatttatagttggttaattaggtttataaatgtaatggatgacataatattttttgtattcatccaaaaaaaatccacgtatgagtacacaagcgtgaatattcttctcaattataaagaatgttntcacaatacaagctagatcggttattgtgacgcatttttaagattctttattcttaatttgactgcctatatatacttaacacctagatcatata

SEQ ID NO: 53022 - DNA, 461 bp, Glycine max
  unsure (1)..(461): unsure at all n locations
ggtagggaagagatattctgacatgggattaggatctagctgaccaagcatcnacttaaccctggcatttatcaagaaatttagggtctattatatttatactgaagacagctgcaagtctgtactttgttcacatttcaaactcagtagatcttcacttcaaaggactttggttagagatataaaactatttttgtacatttcatttatccagaaatttagggtaatattatactaaagacagtcgcaagccagtaggttcatatttcaaactcagcagatcgtaattttttagaagttcacactgagaaaacaaaatgaacaaggccgcctaacttagggatattttcctcaagataaaatccatcacatcttgtaagaactcagcccaactaggtggaaatgcaggctcacaaagaaaaggaagagagtaagatgttgtcattaccactntccagcac

SEQ ID NO: 53023 - DNA, 480 bp, Glycine max
  unsure (1)..(480): unsure at all n locations
agcttataagaacaacatngccttaatcatttccaaatatgcatgtgaattangacgcatcaacaagaatcaagccaaggctattgtgcaagcaatcaatggggcaaaacacaccaaatgattataatgatggatggctcanattctcacaaaggtaaaatcatcactttcaaattgagctttcataactatcatgacatgtagagaagaatcaaggatttcaagtcacaaaatgtcaagaacttttattttcaaaacaattaccatttcttgaacatatccagtaattcaaagaaaaacatgcaaagtcgtacatgcacatgaaattgacccataatattaaactgaaaatccgacgaaactaacaacattaacaaattaacacaactaacaaattaacaaaaccaacaaaactagcaaaaccaaagaacacttcccccccatacttaaacaacacattgtcctcaatgtagcacaatt

SEQ ID NO: 53024 - DNA, 427 bp, Glycine max
  unsure (1)..(427): unsure at all n locations
agcttcacanagagaatacattntattaacttctacattacactntntcagtacattgcaacaacttttgagaaagcctgccctagtttggtatgccaagtaggaaacaatacatctatgtcaaaattacatgtgacacctaattgcatgttttgtattgacaattatgaattatgataggaagatgaagttgaactacagggaaatttattaaacacgtacagtatgaacaaatggagaattcgcaatgtaaatatacaaattataaaggagaaagaagaaacaatggtgagagaaagaggaaaatagggtctatgagcttagagaaaccataatgaatgtactcttctctgtttgcataacatgtcatcagtatgaaatattcatcatcggaagcattgactattctccgctatatatcatgtgt

SEQ ID NO: 53025 - DNA, 422 bp, Glycine max
  unsure (1)..(422): unsure at all n locations
tctcganatacattggaaactntatatctttggttttgatcagcagctacgttcatcatccagtaagagttaaagccattaaacaggaaaggagagccatttagcacaagttctgtgtccttggtttgaacaaatccaggtgtaactcggagaagcctagcttcacaaactaaggttgaaatgaggatactgagaatgaccatggatctagtaaggttcataatgctagtcatttttgctatgatcgatgaagttatgtttactctaatgaactgatgaagatatgtgatttggctatgaagatttgtgccatgcttgttcactatttatagacatgaaagtgggttagggagattgagctggaaataatggaattcaacacataatgttagtagatgacaaanatataacaatattaaaat

SEQ ID NO: 53026 - DNA, 457 bp, Glycine max
  unsure (1)..(457): unsure at all n locations
agctntcaacanaagtcttcacanataatcatcacacagcagaaccctagcaagactacccatcatatctcccaaaaccccatacccacgaaaatcataggagaaagaagtccacccaaacctgaattttcgaagtcccactcgtagtcacgcacttcacgaccccgaaaatgctctcctttcacgatttggggcagaaatgagcaccaaaggttgaagctctgtgtggagcttcaatggtgaatgagggaggaagaaaagcaacgtgagggagagggagagagagcttctgaaaatgtggggctgagtgaggagagagaggtgttgcttttggttataaataaaagggtttttctcttcttctattatcttatttaagcaatgccacatgtctccatgtgagtggagcaagaatggcccactttccctttntgactgtgacccatactcagtcaca

SEQ ID NO: 53027 - DNA, 446 bp, Glycine max
  unsure (1)..(446): unsure at all n locations
ctcagcttacacggnttatctttctcacactcgagttntgtattactctttactaagtctttcctaaatagatgattcaaatgatgcatattaatgtgtgcagtcctacaatgccataaccatgtgtcatctattttacttaccaagcaactntgttcatgaaatgatgcttgcttaatattcaacatatagatgttacctagtctcttaccaatgtagatgacttcattagatttggcttcacttataagacaacaatttttgttaaactcaatcttgaaacctttatcacatagttgactaatgcttagtagattatgctttaatccatccacatataacacattctttatctagatnttgtattgattccctatatttccttctcccatcatctttcctttggtatagactncaaacgtgacatattcaccatgctttgacac

SEQ ID NO: 53028 - DNA, 438 bp, Glycine max
  unsure (1)..(438): unsure at all n locations
agccttgttgggcatcaatggtggatgagtgtatagaagaagaaggctgcgtgagagagagagagagagagcttctgaattcttctctcggctgagggaggagagagagaacagcttttggttcttaaaaaaaaggtttcctctntttctattattttattataaactatgccacatgtctccatttgagtggagcaaaaagggcccacttttccttttgattgtgacccatactcagccacaaaagtgagaaaaatctgacctttgaaactctaaaatcctatctcggtttgcgtgccatttctctgcgtctgtcggggccagtctttgaataggcaatatatatatcataacgctcagaataaaaccccgagcgtggttcagaggttcggtttcttaaactctaactcgcacgcacaatgatgattttatactaat

SEQ ID NO: 53029 - DNA, 325 bp, Glycine max
  unsure (1)..(325): unsure at all n locations
tcaattctaaccttcgagggaagccacaacttggacaacgacaaatgaaagcagagaagaaggttatgcgcaagtgagaggagggttagtggcaaaggaatggcgagaataagttaggtaaaatcgtncttgtactaacaattcaactacgacgggtttttctcaacccttttttgtactccatgttcaaagacagtttttcaaatagacgttgttaaactcgccatttgaagacggttattngaaagccgtcatcatacatattcctcaacaatacaacattggcaccacgtatcttttaacaaacatttcgagcaactggcat

SEQ ID NO: 53030 - DNA, 276 bp, Glycine max
aagcttgaacaacctacctcgcacactggacatactcaattctttgtgccagattcccaagacattccatcatacagtcgagcagctgcaccgtgtatgaagcgcttctcagagacagacacgtctccaatgatgacatcatatgagagacacactcttcagctgcaccaacttccaaatattaccatgaacgatcagatgcttattccaccaatcacatataatatatggctacttcagcttgcagctgctcactttgcccaaacagcgccctat

SEQ ID NO: 53031 - DNA, 480 bp, Glycine max
  unsure (1)..(480): unsure at all n locations
tcttttatttattttgaaattcttcgttatggatcatttctatacagtggcagtaatatgggtattatttatggttttggcgttacagcaattacctttatgacttattccaaactatcaaaatctctgctaattactccatcccattaacttaatataatagtatgattattgattgaaaagccctactatgtttaatgattggaggcaactgctttcattgtccgcataaatctattttaagtcaccaagtgtaacaatttcaagcagtaaagacactgtngcttacccttcaatntagtgtaatttgattgactangtgctgcctatgttcgcggattgaacttatacgtctgcataccgaaacaagtgaataaagatggngtatggatgatttttaaaataattattacaaaagtaacaatggtattatatacagagatgatagtataaaacaagatatgtatataatataccatn

SEQ ID NO: 53032 - DNA, 213 bp, Glycine max
cgtgcttagtgacggatacgcactaatcccactgagttcgcttagtgcgacaaccactttggcacttcaagagattagctcctttttacctgaaattgtacagattgtaacattaattccaataaaagagaccccgatgacagagatcaaaacacatcaaagtttatatacaattgctacacaagaactataaattggggaaaattatacata

SEQ ID NO: 53033 - DNA, 315 bp, Glycine max
actgaatgacgactggaaatttgatttctcttgccatgatgcccggcagttggtttgcaccaacaatgcggatatgactggacgtcttcttgccgggtcattggcttttgaaagccgcatccttcactatttaattgtgtgtattctgcttccacggtcttccaaccttgcccaggtttctgaggaagatctaattatcatgtgggcctttcatacagggcgtcaacttgactgggcacacttagtcagatatcgcatgaataaggcattgcgattaaatgctccactaccatatccacagcttgttactctatt

SEQ ID NO: 53034 - DNA, 328 bp, Glycine max
  unsure (1)..(328): unsure at all n locations
gttctttctttttgataccaattattaagttcctttttttcaggaatgaatgcaataagcaatgcaaccaatgaacaacatggatgtatgcgaatgatgcacaactgaagtattgcgaaattttacacacgatatggggttgaatcaatttagattttcaacatggtccatgacatcttcgtcaggtgaaaccggaagtaagagggacatcgacagtcctaaatatgtttggcagtagacgaagcagcgatgtaactcgatccatcttttgccccaattntttgcaagatggttacttccatacttcaacttgacttgatgaaccttt

SEQ ID NO: 53035 - DNA, 530 bp, Glycine max
  unsure (1)..(530): unsure at all n locations
nttgataccatgcttgtcgcgttctantacggtcactcttagtactcatgctgnggaacacgcacttgtagcgtaatgcactgaaacatgcttattgctatgaaatccaaattgtgtttncaattcagaaaacatgaanattacgaatttcttgtgagagttttatgctcgaaatttgggtttgccccatgtttgatgcctttacaaagaggtagcgtggaaaacacccttgcataatgtgtatacatacgtaatataaggaagcatgaattcctagcanagtgtgaatgaatgtcttcctaaatgaatgtatgatagtgcggaatgccttttgaatgcanatatgtacaggatgtaattagctttccaatatgcatataaataaataggagtgaaacagtagaaatttgtatggtgtatttcaaatgtatgtaagtagttngtgatagcaaatgtttaagaatataaatanngtgtaagctcgacgcaacactttgagcatgaaagtatgttttctttttattagaatg

SEQ ID NO: 53036 - DNA, 462 bp, Glycine max
  unsure (1)..(462): unsure at all n locations
tgtggaatcacaagcaggacanaatggatcttcatgtgacgtgacgaggaatacgtggggagctcactatatgtaagggggagttattataaaaattaccattttaacaccataattagggattaggaacccaactatgaggatatctgcctgtccttgtgcatgctgatttttcttcaaagaaaattacggtttaacttatgggatgcgatatatatattgtgatgaatgatattgttttggctgtttgaaggctgtgcgtgaggaaatgatatagatgtgtttggttgaattggtgttgatgttgctattgaggatttaatngatatgtgatgataatgatgattatgatgatattgattngagatgacattngtaataaagaccatgtcaacatgaaaggttattatngatgaatatgtgaatatgaaatgatgtctgtggtgttgtgataacgcaatg

SEQ ID NO: 53037 - DNA, 420 bp, Glycine max
  unsure (1)..(420): unsure at all n locations
tcttatccaagggatcatctggtggtgaagctccttcttccatggcttattccctaatggatggcgcctcctctcacctcttctcctttgtcttccgctgcatctccatggtggaaaatcaccattaaaaaacctcattgaagaccaaagatccagcctncatagaagccccacaagcaagcttccatcaatgccccacattatttccatgacacaaatgcaacgatgacgattaggaaattttatgcaaaactggtcatgcatgcacctatgtggacactcaagcatcaagttnttatggtcatgtgacactagggcttangattcatgttccctatttaagtcaacccagtgtttccaaaatatgttcttttatcaattcatgcattcatccgagtccattttgggtgttcgggaaaa

SEQ ID NO: 53038 - DNA, 413 bp, Glycine max
  unsure (1)..(413): unsure at all n locations
ttaanaattgaattaaaacgttcaanaactgctggtaatctattaccatatatatgtaatcgattacacagtgcaaattttgaattcaaattttaatagctggtgtaaatcagttttggccactggtaatcgattacatcctctggtaatcgattaccagagagtaaatctcttgaaaaagacttttttttaacttaaatttcttggtcaaaccttttgctacttcaattggaattcccttcctatttaatgtaatcttcctaagactctagagactgtcttaatcatccatcttgaatatcttttatttctttgtcttgaataaaactttgagaaacatgtaatcctttggcatcatcaaaacattcagcttgatcctttgtctacatatacatcgtncaaatatgataata

SEQ ID NO: 53039 - DNA, 298 bp, Glycine max
  unsure (1)..(298): unsure at all n locations
atattttttcgtcacgcctatagtagaatgacagttcgtcttcatggctaaaatcaccttctttgaggaatttataccaaggcttgacgatatacttatcacccatccccttggccagcatgattacattccattgtagtggagggttgaatcctctganggatgtcatgtagtcaccacagtggattagacattatgtgacagagggtggaagttgctatatggaaaaaaagtaggcattgaaattaatatttgtatagaagatataaacggatatgaatatttaccagtggatatg

SEQ ID NO: 53040 - DNA, 429 bp, Glycine max
  unsure (1)..(429): unsure at all n locations
taggaacccaagctcttagcttcaatgcaaggaaacatgacttatgtctaagaatctaaantttggttgtgaaagtggaaaggcatgaaaattatgacatgcttgaaaagggttttactagaatttggctgccccatgagggatactttgcatctaggtagcatggaaaacacctttcaatggtgtgtatatatgtgaatatatggcataaaattccttgcagagtgtgaatgagtagcaaaaaatgcctttcaacatatgtgtatttgaggataggtagcattaggagccttttagaatatgtacccatgtcaaaaaaaatggcctgaggacgcttnctaaatgaatatatgatggcatggaattcccttttcagatgctagtatgtgcatgacgtaattagctttccaatgtgcatataaataaacg

SEQ ID NO: 53041 - DNA, 489 bp, Glycine max
  unsure (1)..(489): unsure at all n locations
atgatcatcattacgtcacacatagactaaccctatagacanggcgggagtcaccagaggctgaaaactgtgtggctgatccatgtacaccctcttttgcaactgaccattgcagagggggtcaccaatggatttgaggaggcaaggaccactccattgtatggctcacacagcattttgtacatccctgttgcaattgtggtcagccatggcttcacctgtagactttgagtagtcacataatccanagcagagataacagactaatatgagggagataaacggtcagagtaaaatcatataaatgaatgggattacgagtggaccaaacacctttgtgtatgataatgggaaattgatgtgcangcgacaatggtggactaatgtttggagcangagatgatgcttgangatcaatanngtggcgtgttgtagtgcctgtgccatcaatgtatgtaagtcgtgaggtgctggacaacatgtggaact

SEQ ID NO: 53042 - DNA, 489 bp, Glycine max
  unsure (1)..(489): unsure at all n locations
nttatcatcttgggcgtgctattactcgccgcttataacacatttacgccctgggacctagagaccgatatatgcgagtttttggaataaaaagtgcccatgacctttacatatatgtataggctaggaggggatcaatggactgcatcaaaagtaatgacaaacaacangttgatttgctatgtcttcngagatgaaaaacaacatattgaatcaaactgtgccagtccatgtggggtgatactgatgtaacctgtgaaatattgcttgccacaaatacaactggtggtctactatgcttgtggagcgagaagagtttaatgtggaaagaaaggcagcggcaggtgtttcatcctgctggaagggatatggagaaaagaagaatanaangtgtttatagtcaatatatacgccccctgtgattctcaaaacaagtgtgtactttgtgaatctctaaggcagctaaaggatcttgacccgaggggcctn

SEQ ID NO: 53043 - DNA, 235 bp, Glycine max
  unsure (1)..(235): unsure at all n locations
aatagtttattttcaaaagtagcctcatgcaatgataaaccttcaaattcaatgataaaatggaacatagaaatttatcttttccctaaaacattatcatttacaatattagaatctttgggactatctttctatgtttgcaaggaaaaaaatcactccagaagagaatcttataccactntgaatctttaagtccaatgatagtatctctgactaagggtctattatttctcat

SEQ ID NO: 53044 - DNA, 291 bp, Glycine max
caagacacgtgaggagatacatggagagaaacgaaaaaacaacaatggaggagaaaagtaagctgaaaattagtggagggttaaggagcacctacttgaagctcttgtgctctgataccacttgttggaagcttgcttatgaagcttctatggaggctggatctttgagcttcaataaggtccttcaatggtgatttttagccatggaattgcagcgaaagataaaggagaagaggttagaggagacgtcatccactagagaataagtcatggaaggagaagcttcaccac

SEQ ID NO: 53045 - DNA, 181 bp, Glycine max
  unsure (1)..(181): unsure at all n locations
gtgatttaaaataaaaagtgtttttcaaaggttttactctctggtaatcgattaccagaggatgttatcgattaccagtggccaaatacattntataacagctataaaaatttgaattcgaaattttaaagctgtaatcgattacacaatattggtaatcgattaccagcagttagtaaac

SEQ ID NO: 53046 - DNA, 244 bp, Glycine max
  unsure (1)..(244): unsure at all n locations
ttgatttatcgacatgtaatgcatgttatctactgtgcctgaaggatcatgataaaacggaagtaatctangaaatgcttgaatgattctattaagtaagtattaaacaatgttgattcttaaatgacatttattgtgaagcaacttatgatgatgcccagcatttgttgatgccaacccagtgattgatcagacttcagacaagctcaagaatcatccagatcagattagagagaataagagc

SEQ ID NO: 53047 - DNA, 303 bp, Glycine max
  unsure (1)..(303): unsure at all n locations
ttatttattttaatgatgnttttgtgggtgtagtatgccacaaatttgactggaggttcatttgatgaagctcgaatgcttcaaaatgtagaagcatgtgaatggttgaccagtgccttgcatggtcttggttttgcctaatctagatcctagttatgcaaacatgagagctntatgttcctttctttacttttctcttaaaaatcatctggtaaaataaaccgatcatgatttggcatttttaaacaaaattatcaatgagacatagagtgcttggtgtatttattttagaaaaatattaat

SEQ ID NO: 53048 - DNA, 352 bp, Glycine max
  unsure (1)..(352): unsure at all n locations
ngagatgaggaagtgatgaagggtgaaacttactgctattattgttgaccacagagtggtacctggagatatgtcgcggnggtcaagagaccttgggacgtcangtggggtgctatttgccaaaaccaagcttgaccaatcccgacccaacccgggcatagtcggtcagtgagaacctgtgatgtacctaaacaggcgagctcctggcagtcaacagataaaaggaaaacaagaccacaaagcaaggaggcttgtggtggctggccagctgtgaattttgtgtaatatgtggatggtggcctctggtaatcgattaccaagggtgggtaatcgattacaaggcttaaaattg

SEQ ID NO: 53049 - DNA, 402 bp, Glycine max
  unsure (1)..(402): unsure at all n locations
tgtgggagtggtgacttcccgttctcaatggcggcgcttacttgcctgccctacttttacatgtacaaatgattgtttgaggtattggatgtcattctacccttgaccctttttagtgtgctctactggagcactagaatgcggccccttcccagctcctcccaaatagttgggcgatggtaagggcgtttaaaattttgtgtcctttcttcaacatcaggcctagtgtgtcaatcttattcttttttcaaatgaagtttcctggaaagactagatgagtctccttgaacagcatgtccaagaagctgtttgagtntgattcanacattattcgtcgttttaaggaccaactttttaagggtctanctacttgattcatggctaatggcatgccactgatgc

SEQ ID NO: 53050 - DNA, 393 bp, Glycine max
  unsure (1)..(393): unsure at all n locations
tgtntaccccatgttgaattttcttacaatagagctgttcatagcaccactaattgttctccttctgaagttgtttatggttttaacccactaactcctcttgatcttttgcctaatgtttctggttttaagcataaagaaggtcaagcaaaggcggactatgtgaagaagcttcatgagagagtcaaagatcaaattgagaggaaaaataaaagctatgctaaacaagccaacaaagggagaaagaaggttgtcttcgaacccggagattgggtttgggtgcacatgagaaaagaaaggtttccggaacaaaggaaatcaaagcttcaaccaaggggagatggaccatttcaagtgcttgaaagaatcaatgacaatgcttacaaagttgag

SEQ ID NO: 53051 - DNA, 294 bp, Glycine max
ggccttgaactagctaaatctcggttgattagttagctctgaccaaaaaacggctctaatctaatagtgtattcacccttcttttttgtatggtgtaaaattgacttaggtgaaaatcatgtggtcggagaacccattgtgccattacatggagaatcgatcctcatatcgatcactagattatgtttgaaatacccaaatatctcgtaatatgaaaattaaatcttcagaagactataagagcatactatcgattatgcaagttagaactacttattcctcgagatataattt

SEQ ID NO: 53052 - DNA, 354 bp, Glycine max
  unsure (1)..(354): unsure at all n locations
ntgtagggcgaatctttaacatcctacttaaactntntttctgaacagctctgatcctggacacttgacaaaacctaattatcatttcactttacaaaattcccagatacaaatttccttcccattactggtcttgagccttaattctgcagtgttaatttcctttccagtaccagtcctgtgccatgattctatgcagaatactggatcagcaaatgatcaacttgtactattgcagtatcttcatggacagaaagcctgtaatgattgcaactttatcaacacttttgaaacccttattgtaaaatgctcttcctctaaagtttttctcttacatcttctgctcttatgctg

SEQ ID NO: 53053 - DNA, 98 bp, Glycine max
atattatatgtgtagcacgtgttttttgtctcaaaacacttatgtgaaaatttcttatgcaagttttagtttccaactcacttaattcccatgattcg

SEQ ID NO: 53054 - DNA, 212 bp, Glycine max
ccctataatactaagctcacccccatgatgaaaaacatgaaaataaccaaaaaagtccttattacaaagaaaactcaaaatgccccgaaatacaaggctaaaaccctatactactagaatcaccaaaatacaaggcctagacgaaggaaaaacctattataatatttacaaagataagcgggctcatacttagcccatgggctcgaaatcta

SEQ ID NO: 53055 - DNA, 261 bp, Glycine max
cgaacggtcacttgcacaagacattcttataactatgaaaaatgaacccatatacaatcaaggcaccttcgttacctagattatttacatgtacttccaaggtgtatttgttacctacatcacacacatttcctttgctaaattcacatacatgcatactctaagcactttggctatcaaaaatggcatacgtgcacatcttggtatttctaatacctatacatacacaaacttcataatgaatcttgactatctacacaa

SEQ ID NO: 53056 - DNA, 103 bp, Glycine max
  unsure (1)..(103): unsure at all n locations
atcaatacaagcccaatcccaacatttgaagcatcacactcaatttcaaaagaattttgaaagtttggcaacacaagtatggnggcattagttagcttttgct

SEQ ID NO: 53057 - DNA, 528 bp, Glycine max
  unsure (1)..(528): unsure at all n locations
natgatagcatgattgancgcactgctattacgtgacactatgaatactcaagctggtcantgaaagtatcagatactctggcacatcagtggctttcatgggtataagtacaaacagaaccctctttggatctggcttgatgagacactttgagagacagacattttcatatagactagcccatagccctcagggacacgcctcttgaattaattttgttgtcctgnggcttaacaagagtactagaatatcctctatctgagnttgcatcaaaagtgtttctcatcaacatcaactttttcctcaaagaccatgagtgtatatgcaagagcgccaattatatcaccaacttgtgcatcatggcgaggagaacgtgaaagttctccaagatatagtattaaagcagacatgccaccacagatattggctanagctcgagtngcatgctcctgcagagcctggccaccatcaccttgcatacactcattagaaggagcactatagctccaatanggatgggatgccat

SEQ ID NO: 53058 - DNA, 110 bp, Glycine max
cttattacaacttgaactaaagcccttttagttgattaacccaaaacatatttttggtcagccaactttacaaggattgggccattatttagacaaactaaacactctaa

SEQ ID NO: 53059 - DNA, 438 bp, Glycine max
  unsure (1)..(438): unsure at all n locations
gcttacaaagagaatcatcttgatatgacaactttggaagttctcttacaggctaagcttttgaagctntgagattaacctcaagcttgcaagaccaagtttcttatgccataccgagtgatgctttttttactgagaataatcatgacaccttttgactagaaagatcaccaagtttaatcttataaagatttccttgtcttttagcaaagaagagtgaagagttgtccttgttttggatgatacacatatccttgttaaagatgacattatatccactatcacataattgacttatgctcagcagattgtgcttcaaccctttaacaagtagaatgttattaatgagaggatagggagaaatacagatcttatctacaccaattatcagacctttctagatttgaatattacctcttcaccatcagagttaacagt

SEQ ID NO: 53060 - DNA, 348 bp, Glycine max
  unsure (1)..(348): unsure at all n locations
cttggaaagtgttgttnttcaccttcttgctaagccaatctgttggcttagcgagtgttcgctaaacgtaacactcctgggctaagcgcgagcaagactctggaagagatgagctgtataggttcactaagcacactgctttatctcactaagcgcaccgcttcagttcatccgctaagcgagaaaggcgtgctaagccaaaaattactaacgtgcgctaagcggtccatacgtgcgctaagcgcacgagcatgaacaaggccacctatttaagcctgaaatcagattttgtgaagggagtttggactgggattcatagctntgcatgtctagggtttctagagagag

SEQ ID NO: 53061 - DNA, 353 bp, Glycine max
tcgtctcagatccctcatgtaagactatgcctaaactaaacaacattattgtaacagcataattaataccaaaacttaacctgcagatcccttatgtaagactaagtttcgatcctgcttcaatcaagttctaaggcaacagtacatttcccaatgctaaagtcacctaactgtgcacacaaatgggtgatcagaccaaaagcatactaacattaagcattgaatgaagcattgaacatagaaaacacaatcaattagatattaggtatttacatcagttcttcattagaaatacccaacaagggtgtttagccagccattacaaagaaaccttaacaataaatgagcttaca

SEQ ID NO: 53062 - DNA, 445 bp, Glycine max
  unsure (1)..(445): unsure at all n locations
atgaactatgaatgatcgtgctacggccttgaactagcttcgatcatcatgaccgagtgtcacatgttttcgtgcatattattctcggtttggttactttttataccccctcttgacgtcccttaggcattttacttaagtcatttcttccttaacttaaaaaataaaataaatttcacccgacggttggaatggtttaatccgtaacttcgggtaaaatgaaatccgaccgtcggtcatgccgtaccacgntggaatcanaaagaggtaaaaaaatatataatagaaaaanacatttttagtaaaataaagtggaaatcaatcgacgtntctctttggattctcattctaatcgatgattataactagtgaactanggtaaaacactcgctagcagctcgtctaaaaaggctttgagttgcattatttctactagtaaatgatn

SEQ ID NO: 53063 - DNA, 298 bp, Glycine max
  unsure (1)..(298): unsure at all n locations
tgccacccagctcgcccaggcgagctaggttgcttcctccataaggcaccgccttctggggaacttcctagaagacccaagtgggcagaatgagcataatttgtctccacatgtcatcggtcccgccgcctctggatgacaatagacgcagaatgaccataatttgtctttgtgtgccatcggacacaactgtgtctgaatggcgaaaaggtgtgtggaatgaccataatttgtctacgcatgtcattgngtccgctgcctctggatgacaaaagacacagaatgaccataatgtgtc

SEQ ID NO: 53064 - DNA, 168 bp, Glycine max
attcagatgttccgagtcagacagatattcagttctggagaatagaaatcagaatagagagttgtttagatcagaagagattcagatcagagaaaatcagacattcccgggagtatgaagttttcaaaacaactgcaaatttgtttgaagattttctcaaattctagt

SEQ ID NO: 53065 - DNA, 318 bp, Glycine max
  unsure (1)..(318): unsure at all n locations
tatgttgattgggctgagtgtctccaatatggcagtgcatttgttggggttggtttcaatcccccaatgtgtgatatgaaaccaaggaacttgccgccgcctacctctaaaatacatttttcatgngtgacgcatttgttgtatttacgtatttccttaaaaacttctttctggtccaccacatgttagggtatactttgaaacttaataaccatgttgtccacatatacttcgatgtttcgtcctatctgttgtttgaagactcggtacattagtcgctaatatgtgaacgcctacgtttttatggtgaatggtatg

SEQ ID NO: 53066 - DNA, 326 bp, Glycine max
  unsure (1)..(326): unsure at all n locations
gctttatgtgacctgatcctctgagtggtacctacggtgatcgagcttcactgccattctctcaaatgaactgtgactcatctcttcttcttgagctataaagaaatggtcagcttgctgaggcccatgaaatttttatttaagaaaaataaattcagccagagtgggaatgttgttgtaaaatgttggttcaagtcactctcactcctactcaaactagcacaggtttgaaagtgggtgttgcaggttcagacatgacanaaaaagagtgttctgaagttgaagctttntgtctagaataatataatttatatttatactttcac

SEQ ID NO: 53067 - DNA, 455 bp, Glycine max
  unsure (1)..(455): unsure at all n locations
ngcctcanagaggtccaggaaggacaaggcggccgaaggaactagttccgctccggagtacgacagtcaccgctttaagagcgctgtacaccagcagcgcttcgaggccatcaagggatggtcgtttctccgggagcgacgcgtccagctcatggacgacgagtatactgatttccaagaggaaatagggcgccggaggtggacatcactggttactcccatggccaagttcgatccagaaatagcccttgagttttatgccaatgcttggccaacagaggagggcgtgcgtgacatgagatcctgggtaaggggtcagtggatcccgtttgatgccgacgctatcggccagcttctgngatatcatgtggtgttgaagaaggccangaatgtgaatatggccgaagaagacccgtctgattggttcattangaggcatcgccaactgctatgan

SEQ ID NO: 53068 - DNA, 406 bp, Glycine max
atatttatttaatcctgcatttaggtaagctctgataatcaatcagctcatatttagcaatcattagaacaaaataaataaataaatcttgcatgaatattgatgtgaaagattactagatacacatcatctgagtaccatgttttgtgattcatgtaagtagatttaagatccaatccatttgagtagatattgattggatgtggattagattattaaaaatccaatccatgcccacccctagtgccaccaaggaggctataagacaacactagacaaaagtttggaaaaaggccacttctagatagaataacaaatatattgtttgataggaattgagtgtcatcctatgaaagaacatttggaatcaaattctaattttcaaaatcaaactcatgagttcact

SEQ ID NO: 53069 - DNA, 339 bp, Glycine max
  unsure (1)..(339): unsure at all n locations
ngacaagtattntacgtgcaagacccttgtgatgaaaggtggtgcgtggttctacagggcaaaacagttggtgttaatgtagaagatgatgattcatacatggacacctatgttagtcctttgaccgctcaaatcactcgtaatgttgtcggagaagaagaagctgacgatgttcatgctaatcgaaatgatcatgatgaaggagaattgattaacatcttctaatgcaattttctgcagagatagaggtcaccaaagcaagtaagtgacagctacattnttcactgatggaggcatcggttntttggtttagatggcatccttaggacttcatctagc

SEQ ID NO: 53070 - DNA, 306 bp, Glycine max
  unsure (1)..(306): unsure at all n locations
gcgctaaccgcagcttgccgcactaagccctagatgcttacggaattttacaacttcaagttatgcttaacgcgaggcatggctaagtgctagtgttttaaactcaaacatcatgttggcacgctaagtgcagctatgcactaagcgcgccatacngaatttagtttttaaaaattaaggcagaggcacttgggttgctacctttgcacctaaacctttgcaacctcttaaccttgagcaaattcttttactttctgctacgagtgtactgcttctctacatcatctttacttcatctcaagaaaa

SEQ ID NO: 53071 - DNA, 450 bp, Glycine max
  unsure (1)..(450): unsure at all n locations
atgactctgtgccttataccagctgagagaagtgaggtaacttctgttattgtacacataggtactggaaatatgtccgggggtaagaaacctggggacgtcacgtggggtgctatttgcccaaaacaaacttgatcaaatccgacccaacccgggcataattcgtcaatgagaacctgtgatgtacctaatcaggcgaactccctgctgtcaacagataaaaggaaaacaagaccacaaagcaaggaggcttgtggtggctggccagctgtgaattatgtgtaatatgtggatggtggcctctggtaatagattactaagggtgggtaatcgattcaacgcttataaataaacaggangctagatggtctctggaatcaataccangngtgtaatcaataccacgctgaaaacgaggcaggagcctctgtaattataccaagggtgtat

SEQ ID NO: 53072 - DNA, 340 bp, Glycine max
  unsure (1)..(340): unsure at all n locations
ctacgctattctgatatgcgactctgtcactgtgcgactcgagcactgttgatcaatacttcatgacgacctgaaattcaaaactagcacttgagcatcattaacatatgctcaaatttcttagccattcaaattgntttactttaggctaaacactattaaacaattttctgaagattagcaactcacgcatctgtgttctgctcctcacagatgatgcgggaagcaatgcaggcatattttaccctttgcgcgcctatgctgtggaccagacaaacaaaaacaaatatgtctcatcaaaccatgagaagacagcataggttaactctactttctccta

SEQ ID NO: 53073 - DNA, 343 bp, Glycine max
tcttagtcttgattgatgaagatgaattcgtggctacttcatgcactcctctaatgacaatagcatcacttctagcactaaattgctgggaatttgaagccatcttctcaattaaatttctggcttcagcaagggtcatgtctccaaaggctccaccactggcagaatctatcatacttctctccatgttactgagtccttcataaaaatattggagaagaagctgctctgaaatctggtggtgagggcaactggcacataattttttaaatctctcacagtattcatataggctctctccactgagttgtctaatgcctgaaatatcctttctgatggacgt

SEQ ID NO: 53074 - DNA, 332 bp, Glycine max
  unsure (1)..(332): unsure at all n locations
ctaagcttaccatacctactcaaaacataaatgcaaatggccaacactagaaagaaccctgtcttctcttttttctcgagcccctaccttcattactctctctctctctctcctttactaaagggttaaagtccttgtatttttttaaagtatacttaattagtaactctatttatttttattttccataaggcactgaaattaattaagttaatatctctatcttgttggagctggctacttangtagtgagactgagggaatggaaatctttgttgggttgttttgtttctaaagaaagcttcttcaacattatctgctgcatttttttt

SEQ ID NO: 53075 - DNA, 252 bp, Glycine max
  unsure (1)..(252): unsure at all n locations
cacataaccaaaatacagcttttctcacgtaaagaccacagtaacaattccttcgatccaattcgntaaccggtggatcgactccaaaattttactggaagtctatagtgtataagcctgcattttgaccgttgggatatactagcaaacatccagaactcattctgcactagactttccacagccaaccacacacaagcaattttctgcacttgtgcaaaattctgctgacaatttcacagcaaaaactct

SEQ ID NO: 53076 - DNA, 374 bp, Glycine max
  unsure (1)..(374): unsure at all n locations
tgtcaagccaattgctatatcctcgaaaataccaacctgtatgcaaatgcttntattcgtaagttaacttacattgcaccatgtatgtgttaagtttagtgttatgattggttgcttattctgtataagtgtcattctagaataatagtagtaaactctctctaatcctccatataacaaccaaattaaaaatcttgtttggtcttttttagactaaccaatgtaaaatgtttcatgcattaataatttntaccaaaacacccttaatcangtagcatttctcttatcttatatttattctttctttaacccttgtgatgtagctacatgtggagtttgtaggccttggatcttcttcaacaatggagtctttt

SEQ ID NO: 53077 - DNA, 155 bp, Glycine max
  unsure (1)..(155): unsure at all n locations
tgttgactntgatgataattgcctcanaattaagtcatactaattatgattntntttaaaggttaaattactcatttgatctctatagtttcaagattcttacctttttagtctctatagtttgaaagtgggttttttagtccctatagtttaca

SEQ ID NO: 53078 - DNA, 394 bp, Glycine max
  unsure (1)..(394): unsure at all n locations
gacactatgaatactaagcttcctcaggaatgtgaagngatacttacaagaagcanaatttcttatggccttgttggtgatgagataatggagggcgtattaaaagatgtatgtgatgataaggaaggtgtatgagagcgagaattggctaacaataaagagaaaaaacaatgagtgttgaaaatgtataaaaaaaaaatgagaaaagctaagaaaaagagaaatagttttaacgagagagatgatgaggtcttatcttttaatacctatagtcaaataacgagagaagcaaagaaaggaacacctagaggccctaccaacgatgtcccctatcttttggcgccatctaagaaggagaatgagcatcatttntgcaggtttcatgatattttct

SEQ ID NO: 53079 - DNA, 250 bp, Glycine max
  unsure (1)..(250): unsure at all n locations
tgaccaatcccgacccaacccgggcatagncggtcagtgttaacctgtgatgtacctaagcaggcgagctcctgtcagtcaacagataaatggaacaaagaccacaaagcaaggaggcttgtggtggctggccagctgtgaaacttgattgatatgtgagatatggtctctggtaatcgattaccaagggtgggtaatcgattacaaggcttaaaaatgaagacaggaagctaagatggtctctggtaat

SEQ ID NO: 53080 - DNA, 311 bp, Glycine max
tacctcgagcaaaaaaaaaaagggagaagaaatttccatcaagaggaagccgaataaagaagagagggaaatttccatcacgaaaaagaaaaagaggaaagggaaatccccaatcaaagagtgtgagaaagaaaaaagataagaaagataattcccaaccaaagaatggaagaaagtaaaaaagaagaaagctcctggtcaaagaaaccaaaagaaatgtgcagagaggtctttggaccagacaatatctgaacaatacagaattgtcaccaaatgaacaaaaagaaggaaaggaaaccacgacctaaaat

SEQ ID NO: 53081 - DNA, 322 bp, Glycine max
tttgtctactattattgggatcatctctttctccttcattggaggttccacttgagctgccaagtctcttcacccttgggcgtattctttgaaagattgtgcccctttttgcacatgttctatagttgcaccctatccggagccatatcagaattgtactgatactgcctaacgaaggcaaccattatgtacttccaagaatagactcgagaaggttccaagttagtgtaccaggtaacagctaccctagtaagactttcttggaagaaatgtatcagcaattcctcatcttttgcgtattcccccatcttgcgacaataca

SEQ ID NO: 53082 - DNA, 220 bp, Glycine max
  unsure (1)..(220): unsure at all n locations
ttggattgtcacttcaccctttgtatacttttctttcattccggattattattattattattattcaatggttctttacttcacaacaacaactataatcatattaatattacgagaaagagaaagaagaagatgatgatgaggaatgaagagaaaaatngaaatgaaatgagtcacttggatgtgttggacctcgcacaaagagaaaacctaactagta

SEQ ID NO: 53083 - DNA, 294 bp, Glycine max
actagcttcattttttcgtggatgcagaacgattacattatagggaaagatatgtataaatttgaaccctgtgacgttaacttctcttaagccttcttgttgtgaacccaacaatggactgtggggtgatgattatgccattgcagtaccttttgtccttcagttcctcctttgtgttcagtgattacaccaagaagcaaattccacttcttgtaatgaaccccaaggacgtactccttgtgtcaatgattaaccaggaacaactgtcctgaacaagagattgcttttaaactt

SEQ ID NO: 53084 - DNA, 307 bp, Glycine max
ttattaaaatctgtcttgtaggaactggctcaatagtgcctgcaccttcatttgcaccgatacagaaatcagacaatcaggaatctacatacggaaattgcctctcataaagtacaatttgccatgtatcttcttcctcctgcaaaggtagaatggaaagatgatacatttcctagattgatggtgagatgatttgatatggattttgcatctactatactatccttaactgtttgatgagttgatataaaattttcaactcatacgtgtaccataacactattgtaaaaaaatggatctacaatgt

SEQ ID NO: 53085 - DNA, 431 bp, Glycine max
  unsure (1)..(431): unsure at all n locations
tagctgaagttcttgagaggcgctgattttggttatgctttatcgaaagacacattcccctgctttcctttactggaaggtcaaaggtacttcatctctctcttatcctgatggaaccaagtggaatgctataatttttagtgcgtctccaacgcacattacattttcatgacagtatatgtatggtacgaccactactatttggctgacaagtgccagtattataattattaggactcactttttatggtggtgtcactggttttcattctaaatacctattcgtattttataacatacatggtgtgacctgtcacatacaaatccggattgactcttaggttgagcgtcttcccccaccattatgcttttccctagataataaaacaaatttctttcaattatattataacctggcgggacaaccttcn

SEQ ID NO: 53086 - DNA, 387 bp, Glycine max
  unsure (1)..(387): unsure at all n locations
ttacgtgcactatgatactaagcttccacacatccaagcaaaacaacattcatacagcacatgctatcacagccaagcaaaacagagcataggcagataactctgctcaacacatcaaccaaaatcacagtttttctcacgtaaagaccacagtaacaattctttcgatccaattcggtaaccggtggatcgactccaaaattttactggaagtctatagtgtataagcctgcattttgaccgttgggatatactagcaaacatccagaactcattctgcactagactttccacagccaaccacgcacaagcattnttctgcacttgtgcaaaattctgctgcacaatttcacagcaaaaattctgcataagtgcagatttcgaaaa

SEQ ID NO: 53087 - DNA, 346 bp, Glycine max
  unsure (1)..(346): unsure at all n locations
tgcgaaagccaacattgggaagttagttttacaagataatgcttatcttaacgcaaaaaatatcatgctaatccccctgatttgagagcaaactcacgtgatctatttatgcacacgcgtacatgtggaatattctaccatttatatcaacatagaggctatgcaacacattctaattgtcacacacatatacgcatttgaaaagaacatacattctcacgcncaaggcattgcgtcaaagttcacacttaattatatcctaaacatttactattacaaactacctacacacatttgaaatatatatcatacaaaatttattgtttctctcacatttatttatatg

SEQ ID NO: 53088 - DNA, 474 bp, Glycine max
  unsure (1)..(474): unsure at all n locations
ttgtcccattaaanctgattccctcgctttcgtgacctatgaatctcagctcagatcatcataggttaagtgttgatgtacaagatgatacaaagatgagacaaggtgatgacaaaagctcaagattaatcaaagatgagttccagatattcaagatagaatcaagaacacttcagattcagagggaagtgatttcagaatcaagaatcaagattcaagaatcaagagaagtcttaatcaagataagtatgagnagggatttctcanaaactgagtagcacatgggttttctcaaaacatatttaccaaagagttgttactctctggtaatcgattaccagattggtgtaatcgnataccagtagcanaatggttntcaaaaagccttcaactggatttacccacgttccanttgattcanaatggtnngtatcaatacaatgatttggtaattgataccagtgcctttgaacg

SEQ ID NO: 53089 - DNA, 258 bp, Glycine max
  unsure (1)..(258): unsure at all n locations
ngaccaatcccgacccaacccgggcatagtcggtcagtgtgaacctgtgatgtacctaagcaggcgagctcctggcagtcaacagataaaatgaacaaagaccacaccgcatggaggcttgtggtggctggccaactgtgaaacttgattgatatgtgagatatggactctggtaatcgattaccaanggtgggtaatcgattacaaggcttaaaaatgaatacaggaggctaagatggtctctggtaatcgattacc

SEQ ID NO: 53090 - DNA, 90 bp, Glycine max
atatttcacgaggctgtcacaattcttcacacgcctttagagagttctacgctactctagagttctaccaaacattctagaatattctac

SEQ ID NO: 53091 - DNA, 210 bp, Glycine max
tttccctttcttgtttttttaaagttgaaggtgaggatattttgggaaaacaaaattcattaaaagtcacgtgcaacacttgacttgtttttgttaaagaattaaacaccgataaaattgagggaggcaagtgtaatggttagtgaacaattatgggaagagaaatgctagtacacactttttaacacagtcatacataccgactctttt

SEQ ID NO: 53092 - DNA, 348 bp, Glycine max
tatatgtgatgcgccaaaattggacattcgagtaaatgtatgacctttgaatttctaagaactttcgttgttcaattctgagccgctcgttatgtgaattgtctgaatcggacatccgtgtgaaaagttatgaccatttgtatttctcaagagctttcgatgttcaatttcgagcctctctacatattatgcgcccgaatcggacattcgtgtgaaaagttatgaccatttgaatatctccagagcttccgaggttaatttcagcctctcgcatatattcgcccaatcggacatcctgtgaaaagtttgaccattgaattctcacagctccgttgttaattcgagcgt

SEQ ID NO: 53093 - DNA, 206 bp, Glycine max
  unsure (1)..(206): unsure at all n locations
atgaatatatgttcatagtcttttaaacgtgttggagaaaggtttgaagttngatttcctcctaataaaaaataataaattattaattaatatttaccgttaaaataaaataaatatatgttcatagtcttttaaacgtgcttttgaaatgaatatatgctcatagcctttctttgcatgcattcaagcacattggcaaaagcttt

SEQ ID NO: 53094 - DNA, 441 bp, Glycine max
  unsure (1)..(441): unsure at all n locations
taagaaaaagatggcctcagcanattccttattttcagagtggaattctatcaatagaccttcaatctttaatggagagggttaccactactggtaaacccgaatgcaaatttttatcgaggcaatagatctaaatatctgggaagccattgaaatagggccttatatacccaccacagtagaaagagtttcaatagatggtagttcatcaagtgaaagcataaccatagaaaaacctagagatagatggtctgaagaggatagaaaacgagtacaatacaacctaaaagccaaaaacataataacatctgccctaggaatggatgaatatttcagagtttcaaattgcaagagtgctaaggaaatgtgggacactcttcgattaacacatgaaaggactacagatgtaaaagatctangataatgcactactcatgagta

SEQ ID NO: 53095 - DNA, 437 bp, Glycine max
tgaatcttgcttggtcgggtacatgagcatatgcaatgctcccaaatactctcaagtgatcaactcttggcttcactccactccatgcttcttgtggggttgatttttgacattctttgttggggagcgattggacaaataaacggcacatgcaacatcttctgcccaaaatttctctggcatatttttaaccttcaacatacatctagtcatattaagaatagttctattttttctctccgctaccccattttgttgtggagatctaggaaccgttagagggcgacgaatttcatatttttcacaaaattcattaaattcttttgatgtgaattcgccacctctatcagatcttatagctgtgattacataaccactctccttttcacaagagctttataattttaaaaactacaaatgcctcagattttgcttta

SEQ ID NO: 53096 - DNA, 402 bp, Glycine max
tgagctcacacactctaataattcgtccaaatgtgaaaagaaagggaaaggaatagttatttgaacagtaaaagacttaaatacccttatttttttctatattattttttatcttcaaaatagaagaacaaaaagcatagaacctagtacctacacacttcaataatgcctctgaatgtgaagagaaaggggaaggaattcttgcttaaataactacaacactgaacctgtgctttgcaaggtcaatgaaaaaataattaatataaaaatggcaatttgcaaagagataaggagaaaatatatatatataagatgtacatgtaaacgttggcacaaaatggtaacatgtgtctaatttttggatagattcttatataattataaataaaagactcgattact

SEQ ID NO: 53097 - DNA, 422 bp, Glycine max
  unsure (1)..(422): unsure at all n locations
tggaagagaagagagcacttaattcctcaagtgctctattcttaacttacaggcagctattttgtacaaattctcttattattctggacattattaaaggtaacggtgctaccttttcaccgcaaggtggtgctccanagtacatcatttacacccttgacttgattatgttagatagagtcaagtacctaacacttttgaaccttgtcattacctacaattgtttcagcttagagtggatagtagaatttaattaaggaaatgaaagaaatgtacagacaaaaagactgtggttggttaattgaatgacataactaagaataactaggaacaggatattctgaaaaagaaatgaagttgaactgaatcaggaagtaagccttaaacagatatttatattctaatgaagtctagttagagag

SEQ ID NO: 53098 - DNA, 259 bp, Glycine max
tgaaggagaacttgatgccttggtcaacctaataactctgtttgccatgaatcacaaatctacacctgttgcaagagtctgtggtctatgttcttctgcagatcaccatacagaatcttgtccttctttgcagcaatctggagtcaatgagcaacctgaaactcatgttgcaaatatttataatagactccctcagctgcaagacaaacaacagcataataattatgacctttcaagcaatagatacaatccatgtttg

SEQ ID NO: 53099 - DNA, 412 bp, Glycine max
  unsure (1)..(412): unsure at all n locations
tctgcaagctgaagacacgagctggagttggtttagctcttcagctgatacaccacatagagcagtgaagaattccacaactgaatcactaggtagtttaacactattcatgaaaacttgttctgcaggttttgcagctaattctttcagagattgaacaacagcatccttggagatttggtttgacccatgcataacagtgacagaaattgaaggagttgatgttataaattcgaggcgagaaacacattccagaactgcattccatgtatcttgaagagcgttcatgtctgagtcacatagaaccaacagtgtacgcaaagcttccacattnttactgcgcatttccttgggggcatgcaagaaagtaaacctgaggtgtcaacaaagaaactaatgaacattgtcaact

SEQ ID NO: 53100 - DNA, 285 bp, Glycine max
atgatgttcattatacaaagatcttcccatcaccccacgagttttgggttcaaaaagatgttgcctagctattgtatgatagaaaatgttttttgaagtcatggacttgcatttatgtaattaaaaaatatggttgaatggtaacttgacatgcactaaaatccattttaggaaatggcattacaagctaaactctagccataaaactgagatatgcataaaaatatatctatatgctaccatccatcctggactagtttaacttggtatatgatgatgttcata

SEQ ID NO: 53101 - DNA, 191 bp, Glycine max
  unsure (1)..(191): unsure at all n locations
tgatcgactctttacaccaagaggcaaccatgtggatggatcggnttgctcttaccttgaacgggagtcaagaacttccccgattgttagccaaggccaaggcgatggcagacacctactccgcccccgaagagattcatgggcttctcggctattgtcagcatatgatagacttaatggcccatataatt

SEQ ID NO: 53102 - DNA, 381 bp, Glycine max
  unsure (1)..(381): unsure at all n locations
gcatatcacacttgaatttcttcttttttctcttccctttcaccaatcttgaatgaaatatgcttacttagggtttcgaatatgttacggaagcattacaaaagcctccgaaaccataatcaacaaagtggggggaggttcttgccgcccagctgggcgagctggttgcttactcacgaatattcctgatgcacccccctttttccgctctttgtgtttctcactgttttctttccaaaacatcacgaaacttgcagcaataggcgttgagcttttcgaagcgatcgattgaggtccatatgccaacaaacaattgtctctggacaaaattatggcttgacaatccatttacacccncttcactttgctaaatacaccttt

SEQ ID NO: 53103 - DNA, 441 bp, Glycine max
  unsure (1)..(441): unsure at all n locations
tgtgtcacttgcttgggtgccttctttttaaagtatcatgttatgaatgttcaattggtagattaacttatatctataaaacaacatagtaggataataaatattcatgatcgatctatatgagatcttctgtttcttatttcaatccttaccagctgaacacttacaatatcctttttttttctgattagttttattgattttagaatattgttaatttccaccattccttttgttatgcttacaatatttctttacctacaccattgaaagtaggttntcttaaattgtataatctagtagtttttatatttgaaatcagaatgcatgagtaactgagtatgtcatttaccattttatagacttngaaggagataaatgcataaattacttcattgttcatttttggggtcatttatcctaattattagctttatttca

SEQ ID NO: 53104 - DNA, 456 bp, Glycine max
  unsure (1)..(456): unsure at all n locations
tggtnnnatggatgtctgtgtcctctacggccttgatctcgctacgcaaactactggtactatggttcgctcagcgcactgcccagttggatctcttttagaaggatgagccattattcaaccatgctcgcgatactatcggctagtacataaatgtggcatgcctgtcgtattggctctttaggtgcagctatgagtttatatgtgctaaagagaggactatactatgtgtatctgctgaaacgatggcgggtgtgcatcattctgatattgatggtctatcacgaacacgagaaacttggctggtgccttagatgatgaacatcattgtcaccctatcagctgaatcagataccgagtgtgcatcctgcatactatatgcatgaactggtaaaggaaaatatgggacatgagttcctctgtatgacagaacacattgtgatgtcttgatgaccg

SEQ ID NO: 53105 - DNA, 228 bp, Glycine max
caatgtcattactcagccaataacaaaccttctccttacccaccgcccagttattcacaaaggtcatccctaaaatcaaccacaaagcctacctaccgcacttccaatgacaaacaccacctttagcgtaaaccaaaacaccaaccaagaaatgaattttgcagcgagaaagccttagaattcaccccaattccagtgtcctatggtgacttgctcacatatctactt

SEQ ID NO: 53106 - DNA, 452 bp, Glycine max
  unsure (1)..(452): unsure at all n locations
ctgggaccaacgagaaacatcaacaaccattatttctaaatgtataagcagaaggagaaggagggcgcggggaatcttgagtatcccgaggaggaagatgtcttgcacaaagaaggtaatagtgaagtgggccacgaaatatatgtggaataagaaccaacttatgcacgtgagagacatattgaagttggagtgtgtcttaacggacttgggccttctattctgatgatgacatgaccaagagcaaggggcaggatccacttgaaagacttggagggcctattacaatggcttaagcaaggatagccaaggaagctcttccacaagtgtgttcctactatttgaatacaagcccacgtntcaatgagatatatccactgttgtgagttgtatcatggaccaaatggatgacgactatatggcaccactatgtctcacatataaaatgttag

SEQ ID NO: 53107 - DNA, 387 bp, Glycine max
  unsure (1)..(387): unsure at all n locations
cgaattatacttcaactaagaaaatatattcactntcatatcgaaacatcttcaagttaagcttgagttagggctaatgtgatctggctcactttggttcggctcttaaaatggatttgttatttttcggtgacaattacaaatcctttttgaaaaaaaaatatactaatttatgttgcaaagtgtgataccctatgttcaagggatattaaccaggcgattgtgtgaatttactttccggaaataagagtcttattaacaagttcttgagaattgacacttgcatacttgttacaaaattaatatataatattaaacttttacaagtgtaacttattatatccatatacttcactttttctttttaaattataagattaaggtata

SEQ ID NO: 53108 - DNA, 341 bp, Glycine max
  unsure (1)..(341): unsure at all n locations
tctcgattcattctatgcacccgtagtggtccacatggtgtttcgtgcattattattctcgntatggttactttntataccccctcttgacgtgcttaagccattttacttaagtcatttctcgcttaacttaaaaataaaataaatttccacccgaacgttgaattatattatccgttaacttcggttaaaatcaattccgaccgttcggtcgtgccgtaaccacgttggaaatcaaaaagaggtaaaaaataatataataatcaaaaagacatcttttagtaaaataaagcggaaaatcaatcggacgttttctctttgggatttctcattcttaatcg

SEQ ID NO: 53109 - DNA, 420 bp, Glycine max
  unsure (1)..(420): unsure at all n locations
tgangctattcaattgctccagattgcagcacataagggttatggtctgtatggcggtcggtagaggagcataaaccatagattcttgcgacgggtacaaatttctgattcaaggccagctgggctaccaagttaaccaacgcatctagtttaccctcaagcttcttagtttcattcggtgaagatgaattcgtggctacttcattcactcctctaatgacaatatcatcatttctggcactaaactgttgggagttggaagccatcttcacaattaaattcctgtcttcaacacgggtcatgtctccaagggctccaccactggcagcatctatcataactttctacatgttactgagtccttcataagaatattagagaagaagcttctcaacaatatgtgggtgagggcaactggcg

SEQ ID NO: 53110 - DNA, 354 bp, Glycine max
  unsure (1)..(354): unsure at all n locations
cctagtaaaactacccatcatatcttccaaagccccatacccacgaaaatcatgtgagaaagaagtctacccaaacctgaaatttcaaagtcccacacgtagagatgcgcttcacgactccgaaaatgccttcctttcacaatttggagcataaatggtgaccaaaggttggagctntgttgggcaacaatggtgggtgagaaaggaagaagatagctacgtgagagagagggagaaagcttctgaattttctgagtgaggagagagaacatagcttttgggttttttttttaaaaaaaggcttntctcttttcctattattntattttctaaagcacttgccacttgtcccat

SEQ ID NO: 53111 - DNA, 245 bp, Glycine max
  unsure (1)..(245): unsure at all n locations
tatcacataggtntaataaatcgcgaatgaccatcaccaataatgtgtgttcctgattagagctcgtgataactaaacaaaaaatagagaagaaacaccacaactaataaaaaagaatgctatanaagaaatagagatagttaacagaataaatcagttgatagagggatgtaatacatgaatcactcccagaaagacgaaataaacaaatatgcagtcatgagagacagagacagggacaaccc

SEQ ID NO: 53112 - DNA, 425 bp, Glycine max
gcacttatatctaagacaagaggggattttatcatagactttgcgttaaacgagtattgcatgaaggatggtcttcaagtctcatatgagtcgatagtgatcgctgacaaccatgaagaatattatgaaaggcttcttgatccaacacctgatgagccataatcatccaggaggccatagaggaattcttcactctcaactagattgcaagaatatgtcttgtttaatgacaaagatacatctaatgaagagattatcaattgtactttatttgcagactgtgatccacttatttttgaagaagcctcaagtgacgagaattggagacaggcgatggatgatgagattcgcgctattgagaagaatacacatgtgagttggtggacttgacaacaaacaacacgccatcactatgagttaaatgg

SEQ ID NO: 53113 - DNA, 404 bp, Glycine max
  unsure (1)..(404): unsure at all n locations
tactatatgnagaaaagaccaacgctgtatcggtatggtacgacaatccttcaataccttaattatacattctgagaggttcgttatcatgtggccatatcgacgtccttctctatcataagccatggtccatttttcctttgaaatgcgatcaatccatgttgctatggctggactcagttgacgaaatttttctaaattttgatcaaaaatatgcttgcaaggagtgtagcctgcatgaaattagttagcaacaataatttgaagtatacatgagacttanataacatgaccatgataaatgaaatcttacccaatntnttcaacatttctttttgtttggcattattgaatttgcgattgaaatggctcgctatgtgtcgggcgcagtanacatgataact

SEQ ID NO: 53114 - DNA, 405 bp, Glycine max
  unsure (1)..(405): unsure at all n locations
gaatgagcatgtgattataagtatgactganaatgttagtcagtttgtcagattgattgtgaaggaatgcttaacccgtattccagtaagagtgtgatccctaaatttttgagaagaacgactaatctttaagttttgattttggcgtgaatctcttgaagtatggacttgatgtttgaaattgaagatatgaaggccatgtttgatgtgatagccacttagccaaaaagctgacatgtgcctgaatgaaaatatccttgtacccanttgagctgaatgaatatngatttgatgaccctgagcctatacaatggtatctctgctacctgactangggtgaggagagcatcatcataggagcgcggtcaagcanattgtccaattggggagaatatcaagaaattg

SEQ ID NO: 53115 - DNA, 498 bp, Glycine max
  unsure (1)..(498): unsure at all n locations
tggnccnnnnnnnnnttatgattacccttgctattaccngccctattatactcngcctantaggtccatctatggattgaaccatgcctcccgccattggtatttaaaatttcatgaggtcatttcttcatttagctttgaagaagaatgtcatggnatcactntgtatatacccagaanggtccagtggngagtaaagattttgttccttgtattatacgtagatgacattctgcttgcgactaaatgatagggtatgctatatgangtgaacaattctctcaagaacttgatatgaggatatggagagcatttatgtctagcataagatcatgagaaagactcaggcatttangctgtctcagaacctatataacaagtntagaagattatatgaagatgttcccaaggtactccattggaagggacaactgctttgatcatgcccaaaatgatttgacggaacacatgaaaattcaatgcttacagtcgagccta

SEQ ID NO: 53116 - DNA, 512 bp, Glycine max
  unsure (1)..(512): unsure at all n locations
agcttcattctacatctgatgaagaggatgtgctatctgcacanaagagaaagcttcctgatcatataggtggaccttcttctagtagttctaactggcagcaacctcctatccctcttccatttccacctagagtaattccaaacaaaaagatggaagaagtggataaggagatcttggagacctttaggaaagtagaggtgaacatacctctgctagataccatcaagcaaattccaagatatgccaagtttctaaaagagctgtgcacccacaaaaggaggttcaagggcaatgaaaggattagcatgggcagaaatgtgtcagcattgataggtaaatttgttcctcacattcctgagaaatgtaaagacctaggtactttttgtataccttgcattatggggaacaacanatntgagaatgtcatgctagatctaggagcatcagttagtgtcatgcctctgtccattntcaattctntatctcttggacctactgcacctacgagt

SEQ ID NO: 53117 - DNA, 449 bp, Glycine max
  unsure (1)..(449): unsure at all n locations
agcttcagcatattttttgatatatngaactctctatcagatntcagaaatgtagttactgaatgaagaatatatggccaacaacttcacagagacacttctgcattctgctgttattattattcagaaatggctttccaggtttttttgaaggactttgatgatatttttaaattgataaanacaatctcaaacaagtnagaacaaagaanaacaaaanaaagtcttgattggtttagagagcataattccatgccatgaagaacagcacaagcaaagggattaattgcaaatgtgagctgacaacagtttattcatatgatattntgagccctaaatggcacgtatatagatggctcccattcttctcactatcatatcagtaacttccttttannatagtatctcacttcctctccattctgcactctcccactggatatttctca

SEQ ID NO: 53118 - DNA, 254 bp, Glycine max
  unsure (1)..(254): unsure at all n locations
gttctgaatctgatctcgagattaatgtggggcaaaagtttttctgatatttcccagcatcttcttttttgtattgcaaattaataactngttctacaaagattgagaatttagggggtgaaattagatgctangtgcatacagttctttaggtacttgtgtggttgttcgccaattagaattgaagttntacctcactaatttgtattgatctataatgcaaacttttactgtatgaaattctaatctgactg

SEQ ID NO: 53119 - DNA, 524 bp, Glycine max
  unsure (1)..(524): unsure at all n locations
agcttgtaccanaattctttttggcgttgataacagcagagatgcttaaaagaaatttgntattagaaacgaaaatgcttagcattcctcatatattgtgagaaatataggaaattattataaaaagtcgtatcaataataaaaaataatntaattgatttataatactataaaagaaatgaaagataatatattgtgcgaaaatatagtaacttttttatgtagaaatagaagatgataccacaatttacaatactcatgctttattttcaatcaaccattgctattgattaaagaattacaataatacggggatgggttaaattntatgggataattagtatttttttaagatgtgtaattcgttaataaattcgttcctcaaatactagaaanntcaaattagtactctataatgtaaagtgcgatannattatccagatatgtggttatattgaaatagtttgactaaaatgntagtacaatatttttttttatcacaatgttaatatattttttatcaa

SEQ ID NO: 53120 - DNA, 384 bp, Glycine max
  unsure (1)..(384): unsure at all n locations
cattcatatcagaggntaaattatcaaattacctcgactaataaaacacatacaattnttaactctttcttttgcaactcctcaagagctntctgaaaaaatctgcattcttctagcaaggagatctggatgaatacattcgatgcagaaaatcaccatgtcagggaaatattaacagtggcatatgaaccatataaaagacttcatattcctaaacatgcacttctagtgacaacagagatatgtgcattcaaaacaaaacacaatttacctagagcaagacatccaaaacatgaaaatatagatgctgagaaagttctctatttgagttataatggctataatgcataaaggctatcattggcatttacaaaaactcacaaa

SEQ ID NO: 53121 - DNA, 453 bp, Glycine max
  unsure (1)..(453): unsure at all n locations
gcatgcacgctttatagcgcgggncnnggagacataatttnattggncgcttttatactaagacgatgttccgagtacattagatatggtacaaccatgccctcctgatttccagctgggaaattggcgagtggaggaatgccccggcatttacgcaacgagcataatgtaaacctatacggttataaaagctctatagttgggcctaggctttagaggttttcctttcggtaaggctgtgcgtcttttggctttgaatctataatacaaggatcgtttttcatctgttcctacgtctctacccattctcattcattagcatgtttactttcttttctgaaacggcagatccgatgacgagtccccctaaggtactaatacctgtgacgcgtctatctacttttagcaagagatgaatcctacggaatatgaacgaaacgaagatgtgggact

SEQ ID NO: 53122 - DNA, 491 bp, Glycine max
  unsure (1)..(491): unsure at all n locations
agctntataagcgcgggtctgggagacatttgtcaagtggtcgctatatacgaagatgatgttccgagtacattagaattggtacaaccatgccctcctgatttccagctgggaaattggcgagtggaggaatgccccggcatttacgcaacgagcataatgtaaacctttacggttttaaaagctctatagttgggcctaggctttagagtttttcctttcgttaaggctttgtgtcttttgtttttgaatttataatacaaggatctttcttcatctgttcctacgtctctacccattctcattcatttgcatgtntacttctttttctgaaacggcagatccgatgacgagtcccccgaaggtactaatacctgngacccgcctatcgacttcgagcaagaaatgaatcanacggaagatgaaggaaacgaggatgtgggacttcccccanaattagaaagaatggtcgcccatgaggaccaagaaat

SEQ ID NO: 53123 - DNA, 277 bp, Glycine max
actttattggttttgcactagtattgtggcatagcaaaaagcaaaatagtattgccttatcaactgtagaagcggaatatatttctgttggaagctgttgtgcacaaatcctatggatgaagcaacaactctctgattacgggttaatgcttgatcacattcgtattcgttgtgacaatacgagtgcaatcaacctatccaaaaatactattttgcacttgatcgaggccgtacccgaatcaaataaacattaaaatgcagtaactaggaagtgatc

SEQ ID NO: 53124 - DNA, 384 bp, Glycine max
  unsure (1)..(384): unsure at all n locations
ttcatcgcatccactaacagacgttgagcgcccgccaactgatggtactcgtcaccaccaccacctactccagccattattcaacaggaaaaaaaaatgtgcaataaaaattattaagggttcaggacctcacaacactctactcacgtctcttagatggtagtacactcgtgtntaatgctctcaatangctnttgtgtaatgtattccctcttgccttttaccactcgtgtttcctcttaagttcctggatggaccanattagacacacaagataatataaaataaaaggaaagacaatataatgatcacanaccagattgatttgggataacaactcggacttngattggataataatatattagaattggattggataac

SEQ ID NO: 53125 - DNA, 421 bp, Glycine max
  unsure (1)..(421): unsure at all n locations
ctagttgatntatatacctagtatagaattgaaggaccattcaatngtctgatattcacgataatataataggctttctgcattgacaatttatattgatattgatcactggaaaaatgatgtggtatgtaaaatagtggtaattttgtaacagggggcgctaacaacataatttttaatattttgtaaaaaaaataaacataattnttaataaattatttctacatatggntaattttttcaaatgtatgcaacctactaagttngaatcccgaagcatcgatgctgatgttaatatgtatgatcgactaaatcacatgcattgtgatattggtgtagagacctttcgaagaagttggtgttgacatgattaatgataagatgaataaatanatatgaatgatccactagatgacatgat

SEQ ID NO: 53126 - DNA, 357 bp, Glycine max
  unsure (1)..(357): unsure at all n locations
ttcacaaacaanacatangcacagggccaaaaactgcagngtcaagtaaactgaaacaagacattcactaactgtgtgaaggaatccaactccatctctaatggtagattacaacttacaagtggaaataaatccatagtgacataatttgaaggttccttttctcaacagaactttaatctaaactacaatcaattatcaaaatgccaacctaacaataggtatgaggcatggacaccactaatttctcaatngaaagcagtggtgcagcagctttattggtgcaaataattcatccagcttagtgatcgacatatagaggcaatagtaatctgtgtgcagagtcctcactgatgg

SEQ ID NO: 53127 - DNA, 426 bp, Glycine max
  unsure (1)..(426): unsure at all n locations
tatgtatagctttccccaatttatagttcttttgtaggaaattgaaataaacttttgtggggtttatctctgtcattangggttcttttattggaaataatgttaaaatatgtacaatntcacgtaaaaaggagccatttttatgaaatgccaaatagctattgtgctaagtgaactcagtgggcttagcgcgtatccatcgctaagcgtggcttcagcatgcttagcgtgaaaaaggaatatggaagagcacctgaatcgaagcagcgcgctaagcacgagatcagctcgctaagagacttgtctgtctcttgncangctcagtgcaacattggtgccaagtccaaatccacttactcgcgctaagcgtgacaatggcgctaagcgcgatgtcacaatntcagagcctatntaaagcgtgaattg

SEQ ID NO: 53128 - DNA, 363 bp, Glycine max
  unsure (1)..(363): unsure at all n locations
ccccgattgagaagcaactacgtaatctatttatgcacacgcgtacatgtggaatatcctaccatttatatcaacatagaggctatccaacacattctaatngtcacacacatatacgcatttgaaaagaacatacattctcacgcncaaggcattgcgtcaaagttcacacttaattatatcctaaacatttactattacaaactacctacacacatttgaaatatatatcatacaaaatntattgtttctctcacatttatttatatgcatattggaatgctaattacatcttgcacacacttgcattcaaaagagaattccatgctatcatacatccatttaggaaaataatcattcaca

SEQ ID NO: 53129 - DNA, 424 bp, Glycine max
  unsure (1)..(424): unsure at all n locations
atgccgctatgccggaaatgacatatgaaatgatatgcccgattaacaccatntcctatttaaccatgcattaggtaccatgttcaattattttgttnttgtgttgtgtggtttttttttttttagaaatgggtttatgatcccaacatggttggctcatggtgcctaacacatgcaactaagaatgtagtgtgaagtttcacgcttcccctcttttgtttttgtagaggaaaacacaaggatgagcaaacatgaaaacaaatggtatgcaattttgcagatcaaaaagtttgttgaacgcatatgcatgatgatgccatgactcatgcaaaatgtgaggctggaatatgataacggacaaatgcangaacgatatgtcattatgatgtatgaaggatcttatgcgatcatgatatgaatcatt

SEQ ID NO: 53130 - DNA, 306 bp, Glycine max
  unsure (1)..(306): unsure at all n locations
gtttctccttcaaaacctcttgaactacttcacattgatttatttggtccttctagaactatgagttttggtggtaattactatgccttagttcacgcctatttatagcaaaacaaggcatttaggacaaaggtagctcacccaggcgagctattgcttcactctgaagtaaccttgcttgcctaggcgagctggttacttcaccatgaagttatttggtggcccaggcgagacatatgctagcctgngcgagccagggttcagaaaaagccttaaaatgacccttttgccctcccctttgggtat

SEQ ID NO: 53131 - DNA, 411 bp, Glycine max
  unsure (1)..(411): unsure at all n locations
agctgannatacgatagatgaatctgatgtttctgaggaattggaattctgggagaaatctatcattctctttgcactangacagtctctgtctatgaatgcggttaagaagttcatggagaagaacctgaatntcatttcactcccagaactattttacaacgatgaaagttacttcattgtgaaatgtaagaacagggaagacatggagctggttatggaacaaggtccctatttcatttacagtacaccggtatttctttgcaaatggaccactgaatttgagatgaaagaagatctattgcgtgttcttccaatttggataacgttacctcaattgccactgcacctatggggggaaaggagtatttngaatatagctagtgtgattgtaaacctataacatgtact

SEQ ID NO: 53132 - DNA, 479 bp, Glycine max
  unsure (1)..(479): unsure at all n locations
cattgcaagcttgngttgcggtatagttagaatcttttgatagagtctacctctttcttttcttccttgtagatcatgatggcggcgcagctaatccgtgaacgagttgagatggagtgcctagagggagcttgggagaccctcgaaggcaacacgaggtgccgatttcggggcaccattcgattcacggctacttctttggtgcatccagatgaacctgcacggacgcttcagcgcacggtggagtggacagctccttggattaattntgtgtatttttgagggtgggtgtatctaagactgactgttangtttactctttttgtttgtatgggtagacctgatgtatangaatttgatattgtatacttgtggttgaagccccactatggacacctttgctctggatgacactgtattnttgtaaactcccatattttggacaactttaaatgatgaatgtatttatgatcaatctt

SEQ ID NO: 53133 - DNA, 228 bp, Glycine max
gatacatattaaaaaaattcaaaattatatatgtatctattatatataagtatataactaatattattgactaagaaaagtccatccattgttccatacttcaaaattcaaaataacaattgaagtattaaagttgataacataagtgaagtgtattagtaataaaagaaagtgtaaatagcaactacttaaattaaaacacaagtccaagtttttaacaaacaaaat

SEQ ID NO: 53134 - DNA, 414 bp, Glycine max
  unsure (1)..(414): unsure at all n locations
ggatcttagcaccgcgctgcagcttagaggtttgaattgaattaagctgnatgatacatgatgtgatcgataccacaacggaactcttgaattcaatttgaaaagtatacccttcaaatatactgtgtatcgataccaaaacttgtatcgatactagtgaagaattcagaaaaacctttttaaaagacacatctcttcaaccattttgaaaggcacgaaggacctatatatatgtgtgtctgacttcgaaaagcaagagagaaatattctaagagaactntatttccaaatgctctttcaataactctggggcaaacactttgtaatctattgagagttcatctaggaacttcanattgtattatcatctctaaagagagaaattcctctaggatcttcaatctgtatcatcta

SEQ ID NO: 53135 - DNA, 367 bp, Glycine max
  unsure (1)..(367): unsure at all n locations
gttctcagtatgaaaataagtagtggaatgctgaaaattagaatatttagaatcaccctcaactgaatgctcagaatgctcaaaatgcacaaaatgaccaggatgcacactatgcctaactaatctatgaaaggttctatctatttcaggatcgaagggttgtaaatcacctggattgcccctagttatgcactatatgtagcaaataatgtgtttctcaacaagcacctaacaagggggtaaaactacagctatactcaaacgatatcaaaatgagctgaaattntgtgaggaacaccctaaaatcatgaaaagatagcacgaaaaatttcaaacaaaaattcaaagtataactatgaaaactacc

SEQ ID NO: 53136 - DNA, 333 bp, Glycine max
  unsure (1)..(333): unsure at all n locations
ctacatttaattagtataacacccatacacccaaaatagaaaagtcaagctcaacgcatatctcaactgagaattacaagcctaacaataagttaaacacacaatcacaactcagtattgacaccaagcaccacaccttatctaggagaacttgataaaacattagatgaagttagcagtgaagtaaaaatgtcattggactctagcacaaaccacanttcagtaaactcactttgataaaggtgcattttaatgatttcttctaangttttatttgatcataccgtaccattttagttgaactatcttccatctgattcatattttctcact

SEQ ID NO: 53137 - DNA, 464 bp, Glycine max
  unsure (1)..(464): unsure at all n locations
agcttgtccttgatatgaagataataatctatctaggcagaatggaaagaaacaaggggtgtgtgtctagctatctaattaggttgtacctatgcaatgagaactatntgtagttctttggtgttatgcaacaagtgaggagaaaatgttgcaaaatatagaagtgagatggcgtatgagacaggtatttatggacagaaaatagaccctccaactctcagtactgaaaataataatttggtagtaactccttgtgtaatatttggagaataaaagaaaaagggtatagtgagaaggggtttgggatttcacctgtcaactntcatgctcaatgaattaaccgttcatttttcttcatgtatgggaaaaaggtgagggagggacaatgaaagtgtctttttgaaagtgacttttgtaatgtgtggggtttcattcaattccaatgagagggacgttgaacgtag

SEQ ID NO: 53138 - DNA, 298 bp, Glycine max
  unsure (1)..(298): unsure at all n locations
aatcactctcttcttagggattgtttttctgatgtctcgatgagaatgtgtaatgttagaagaacaactttatgttttggagggagttattctactaaaacctgagcattagacatataagtcggctgtgtagattttcaggggaaaaatgccggattgcatatacagcgttctgatttgagtgtaggacaagacccccctatatcatttgggttaatattacataattatgactctgctaatgtttctggatcattntattttttatttatctgcagctatttgggctttgtttttc

SEQ ID NO: 53139 - DNA, 457 bp, Glycine max
  unsure (1)..(457): unsure at all n locations
cctcaaccctcactaccaccaatcgttaggctaaacttcccactatttctagtcgcgagttcttagtgtattcgtaaggggaatatatcacccttgtagtggtcctagtctattaataggggcaaagtagtagaaacaagtaagtaaaattttctatactttatactcacttaaaaacatagactgatttgagcgtcanagtccctttttaggtactcccttcacacacacacacttggagaaggagcctcaaagaggaggaggagggataatataataataataataataattataataataataataataataataataataataataattaattcaaaatgggtaatacgaaccttataatatattattcttatagatgtaaactntaataataataataataataataagactntaatgtttgacactgatagtgtacaatcatttacattat

SEQ ID NO: 53140 - DNA, 505 bp, Glycine max
  unsure (1)..(505): unsure at all n locations
tcatgatgatgaatcaagttgatntattaagtttcgataattacatagatgtngattaaaagcccaaagaatgagttttagattaaatctagaacaaattcaagaatcaagagaagtttgatttcaagattcaagaaaagatgaattcaagttccaagagaagaaatcaagaagacttcacaagggaagtattgaaaagatttttcaaaaaacaaacatagcacaattttgtttttcaaaagagttttcacaaaattttctaagttaccagagtttttactctctggtaatcgattaccagtaacaaagattgttttcaaaaagctntcaactgaatttacaacgttccaattgatttcaaaatagtgtaatcgattacaagatattggtaatcgattaccagtgtgtttgacgttgaaattcanattcaatggtgaagagtcagatcctttcacaanaatggtttgtgaatcgatacaatgattgggtatcgataccagtgctg

SEQ ID NO: 53141 - DNA, 333 bp, Glycine max
  unsure (1)..(333): unsure at all n locations
gcatagctcattcacggatttgtcggtggaggaaccgngtaattacttggtattaccatatcttaaagagacacangtggtgtatcttgtcttgttgaattgaaaactgtgctatagacacccttaaaaaaggaatngcttgaaatgagcatgacttttttcttttctgcttctggcgtgaaaagtctgtatataatatagactttcatagacaattgatttgcggccacagatagaggatttttggaggcttgactggagagatgattcaatttctgaaggaaatcttcagtctcattttgagatgtttctgttagctgatcatagtgtcat

SEQ ID NO: 53142 - DNA, 480 bp, Glycine max
  unsure (1)..(480): unsure at all n locations
ctgcagcttgctcatacaatctcatcatcattgtactatncttttcagtatcctcacaacttccagtattttccttagtcatgaaccatcttgcatttttgggtttgacatttcttagaanatgtggaaatntacataaaaaagttggttgaagaagggaagacaacatcccattaagaaatgaacatctctcttagtagtgggatcgagagaaagaatangagaggtgatttcattatagttctaacttgtgttagtgacaataatcacctgaagtagcacatcatccttcacaaaattttgttttgacctcacgtaaagcccattcaaaatttttcatcctctctgattgtaataagccaaggcacaaagaaagtcattnttgttgaagtcagtagtatcacanacaaacactaatggaaatgaatntaatagtgtgatgaaatctggatgtgaccacatcatatcttttgacacatc

SEQ ID NO: 53143 - DNA, 175 bp, Glycine max
  unsure (1)..(175): unsure at all n locations
gtcaaactctttcaacaacganttttaaaacaatgtaaaaaacatctttctacatcggttatgccagaaactaatgtagaatgtttgttaaaatgagtaaatcttccaatgttctatgtcagttctataaacaaccggcacaaaaagtacctaaacaactatgatntttcacatg

SEQ ID NO: 53144 - DNA, 404 bp, Glycine max
actgatagaagaaattcttatgaggagagaactctgtattttttgcttgatacaaatgtgtaggattacatctctatttatactattctaaggagaactctagacacactaattgtagagagtgctcaactctagagatccaaagagtattctagagaatattaccaccataagagatatctagacactccaaacactacaagaattctctagaacatgacccatattacttaagcccaaataactaattcaacgaaccagtaattaattacggcaaattaagttatattcaacagctatgggaaaacaagatatggtatggcaagtagtttcatacaagcactttatgtgaaggatgttctttcttttttttgcaagccatgcacgcatttaattaaactacc

SEQ ID NO: 53145 - DNA, 367 bp, Glycine max
  unsure (1)..(367): unsure at all n locations
ctaaatcatgacaatattgataacaacaaaactaaccataatctcatagttatgaacatgatatattttctttgacagtacaattgttccccttataaaattctctataacaagtgttgttcatatggtttctgtggcatgcccttcagaatgcttttgcaaccagtcttcaatattgtatttcctaaggtaggaatagtgcataccacttctgagttgatctctgttatcattcacaggttntattcttccagttagatagttattcagtgacttggttaagggcccttggcaagtaactngngagctctctcaatgcaatatcataattttagcagttaattactatgtgacatgcaattattat

SEQ ID NO: 53146 - DNA, 420 bp, Glycine max
  unsure (1)..(420): unsure at all n locations
cacaacaagtttttcacattcagaaagcgcgcataacccaccattccctgttgccacctcaactgagctcacgtacatccacgtagcccatattctcgttttctcacaccgggccccatcatcctcccagcttcccaacatcaaagtaatacaaaattcaaacagcacaagctatcacagccaagcaaaacagagcaaaggcagaatactctgcccaaacaccaaccaagatcatagcttttcacatacgaataccccaggaacatntccttcgttcccattcgttaaccggtggatgcaactcgaaattntactgagattctctagtacataagcctacattgtgacgcgtgggatctactagcaaacatccagaactcattctgctactactctgtcacagccaaccacacacaagca

SEQ ID NO: 53147 - DNA, 361 bp, Glycine max
aaaatttaactatgttttggataacaatgcaccccagttgcccaatcaaatagctaggtcactcgaatgaaactagtgtccttatctttacttcccttttatttccaataaaagataagtaaagaagggcaactgtcataccctaatttcgtccagggactatcattcatggatattttgattttcgctagccgaattgagttgttcgacgcctattaccacccaagacgaaagatcattcgacgttttggtgaagaatgcgaaaaatacccaaaagggagggcaaaagggtcattttaatccctttttttgaaccctagctcgcccaggctagcctctagctcgcctgggcccccaaaat

SEQ ID NO: 53148 - DNA, 457 bp, Glycine max
  unsure (1)..(457): unsure at all n locations
agatacgattatctgaagatattcattntctatcgttcatacttccaccactatcaagagcagctaagtactgcaatgcaattttagctgtttctgttttcccagatccactctcgccactgcgaacaaatttctaacaatgattattaacaagcacaccagtgaatgtatcttattactactatgaaaatccaatgatattggtttatgaacatatattaagtgtcatgcacaaaatgtaacccataaatgcagtaaggagctgaccttatgataatggactgatttacttcatctgtaagatacaaaaagaaaaagaaaaccgttataaatgtctcattcaagtagaatgcaaagattgcaaagaaaggaagagaaagggagaatntcattcacctcttatcaccttgttataagccgtatctgccacagcatacacatgaagactattcaatat

SEQ ID NO: 53149 - DNA, 373 bp, Glycine max
  unsure (1)..(373): unsure at all n locations
attataatatatcggttatctattaccagagtatctgaacattgaaatttatattcaattgtgaagagtcacatcttttcataaaaagctntgtgcaatcgattacatgagtttggtaatcgattaccaatgtcaagttatgaataaaaagtcaagagatgtaactctatcaatggttttcaagtgtttctcaaggttataactcttccaatggttatcttgaccagacaagtagagtctataaaagcaagaccttgacttgcattttaataactctcccaatatactttagaatattatcttcttcttcttcttcttctgcctttgccaaaagctttcaaagttttctggtttccaaaccttgttctttcac

SEQ ID NO: 53150 - DNA, 459 bp, Glycine max
  unsure (1)..(459): unsure at all n locations
cttagacaagaatcatgatttgataccacatgttgaacaagtggcatcaataacttaaagaagggggcgtgtgaaataagttttaaaagaattttttgattaataagttntaatcccttttcannaacattgtgataggttcagaacataaaagatgaagaagaaattaattcgataatgttcttcaattatgcaagacaaaataactgcaataaanaaccgagataaggatagagagaattgtaaactcattttatcctggttcgaaccacttctgtgcttacgtccagtcctcaagttactcacttgagattttctactatctntgtaaactctttacaacctttgaacacaccttgtgatccctcacccttgtgttcaagatctcacaagccaagagacannacagctcttattaccactgagtttatgatatgtacataaaggtttctctccttt

SEQ ID NO: 53151 - DNA, 343 bp, Glycine max
  unsure (1)..(343): unsure at all n locations
tacttcttcgttcaaatccttatcgaacaaatcaaggaatcaaatgccataactagaccaactgatggaagagtggcacatgtangttgataaatcagtggtatcaccatattaagcatattaagtaaggattcaaagatataccatacaggcctggcttttgctgattgcccattgcctgtcaaacaaagtagaaatttctttctttcccaagagcacataacattttttatgatacacaattaacttaacaaagttacctccatagagtacttttcagattcagcctaccctttctctctaactccgatttgctttctttgctacacctattctttcttcc

SEQ ID NO: 53152 - DNA, 412 bp, Glycine max
  unsure (1)..(412): unsure at all n locations
acctgcngcatgcaagcttgagatgaggatttgttgaagggtgtttaacttctgctttattgttgaccacagagtggtacctggagatatgtcgcgggggtcaggagaccttggggacgtcaggtggggtgctattgcccaaaaccaagcttgaccaatcccgacccaacccgggcatagtcggtcagtgagaacctgtgatgtacctaagcaggcgagcctcctgcagtcaacagataaaaggaaaacaagaccacaaagcaaggaggcttgtggtggctggcccagctgtgaatttgtgtaatatgtggatggtggcctctggtaatcgattaccaagggtgggtaatcgattacaaggcttaaaaatgaagacaggaggctaagatggtctctggtaatcnattaccac

SEQ ID NO: 53153 - DNA, 251 bp, Glycine max
  unsure (1)..(251): unsure at all n locations
tgcttcaatggaggaaaagaaagagggagagaaagagagaggggggagcacgaaattgaaggaataaaagaggtatagaagtggaactttgaagtatgtctcacaagactctcattcatcaaagttacaacaagtgttacacatgcttctatntatagactangtagcttccttgagaagctttcttgagaaagcttctttgagaaaacttccttgagaagctagagcttagctacacacacccctctcat

SEQ ID NO: 53154 - DNA, 425 bp, Glycine max
  unsure (1)..(425): unsure at all n locations
agcttccttatacacttgccttttcttatcctntctggaagtgctggtctcgaatccagtcccttaaactngttcttctaatagaaattgttatttcggaaaagtctttatttttttcttcaagagaggaaactatcgactcaaacctctttgaaagacaaaccaaaattttctccataactcatngatcgatgagtttttcactaagcaatctgatttgtgtaataacctttaaaattctatcagtaaaatttttacaaatntactttctttcttcttcactgcttcaaactctcttcttatcaagttcaacccctgcattcttttcaccctttcactcccttggaactcctccttcaaatgatctcatgcctcttttgtcatcttaagaagtaggatcttcacaaaaatatcatcatgtagtg

SEQ ID NO: 53155 - DNA, 388 bp, Glycine max
  unsure (1)..(388): unsure at all n locations
tctctctcgncnanancaactaactcatctgacatcattttcaataatggtcgatcggaatgtccatttgtttttgtactctagctgatngcaaatgtatttcgaccggaagtatagcatcgtgcccataagtcagtcgaaatggggtagtattagttgattccttangagaatntctacatgcccatagaacttgatctaacgttttattccaatttcttggcttttgggcaatgtgttttttaatcaagttgattacaatcttattggctgcttcgacttgaccatttgcttgcgcataatatggtgtcgaggttaataatcgaaagccagttttttgggcaaattctttcatttttcgtccagtaaaaactgaaccttgatcagt

SEQ ID NO: 53156 - DNA, 510 bp, Glycine max
  unsure (1)..(510): unsure at all n locations
ctagagtcaccgcngctgcagcttattgactatggggcgaatttttntagattaaattacatcttgngtgtctaaacattttacttgctgatggtttttgaaaaatctattatttgctttgtagaaagttttatcatatgaaaatgttgactctttggcaagtgtaccaattcgctctaagtagtaattctcggaagtccgagtatcatttccatagggattttattacacttttattgaatactcttcaatttgtaagtaagaaataaatagtacaaagcaagaataaaagcaagagtaatttgtaaaatcaagtaattaagaaattaattaagatgaggatgttaagaccggacannacctaatggcctacgatgcatgaatntatgatgtttcattaccaatgtaattgaacctgttctccccacatctgtcagtttacttgcccctgatgcttacgatgacaacctattcaatacctatcccccaatgccttgtgaagactcatat

SEQ ID NO: 53157 - DNA, 269 bp, Glycine max
  unsure (1)..(269): unsure at all n locations
gagtggggagaaaagagaannaaaagaaacgaaaggaaattcccaatcaaagagtgggagaaagaaaanagaaaagaaagagtattcccaaccaaagaatgggagaaagtaaaaaagaaggaaaccatgacctanaagtggtcttctccctttgattaccaaccaaaatcctgtgcgctagcgactnttcgtcccgcactaaacaaaaacagaaaaggaaaaaagccaaccaaaaatcaaaagccaaaaacacacaaaagccaaaaaaa

SEQ ID NO: 53158 - DNA, 494 bp, Glycine max
  unsure (1)..(494): unsure at all n locations
agctntgtcagtcttgttgaaatnttaatttgccaacaatcattaattngatatactatatgtatacgcatatataataatttattatttaatattaaattaaaaagttatatgataaacaaatttttactacttattattatgattaaaattaataattaatttagtatttaagatcttctacatgtaaaagaaacttaaatttttgtgtgctattgaatcaaaattttaatttaaaaaacaatcattgatttgatttaatatacttaaaaaatttttgagtcgttaaatcaagattttaatttcacaataatcattgatatgattaaacgtattnttttttttatgaaaatgcnaaatttatgcacaaatttatatttttaaaataaaattaanacccattaaaaatattaatgaacacgttaatgacttttcannaaccattgacatgaatatctnttgtttacatattcataactaccatntaatttttt

SEQ ID NO: 53159 - DNA, 404 bp, Glycine max
  unsure (1)..(404): unsure at all n locations
agatactcaacttataagctctacttaagccatatctctagttgacgtgttcatgatgcttcaattaaggcagcccctanagaggctgcagttaaggcanggtangggtgaactgcaattaaggcagttttccaacaattataaaggtagaaatctgatagtcatgtttactatgcttattatgtgctaaaattcttgctactgggattcatatactgtacggcttaattgttgctangactgatcatctaagacaatttgaaagtgcacatgtatgtcttatttccaatatatgtatatatgcgttaaatcctattgaattgtttaatattttatcgatgatgtttattatntaatgggtgttgttgtcaggattctgatggtgaattacttccatttgttct

SEQ ID NO: 53160 - DNA, 369 bp, Glycine max
  unsure (1)..(369): unsure at all n locations
actcaccaaaacatctttagccacgcttctcaatgattgtgcttattttgaatgtttcgtgaacgaactttcatgccccatatggcanacctngctcttctagtccagtattcttttaatcttgtcctctagcaacacgaattttttatatttgtataccttctctcatcatanttagtcattcctttatcatccaattntcttatctcgctggagctctngaaagttgctntaatcacttcatgcttctttcataagagaaaggttccacanataagagttatannattgctatgttatcatactctacaagcatacatacatataantgcatgtatgttacatacatacagatggatgttaatttat

SEQ ID NO: 53161 - DNA, 231 bp, Glycine max
atagaagccccacaagcaagcttccatcaagaagatagagattagctacacatacctctctaatagctaagctcacctccttgagatgaaaagctagatcttagctacacaccccctataatagctaagctcacccccatgacaaaaaaacatgaaaatacaaaaaaaaagtctttactacaaagactactcaaaatgccccgaaatacaaggctaaaaccctatactact

SEQ ID NO: 53162 - DNA, 408 bp, Glycine max
  unsure (1)..(408): unsure at all n locations
tcacctgcggcatgcaagcttcgctgcgcctgtgcggcgatctctcctactccgtcgagatcagcgactgcgacgacatcgtaagtgtacgtngaggccatcgctttgatgcactgcgaagatctcaagcctantgtgcgctccatggccgaaggagtttccaaaatttgagcttgctcaaagtacgttgcgaaactcactcatcttgtttaaccaactgagctagaccctcgataccacgcttatttatttgaatgaagttgaggtagttgaggtaaataatagtaattaagttcaagtttgtataaactgttccataaggaanagtaaaataagaaaggtttatgaattaagtagttctctgttatgcataattaaaattagcttgagtggataagttaatgaaat

SEQ ID NO: 53163 - DNA, 453 bp, Glycine max
  unsure (1)..(453): unsure at all n locations
tagatgaatctgatgttgctgaggaattggaattctgggagaattcgatcattctctttgcactaggacagtctctgtctatgaatgcggttaagaagttcatggagaagacctggaatttcatttcactcccagaactatnttacaacgatgaaggttacttcattgtgaaatgtaagaacagggaagacatggagctggttatggaacaaggtccctatntcatttacagtaaaccggtatttctttgcaaatggaccactgaatntgagatgaaggaagatctattgcgtgttctttccaattggataacgttacctcaattgccactgcacctatggggggaaaggagtatnttgaaaatagctagtgtgattggtaaacctataacaatgtactgcgaagaaattacgaatctcttatgctanggtcccttggtgagtggatattact

SEQ ID NO: 53164 - DNA, 201 bp, Glycine max
cacttcttcagatgggtttcttccgaggcaagactcaacccaaccgagcttaatcactgctataagtatttgaactctgttcaaccccttgtcatcattcccttgtaccacattctagtaaacacctgcatattatttgttgtcatggcttacaaaatacaaagaatgtgttcttccacgggaaatggtcttggacattct

SEQ ID NO: 53165 - DNA, 524 bp, Glycine max
  unsure (1)..(524): unsure at all n locations
ctgcagcttacagagatttagtatgaccactattctagattatattatactaatgccttaacctangggaataaaaaaacttaatggctagtgtaactganattgtgcaaccaaaagtcacccccaacagccaacaagtcagccaccatttggtctcccaaaggctgatgcctangtttgccaatgggcccttattacaacttgaactaaacctaactaaagcccttntagttgattaacccaaaacatatntttggtcagccaactttacaaggattgggccattatttagacaaactaaacactctaaaattgaaacaaagtggtgtcatntagtccctcctccattgggccatgatacaactcacaaccttggacttttctcttgaaactnggcttgtattcaacagtatggacaacactttgtgaagagcttcttggctttcttgctctagcccttgcatangtcctccaagtccttcaagtggatccttgcccttgctcttggtcatgtnctcatcatt

SEQ ID NO: 53166 - DNA, 270 bp, Glycine max
  unsure (1)..(270): unsure at all n locations
aaattttccattcaagagaaagccaaaaggagagaaagggaatttcccatccaaagagtggggagaaaaaaaaagagagaagaaaggaaattcccaatcaaagaatgggagaaagtaaaaaaaagaagaagaaagggaagaaagttcccgatcaaagaanacaaaagaaatatgcagaaagatctttggaccggacaatatctgaacaatacagaattgtcaccaaatgaacaaaagaaagaaaaggaaaccatgacctaaaagtggtct

SEQ ID NO: 53167 - DNA, 322 bp, Glycine max
tcgattcggagacattatatatcaagacacctgaaaattgaccacggaacctctccgagaaatcaaatgggcataaccttttacacggatgtccgaattcggcgcataatatatcgtgatgctcgaaattgaacaacgaaagctctcgagagattccaatggtcataagttttcacatggacgtccggtttaggtgcataatatatcgagacactggaaatgaacaacaaaacctctcgagaaattaaatggcataacttttacactgatgtccgattcggtacataatatatcgagacgctcaaaattgaacacggaagct

SEQ ID NO: 53168 - DNA, 535 bp, Glycine max
  unsure (1)..(535): unsure at all n locations
gggggctccccnncctgaacccctggattacgngacatatatactcatctatatctaagtggaccactntttcatttacacccgttgtttttcttttcaganaatagaagtttattctctttattctaagtgagagtgattctcctatttcttgagtgattcaagaatccctggctgtatcaaaggactttcacaaccctttgtgtggttgccctcactggnaaagagtgattatttncttcctttcatcttcacccttgttctttcaaaccacaattccagaaaatccacctcttcccagaattatatcgtgtccataactcccattttacgcactcaaattaagtgattcttgagcctaaattgaatttcaaaacgagacctttcacctcgttntggaatcacctcanttggagccctgtagcttcacttattgtcatttctatanttatgtccagccaccacttaacctatngtntaccatcccattcatccattttatgccaagaaccaccttattaagacccacanaatn

SEQ ID NO: 53169 - DNA, 535 bp, Glycine max
  unsure (1)..(535): unsure at all n locations
aggggctaccccnnaatgatacccttgcatnaccngaccatgtgaacccatcgtaggcgtnnggccttggcagtgaaaggatcgnngtggttttattaaaggcaaatntaagcattcctctgngacaatggagaaacctggggcaattaaagagggtgaggttaaaggaaaaaccattctgtgactgcatttctatacagcccaattttccaaccaacccaaaaatgtcattactcaacccttcntcttacctaccgcccatttatccacaaggccatccctanatcaaccacaaagtatgtctaccgcacttccaatgacgaacaccacctttagcacaaaccaaaaacaccaaccaaaaaataaaatttgcagcgaagagcctgtaggattcaccccaaattctggtgtcatatgctaacttgctcccatatctactngataatgcaatggtagccataacccctgctaggttccctcanacccccatttttctgaggatacgactcgaacgcaacatgtgcatatcgtggag

SEQ ID NO: 53170 - DNA, 382 bp, Glycine max
agcttactgggcagtgaagacttgcaacttctctatggatcaagttggtgaggaaagaaagttgcaactgagtgagttagatgaaatccgcctagaagcctacgagaatgccaagttctacaaagaaaagaccaagaagttccatgatagcatgatagttaagaaggacttcatggttgggcaaaaagtgttattgtataattctaggcttggactcaagagtggtaagttgaggtctaagtggattgatccttttgttgttactaatgtttttccttatgggacagttgagatcaaaagcgactccacaaacaagagcttcaaggtcaacggacatcgacttaagccattcctcacgaacccttctttattggacgtagtg

SEQ ID NO: 53171 - DNA, 400 bp, Glycine max
tggtgcggagatgatggtacagcgggtgaaccagaagcggaagtttcttttggtgaggtagccatggaaaagcagagcgtttggaatgatttcgtaaatctcataaaactattgggaaatgctggtaaaaacacgaatgccaagcagatataaatttgaatgaagaatgtagaggggcgtgtgaagcaacggtcgaatttgctttgtagtgaacgtgctattaatgttaagtgattcgtttgggcacgttcagattgcagtagctgctataattcctctagcagacaaatgcccagcttgcccctcagtttttcaaactgatttgcatccaaagcctttgtgaaaatatctgctatttgttcctcagtgtccacatgcttcagtgtgatcactttatcat

SEQ ID NO: 53172 - DNA, 309 bp, Glycine max
  unsure (1)..(309): unsure at all n locations
cctgattaaatagtcttaaattaccttgtgtttggtatctggctagataacactcaacgtggggttagaaagtaactcgtagttactttcgcattggtttgtttatgtgatttntactggacatanatttctaaacttgaaccaaacatgtatttaannagtagctcgagagaagaaaatttgttgaagtcgtataacgaagtgtctagttatatngattcttaatcaatatgagacatcctanattaaacatctcttgagaatgaaaattttcagaatagacatctagaaattgtcaacattaaaact

SEQ ID NO: 53173 - DNA, 382 bp, Glycine max
  unsure (1)..(382): unsure at all n locations
gggtctatgagaatgggggaccaaacttgatttatgctaacccccaatccaatcaaccctttatgtctgttataaaagggtttcactttctccttctttccctctttcattgttctaaaataagataaaatgataaatntagtctccctattcatatatatgatatgagattnatcaaattgattccttatcatttaaattataaaaggactaaaattgaattctaacacaaacaacagggaccaaatntataattntttctaaaaataaaaagtagaattgaaccagcacattacctcgagaaaataaatttggtttccatgaaatttctggaaaaaaaaatgttgcctacttttaatctttcatttattttctagtccta

SEQ ID NO: 53174 - DNA, 439 bp, Glycine max
  unsure (1)..(439): unsure at all n locations
acacatatgtattttcataaaatttataaaaccttcactcttatccttntaaagcttatacttgagaatcttcatgtctctaaaatgaaagatgcttcaccgaaacattgagagaaaaaacacagttgaaatttcacataaataaaaagttagaactaataaaaaaaacagtactggtttatttataagcaccatctccattgaaaagagaattttattcttattgaaattagtaatatattaagacgttgaatataaagattagaaaatgagtcanaatgtatcaaaactcanacaaaaaagggacaattggataaaccaatatagaagaggaaggagaaggtgagtntgtttaaactntacaaagtaattntaaaataagggaatgttaaaaaaaagttttttaaataagcagataagaattgcttcttgaaaaaat

SEQ ID NO: 53175 - DNA, 391 bp, Glycine max
  unsure (1)..(391): unsure at all n locations
aaataattaataatcttttatataattaaaaacacagtaatataaataattactacatctaagttatataatacacatagattaaaatagtacggtgactgagatgagaaacatagagacatgcntaataaacataataaaatgagaataacaaaacatactaaaaaacacaattgaaacacgaaaattatgaaactaatgatagtttgaaagatgttgtgcaagagacacgtcttcttccatttgagttactggtttgttaaaaataactaaaatttctattgggagaatcgtttctagtagttggattctactaacacctttaacatgtcttcatncgttttcaactctggtatttcatattcgaattaattttctgaatatttagcat

SEQ ID NO: 53176 - DNA, 512 bp, Glycine max
  unsure (1)..(512): unsure at all n locations
agctnttattatatttattactaagnngaatttttatnttntgatgaaaaacaataaaaaaagacacccatgtaactgataaaaaaattgtctcattattttattcttttacaatatgcatttttttccttgccggtcattaggtgtccaatattgaagtggtttgaatcgcatcgcatgtcatggaaatgtaagtataattgtcaacgaaaaaaaaaaactagataagaagaatatcgatttaagagattaattaaagcattatatgtgtgtgccatgaccatagatagaaacattaagataattaaaaggtaaataggtatttatggatatacgagtgaacttattttaaatgaatgtgacgtagtaaaactaccactctttcacacaaatattggattggtgagatctaaatacangagaaaaaattaaatcactattattatcgtcacaaatggattaatgatatacatgnagtatataaattattttcaccgatcacaatcaaattt

SEQ ID NO: 53177 - DNA, 182 bp, Glycine max
gataaatataacaagtatatgctgttggattagggtctgaccttatggatttatgacaatggacagggggagagttcagatggtctcatatctatttaacgtctagtcaaataaaaatactttactttagtttaatctgttatgtaataatatatagaatggattgttttgaggcttgttta

SEQ ID NO: 53178 - DNA, 490 bp, Glycine max
  unsure (1)..(490): unsure at all n locations
agcttcacaaagagaatcatcttgatatgattactntggaagttctcttacaaggctatgctnttgaagctntgagattaacctcaagctagcatgaccaagcttcttatgtcaaacccaataatgctctttgactgagagtaggcatgaaacttttggactagacagatcaccaagtttaatcttatacagaattccttgtctcttagcctagaagagtgaagagttttccttgttctcaatgatacacatatccttgttaaaagtgacattgtatccactatcacataatntacttatgctaagcaaattatgcttcaaccctttaacaagcaaaacattatctatagaaggataaggaggaatacatactntacctacaccaattatcagacctttctganttccgtcgaaagtgaccaccctactagacatanggcttanggattgaacatagactttcacttatcatgtgtcgtgagcaaccact

SEQ ID NO: 53179 - DNA, 358 bp, Glycine max
  unsure (1)..(358): unsure at all n locations
tgagatgaggatgtgttgaagggtgaaacttcctgcttttattgttgaccacagagtggtacctggagatatgtctcggggtcangagaccttngggacgtcangtggggtgctattgcccaaaaccaagcttgaccaatcccgacccaacccgggcatagtcggtcagtgagaacctgtgatgtacctaagcaggcgagctcctggcagtcaacagataaaaggaaaacaagaccacaaagcaaggaggcttgtggtggctggccagctgtgaaacttgattgatatgtggattgtggcctctggtaatcgattaccaagggtgagtaatcgattacaaggcttaaaattgaggaca

SEQ ID NO: 53180 - DNA, 482 bp, Glycine max
  unsure (1)..(482): unsure at all n locations
agctcatcttccatgtctattcttcctgctttattagcattctcttatacaaatnagntactgctaatgaaaagaaaaggatggtccttaaagatattgtttttgggaaattaaagtatgtacaagaaaaaatggtcattttgatatatgtaaattctgaagggatgtaggacctgctctaatgtaattttaaaacttctcacctaaccaattaatgagtgcaacttttccctcaagtcgcacaaaagtaaaaccatagtaaaataaaagcatctgcctctttgaagctataataaccaacccatgttccaaaagattaaaagcaaagatgggatttttcaaaagaaaaatcataatttcgtaggattatanaagatgtcactaagaggcatcagtgtattgatatggaagataattaagtcttatggaatactaatcatgaacatatatgcatttattgcacccttccctttatatgtata

SEQ ID NO: 53181 - DNA, 295 bp, Glycine max
  unsure (1)..(295): unsure at all n locations
cctctctaatgnctcacccgtttagtaaatgcatagatattagngaggcgacaagagcaagtgtatattcactcgctataatttgagttcccaacacacactaaactttgaaggaatgtcgaaattcaattttcacaaaatacattgttagataaggacgagaaactcgcgacaaaatttgaaattgatttaaaaatatcaatcattcatttttctacattgattttttaaaaaactgacttagaatgaatattgtgaaaacatgatgttctttaataatgaatgcataatcaac

SEQ ID NO: 53182 - DNA, 325 bp, Glycine max
  unsure (1)..(325): unsure at all n locations
tactatatngtgactngaccaacgcttgtattggaatgctgcgacaatcttttcacaccttattcacacattctgatanggtggttgtcatgtgaccatatcgtcgtccagatgtatcgtaagccatgctccatttttctttganatgcgatcaatccatcttgctatgngctggactcagtgacgaaatttttctaagttttgatcaaacacatngcttgcaggagtgtacgctgcatcanatttgtatcatcaaaagtggacgtaacatcaaactcanataaaataatgataaaatanccttacccatttcttgacatctttt

SEQ ID NO: 53183 - DNA, 271 bp, Glycine max
  unsure (1)..(271): unsure at all n locations
aaatgaacaacaacaatcaaagtcaagaatagcanatgaataaaattcaccacaccaattaataaaaaataaaaacacagtaactgcttcaagtgtgcattntgcataccacatagattggttatggcatttgagatagccaaggctgtagcgaccccatttccacaacctgacatatcttctccaagtaacaattntgcaaacctctccttcatcatctcaatctctacaagtgagaatgaaaatcanatctcatcatactgatatcatc

SEQ ID NO: 53184 - DNA, 218 bp, Glycine max
  unsure (1)..(218): unsure at all n locations
tgtgcagaggggatctctggaccagacaatatctatacanatacagaattgtcaccaaatgaacaaaagaaagaaaagganaccataacctataagtggtcttctccctttgataccaaccaaaatcctgtgcgtcggtgacttgttcgcctcgcgtcaaacaaaaacagaanaagaaataagccaacanaaaaaatcatcaaaagctcaaaacacac

SEQ ID NO: 53185 - DNA, 506 bp, Glycine max
  unsure (1)..(506): unsure at all n locations
gganccaagggatgacccctgaaaacgananttgaaccttganccagnnnnncnnnnnnnttgatccctgaatccggaccaagaaccagctgctaaccacatcttgtctactaagcatttttgctctaacanatcaataagattggggggaagaatatgcactgactaaatatgtgatcgtcttatagacanatatatcacttaacacttttagtcttttctttcaggtatacaaggtgtgttgagagcctagtaactatacaagaattttaaaaaaactttataagaaagaatgaaagaataaggtcacacagatgattcgtgtattgtgtcttcaaagcttcttttatatatagccttcatctccaagtacctgttggtgcatttaatgctagcattaaatgcacatctgttcgcaaccggcaagtgtaccggatcgcacaagtagtataaaactgtaagaaccgagtatcgaattctcgaggaacttgtgttatctagaaagc

SEQ ID NO: 53186 - DNA, 479 bp, Glycine max
  unsure (1)..(479): unsure at all n locations
ctctcccttttcttaatggtttagtgaaggtttttgtcacctttcttattcgaatcacttgaatagngaaaaaattgttccctgaagaaaatcaacccaagcgttttcgtgggtgaattcgcgaagattttcacccgtcttcgacgttcttcgttcgttcttcgtncgtcttcagtcttcaaccgggtaagttcccgaaatcgaacttttcaattcattctatgtacccttagtggtcctcatttgttttcacgtgcttttattttcgtttcatttactntccgcacccccttttgacgtgctntagtcatttacttaagtcatgttctcgccttatcnaaaaataaatanattccactgatcattgagttgtatatccgttatttctgtaaaataaatccaccgttcgncatgccgtaccacgtnggaaccaaagaggtaaataatattaatataaaaattctttagtaaataatcaa

SEQ ID NO: 53187 - DNA, 462 bp, Glycine max
  unsure (1)..(462): unsure at all n locations
cgcagcttaagaaagccctggagattgagcacaagttggtttaagtgnnaatatcaaggcttggaatgattanaactcaccacaactattccctctcttgcacccacaactcaccaccccattcctatcagtcaaagtttactcacctaaaccctaaacactntanaaaccaacttataacacatgcaacatggtttaagcataaacacacacacacacacacaaagaccacanaccataaccttataaataattaattaagtacatacactctaaataaattcaattactcttgcgatataataaagacacctaatcaagcattataataatcatagtggtacatattgccgaaccacgttaatctttgggtctcgctctactgagtatagctttgatgtggtttctgtggttttctagatcttgatcttgcgcagattaagagtagcagaatttataact

SEQ ID NO: 53188 - DNA, 394 bp, Glycine max
  unsure (1)..(394): unsure at all n locations
ttccgttgttgggaataaaaacactcataacccagacacttgtatgcttgagagaaacactanccctgtgatgaatgatgcatggtaaacctaccatgctgatggtcacacttgcattacgagatcatgacaagtgtaagcttgagaagtagttattaaaaggtttgaaatgatacgcggntatctcatggatngtaattggtatatttagaacttgtcataatttttcttttgcttgaggacaagctaatattncaatttaggggagtntgataactgcaaaatttaggtttaattgatagtcaaattagacaagaatgggtaaanttcctctactttactggttgtttttaagagaataacaaggattntaatatcattttagttttgatta

SEQ ID NO: 53189 - DNA, 330 bp, Glycine max
  unsure (1)..(330): unsure at all n locations
ctactaaacagaaaaatggagagaccccacatcctaattaaaaagagattattttctaaaaatcagcatcatttgactctatgatcactcttgcatttaggtcataaaacctatacgctctgctattaatagcataaccaatgaacacacattcataggctctacttgcaagtttaaccctcttaagatctgggatccttacataggccaaacatccccaagttctcaaataagaacaaatttggtggcttttctttaatatctcatagggagatgtctntctttnttgattgtggattctatttagcacataacaaacagttaacaaaa

SEQ ID NO: 53190 - DNA, 411 bp, Glycine max
  unsure (1)..(411): unsure at all n locations
caaccatggttcctggattcctggccgttaccatggcttctaataaataattccctcctaataatttcccccttcctggccatgggttccggaaattaaggctaataataaaccatatatggccttttattaaccaaaataatgccaaaataatggagaacctattgatggcaaggcctatgccaattgatacttttagtgtcattcactttcaatgaagtctcttatttaaccctctctatttttttgactttaaatttccttgtttgaccttcaatatatngacactgaatactggtgtatcatgcaagtagctgatatatattatatgtcaagtaccttaactttggtgccagacttgatgtcgatctctactgngactactatccantgttatntcatgagtctggt

SEQ ID NO: 53191 - DNA, 489 bp, Glycine max
  unsure (1)..(489): unsure at all n locations
ggggnnnnnnnttagataccatgattaccgacccaatatcccatcgaggaccggcaaccacgggttcctctaacaacaacggttatttctcaccggcaaccgataggatcttatataaatnttacaaacccaggaccattaaaaccttaaaaggccaggtaaataaataatggggacctcttggtaaccagtggaatagtggaaaattcccaaaattttgagaaaattaaatcattttttggtgtccaaaattttccgtttgggtttaaatctttatttggtatatggaaatcaatttttgacctgaagttaatcaaattttcctttaacattatatttgagnatatatgccgagtgtgaattaacgcctcataaatctgggatgggcttacttgccacactctaggatgataaataagagcgatcatatttgacactgaaaaatatattttcacatctaataagataaataaaaaacaatgtatattt

SEQ ID NO: 53192 - DNA, 516 bp, Glycine max
  unsure (1)..(516): unsure at all n locations
cttatataaacacttggactgttggtatactcttgtatgcttaattattttcgccagcactaattacaccatccatgcattatgttatattatatacttaattacttaatatttaataaagaaaaataagccaagcatccccaatccaaacataagctaacctatttctaccaaaaatctccattcgtttctctaaaaccccttttcaagagctttccaagaattattatctgtgattatnttgagttcaaaanaatgagtaaaacactacattggtccttaattagcattatntaattattagaatattttgtattatttatgaaaactaatattctatcattagaagtatnttattcattatttntttctctctaatcatatcaacgaatggaaaaaanaataggggcttaagggtgtggcagaattctcacaccaacacaagtctcattatangaaaacaaataanacacataatttaagaataactgcanatattactgctttagcattact

SEQ ID NO: 53193 - DNA, 436 bp, Glycine max
  unsure (1)..(436): unsure at all n locations
gttctttctgtatctttcccctatcccccanaagttttctcagataaactgtaagtatgaatctcactatgtctggctaattcttgtgaaggcaccctcaaggggccttagttatcttcatttggaaaatgcgaatgtgatttagaacccaactgctngtanatagnattnttttttcttttctttcgcttgttttcgaanacctgngattggtaagcctgcaaaggtgtgcccttgataactgtttttgaaaaactatgaaagtcctttntggttaggctggtgcttggaggaaaataagatctacataagacccaaaagtaagtgtgggcagtttgcgatcttcagtactcagcttaatatccaaaaaactgataaggaccgttgttgtaattttttaanaaaaaaagagtacaggttcatcatatttatattt

SEQ ID NO: 53194 - DNA, 328 bp, Glycine max
caaaatgtgtccaaaatttggcccgttggtcaaataatcacatggaaataaaggagcctcctcttcaaaaagacaaagggtcataatgtggtctaatgtaatttctccccgtggacgccctccctaagcacaaaagctactgctattagatagtcacccatcccatgaatgatgagaggaattcacgagttcaactgcaagcttgtaacaaatcctggacaaaataactaattcataacgctatggcgggcgtgtttatgagggaaacttctgatttcatacatgatagccttactcaaaccacacaacttaattattactatatgga

SEQ ID NO: 53195 - DNA, 185 bp, Glycine max
ggggaataattcagatctatttaatagaattccaaacttttgagggaccatgccctcgaaatccccggaaaataaccaaatacttaatctctaagcacagtgaagatagtatccagaagttcacataacaagcaaaccctgtttattgttttaactaactaaaaaaatcattgcctaacggtaac

SEQ ID NO: 53196 - DNA, 454 bp, Glycine max
  unsure (1)..(454): unsure at all n locations
agctngctaagtgagattcagcatatatattgcattctntagtgtgaaaacatgnattcacgcctctctctctctcnaaacaccgcccanacaaccctagaaactcctcctccaccacgagctngtcgtgcttgccgtcgaaccaccgcatgaagaggaatattttaatcagagtggaatcctcacaatccaccttaaggatntggtagagaaacaagctctcaatcatttctttcatagtttgtctaaggtaatctttgacttatatgcctttctccaagttgtttgagcatctcttagtgtctcttgtgttntgggtaccgtaataggatggttttacacttcctttgataaccttgaaatgagatgtgtaaattattttttataaatgatgtggttcataaccttgttgaacccatcacattgtgtggcagaattcataatatattttttg

SEQ ID NO: 53197 - DNA, 243 bp, Glycine max
  unsure (1)..(243): unsure at all n locations
tacaccttttgtttggttctctatttggttcttaaccctctcatgcatcnttctttacaaatctaacctggattccccttctttatgtataaaaagaagtgtccagtgggaggggaatgaggtctaacggtgttaggggattgaacccatagacaacctcaaaaggggactgcttggtggttctatgaacccccctgttgtaggcaaattctacatgaggaagatactcatcccaagacttat

SEQ ID NO: 53198 - DNA, 334 bp, Glycine max
cttgctgctaccttttacaatccatgaaaagcaaagtctatgtgatcgatagaatattgtaacggggctgcaggcatagcaatcaaagagaacatgctaataataattgcttataactcattgaataagggctgaccttaaaccggctacctatacttgggtatcttctaccccacaattcttttcccacaattctaaaattacttatcttttctttctttttcgtcttcttttcttttttgatacataaattaggtatttatacttatattttacagatggcatactaatgtaacgctacatacggaagacagttgttctcgagctaatttta

SEQ ID NO: 53199 - DNA, 369 bp, Glycine max
  unsure (1)..(369): unsure at all n locations
gaagaaagagagagcaaggggngataaagatgggtatggtaaatacaaaaatcattggattgaaattgtaagttttccttatatagttgacataattataattntattttttactttagcctacacgtatgggttttgctataatttactatgtttattgaaaataatgtctattgtatcttgcttttaatctatcgattangttgggcaatgtttattggaaatgatacttatcatatcttactcttcttagatctatctattgaattangctaaaagatgtttattgtgattaaggtttctatttcatgaacatgcacaggcatacaatacattcaatatgttattctagccattgntttcaaactc

SEQ ID NO: 53200 - DNA, 328 bp, Glycine max
  unsure (1)..(328): unsure at all n locations
acagagnggtacctggagatatgtcgcgggggtcaagagacctggggacgtcatgtgtggtgctattgcccaaaaccaagcttgaccaatccccgacccaacccggcatagtcggtcagtgagaacctgtgatgtacctaaacaggcgagctcctggcagtcaacagataaaaggaaaacaagaccacaaagcaaggaggcttgtggtggctggccagctgtgaattttgtgtaatatgtggatggtggcctctggtaatcgattaccaagggtgggtaatcgattacaacgcttataattgaagacatgaggctaagatggtctctg

SEQ ID NO: 53201 - DNA, 385 bp, Glycine max
  unsure (1)..(385): unsure at all n locations
tatgcacatatttttttactatcgttcacttgcacaagttatcctattaactaagaaaaatgcacccatatacaatcaaggtagcttcattacctagattatttacatgtacttccaaggtgtagttgttatttacatcacacacgncctccttggctaaattacatacatgcatactcaaagcatttcggggtaccaaaaattgcacatgcgctcatcttggtatttctaatacctatacatatacaaacttcatgatgaatcttgactacctacgcaataaggtgctacatttcatgcccctttttttttttttcaagtttttgctacctaaagccacatgcaaattcaagcatattttcctttgctgactaaaattgtattc

SEQ ID NO: 53202 - DNA, 493 bp, Glycine max
  unsure (1)..(493): unsure at all n locations
acgctattctntatctagagtagntgagcactacaacttactactgacatatattcgactttagtagtggacaatgtangtgagccttgcatcttgcatattcatgttactaagttagcaccgataaagtaatagcttccactagtgctttttctttcaactntatcaccaacatagtcaacatcataatagcttggtagtctgaaactttctcttcttttgaacataagaccaagattagaagttccaattaaatatctacaaatatgtttaattttagttaggtgaacttccctctgttctttttgaaatcttgcacatagataaacattgaacataatatcagaaatggatgcagtgagatagaccagtgagttgcatccactttttttgatccttgtccaatccaaggtatgtcatggtgtgcattggagtcttcatttcttttcatcgcccatgttgaatntcttcagcaattctttcacatacttag

SEQ ID NO: 53203 - DNA, 334 bp, Glycine max
  unsure (1)..(334): unsure at all n locations
aacatgttgatgtgagatgtttggttttctaccattgaacaattcatatggagttttcttcaagataggtctgattacagccctattcatgatataacatgcagtattaacggcttcagcccaaaaatattttggaagaggggtatcattcaataaggttctagcaatttcttccaaagacctatttttcctttcaacaactccattttgttgaggggttctaggtgcagaaaaattatgttcaatgccattcttttcacaaaataaatcanattctttattntcaaattcacccccatgatcactcctaatagatataatcttgagacttttc

SEQ ID NO: 53204 - DNA, 313 bp, Glycine max
  unsure (1)..(313): unsure at all n locations
gtcattcctgtctaggatttgacgctgtattgaccacctctcgaaatgatcatgtccctgtctgtcgattcataaggtacaaaatgcatgtgcatgcgtatgcatgggcagtttcatacgcaataattctttagcaaaaacccattgggttgcagtntaaataagcacttatagcatccctataggtcgagcgaaaaggctnggatcatttaaaaagaatatgcatncttaaaggcacanaaccagggttgaaacaacgaatcatcaatctcgcgctctttanatgatcgcgatgacaaattacagaggacag

SEQ ID NO: 53205 - DNA, 239 bp, Glycine max
  unsure (1)..(239): unsure at all n locations
acatctctcaatttcatgtaaaaaaagttaatggaccagattgggtaatgctcaccactacttactaatatattcacacaaaanaaaccactacttatntaatattgaaaatgtttaactatacattttcattcaatattgttacttttaggtacactaattagattcagtaaaaaaaaaaatacactaattagaaatatttattatcattgatttatacattaattatcatccatata

SEQ ID NO: 53206 - DNA, 384 bp, Glycine max
aataatggtcgatcggaatgtccatttgtttttgtactctagctgattgcaaatgtatttcgaccggaagtatagcatcgtgcccataagtcagtcgaaatggggtagtattagttgattccttaggagaatatctacatgcccatagaacttgatctaacgttttattccaatttcttggcttttgggcaatgtgttttttaatcaagttgattacaatcttattggctgcttcgacttgaccatttgcttgcgcataatatggtgtcgaggttaataatcgaaagccagttttttgggcaaattttttcatttttcgtccagtaaaaactgaaccttgatcagtggtaatttgtttctggaataccaaacctataaataata

SEQ ID NO: 53207 - DNA, 341 bp, Glycine max
  unsure (1)..(341): unsure at all n locations
cccattttactaataccccccttttatttttgtactctttttctgtacgtacaaacttacaactcgaacgatcttattttttttctgcaggttacgaacccttacgacttatgtanttactcttttttagctttcaaagaagttacagaaacttacggattgcgcanaaacacctctttttgacttccgccacattacggaagttcacggatcgcacaagcctgcttccttttgatttctgagacatctcgaaacttcatttattgcatgtcatcaagtaataatccccggacgaaattanggtatgacactntcacaaacacatcntttcttattcaact

SEQ ID NO: 53208 - DNA, 417 bp, Glycine max
aacgcctctagctcaacacccgttctttctaatgcacccacccagagtgattctccccaagttccaactccgaacgcaactcgaccggccggtaattccaacacgacaaggaacttccctccgaggccgttgccggaattcaccccgctcccaatgacgtacgaagatcttctaccatccctcatcgccaatcatttggccgtggtaactcccggaagggtcctcgaaccccctttcccgaagtggtatgaccctaatgcaacttgcaagtaccatgggggtgccccggggcattccatcgaaaaatgcttggcccttaaatacaaggtccaacatctaatggatgccggatggctgactttccaagaggatcggcccaatgtgaggaccaacccgctcgccaatcatggaggggga

SEQ ID NO: 53209 - DNA, 393 bp, Glycine max
  unsure (1)..(393): unsure at all n locations
atgtgctcgcgactggnctgtgtctttcctccgcaacttgagttcactatcgctaccccatagagctccgcgaaatttgttcctgccatactctttcttgcgagcccttctggtctcttgttcaaaggctcttgcggtaatttcattctttttccgtaacccggcacactccttccgaacgtgtgtagcggccaacatgatcttctccttggcaagttatgccttttctaactcgctttagagagcatggacttcttctgcctcttccggagctttaaaactctcttcgctgacgacttttaacttggcgagccaatctaaacctctatatgaactttcaccattcgggtacccaccaatgatgccatacgaatgcctctaagctcttgatct

SEQ ID NO: 53210 - DNA, 371 bp, Glycine max
  unsure (1)..(371): unsure at all n locations
acattatccctatagaatgttaactttgggttgttgagttcgntgnttcttatgtttttgacataatcttggctcctggttggtgggttggtgagttggtgagttgctaggttcgtgagttcctgagttggtgtgttctcgagctggtgagtntgttgtttaaaactgttggttttgtttactgcaatgattgttattggtgcaccattttcttgtttgctgagtgccattgttttgttttagggtataagaaaacaagacgtagtttgcattggatttttgctttgaacaatggttttgataaccctaaacactaacctaagactttgttgtctcactcctgtgcacattaagtgattgattcaagaaaa

SEQ ID NO: 53211 - DNA, 395 bp, Glycine max
  unsure (1)..(395): unsure at all n locations
agctnggctctagccatcanaaccatctcattcttaacttcatccatcttggaacaaacattttggtcaagtgtgtgctnttttcatcaaacaaatcanatgtgatcttcttatcatctattcccatttgcagaatacctttccccatatccaccacacaattggaggttaacatgaagggacggcccaaaatcagcgggatttcaacatcctcttcaatgtccatgatcatgaagtctgcaggaaaggtaaattggcgcaccttaaccaaaacatcttctaccacgccataaggccttgtaatagatcgatctgccagctgcaatgtcattcttgttggcagaaatttcagctctctaatccttctgcacatggagagagacatcanatttatg

SEQ ID NO: 53212 - DNA, 270 bp, Glycine max
  unsure (1)..(270): unsure at all n locations
tcactatgcacagttggtaattctgatgctgtgaccaagtcaaattaattttgaaactatattttgatcaactgtaagcattcagaatcttttgctgtcaaattacccatngccttccctactgtattgtgtggcattatgttgagtcaacatccaaatattttaaacaacattgactctgtaatgaagagagaatctcctctatccctgcattacaaactgtttgaggggacacatgtcccagacattgtctcgacatcagggaaagct

SEQ ID NO: 53213 - DNA, 344 bp, Glycine max
  unsure (1)..(344): unsure at all n locations
caagaaattcaagagatcagagagaaagactnctaatcaaagaataatgtatgaagaagggtntnntttttataaaactcggagtagcacattggatttcttctcaacaacatggtntaccaacagagtntttacctctctgggtaatcgattaccacgattgttgtaatcgattaccaatagcaaaatggattngagaaagttttcaaatgaatttacaacattccaattgatttacaaaaaagctgtaatcgattacaattgtttggtaatcgattaccagtgcctttgaacgttgaaattcaaattcaaatgtgaagaggcacatcctttcacataaaagc

SEQ ID NO: 53214 - DNA, 549 bp, Glycine max
  unsure (1)..(549): unsure at all n locations
aggggcgttcttgnnnncctgatacccatagcatnnaccngacacannactgatgcccatagcatnngcngcgacactatagaanactcacgcgngactanngggttatattatngatcacgancngagactaagttgatctgattngcgcaacaaaggacgagaggaacgggcgagttcnacatctgcacttatgcacaattctgctgtgccaataggtgcagcagaattttggctctgtgcagaaaaatgcttgtgtgtggtgggctgtggaaagagtantacacaatgagttctggacgtttgccagtagatcccaacggtcacaatgtatgcttatgtactagagacttccagtcaaattttcgagtcgatccaacggttaatgaaccgcaacgaacgaatagttactgcggtctttatgtgagataagctgtgattaggttggcgtattgggcagagatttctgcctttgccctgttttgcttggctgggatagcatgtgctgttcgaatgttgtctactgtatgctggcgaaccttggaggat

SEQ ID NO: 53215 - DNA, 476 bp, Glycine max
  unsure (1)..(476): unsure at all n locations
agcttcatttacttatagtatatagatatttatgatatattttttataaaataaaaatgtgcattntatcaaatcaacggatgttgtgaaattaaaattttgatctaacaccaataaatgttaactatgttaggtatttacttaatcaaatcagtccatgttgtgaaattaaaatttctatctaatgccaataaatgttaagtatactagacatttattaaatcaaatcaacggctgtgctcaaattagaattttaatccaacgattcacaaatgtttaagtatgctagacatttattgaatcaaatgagtggttattgtcaaattaaaattttgagaattttgatccaacggatcattaaagttaaagggtgcttgtatatatcgtatatagacaaataagatgggtaaaacaagtatataattaacaaaaataaaatgcatcatatttattatcanatagaaaacacaattcga

SEQ ID NO: 53216 - DNA, 383 bp, Glycine max
  unsure (1)..(383): unsure at all n locations
tctggtgggacatcttgacttgctntccaatctgacattttccacagattctgccttcttctattntcagattatgaatgcctctaacagcacctttgtcaatgattttcttcatacctcttaggtgcagatgtccaaatctttgatgccatattttgacttcatcttctttggagaatagacatgtggaggagtaactggtttcttgaggtgtccataggtaacagttgtcctttgatctgctgcccttcattagaacttcactcttctcatttgtcaccaagcattctgactttgtgaagtttacattgaatccttcatcacacagctgactgatgctgatcaagtttgcagtcagtcccttcaccagcagtactttgttc

SEQ ID NO: 53217 - DNA, 296 bp, Glycine max
acacttgttgtaactttgatgaatgagagtcttgtgagacacaactcaaaagtccacttctcttccttttttctttcttcaatttcgagctcccacctctctctttctctcactctttcttttcctccattgaagcatcctctccaagcttcttatccaaggctcatcttggaggtgaagctccctcttccatggcttattccctagtggatggcgcctcctctcacctcttctcctttgtcttccgctgcatctccatgggggaaaatcaccattacaggacctcattgaagctc

SEQ ID NO: 53218 - DNA, 272 bp, Glycine max
  unsure (1)..(272): unsure at all n locations
ttcaaatgtntgtgcatgacaaggacaangggatttgagatgttgcatgatggctttgatgcttaaagattcatcttccattatttctccatcaattgcttcttccnccatggatgtgaatggctgcgttttgaatagcccgtctcctttgttgttaatataaaataatgaataagaataaaaactacgtcattatatatctcactatatatangaacttttaacccataacagctttacgaaatattttttattcctttttctctaacgct

SEQ ID NO: 53219 - DNA, 305 bp, Glycine max
  unsure (1)..(305): unsure at all n locations
atatcgacaaggggatcatcggccaactattnngaaggattgcattaattatgcaaaatcatgtgaagagtgccaaaaacatggtaccatacaacaagttctaacaagtgagttacattcgataaaaaaaccttggccttttcgaggatggacattaaatttgataggtcaaattcatccattttcctcgaaaggacataggtagatcttagttgttgttgattattttaccaagtgggtagaagcaattcccttaaaaaatgttgatcaaggggatataactaatttcatagaacaaaatatta

SEQ ID NO: 53220 - DNA, 515 bp, Glycine max
  unsure (1)..(515): unsure at all n locations
ttaagtcacctgtgctgcagcttaatgcactattcatggagttgtctataactatttcagactgatcaacacttgcacagtggccaaagatgcatgggagatccttgaaatcactcatgaaggaacctncaaagtgaagatttccagattgcaactcttggctacaaaattcgaaaatctgaagatgaaggaggaagagagtattcatgacttccacatgaacattcttgaaattgccaatgcttgcactgccttgggagagaggataacagatganaagctggtgagaaagatcctcagatccttgcctaagagatttgacatganagtcactgcaatagaggaggcccacgacatttgcaacatgagagtggatgaactcattggttcccttcannaccttgagctangactctcggatggggctgaaaagaagagcaagaacttggcattcatgtccaatgatgaaggagaagaagatgagtattgacctgatactgatgaaagtctgacaa

SEQ ID NO: 53221 - DNA, 325 bp, Glycine max
  unsure (1)..(325): unsure at all n locations
caatgttatccactctgtcaaactccatccgacctatgggtttatatgggagagggaggaaatcgatgctgttccctctgaagatggagtcattccaccaactgggtggaatatgtatgaagattaatatgactgaggccactgcatgggccagaattacggcttatatggccgaaaatagactaaatacggcctttgaggctgagtctcaacaaaatatggcagtcgaagccaaaatcgaagatcatganaacaaagaaacaaaggatcgaagactggattgcatttatgatgatgagccgctgggttntgagaaaaatcccat

SEQ ID NO: 53222 - DNA, 209 bp, Glycine max
  unsure (1)..(209): unsure at all n locations
gagtantacaaaatgagttctggatgtntgctagtagatcccaacggtcaaaacgtatacttatgtactagagaaagaggttactgtggtctttaagtgagaaaaagcggtgattntggtttgagtcttgggcagagtattctgcctttgccctgttatgcttggtttgatagcttgtgacgctttggatgttgaattaccttgatgtt

SEQ ID NO: 53223 - DNA, 329 bp, Glycine max
  unsure (1)..(329): unsure at all n locations
gatggttaagagcttggataaaacaatngtgatcatagactccaatgcagccagagattattagagtcaccatgatagagctccgattcaaagaaaaggtataatggagctagatactcagaatgcaatgttgactcgaaacaaactctagactcagcaaatagaggccttaaccaagcagataggctaccttacttaacaatatcaataaggtggatcacaacaaacacaccaagcccatcaagttcaacaatttttgagatgtgacttctatggtggtgaccatcagaatgaccactattcatcatctggtgattgcaatagaaaga

SEQ ID NO: 53224 - DNA, 304 bp, Glycine max
ccaatgcaatatatataagataaaatccattcctacaattatgcaatttccatggtcctcatgtccaatcctaagcatgttgagatctcatattgactctagatatgaccaaaatagagattataaaggcttaggcaatcctcacctcatgaacttgttcttggggttgagttagggccagttctaattcaaaatgcttaatgcttagttggtgtctggttagactatatctgaactttcacaaagttacatgatattatcatttcaaaattgtcttttcccggcctacttgaatttttgaatg

SEQ ID NO: 53225 - DNA, 459 bp, Glycine max
  unsure (1)..(459): unsure at all n locations
caccggtcaaaattgcaacaagttctacaatttaatnagtataacaccataacaccaaaaatagaaaagtcaagctcaacgcatatctcaactgaaaattacaagcaaaacaataagttaaacacacaatcacaacaacagtattgacaaccagtcaaccacaccttatctaggagaacttgataaaacattagatgaagttagcagtgaagtaaaattgtcattggactctagcaaaaaccacatttcagtaaactcactttgataaaggtcatttttaatgatttcttctaagtttttatttgatcataccgtaccattttagttgaactatcttccatctggattcatttttctcactagaaagtctgtcttgaccttctcacgtgatcaaaaccaagctggcttcggcaaatcatgccatgttcatgcatgcncaaaatattcatacctcatcta

SEQ ID NO: 53226 - DNA, 370 bp, Glycine max
  unsure (1)..(370): unsure at all n locations
tagtttctactttggggttatgttttgatagtttcatggattaatgatttgagcttcttccaaatggtcttgttgttgttttcgcttaatggttaagctttgatgcttgctttggactcttggaagaagattgaaaaaattgaagttggtcaaagatttttataagctacagcttttgtcaatgtatttcagcatgtttagatatatttttcagactttattttcattttcttttatgcaaatgtattatcttctccaagatggaagtgttttccagagctcgcggnggtgttagagatacaaattatttattagtctatttagttacaagttagtttagttaattacaaattagttacaagtttaatta

SEQ ID NO: 53227 - DNA, 201 bp, Glycine max
agtggcgtattggtattgttgggcatatgacaaatttgagtgcaagtgaacgaataggcgtaataatgattcttggttttgctttttttacacatcgacaccacccccaattcccaaacattgtcacctctttcatcaagtttggatttttaaatccatctgaactgtgaataccaactactatctgcacttgtttgttct

SEQ ID NO: 53228 - DNA, 323 bp, Glycine max
  unsure (1)..(323): unsure at all n locations
aaaagccaaaaaaggaagnacattccagaatgtaactgtacattctggattggtcatcccgaaggataaaaagggagtacacgaagcaacagctcactttgttgaagctgggtcgtttctgctaagactggtactatatagatgtatcccagtacagcattttatttgagtctgtactatatgaaagtagattggttttgcatatattcttaacaaattacacttaattatggaacggaggaatcacattcttaaaattaattatatacatatcctatttataacttcaagcattttgcttggaagagggtattcttatattt

SEQ ID NO: 53229 - DNA, 489 bp, Glycine max
  unsure (1)..(489): unsure at all n locations
ttaagtcaccgcggctgcagctacataatgtgttctgtgngcttaagattataggaagcagcttcttctagttgagttgtcaacgggttcaaaacaatatctgtgatccttcaactctctattgctcattancatgtactgatgttagggttcatttgaatttgtctaatctcagctttgaagacacaaactccaacacttaanaataaatattgaattattgattnttccctaactgggttttttcaagattaanatanatgtgtaaaaaagatgttgacagttttctgcgtcgtcattctaaaaatatgctccaatatcatggtggtggttggagaattgccaaaatactctcttanaatttgaagtatcgntatcaatttatttgtgaaacacatntgttgtagtctgcaaccgccagagactntagttntggtattctgcagccgcattttagtggttacatcgcagaaatgcttgcattctgtt

SEQ ID NO: 53230 - DNA, 401 bp, Glycine max
  unsure (1)..(401): unsure at all n locations
tgaaacaaaaacatcaattcatatgaattttaaaaaaaatgtaaaaccatcaatcaatttaaaatgaacagaacactaattttcttggttgcatatatctcatatntattcttctttggttaaatgaagagataataagagaganagttgaaatgaaattaaagagagagagttttaaaattgtttcttaaaactttttttttctttttatgctatttttaatccagtgaaagaaaataatcattatttatgtttttttctttgataaaatgtagcgttaatgtttgatcttactttaaacaaaatggtgtttttttaggttacccaaattgtcatatactaaagatatttgagagaaataaaaaanacacaacacatgattntctaacactattaaatga

SEQ ID NO: 53231 - DNA, 388 bp, Glycine max
  unsure (1)..(388): unsure at all n locations
agctagccatctaacaacatcaaaatcatcgtgagcgttttcgtgtgggagctttgcccacaggtatatagcaccttctcctcctttcacagaaccctctccagaggagagagggcttctaaaacaatttctctgttcttttcaagagtttttacctgatctacaacccattgaggccccacttccaatgaatacagggcaagatactgtgataatattgaagcacagatgggaatgttgtcttgaactttgagaagttgttcagcaaagtcttttacttcagagggatatgctatctgcaataatcaggtattaggacagactangcagtgctcatcttttaacactagttacgaagtttgaactgnaaatataactactatgttgc

SEQ ID NO: 53232 - DNA, 519 bp, Glycine max
  unsure (1)..(519): unsure at all n locations
agggtctcggggnnncctgatnaccattgatnnaccgacncaagtgataccctgaattacgcgacacatagatactcagcgtgcctcacgaaatcaaatacacgtagataagttccagaagcaaacancacacagcgagnttcgacaaactaaacccaggaacgaaacaacaatnngcggcaaccaaaaccaataacatngaatcagaacaaaaaacaattagtaccttgatttcgagtctgagaggctgcaaatgcaagtaacaagagagaaaataanagcaaacaaaaaaatacgaatcagaacaaggtttcacagtggatcacgttgaaattgaaatagcaagagctagataagcgaattgcgaggctcgcatttcaagtaagaggcagcaaagcattcgaaaatgaaagagcgaatggcatagtgggaaagcatgaaatcgaagcgaattcngccagatctaanggtgtaagaatgcanaagcgttgccgaagacagatcaagaggaactcacct

SEQ ID NO: 53233 - DNA, 499 bp, Glycine max
  unsure (1)..(499): unsure at all n locations
gacccggatcttaagtcacctgcaggctgcagctgatcanactatttctaatcattctatccactcaaatcatacaattgctcattcaaatcattctcaaacactcatttcatgcaaaacaatccactgcatatcattttcaatcaattcactattcaaacaagctnttggtacaagcaaacaactcanagtgctaaaatttaaaacaactganatataaaaattgaaattaaaatgactgaacataaatcataaaataactgaaaataaacttaaatgttcaagatgcataaatttaaatgtcctgctcctatggttgctcctgtgcatgctcattaaggcccaacacctgagcaactggtgaatcctgagagataagttgttctaactcagatgctagtgcagatggtatggcatcattaggtatgggtgttggggatggctctgggatcntgattgtaaaagtctcctcctcctgagccatatgcataactacatc

SEQ ID NO: 53234 - DNA, 444 bp, Glycine max
  unsure (1)..(444): unsure at all n locations
tgcaggatgatctttatcctgcanaaatgtgcacaaaattatctatgactatgcaaatcactttctacgatgatagagtagtttgggatgcttgtttttggtgggcagaaaatggagaaagcatgaatattcaatatgccttcctaagttttaccaaaaagttttagttagaggaaattcgtgaagaaactaaactgaaattatgatcatgtcatgtcatacgatttatttttttctagaatgatgatggaaagatcagaaaacatctcatgcaagtaccaatctttttttttcttgaatccagttatatcatagaattgagcttatagactgtagcatatactatacaagtctacagttacaaaaagccagaanattattcatctttgaataagatatttctttgcacaatgtttaagtgtcaaataagtattttggataaag

SEQ ID NO: 53235 - DNA, 445 bp, Glycine max
  unsure (1)..(445): unsure at all n locations
ttaagcaccgcggctgcagcttcgaaggatttatagaccaanctttattcatagcatggtcttaaaggaggagntagctggttgcttaagatccaagaggaggttggcccatataattactgtcaacacatgatagatttaatggcccatattaatagaaaccgttaggttctgttgtaacacttttgtaaaatcttggctagatgaaagcttttgttccttttttataaaaagagaagttctgaaactcatcacattgtctaanaaggccttgaggtggatctaagtgctctgatcattcattancatattcatgaattggtggcatgctcaccactgtttgtttctttaaggaactcaccataactaaaaaagcgcaaaggcacccctataacacccgatccaaaagtaagatggataacaaagagggagtgcaagaacagat

SEQ ID NO: 53236 - DNA, 409 bp, Glycine max
  unsure (1)..(409): unsure at all n locations
gtgtgtgaacagtttactgattgagnatgatatgcagtgtttttgtttgtatganatgagtgcttgcagatgatttgaatgagcaactctatgatttgagtggattggaatgattagataattgttctgatcaagcttgcagccattagaagagaatgagcatgtgattggaagtatgactganaatgttagtcaggttgtcaaattgattgtgaaggaatgcattgatcgtatcctggtgagtgtgtaatctttaaattttgagagaaacaactatcatttagtattgatttttgcatgaatctctgaagtatggactgaatgcatgacattaaggatgatgaaggccatgtttgattgtgatagccacttacccaaaaagctgaccacgtgcttaaatgaattatcc

SEQ ID NO: 53237 - DNA, 460 bp, Glycine max
  unsure (1)..(460): unsure at all n locations
ttgcttactgggcagtgaagacttgcaacttctctatgtgatcaagtggtgaggaaagaaagttgcaactgagtgagttagatgaaatccgcctagaagcctacgagaatgccaagttctacaaagaanagaccaagaagttccatgatagcatgatagttaagaaggacttcatgggttgggcaaaagtgttattgtataattctaggcttggactcaagagtggtaagttgaggtctaagtggattgatccttttgttgttactaatgtttttccttatggtacagntgagatcaaaagcgactccacaaacaagagcttcaggtcaacggacatcgacttaagccattcctcacgaacccttctttagtggacgtagtggtggaagagactgccttannatgaaaaccatgatatcaccatatccttaaggaatnntggagcttggaattgtttggg

SEQ ID NO: 53238 - DNA, 256 bp, Glycine max
  unsure (1)..(256): unsure at all n locations
gatggcctgatgaggttcattgagaggtgaaagtgagtttanggtgnttcttggatccctaatgttgtanggtctatgtacacctctcatgtgcctatttatagctctaagattagtgtggctgcttatttcaacaagaggcacactgagaggaatcagaagacgtcttatagtattactgttcaaggggtggtggatcatagaggggtgttcactgatgtgtgcattgnngtggcctgttcaatgcctgatgatc

SEQ ID NO: 53239 - DNA, 386 bp, Glycine max
  unsure (1)..(386): unsure at all n locations
tctgcttgcctcatattagtccatganagactatgcggccgaaagaactanttccgccccggagtacgacagtcaccgctttatgagcgttgtacaccagcagcgtttcgaagccatcataggatggtcgtttctccgagagcgacgcgttcagctcanggaggacgagtatactgatttccaggaggaaatatggcgccggcggtgggcaccactggttactcccatggccaagtntgatccagaaatagtccttgagttttacgccaatgcttggccaacagaggaaggcgtgcgtgacatgagatcctgtgttaggggtcagtggatcccgttcgatgccgacgctatcagccagctcctgtgatatncgatggtattggaag

SEQ ID NO: 53240 - DNA, 295 bp, Glycine max
  unsure (1)..(295): unsure at all n locations
tataataagaaataagaaaatattgttntagtgaaaagtatttatttattaaaataatcacgtntatgttttttcaatgtataatgacgacaatggagattaagtttaagtcctattgcatctaaggtgaccctgatggatttcatattttcaacctatcaaatgataagttattattaaaaagaaatggcttttattgcacttttctatttntatatgctgattttttttaatgaaaaaatttctatttttagacctttaaaatctaagaatggttatcatcatttttcttaaa

SEQ ID NO: 53241 - DNA, 112 bp, Glycine max
agtattggcaccacatcacattaaatggagtttttaaaattaataccatctgagaaatgcgtttgacttaataatgatgttctgataagacaaataacagtgatcacaatgt

SEQ ID NO: 53242 - DNA, 526 bp, Glycine max
  unsure (1)..(526): unsure at all n locations
agggaccgtgnnnttgaaacatgcatnacngaccaagtgacacatcgagggcacangcaacctagcancttgagacctgtactcgtccnngncgacaanccactctantagatgatgacaatgcctgacatcaagatatgcgatatacaagatgatagcacgagcacacaacccggactccccctatcttgcggcatgtatgcctaactctactcaatgataaaaacacagagtgagttctcacccgagatctctcgcaagttctcgaccccgtggggagcggaaaacagaacgaagcgacgcaattaacatccacgctgagccaaaccatcaaccaagatgaatccacacactggcataaccaatccaaaacataggcgagagacacaaaacacttaataatagcgcacgattacgaggactagagcaacagagagccaaacacacggcgacaaaccgcagtacgaataatactcaagcactaataatacggagncacaagacttaagcggagacgatgagggag

SEQ ID NO: 53243 - DNA, 434 bp, Glycine max
  unsure (1)..(434): unsure at all n locations
cagacctcccatctttaatggagtgggttaccactactggaaaacccgcatgcaaatcattatagaggcaatagatntataatattgggaagccatagaacaaggaccttatgttccctctataatagccggaagtgcaacaatagaaaaacctagagcagattggactgaggaagaaagaagattagtacaatataatttaaaggccaaaaatattattacatctgccttaggaatagatgaatactttagggtttcaaattgtaaaagtgctaaggatatgtgggatacaatacaagtaacacatgaaggcacaacagatgttaaaagatctangataaacactctaactcgtgaatatgaaacttttaggatgaatgtaaataaaagtatacaagacatgcaaaagaggttcacacacatagntaatcatc

SEQ ID NO: 53244 - DNA, 403 bp, Glycine max
  unsure (1)..(403): unsure at all n locations
tattataatgaanttctcatgatatccttgtgtgngggtgatgcccganacacttgaataccctttacgatagctccacacttgcagtacatgtcaataattattgtgagaacaacgacattcaactcaaaattcccctttttacataatcatgaacccactccccatgttgaagtgcacctaagtgagcataaacacttaacaaactcatcactgtaaattcactaggctgaacccttcgtctctgcatcttgcggaaaagctccaatgcctccataagccttttattcctaacatatccactaatcatagaattctaagtaactntagttcttgtaggcatgttatcacacaacctcctagattatcaacctccccacacttagcaagccccatgatcata

SEQ ID NO: 53245 - DNA, 448 bp, Glycine max
  unsure (1)..(448): unsure at all n locations
attagaaacgagaatgcttagcattcctcatatattgggagagatatagtaattattataaaagtcgtatcaataataaaaaataatttaattgatttataatactatacaagacatgaaagataatatattgtgcgaaaatatagtaacttctttatgtagaaatagaagatgataccacaatttacaatactcatgctttattttcaatcaaccattgctattgattaaagatttacaataatacggggatgggtgtaaatttattggataattagtattttnttaaaatgtgtaatccgttaataaatatcgtcctcaaatactaaaattcaaaatttagtactctaagatgtagagtgcgatacaattatccacatatgttggtatattgaatagtttggactaaaatgttagtacactatttttttctatcaagatggtaata

SEQ ID NO: 53246 - DNA, 382 bp, Glycine max
  unsure (1)..(382): unsure at all n locations
tacctcaactaataaaacacattttatntttaactctttcttttgcaactcctcaagagctttctgannaaatctgcattcttctagcaaggagatctggatgaataccattcgatgcanannatcaccatgtcagggaaatattaacagtggcatatgaaccatataaaagacttcatattcctaaacatgcacttctagtgacaacagaaatatttgcattcaaaacaaaacacaatttacctagagcaagacatccaaaacatgaaaatatagatgctgagaaagttctctatttgagttataatggctataatgcataaaggctatcattggcatttacaaaaactcacaaacagtgaaagcccattaaaatctatca

SEQ ID NO: 53247 - DNA, 509 bp, Glycine max
  unsure (1)..(509): unsure at all n locations
cctgcatgctgcagctgaccatcccacccacccggcatatttgtcagtgatatcatgtgacgtacctaagcaggcgagctcctggcagtcaacagataaaaggaaaacaagaccacanagcaaggaggcttgtggtggctggccagctgtgaattttgtgtaatatgtggattgtggcctctggtaatcgattaccaagggtgggtaatcgattacaaggcttaaaattgaagacagggggctaagatggtctctggtaatcgattaccaaggggtgtaatcgattaccacgctcgaaaacgaggtcaggaagctagggaagcctctggtaatcgattaccaaggggtgtaatcgattaccacgcttataaagggaaatgggagatggtggaagcctctggtaatcgattaccanctcgtgtaatcgattacacagaggaatgggtcactagtaatcgattaccaggcatgtgtaatcgatacacagtgcatattgcatattatgttct

SEQ ID NO: 53248 - DNA, 458 bp, Glycine max
  unsure (1)..(458): unsure at all n locations
ctagacatgatacatgtcagggctgggtttgtttcaagggtaaaagggatgcccttcattatttccatgacacanatgcaaaaatgatgaatttggaaatttatgcaaaactggtcatgcatgcacctatgcggacactcaagtgtcaaaattttatggtcatgtgatgctagggcttaggatttatttcctctattntaaatcaacccaatgtttccaaaatatgttcttttatcaatttgtgcattcattcgagtccatttcgggcgtccggggaaatttcacagcattcacccttcaggtgtagacacgttttttttctcttcaaaaatcggtcatgatcaatgaatttttttttcgaagaagaagtggaaatcatctcttttcanaagcatgtcggttnttagctagacaacttattntctctntttccacctttttccttacttgccttcttc

SEQ ID NO: 53249 - DNA, 463 bp, Glycine max
  unsure (1)..(463): unsure at all n locations
tagctntactaanactgaaacctctngttctttgtatacaagtttatcaacctaagaaggcatattcggaatcaagttatatatcatgtattagttacatttatcaaattccctaggttaataaaactaaaacatacttacaattntagattcatttttgtccaactcctccagagctctctcaagaaactcacattcatctaacaatgagatctgggaaataataatgagtattttangtcaacctgaataccacccagagctcanaataataacagcagtcaaaccatgaataccacccagaggtcaacctgagaattaataatgagtattatcatntactccacctgctgcttaggttatgtgaataaaataactggtgcagaaataagccatatctgntggacatataaattcataaattcaaaccactgnggttgacatggaaccacacacacacaca

SEQ ID NO: 53250 - DNA, 167 bp, Glycine max
  unsure (1)..(167): unsure at all n locations
tgtaagcattgattngatactgtttccctcatcatgtttctcatgatgtttacaatataatgagcctttgctaccctgcgatgagacacacatagatacacaaacacacacacatagagacaaacacacgcagacacctacgcaaacacacacactcacacacagag

SEQ ID NO: 53251 - DNA, 463 bp, Glycine max
  unsure (1)..(463): unsure at all n locations
atcatcatcgnnccttttgtactccaaatngattcttaaagtactagtggttgcaagaattgcctttgcatggcaatactattcacaatgatatctgccaactaagtagttttacttgtactattgcatgtattttcatgtacaatacaaaccttccactgcccgatgtgcctgcgtgcattcatgactttctaatngatcataacaatacatgtacaagaacaaattgattgattataaaaacaantttgtccatctgattttacattttaaatgaataaaaatgcaataccatttgttttaatcgattatagccctatcataatcgnatacataagntgttntaaacttgtaaagttatgtctcgtatcggtttaatcgattacaatcttatcgtaatcgttacacagttgtttttgagacatgactgatttattaggagtttctgtttaatcaatatcat

SEQ ID NO: 53252 - DNA, 386 bp, Glycine max
  unsure (1)..(386): unsure at all n locations
tcggatccctgtcagatacaatactagaaggaattccatgcaaccttactacttccttgatgtacaactccacgagtttctccattctatacttcatattcactgggataaaatgagcggatntggtgagtcgatctactatgacccacacagcatcatgtccacgactagtcttgggtaaactagatacaaaatccatagatatgctctcccatttccattccggaatctccaatggcttcaattctcccgatggtcgttggtgctcaaccttagccttttgacatgtcaaacatcttgctacatattcaactacatctttcttcatgccatgccaccaaaaacttctcttcaaatcttggtacatcttagtcattcctggatgg

SEQ ID NO: 53253 - DNA, 501 bp, Glycine max
  unsure (1)..(501): unsure at all n locations
ggatccttaagcacctgagctgcagcttgggatacctantagctcggatttccaattcacacggactactatgaaacgtaactagatgggagagtcttttcagctccgttcgtataacttataggttataggttaatgagnttggtttccgagccaatagcctaatccattataataataaggataaatagtcattnttgtcccttaatttgtaatttattgataaatgtgtttctgaaagataaaaatacaaaatttagtccccacaaatgtaaaaagtgcgataaatatattctgtcgttaacttccgtccgtcacccgttaataaagtcacctacgtgacatagaaggacaaatttgtcactcaaatgattgtcaacgttgattgcagcatatggacatanttgcataatnatttttgactnttgttttgacttnctaacatgcgtcctgaagataaaatacaaattaagtcctaaagtataaaagtatgacaaaata

SEQ ID NO: 53254 - DNA, 357 bp, Glycine max
  unsure (1)..(357): unsure at all n locations
aactaacaacttccttctttatagtcttcttcgtatgcctaactaccattgtctagtatataaggtaccaactaccataccatcatatttaactacttgtcacagaattaggaatagaaattntangtgataggagcaggagaaggcatttgccacctaccctacaaagcatcaatggtcctatcttctttacaggactgacgtattcactcaatccaaccgtgaaaaattaggtggcacatcagatacacataaaaaacgtacccaattataacaactacaagagagttgaacaactaataattgttaattntgtttcagcaaaagccgntgaaacaatcatatcacttcatttat

SEQ ID NO: 53255 - DNA, 436 bp, Glycine max
tttctctattggaagcttccaaatgctgttatatttaagcaagagcaatgccagacgatgcagttctgattcaagaagggtaaattctggtctggtcatggcttcattcttcagcaaactggttcaaatcaatgctatactgcccatcatgtaatttggcatctctggtaccgattatcattcattctatatatattcttttgccgattttaaaaaaataatattgttgcctgaattttattagcgctgttttttcttcttcttaggtgcgtgatgttaattagatgcacaatgttcagatatatattttgttctgccgatcaactgcatgctttggtttacgtttaccattcattatatatagagattctttggtcttacgtatacctgcttgactgatagtatattcttcttcgtatgagcaactagtgtaaca

SEQ ID NO: 53256 - DNA, 367 bp, Glycine max
  unsure (1)..(367): unsure at all n locations
tatatcccaattttcgaacatcaatggattcactcataccatgaaaaatggtaagtaactcagactctgattaatgataggacatgtaaaaaattcagaatttgccttcattatggactgtatcaactcgcgttgagttggttggaaaccaattttagcagccaccgacgtaaaaaaaattcttagcggnggttagaaatagtttgaggttaactatatttttgctccaatttttttttttaaatttcacgtttaactagtccctaaacatttttttagtatttttgggtggtctatttttctctaatgaatttagttcttggtatcaaataacatcattaattaattgttaatctaatatttcatg

SEQ ID NO: 53257 - DNA, 450 bp, Glycine max
  unsure (1)..(450): unsure at all n locations
agctttgaaggtgtgtatgctntgnggattaaattaagtgaatatggtcttcacctctccccctttntaaattttacatcagacacactcacccaggcgagctaaatttnttnttttttttttacaaaattgtgttattcattgttatatttcttctanaaatcctataattgcatataagcttaggagaattcaggatataattcaaggaaacaaacaagcataaaacaggaaattaaagagcaaagttagagatactagactgcctcataggagcacttctttaacatctttagccggacgcaggttgatgatcaatcgatcatgggcctagcacctgttcgtacctaccccaaagattgaacaaagaaagtggcatcatgcanatgtgaaacaatactacacgatgcatgcattacctttcacttacccttattgcttatctcaaat

SEQ ID NO: 53258 - DNA, 390 bp, Glycine max
  unsure (1)..(390): unsure at all n locations
tgagatgaggatgtgttgaagggtgaaactnnttgctcttattgttgaccacagagtggtacctggagatatgtctcgggggtcaggagaccttggggacgtcaagtggggtgctattgcccaaaaccaagcttgaccaatcccgacccaacccgggcatagtcggtcagtgagaacctgtgatgtacctaagcaggcgagctcctggcagtcaacagataaaaggaacaaacaccacaaagcaaggaggcttgtggtggctggccagctgtgaattttgtgtgatatgtggattatggcctctggtaatcgattaccaagggtgggtaatcgattacaaggcttaaaaatgaagacaggaggctgagatggtctctggtaatcgattac

SEQ ID NO: 53259 - DNA, 429 bp, Glycine max
  unsure (1)..(429): unsure at all n locations
ttactcgataatgtctctgaaattactggnntttttaccatatactcgatctgaaatttctgcttaaatgtatngttttatgaanaatttgttaaggtgctaattacaaggattaagcaatatatattttaaatgcaaagttctaaagccagagtattatttttgaaacaataactgttttctcaagactgcctttaaatagtgtagtaccttatacctagcctagagatgaaattgtcagagattgtgcacaaattggctgatcacacacactaattagtgtactatatctggctntatgtgagcaagatatctgccccagctccctatctgcagcatctctcctaaccttgcttcgtttcagaatctagtcttcatcaacaactaccctntcgacacctncaatggaatgtcataaatagtgaatat

SEQ ID NO: 53260 - DNA, 483 bp, Glycine max
  unsure (1)..(483): unsure at all n locations
tctgtcttgtgttgcggcatagntagaatcttgtgatagagtctacccctttcttttcttccttgtagatcatgatggcggcgcagctaatccgtgaacgagttgagatggagtgcctagagggagcttgggagaccctcgaaggcaacacgaggtgccgatttcggggcaccattcgattcacggctacttctttggtgcatccagatgaacctgcacggacgcttcagcgcacggtggagtggacagctccttggaattaatttgtgtatttttgagggtgggtgtatctangactgactgttangtttactctttttgtttgtatgggtagacctgatgtatanngaattgattattgtatacttgtggttgaagccaccactatggacacctttgctctggatgacactgtattttgtaaaactcccatattttggacaactttanatgatgaatgtatttatgatcaatcttgttact

SEQ ID NO: 53261 - DNA, 384 bp, Glycine max
  unsure (1)..(384): unsure at all n locations
cattcttaatgtagtgaagaaagaggtgatgaagctactatctgcatggatcatttatcccatttcagataacacttgngcttcatctatcccattgacctantcgaggtagtgggtcaatgggttagtgatccaactggtgggctagtaattgccctagtgtgacctgatacatattaaaaaaattcaaaaatatatatgtatctattatatataangatataactaatattattgactaagaaaagtccatccatttgtccatacttcaaaatcannaataacaatgaagtattaaagttgataacataagtgaagtgtatagtaataaaagaaagtgtaatagcactacttaaataaaacacaagtcagtttttaacaaac

SEQ ID NO: 53262 - DNA, 427 bp, Glycine max
tatgatgatcgagatgtagaatgggtttatctacatactgagagatttaagctcttgttacttcgtagtgaagtttctggaaatgcaaagggtgaaagagccttaacgaaacttatgagttctgatcaccaaaagggaagcaaatccagtaaacaaaggcaaagaacagaagagaatacagaggatgatcgttgtggtgggagcagtatggactcagaacctataatttcctggttggctcgatcttctcatcggcttagatcttcttttcaaggcataaagaaacagaaaacttctgttacaattccaagtacaatgtcatcattcgtatatgatgaacctgttacagcaaaggggcatttagctaagagatctttgaggggtgctaaaaataatttctctagtgattctgtgtcacaaaataaaa

SEQ ID NO: 53263 - DNA, 238 bp, Glycine max
tccttggtgatgataatgcctgagcctcttgtgccagatttctgcgagatcttccttgagcgagaaaacaactttctcctcctccaatgtgatgtagagtaaatgcttttccctttcattataccttgaaaatatcgtgatcagctgcctcttttatcaagtactatttgacttcagaaataactttaaatcctctatcaatcaattgaccaacgcttagcaaactttggtcaatttc

SEQ ID NO: 53264 - DNA, 465 bp, Glycine max
  unsure (1)..(465): unsure at all n locations
atcttattcatggaaatggtattgcttcaatttctaatgtccaccaaggtagtaatatgacgtgaacaacacttcacanattacattgacaattataatcttatttgatattaaaattgtatcaacctatttcaacagtagctaatatcaattnttttttcatattcattgtataggatattatgatactggtgatcctattcattaatgtaattattgtaaagcgcttatctggaatcaacagaggatgtgaaagcacaagcacaccattactcccaaatatcatctttgttttggcaatggtaaagtctagcaaccattattgaaagaacatccttctttgcttcaacatctactatttgatcaaaattatgatgatagcgaacatttccagcataatattagactatataacattatgtttgccttcacttcacctgagatgaaggtggatcacatatatat

SEQ ID NO: 53265 - DNA, 498 bp, Glycine max
  unsure (1)..(498): unsure at all n locations
atccttgagtcacctgcggcatgcaagctntctccactaagttgcctgatgcctgatatgtcttttctgatggctgtggtcctagatgcagggaagaatttctccatgaacaccctcttaaggtcattccagcttgaaatggacctaggagcaaggtagtatagccaatcttttgtcactccctctagagaatgaggaaaatcctttagaaagatatgatcttcctggacattagggggcttcatggtggaacaaaaaatatggaactccttaagatgcttataaggatcttcacctgcaagaccacgaaacttgngcagcaaatgtattagtccagtcttgagaacatatggaacaccctcatcaggatattgaatgcacaagctttcataagtgaaatcaagtgcatccatctccctaagagtcctttcacgaggtggagggtgagccatgttctcagtatgaaaattagtagcggaatgttcaaaatcacaatat

SEQ ID NO: 53266 - DNA, 418 bp, Glycine max
  unsure (1)..(418): unsure at all n locations
ttcccttagagtcctctcacggtgtggaggttgttctcatgttcttagaatgttcaaaactataatgcttagaatcaggatgttcaaaattaccaaccacaaaatgctcagactcaccaataatagaatgctcaggatgctcaaaaggtacaatatgatgcctaactaatctatgaaatgtcctatctatcttangatcaaagggttgtaagtcagatggattgcctctagtcatacactacattcagcatgcacaactagttgccttcttatgcaagtaacagtgtaggtttgaactacaactaccctcaatgatatccaaatgacttgaaattntgtgggcaacaccctanaatcatgaaaatatggcacaaaaantttcaggcaaaaattcaaagtctaactatagaaactacct

SEQ ID NO: 53267 - DNA, 482 bp, Glycine max
  unsure (1)..(482): unsure at all n locations
agcttagccgaattcagatggaattaaagttagcttagctcaaccttggctagcttagcgcaccaaatcagccttagatgcaagggttggtcgctaagcgcttgagactcacggcttattgcatgaacagtgatgcgcttagcgcgaggcttgcgcttagcgaaaggactatntttcagaaaaaagttttctaagttatttntcagtcctttttccaagaaattgaaacccttatgttaaacattcacagattggctgatatactcctatgtatagattatatagcaagttccaaatgattaaatgcatganaaacaaagataatagaaattaaaactgggttgcatcccaggaagcgcttctttaacgtcattagcttgacgcatagcttaataccttcaaggtggcatganagtcacaaagaacacatcttccttgaagtntctccttttagctagaaattccatgaacttcatataatc

SEQ ID NO: 53268 - DNA, 346 bp, Glycine max
  unsure (1)..(346): unsure at all n locations
cttggattagtgggctgaaccatagctaanattcactaatcataattagtgaaattttggccccaaaatttggctccacaaattcaatttcaaactcaagtgaaatttgaatagaaattcaaatttccctccaattnttgtgtgacacgtangctataaatagagtccatgtgtgtgcattntttggaactttgatcatttgagaattacacttaaaagttcagacctcatttgaagcacanaattntttgctccttttctccctttccctccactcttcttctcctaccttcaagctcttatccatggcttcctatggtggtgagcttcttcttgactcatattc

SEQ ID NO: 53269 - DNA, 436 bp, Glycine max
  unsure (1)..(436): unsure at all n locations
agcttcttatccaaggctcatcttggtggtgaaactccttcttccatggtttattccttaatggatggcgcctcctctcacctcttttcctttgtcttccactgcatctccatggtggaaaatcaccattaaaggaccccattgaagctcaaagatccagcctccatagaagccccacaagcaagtttccatcacaacacctattcatccatctttatcatctccaagatcatccacattgttttcttccgatgatcagcgtctatggtatctctcttcaatttcttctaggatcatcttagacgctaagtacctagatgtagagttctttaatgatgaaatgttttattggctatcaagtgttcaaaattctggccttgttgatttcatgtcattaanactgccacattatcctgaacttgaaaggtcttctact

SEQ ID NO: 53270 - DNA, 320 bp, Glycine max
  unsure (1)..(320): unsure at all n locations
agtataaatgtgtaggtttataaaagaaatttgtttaagtaaccaatcagtagcgcatgcaattcatgattttctttnttcaaatttctagtgtatattaatgcgtgtaagttaacttattcgattaaaactgttgtaactgttcaacaattagtttagatactaaaagatagagtttgaaacaacccataactagctagctcatcagaatttaaatggcaaataataacaaacaaacactacagcactggcttcttttcctttagtaaggaatttcgatcagactaattgagtgaagatcgaagaatatgatagcaaaa

SEQ ID NO: 53271 - DNA, 331 bp, Glycine max
  unsure (1)..(331): unsure at all n locations
aaacttataacattcattntaatagttcatttaaggtactcgaatgcataatttgtcatcaattacatgacgaatgattatgtaatttatagcataaatttaaatatacataaatgatgtatttatttctatctatganaatttgcgaaagtcagattctcttaattttatgtggatgtaactagagaaggtaccgaattatgtgtccttttacaccaggaaaagactaatttgtaagctgtaactcttaatggatgctatctatntaaataagtttcaaattaaattgggtggatattatttctatttcaaggtgaatggactgctgagt

SEQ ID NO: 53272 - DNA, 372 bp, Glycine max
  unsure (1)..(372): unsure at all n locations
agnctttcgtttttaattccttaatcagtgtctgctatcatgacccttaactaaataaaggtatttgaagtatttttaccttgaaaactaatcttcaagagagctaaataatttcagttgtactacattagaattgcaatctcataatttgcttttgctgtaaatcatgttgaaggaaatggttaatctgatagtggacgcaacaaatataacacaaaggtcttgggaggctagacctgaaagtgagggagcagtatcagagattaaaatggacaaaagatctgcgaagtttgtctgctgaaataatttcaagaacttgttttggtagcaactatattgaaggaaaagaaatattctcaaagcttagagatc

SEQ ID NO: 53273 - DNA, 345 bp, Glycine max
  unsure (1)..(345): unsure at all n locations
agctnggagttggttcacgctggcgtcgtacaactggtcaggaaatatattttccattcttagtggctgctacacatgaggtatgactcaactgcatgtacttacactagctatgtctgctgaattcgactccaaattgcaacaaactccatgcagaatacgcaactcttatattgaatgataatattaggattattaataatttaaacataatattgctctcttttttatcaatagttttaaaactattacaaacgaatgaacacaaatattngaattaataaattaatatttactactatattttaaattaatgtattgcgcaatgatatttgaatgatggta

SEQ ID NO: 53274 - DNA, 374 bp, Glycine max
  unsure (1)..(374): unsure at all n locations
ctatttaaaaccaactcagtgtttccaaaagatgcttttttatcaaattatgcacacatctgagcccattaaggcattcggaaaaattttcacagcattcacccttcaggtgtacacatatttttttcttttntttcaaaaaccttttgtgttttgatcggtggaaccttttttcaaagaaaaactggcagtcacttctttccaaaagcgtcttggctttgtagaagcaaagcttcatggtgaatcaaaggtgttttgatgataacaatgatgataacaaaagatgatgacaaaggtgatgacaaaaagctcatagatcaatcaaagaacaactcaagtgaatcanagatcaatcaagaacaattcaagagttc

SEQ ID NO: 53275 - DNA, 426 bp, Glycine max
  unsure (1)..(426): unsure at all n locations
agctntagcatggcctccgtgatagaagctctttgatcttttaaggacgataggtcggccttcatctgttcttgcactccctcttcattatccatcttnttggatcgagtgttataggggtgcatttgcgcttttttagttatggtgagttccctaaagaaacaaacaatggtgagtataccaccaaaacatgaatatgctaataaatgatcagaacacttggatccacctcaaggccttttttagataacgtgatgagtttcagaacttctctttttataaaaaggaacaaagcttttatctagccaatatcatacaaaagtgttacaacagaacctaacggtttctaattatatgggccatcaaatctatcatgtgtngacagtaattgattagcccgtgaatntcctcaagggatgaacacac

SEQ ID NO: 53276 - DNA, 351 bp, Glycine max
  unsure (1)..(351): unsure at all n locations
tctatgcacccatggtggtccacattgtgtttcgtgccattttattcccatttcatttacttttcgtacccncttttgacgtgcttaagccattttacttaagtcatttctcgcttaacttataaataaaataaatttccaccgaacgtttgaattgtattatccattaacttcggttaaaatgaattccgaccgttcggtcgtgccgtaaccacgttggaaataaaaaaaaagaggtaaaataataatataataatcataaaacatcttttagtaaaataaagcggaaaatcaatcggacgttntctctttgggatttctcattcttaatcgaattgactaataactaaa

SEQ ID NO: 53277 - DNA, 432 bp, Glycine max
  unsure (1)..(432): unsure at all n locations
agcttgaccaatcccgacccaacccgggcatagtcggtcagtgagaacctgtgatgtacctaaacaggcgagctcctggcagtcaacagataanatgaacaaagaccacaaagcatggaggcttgtggtggctggccagctgtgaaatttgtgtgatatgtggattatggcctctggtaatcgattactaaaggtgagtaatcgattacaagccttaaaattgaagacaggagactaagatggtctctggtaatcgattaccaaggggtgtaatcgattaccaggcttgaaaacgaagtcaggaaactaagggagcctctggtaatcgattaccagcctgtgtaatcgattacacagagggatgggtcactggtaatcgattaccaggtatgtgtaatcgattaacacagtgcattttgcatatttcatgtc

SEQ ID NO: 53278 - DNA, 362 bp, Glycine max
  unsure (1)..(362): unsure at all n locations
ncaagctggcctctagttgagctcttgtcaaattataggaaacaaaattcctaaaacaatggaagaatgatttaatgtgaacaaccctcccatgttcaagggagccaactatgatgactggaaggaagggatcattgccttctttgaatccactcactttcatatgtgggatgtcgtagaaaagggtagtcagattcccctacgtgcttaaaagaacaagatccccaaggataaatgaacggatgatcataaatctagatttcttctcaactcacgagcaagaaatgctatgttgtgtgctttatcacaagaagaatattccaagggtgatatctacagaagtgccaaacagatgtgggaca

SEQ ID NO: 53279 - DNA, 244 bp, Glycine max
  unsure (1)..(244): unsure at all n locations
atacgacacgagagcacganggagtagagaaatatatttctatgcatcagctcggttattagaaagacccaacatatctacctactcgtgtcatgttatttaccttgcattgtatagtgttagcataaaagtttagcttacattatgtctgaaattggcacttatacatgttatctcaacaatgcttcacttgtgaacttaattaaggctgacaatagctcacctgtgtcgatactcagaatca

SEQ ID NO: 53280 - DNA, 399 bp, Glycine max
  unsure (1)..(399): unsure at all n locations
ggcctgccagcttaagctccacaagagcttgcacatctttggagtcctcttgagtcacttgtgttttaagtgctaagctctgctgcttgtttatcaattttgattatgttagaatttggctctgcgtctctacttgatcaaagaaatatgagtttctcttaataggctgtatggtttttatatgaatgaaatgttatggtcttctcccttttaacatcatatgtttttctgttttattctataaataactgtgactttctggcctcgttatgccaaaaagggggagaaagaattgcattacattgtatattacattagcattgcattacaanagattagtgcactgcatacatacattcataaataactatacttaatgatgatgatgatatgaattga

SEQ ID NO: 53281 - DNA, 216 bp, Glycine max
  unsure (1)..(216): unsure at all n locations
atctagtttttgcattgtattgcttattctctctatganattcaatttcattgtaaatctgtcaaacctatagtttgagaaagccacgtgacttagtgataaaaaatacttggaagtttattaatgtcgggattgtaagccatgagtgatagtggaagaatacttgttgtaatctggttgattagtgaaaccctgataattatcatttcttcctac

SEQ ID NO: 53282 - DNA, 337 bp, Glycine max
  unsure (1)..(337): unsure at all n locations
gcttatgagagagcaagatcnnatggaggaaaataaagcttgctaacaagccaacaagggagaaagaaggttgtcttcgaacccgaagattgggtttgggtgcacatgagaaaagaaaggtttccggaacaaaggaaatcaaagcttcaaccaaggggagatggaccatttctagtgcttgaaacaatcaatgacaatgcttacaaagttgagctgcccggtgagtataatgttagttccaccttcaatgtctctgacttatctctttttgatgcagatggagaatccgatttgaggacaaatccttctcaagagggagggaatgatgaggacatga

SEQ ID NO: 53283 - DNA, 411 bp, Glycine max
  unsure (1)..(411): unsure at all n locations
cgtgatccttcagtcaccgaggctgcagctttcaggaggagctagttttagatgggtgtgtgtagctaagctctagcttctcaaggaagttctctcatagaagcttctcaaggaagtgttctcaagaaagcttcttaaggaagctacctagtctataaatagaagcatgtgtaacactcgttgtaactntgatgaatgagagtctcgtgagacatacttcaaagatacacttctctccctcttgtattccttcaatttcatgctcccccctctctctttctctccctctttcttttcctccattgaagcatccttccaagcttcttatccaaggctcatcttggtggcgaagctccttctttcatggcttattccctagtggatgacgcctcctctcacctcttctacttt

SEQ ID NO: 53284 - DNA, 443 bp, Glycine max
  unsure (1)..(443): unsure at all n locations
gctgttagttanttgttcactttaatgatggacatttaatgttccatacacatcaatttccttatttattatgatattacactttctatgttgtaagtaatattttaatttcctattaacaaaaattgaggtgttacattgctgatgggtttggggctgctggcggtgtgtggtggttgtggcacgacctagtggtgatgtgtgatctgatgtcatggtggtgattctgggtatcgcttcagtgagattgttcccaggtctccatgctcatatagtaaacacatcggcgatgacaaatatgaaggtagggagtgatgtcttttttagtcctagatattctctntttggtntctaacctctattgagcaagggtgaatcttggggtgcaatggttttgcagcggcgacacacctcgacagaatctgacaacttcaatgaatgat

SEQ ID NO: 53285 - DNA, 425 bp, Glycine max
  unsure (1)..(425): unsure at all n locations
caagcttgttcgcacatcgttcgcgtgtatgatatccactcgacaaggtttgaagtaaaggagaccttcaatcctataacacaacgtggcggacaaaaatgggcagttaacttgaatggccattattgtcaatgcggaaggtattctgcgcttcactatccatgttcacacattattgcagcttgtggttacgtgagcatgaactactaccaatatatagatgttgtttacaccaatgagcacatcttataagcatactccgcacagtggtggcctcttgngaatgaagcggcaattcctccttctgatgaggcatggacactaatccctgatccaactacaattcatgcgagaggccagccaaaatcaacaaggataaggaatgagatggatngngtcgaaccatctgaccaccgacaaaaatg

SEQ ID NO: 53286 - DNA, 464 bp, Glycine max
  unsure (1)..(464): unsure at all n locations
agcttaacaatccaagtgatctattacgggaatattttatccctatcatatatcttacctcacccatatcttttacatcaaagttgctagagagaaacttcttagtctcatgaagaagaccaagactattaggtgcaagtaagatatgatcaacatacagaattagaaaaataaccttactcccactgaccttcagatatatatacaccaatcaacaatattttccttatattcaaaggaaacaatgatatcattaacctcaaataccattggcgagaagcttgctcaagactgtatattcatttctntaatatgcacaccatgtgtttctttcctttaaccgagaaccccattggttggtccatataaacattctcctctaaatccccattaagaaagacagttntcacatccattggatgtagctctaagtcataacggacttctaatgtcatggatatcct

SEQ ID NO: 53287 - DNA, 430 bp, Glycine max
  unsure (1)..(430): unsure at all n locations
atgattattaaacacacaaaatgaanatactaagtatttattacctatacttaaccgaaaatacttataacattacaaaataaccataaattgggagagtttgatacaatttataaaagttttatacacaaaagttagtcattttcaccgactaacaactcccccaaatatacagttttgcttgtccttaagcaaaaagagaaaaactaacttgtcctcaagtgacaatgacatgcagtgactatgtacaaaggtgtatgctacaaagttactgattgcatgatcagagaatggagtaaaatgccctcatcacttgtctttcacaaggtatgcagttatccaaagagaagaataaaatgtaacctgaacagatagatgaagttagacataagacaaatatcaaggaaaatagctttaaccacagtctcac

SEQ ID NO: 53288 - DNA, 371 bp, Glycine max
  unsure (1)..(371): unsure at all n locations
agctntactccaagaagctgaanagcgtattataaagaatgaaagaaaccaatcatagagggggtaacttgaagtctgtctttcgttaaactcctgatttgttcggtctgcaaattttgactgcaaaccatatacctgtagggcaaaatcaacagtagaccttgatggagttgactttgactaaacaaccccaggaaagacaggaaatggaaaagaaattgcagaagttagcaaaaaccatggattttttgctcttggatatgcacatatgaagttgcttttgaaaatggtatcacactttagtttgatagctatctatgtttgtggatttagaagcatatatggngaggtttttgagttcacaacaatga

SEQ ID NO: 53289 - DNA, 419 bp, Glycine max
agcttagagccaattcatattacaataactttttactcggatgtctgattgagtcccgtcatatatcgagacgctcgaaattgaatgttgaagctctgagccaattcaaacgacaataatcttttactcgaatgtctgattgagtcctgtaatataacgagacgctcgaaattgaatgttgaagctctgagccaattcaaacgacaataactttttactcggatgtctgattgaggcccgtcatatatcgagacgctcgaaattgaatgttgaagctttgagccaattcaaacgacaataactgtttactcggatgtctgattgagtcccgtcatatatcgagacgctcggaattgaatgttgatctcttaacgaatcaaacgacactactttttactcggatgtctgattgagtcccg

SEQ ID NO: 53290 - DNA, 326 bp, Glycine max
  unsure (1)..(326): unsure at all n locations
gctcagaggttcaacattcaatttcgagcgtctcgttatattacaggactcaatcagacattcgagtaaaacgttattgtcgtttgaattggcttagagcttcaacattcaatttcgagcgtctcgatatatgatgggactcaatcagacatccgtgtaaaaagttattgtcctttgaattggctcagagcttcaacattcaatttcgagcgtctcgatatatgacaggactcaatcagacatccgagtaanaagttattggtcgttgaatntgctcagagcttcaacattcaatttcgagcgtgtcgatatattaccggcgtcaa

SEQ ID NO: 53291 - DNA, 371 bp, Glycine max
  unsure (1)..(371): unsure at all n locations
agctngccatgtcgtcgtcgttctgacctataccccttccgggcttgtacccaagcctcaacattacacgggctaccatcaatgcagcactggatgaacggtgttacactgngggagactcgatgtcgcaacctacccttcagcgggagggcgacgcgagactcacgggtgcatcttccaaggaaggaaaacacgcggagttgccaccaacgtttattcgaggaaaacgtcggaaaaaaccagaaaaggcgtggtctacgaactttaagtgtgaaaggttcgggagttgtatttatgcacggngaaggtactagcaccccacgcgtccgtcacaaggtacgacagcctttaatcaagtgtgcaaatatgac

SEQ ID NO: 53292 - DNA, 159 bp, Glycine max
cctactttcgaggggcaactcccaccttatgatgactatcccgggcaagacgatgaggaaggagatacccatcttggccccctactccacctcatagatccgtcgccccatgaactaccccaaccgaacatagtccgccatatcccggcttccccacac

SEQ ID NO: 53293 - DNA, 444 bp, Glycine max
  unsure (1)..(444): unsure at all n locations
ngcttggagaggatgctttttggatgaatataaagagggagactaagagagaggggggagcacgatattgaatgaagaaaaagggagagaagttgaactttgagatgtgtctcacaagactctcattcatcaaagttacaacaattgttacacatgcttctatatatagactacgtagcttcctggagaagctttcttgagaaaacatccttgaaaagcttctttgagaaaactttattggaaagctagagcttagctacacacacccctctcataactaagctcacctccttgaaaagcttccttgagaagattcctaaagaagctagagcttagctacacacacctttctaatagctaagctcacctccttgagatgagaagctagagcttatctacacaccctctataatagctaagctcaccctcatgacaaaatacatg

SEQ ID NO: 53294 - DNA, 380 bp, Glycine max
  unsure (1)..(380): unsure at all n locations
gcttgcgaccttggatttatgggtgagcgcttcaatgctatggacaccaggattactaggctcgcagatgatatgagcttcatcaggcgttgcttcaatcccccagtcgactgttagntatctttcttatattttatttccttaggctttatggttatttctttcgccttgtatttttgctttcattagtactttngttatgattgtcttggatatatatcattctgttttggtttgtgttgtggtattctaagactttgatttggctgattaagacttgtttggttaattctatggattgacttagtttatgattacattgtgctctactgttgatgaagccttagttcctttctccatacgttattggctttttgatg

SEQ ID NO: 53295 - DNA, 423 bp, Glycine max
agcttctacttatgtggcagggcgggcttccttcactttcttgtctccaacgcgagctttgaccactgctcttccttcccgcgatgcttcttttcatgtccgcctgagtgggcttatagcctaaaccatacttcccacgatttccttgggcatttatcaggctagttatgccgccgttgtctttgcctaaacccatttcgggttcataaccgttccccaacataactcgggtcatcattactgctgcatcggacagacaaggctgcccagagaaggagtccacggaggaaatgctgaccacctcaaaagactggaaagcggtttctaacgattcttctacggcttccacataaggcatagaggatgggcagcttaccaagatgtcttcctcgccagacacgatgaccaagtgcccctccacta

SEQ ID NO: 53296 - DNA, 377 bp, Glycine max
  unsure (1)..(377): unsure at all n locations
cctcatcgtccctcacagtctttagatntgggagccaatccaatccttggtgttggactctcagccacttatgatagccgccgatgatcccattactgcttcccctaagctctctgtcctttcttcacgccgcatcccatgccttgcgaactccttggagtaccctcgtgttgtggtcactaaaaccccgtgcgatgaaaggcgtgatgctttcgtctaatggcgctcctctcatagggtagccaagctgtcttatggtgagaacgggattataattaatacaaccccttgttcccatcaagggaacatttggacatccttcgcatgaagatagaatcctgattcttccttncttctagcgagggaaccaattaaca

SEQ ID NO: 53297 - DNA, 388 bp, Glycine max
  unsure (1)..(388): unsure at all n locations
agcnttgatgcaacatatggagaggttaatgatacaacgagatgatgcgctccatgagaggttggatcaaatggagaatagagatcataatgaagaagaaaggaggagaagagggaatgatggtgttcctagacaaaaccgaattgatggtattaaactcaacattcctncatttaaaggaaagaatgatccggaggcctacttggagtgggagatgaaaatagagcatgttttctcatgccacaactatgaggaggaccagaatgtgaagcttgccgccacggagtnttccgactatgctcttatgtggtggaacaagctacaaaaggagagagcaagaaatgaagagccaatggttgatacatggacggagatgaaaaagatcatg

SEQ ID NO: 53298 - DNA, 367 bp, Glycine max
  unsure (1)..(367): unsure at all n locations
acccggtgtttatagaaacgaggatatgggctacgtgggagtacgtgagctcaattggaggtgggcaacaggggatggtgggtttatgcgcgcattgtggatgtggaaaacttgttgtgcaccatcgcccgaccgccacctaataccacaggtgatgggtaccccataatcctacaagcttgagatgaggaagtgtagaagggtgaacttcctgcttttattcgntgaccacagagtggtacctggagatatgtcgcangggtcaagagaccttgtggacgtcaggtggggtgctattgcccaaaaccaagcttgaccaatcccgacccaacccgggcatagtcggtcagtgagaacctgtgatgta

SEQ ID NO: 53299 - DNA, 149 bp, Glycine max
  unsure (1)..(149): unsure at all n locations
ctgtaaatataagaaaaaacaaaagagattagcacaggttattttcacaaagacataanaataaaactaanaatttgagcctagctgaagacaactgctatgcttagtgcactgatctcgcgcttagcatgcggccttgatattgatgc

SEQ ID NO: 53300 - DNA, 381 bp, Glycine max
  unsure (1)..(381): unsure at all n locations
agcttgcctcatagaggtccagganagacatggcggccgaaggaactagttccgccccggagtacgacagtcaccgctttaggagcgttgtacaccagcagcgtttcgaagccatcaagggatggtcgtttctccgagagcgacgcgtccagctcagggaggacgagtatactgatttccaggaggaaatatggcgccggcggtgggcaccactggttactcccatggccaagtttgatccagaaatagtccttgagttttacgccaatgcttggccaacagaggaaggcgtgcgtgacatgagatcctcggttaggggtcagtggatcccgttcgatgccgacgctatcagccagctcctgggatatccgatggtattgg

SEQ ID NO: 53301 - DNA, 321 bp, Glycine max
  unsure (1)..(321): unsure at all n locations
gctangagacagcgcaagtccctgtgatttcatctgtgactganactgggactgcatctagctgaaggataacattagttgtcgagtcattttttctgtgatcgactcctccagctagtccttgatttgttgagtcagctgctctagctcttcgcgagccctacaggaagacgtgcangaggtccttggagccaatccaaagtatcgcttgatcgtcacaccagcttcggcaacacgcacacgaccggtgtgttctggtagcccaatggcaatagccagtacattctgacatatatgggcgataaatgaaccctgtgacgc

SEQ ID NO: 53302 - DNA, 439 bp, Glycine max
agcttccactgaaaccacctaagttccaacatccgtccaaggttcaaatcattgtggttgatttaatctatttccatttcctcttaaaaccttactatctctccattattccaatccaacacctcccaactttgacagtcatagtttctaaagcattagacgattttgataaagacatgctcgttagttcatcttttaaaccaacctcttttgctaaaactaagcagaaggtattccaagaaaccttttcatgagatctcgatctagagaatttctttatacatgtctttcaaatggaatattgaaggatagatcatggctttctacattgtaggatgacaaaataatggttctttcatcatctcaagatccttttgaagttggtgacgggggggggcaatttctaagcattggtgaattctttttcaataccatattc

SEQ ID NO: 53303 - DNA, 240 bp, Glycine max
  unsure (1)..(240): unsure at all n locations
gattgattttcttgattattttattcaaagatattgtgattatgttattattattctgcctttatttggtttaaccgcggttacaacgtgaatgatcagttagantcttgtttaacagtgactaaatgagaatacaacacacatgatcggttgaaattcatgttatcatttattaagtgacaaaacgacttacataaatgggtaaagcacgttggacatggaagaaaagaaaattgaaag

SEQ ID NO: 53304 - DNA, 438 bp, Glycine max
  unsure (1)..(438): unsure at all n locations
agcttgtgctccaatcattcatgaacctatttgtaaccattgatggaatatttgttaatggtatattgtacccaacattaattatcacttaatgtataattttaacaaccactaaaccaaattaacttacatcatccacaactgtagtatggatatgttcaaacatttgtcacctaaaattatctcggtgacatttgcgtgtgagatgaaaaaaccctctttgacattatgtaacccaaatttcatgccatcccatggcaactgaattggcttttggtaaacataataaaggttcttgaccaattctcctaatggatcaactgtagccactgcattgtccattcctacatatgtaacccttttcggcatacgctnttgtgaatcctacatgtttaatgaaatattaattgcgctacttttcanaacaaaatgtcattg

SEQ ID NO: 53305 - DNA, 278 bp, Glycine max
ggtgagtataatgttagttccaccttcaatgtctctgatttatctatttttgatgcacatggagaatctgatttgaggacaaatccttctcaagagggagagaatgatgatgacatgaccaagagcaagggcaaggatccacttgaaggacttggacggtctatgacaagggctagagcaaggaaagccaaggaagctcttcaacacgtgttgtccatactatttgaatacaagcccaagtttcaaggagaatagtccaaagttgtgagttgtatcat

SEQ ID NO: 53306 - DNA, 479 bp, Glycine max
  unsure (1)..(479): unsure at all n locations
ttcagtcacctgcggcatgcaagcttggtggtactatagctgcactaaattgtttgtgtggttatcaaatgcagatgcaatgcagtagaagggggtaaagacaatatattactacaattatatgaaattgagttggtaatactaagaacagaaaaccattgcacgcaatcaccattataggaattgtgattcattatgaatcacagtagcatgaccgaaaataaaatagtcgctgtgtaaaataacataacaattgtctcanatataggaaaaaaaaatactcctacgccatcattagccgtttntacttattgctgtctttaaaaaaaatgttgcccatttctttcgaatggtggtgatgatgtcgatgtccaacggtgtgtcattagcanaccactgcaagtattcataattgtaagttagtactgcaaatatanaaattcagttccaattgcactgaagtttatgcataccatgga

SEQ ID NO: 53307 - DNA, 368 bp, Glycine max
  unsure (1)..(368): unsure at all n locations
cacattgagtatctctgcggtcgtccggtacattatttcttttagnttggntattgtctaaattanttttccagccaatataattattaaaccttattgtttggtttacttttattttttacttaaatggcaagttgatattgtgtgtttcattaaactcttcacggctcaaatgggtatgaacaactttcaagagttagctcatacttcatagatatgatggtacattngatgattaaactctttgcattctgtggtttattctttttttggcgaccttgtagcaactattattgccttgaggtagagggaatgaaagtcttggagtacagatctagaataatgtaagacttattatgctaataatg

SEQ ID NO: 53308 - DNA, 470 bp, Glycine max
  unsure (1)..(470): unsure at all n locations
gcaagcttgcatgattacatctcccctttctatagcaattcttcttgatatcatcaaaatcttcatgatttacattctccccctttttgatgatgacaaccacctgtaggttaggagcaacaacaaagaaaatatctatttgcatatagtttactcccccttggttttacaatgattgcttatatgagacaattgaagatttcatattttccatatataaaaagttgcctcataaaaaatagataattntttcttattaatttatcttttatctttctctccccctttgtcaacatcaaaaacaaatcatgaatacagaggagaaaaaggtaccactttgtgaatgtatgagaatcaaggataccaaaggcattaaccaatcattcatattgatcaagcaaaacaagatagtatcacatcaatcaaaacacaataatcatatatacatccaaagcattaacaaacacata

SEQ ID NO: 53309 - DNA, 406 bp, Glycine max
  unsure (1)..(406): unsure at all n locations
agctcgcatggggctaagtttaaagaactctcttgttatgaaatatttgtatttgggctaagcgcgcaagggcagctggctaagcttgcatgtcgcgttaaacctaaaaacatctttgttttgtaatatctcaaattgggctaagcgtgcaggcacaggctaagcgagtcatgcattcccggtaagcctgtggtgctcgctaagcggattttgcaagaaatttcctcctgcaaaactctctaagccctatgtggcatgctaagcccaataatatctctgaagttgcaatttcatttttgggcttagcgcacaagtttgggcttagtgcgcanaataaaaaatcaaaatttcttgtacttctaatttggtatgtctcctacgcagcaagcttagtgcgcacttacac

SEQ ID NO: 53310 - DNA, 317 bp, Glycine max
  unsure (1)..(317): unsure at all n locations
ctatcacagccgagcaaaacagagcaaaggcagaaaactctgctcaacacatcaaccaaaatcacagcttttctcacgtaaagaccacagtaacaattccttcgatccaattcgttaaccgttggatcgactccaaaattttactggaagtctatagtgtataagcctgcattntgaccgttgggatatactagcaaacatccagaactcattctgcactagactttccacagccaaccacacacaagcattnttctgcacttgtgcaaaattctgctgcacaatttcacagcaaaaactctgcataagtgcagatt

SEQ ID NO: 53311 - DNA, 392 bp, Glycine max
  unsure (1)..(392): unsure at all n locations
agcttgttcaatggtaatatatgcaattagtaggtaagacatgcatgtgtactttgtgagaagntaaccacactaattcattgttgtgactntgttaaaaaaaataaaaattgtgaagaacggcttctctgccaacacaaccaactttagtcaattagggtgtgttgtttggagaaaaagaggataaaagaaagtagaaagaggacaagagtgatgagacatgtttgtctactgtacggtgtgcttccaaaatttttaaaagaaggcattagctaacgttntattttttaatttaattatagttattttaaactgctctttttttttatcaaaatcgatatatttaagccttattctcccatggggtaaagtttaaaaaattacctaagagt

SEQ ID NO: 53312 - DNA, 410 bp, Glycine max
  unsure (1)..(410): unsure at all n locations
agcttatacttcttatagctgacatgaacctatcttgatagatgatcgtttctgcttactaaccagttcttcatataataaagaggaccattacctctattaaagatagtcaaaagacggaaatcgtattacatgtgatactattataaagaaactaactagccgatgtattgcaatactagattaactcatttgctgtttaagttcattttttgtaacctgatagcctcagacacaccaggtgatgaatagttccatttcaagattttcttccaaattgaatctgcctttcaattttgaacctctttaacttatgacttatcccttctactgttataatacctcaccttacacacagaaacttgtgtagccccaacactaataaaanagaaagttgactataagaacac

SEQ ID NO: 53313 - DNA, 437 bp, Glycine max
  unsure (1)..(437): unsure at all n locations
agcttaactatctccttacataacacatcatcaatgcttcttgctgtataaggatgcttaagtggtataaaatgtgaatacttggacagtctatccacaactactaagatagcttcataccctctggatttgggcaatccagtaataaaatccatcgatatgtcatcccatatttgctctggaataggtaatggttgtagcaaacctcctggagcagtagccatatatttctgtctttgacagatatcacaactcctcacatactcctgaatagtccctttcattcccatccaatatacatttgttgcaatcctcctatatgtcttataaaaacctgaatgacccccttgnggagtggcatggaattcttgtagcaacacaggaatcaattgtgactgactggataaaactaaccttccattgtacatcaacacacc

SEQ ID NO: 53314 - DNA, 313 bp, Glycine max
  unsure (1)..(313): unsure at all n locations
gaatcgcanattcacctcataagggtttagtatcatttaacaccattatcaatttcaaataggatgaccagccattatgaacaatgcaatatgtgaatacactcaatttgaaggttcttatatataaagggtcaaggcaaactagagttgaatattataatactgaaacaatgttcatggctgaagcaataccattaaggtcaaccagcacattttaacgacattttaggacatagacacattttcaacacaaaganagacgtgctagagacacatttcaagtctaacctgagaggaagtctgaggaacatgc

SEQ ID NO: 53315 - DNA, 167 bp, Glycine max
agcttgaactcacttagtttgtaaaactctcttgatgcttacgactagctggtgtgcacatggtagatcccgaatacacatccccactagatggagaagtctttatggcccacccaaccctgattttttgcattctaactgtgtgtcggactccttctcacatgtaa

SEQ ID NO: 53316 - DNA, 327 bp, Glycine max
  unsure (1)..(327): unsure at all n locations
agctngcctcatagatgtccatgatagacttagctgccgaaggaactagttacgccccggagtactactgtcaccgctttaagagcgttgtacaccaacagcgtttcgaagccatcaagggatggtcgtttctccgagagcgacgcgtccagctcagggaggacgagtatactgatttccaagaggatataaggcgccggcggtgggcaccactggttactcccatggccaagtttgatccaaagatagtccttgagttctacgccaatgcttggccaacacatgaatgcgtgcgtgacatgatatcctctgctatgggtcagtgga

SEQ ID NO: 53317 - DNA, 164 bp, Glycine max
tttctcgtgctcctttacaaatgaatgggcacgttaccaagttgccgataacaatcgacgctatgcctgccagacactaataaaggaggttgcataagaatggcgtatgtgtacttcatttggcgctttcaacagagtcgaactacaatagttctctcactaca

SEQ ID NO: 53318 - DNA, 360 bp, Glycine max
  unsure (1)..(360): unsure at all n locations
ctcgcccagtcgagctatgttgcttcctccagaagcaacagccttctggaggaatcttctggagggcccaagtgggcctggtttctatttgcaccctcatctttactaaatacacccnctgccttttattggtgattcttttttcgtaaagttacggaaacttacgaatttcgtaacgatacttaatttctttccgtaatgttacggaaccttgcggattacataatcatcctctttatgacttacggaatgttacggaacctcactatntgtgcaacgatgcttccttttgatttccggtgtgtcatggaaccttacggattgtgcatcaatattttctttagatttctggcacgtcac

SEQ ID NO: 53319 - DNA, 454 bp, Glycine max
  unsure (1)..(454): unsure at all n locations
agctntcaacanaagtcttacaaataatcatcacacagcagaaccctagcaagactacccatcatatcttccanaaccccatacccacganaatcaaaggagaaagaagtccacccaaacctgaattttcgaagtcccactcgtagtcacgcacttcacgaccccgaaaatgctctcctttcacgaattgnggcagaaatgagcaccaaaggttgaagctttgtgtggagcttcaatggtgaatgagggaggaagaaaagcaacgtgagggagagggagagagagcttctgaaaatgtggtgctgagtgaggagagagagggttgctttttggtttaaataaaaggggttttctctntttctattattntatttaagcaatgccacatgtctccatttgagtggagcaagaagggcccactttccctttttgactgtgacccatactcagtcac

SEQ ID NO: 53320 - DNA, 279 bp, Glycine max
  unsure (1)..(279): unsure at all n locations
aaccatgtgtcatctattttacttaccaagcaactntgttcatganatgatgcttgcttaatattcaacatatagatgttacctagtctcttaccaatgtagatgacttcattagaattggcttcacttataagacaacaatttttgttaaactcaatcttgaaacctttatcacatagttgactaatgcttagtagattatgctntagtccatccacatataacacattctntatctagattntgtattgatgtccctatatttccttctccatcatc

SEQ ID NO: 53321 - DNA, 488 bp, Glycine max
  unsure (1)..(488): unsure at all n locations
gtgatctctaagcaccgcggctgcagctgacccttacgagtcagttagtcatatgtaaagcttgacccttacaagacacaccatgtctaacaaactgcttatccaacaactcctctaactgtttcttaagctcagttaactctataggagacatcctataaggggctatgaatatgggtccatcaccgggtactaactctatagaaaactctatctctctctcggatggtagaccagatatatcctcagggatactttcaggaaactctctcacaacagggaggtcacacatggaaacctgtctctatttctaggttagacaagatcatgtacactngagcatcttctnttagagatgtcnataactggttggcagagataaacatcatatccttactcactccaaaatcatcagacaccatagttttatcaaaacagtttaacaagacnatggtggaagataaccaatccatacccaggataacatc

SEQ ID NO: 53322 - DNA, 432 bp, Glycine max
  unsure (1)..(432): unsure at all n locations
agatccacaagggatgtactctcccttattctctntgaacaacctagtggatgtatcctccactagaactaatccacaagagatgtatcctctcttgttctcagtcacaacaacccaagtagatgtaccctctacttgtaccacaaaggatgtatcctctaatgtgttaagacaaagttctcaggcggttagtccttcgaaactttgtgaaaggggaaacaaaagaattctcaggcggttagtcctttaaaatcttttgtttatgggaaagggaagaatcaaaagaattctcatactgtgtcattntgaattctttgacaagggagaaaggagacacaaaagaattcaggcggttagtcttttattcttttggaaaagggagaagagagacaccaaaagaattcaggcggttagtccttggcgaatttttat

SEQ ID NO: 53323 - DNA, 385 bp, Glycine max
  unsure (1)..(385): unsure at all n locations
agctntanggtttatggtttagggtctaagtcttatggtttatggtttagtgtctaagccttagggtttanggtctatgccttagggtttatgttttagggctatgggtttagggttttgggttttgggtttagtgtccaagccttanggtttagggtttatggtttaaggtgtagtgtctaagtcttaagttttagggctgagggtttatggtttagtgtctcagccatagggtttaggttntagggcttagtgtttagggtttagggtttaagcctaagggtttagggtttagtgtctaagccttanggtttgggggattagggtttaagccttacggtttatgattgaaataaaattactccatactcatatgcatctaatg

SEQ ID NO: 53324 - DNA, 425 bp, Glycine max
  unsure (1)..(425): unsure at all n locations
gcttggaagaagagtggaaatggtgtttccttccctcttaaccagctcgtaaagaagaggaagaacgagcatgaatggtgaattntggagtgtaaatgaacttataaaagaaccttagaacatggtccattggattaaggtgttggccaatcttaattactcaattttgattcatgaataaccattcatcagctatggaaagcgcatgcatcactgccaaatgtggtgtgcttcacttttgaaattttcacttaaaaaagttaaagtagagttttgccaaaaatgagtattcttactttntaccaaaactagtaaattntatcctanacatcttgattactatgctaacattcctagtaatacgtgtattcagagtanaccttacacaaggaaaaaatacactgcgactcaatacacaatgcaat

SEQ ID NO: 53325 - DNA, 456 bp, Glycine max
  unsure (1)..(456): unsure at all n locations
gaactatgtaggtctgaattcttcattgcacttgaggatacgtaggagcaatggcatccagcatccccttgtcgacccanaaaaaaaaagatataaaaaaaggaaaagtaaacaactatcaaacaactatcaaaggatgttgtcccttgtttaaaggatgttgtcccttgtgacgggtgcgtggggtgctaatacctaccccatgagtaaacaactatcaaacccttatcttcaaaatttgcaaacctctttttggttttctaaccattctccttttgaagacgccacctttgtttttcgcctcgccctctcgttgaagggaggttgcgacaacaaccattatcaagtaaattctttttggcatcatcaacgtttatttgaggaaaatgtctgaaaaccagaaaaagacgtggtctacgaactttaagtgaaagggtcgggagtatattatgcacg

SEQ ID NO: 53326 - DNA, 398 bp, Glycine max
  unsure (1)..(398): unsure at all n locations
cagcttcatcttatttgtcactttcgattttcttttctttcatttttaacgagctntaaccgatcgtttaagccgttttctcacctaataaatgataaaatgaatttcatccgatcatttgcgctgtaatctcgtttaatcacagttaaaagaaaatctaaccgatcgctcacgttgtaacctcggttaaaccaaaaaaagcaaaataataataaactagtcaaaatatcttgaaaaataataataaaataatcaaaatatctttaaataaaataatcaaaaaaatcaatcggacgttttttggtggaagtttcctttaatgaattgattaataaccaaagtaaaactaaggctaaaatcaactcacaaatcaagttttgtccaaaaaatcactaaaa

SEQ ID NO: 53327 - DNA, 389 bp, Glycine max
  unsure (1)..(389): unsure at all n locations
ttaagtcaccgcggctgcagctgctgttgaacctataaccactatcatcagcattcacanaggtactaaaataccaaatcccaataacctctaaaaatagcacacagatttttatttcctgttgtcaaaactagtgttgttttggatgtaaaagctaaataccttggtcatgtagtcaaagtagttaaataaccccacattatagtgcagtacctgacccctatatgctataatggtacagcanagcagctactacaccaaatcaaatagtttctatataacatgctcaaaactaaagtactcaaatcaaaactggagaaacaatgttgggcttggttggaaaaggatgaaagagaggctgagggacangaaaatgcatagggtacaga

SEQ ID NO: 53328 - DNA, 369 bp, Glycine max
  unsure (1)..(369): unsure at all n locations
gtccctggtgatgggtattggaaatcaattatgtaaaacacgtgtttctatttcatgattgcgactatatattgaatgtatgcgatgataatgactgtgagatgtgaactgatgagatgtctacactatgagtaattgatcatgttatgtatgtgtgttaatgtgttattcccgtttgatagagagtgagatgcatgtctagtaattatgcacaagatgtgtgtcatcaattgataatgccttatgccaccttaggggtatgagagggattataccttataattgttttgtagggactagttggataatgatggttatgaataataaaatagaacgctaagtcataatctaatgtanaaggagagtatg

SEQ ID NO: 53329 - DNA, 456 bp, Glycine max
  unsure (1)..(456): unsure at all n locations
agctttctataatcaacgctcattctccatcacgtggctattctggtaggaattagttcatttcgatcatttcttattactgtcatccctcctttttttggaacaacttgaacaggactaacccatgagttgtctgaaattagatagataaggcctgcctctaataacttgagcacttcttttcttacttcctccttcattataggattcaatcttctctggggttgtttcacaggcttataattggcttccaaattgattttgtgcatacaatatgatggactgattccttttagatcagaaatgtgccaaccaatagccgctctacgtcgatttagaatctgcaccagttgatcttcttcttcttccttcaaagagttgctaattataacaggtttgatctcatcttcttccaagaatacatactttanatgtgccggaagggtctttaattct

SEQ ID NO: 53330 - DNA, 387 bp, Glycine max
gtctatggaccaaacaactaatttaaatagaatatgatagttattaaaatgtattatattatgatcgaccaccaaacgagttcttagggatgatgttggtaacatttctcacaagacttttaactcgttattcatttaattcaaatgttaaattacttaaaccctaattaaatcaaatcatattcgaacccaaaaaaatgaccagttcatgctatcggtttaatttgatttagtaaaacatttttttaaaggatttttagtaaaaacattaatcctaaccaaacataaatgtttaacaactaaagctgtccataaatatgagtaacctagcaactcctttaaagcacgagagatgatgaaaacagccaactagcatttacattgatt

SEQ ID NO: 53331 - DNA, 314 bp, Glycine max
aacttacctatttggatgagacatcttggctgatatgtgccaactttctcatcgtggattcaatcacaaaacaaacttcaatatattggactgtctaacacggggattttagattctttcccacttggatctgggaaccacactctcaagttttgcatttaaacctctctcataatcatatgcatggtgagctagtgactacattacaaaatccaatatctatccaaactgttgatctacgcacaaaacactgatgtggtaaattaccctatctttcagaagatgtgtatgaggtagacctttcaaccaattca

SEQ ID NO: 53332 - DNA, 135 bp, Glycine max
  unsure (1)..(135): unsure at all n locations
caaatggatttccactgaatttattaaaagagagagagagagattntaaatctatctcccttaagttgcggagattacccacaanagtcggaattgtccttcatagtgatacgtgataaatcaagtcaacaagag

SEQ ID NO: 53333 - DNA, 439 bp, Glycine max
  unsure (1)..(439): unsure at all n locations
agctngtaatgtgactgggctaacaatgatatcatggattttctaggattcanaacttaggatctaggagagcattcattccccaaaattattaacaaaccacaacttataatttttcacaacaccaatttttttgctttgctactcttttcagcacattcatttcctttgatgatggtttaccccagcttttattctttaaagtaaattaatattttttttttttgcaaatgtaactagacattcatgctaggctggagtaaaaccatgttttgtgactcaatttaacttgtgttgtttattcattttcctacaatagaaaatcacccaaaaatattcccccaaatttggaataaatttgtctggatccatcagtactctcctacaacctataatataaaaataatacgatgaaacctagagtatctaatagaataat

SEQ ID NO: 53334 - DNA, 328 bp, Glycine max
  unsure (1)..(328): unsure at all n locations
agcttagcccatgaggggatggaccttntctagtcttggagaggatcaataataatgcctatagggtggacctcccaagagagtatggagtcagcaccactctttaatatactgagttaattccttttgcaggtggagctgatatagaggaggaggaaccaacagatttgaggtcaaatcctcttcaaaggggaggggatgatgcaatcctccctangaaaggaccagttaccagagccatgagcaagacgctccaagaggattgggctagagttgataaagaaggccttagggttctcatgaaccttatggtagatttttgacccat

SEQ ID NO: 53335 - DNA, 313 bp, Glycine max
  unsure (1)..(313): unsure at all n locations
acactactagaanatgaggttnttacatcggttatttaagactttcaacatagattattaaccgatgttaaaagtaccaatgttgaaagtattatcgttaacattggttttccaaaactgatgttaacgaataaatacaacatcgattatttaaatagccgatgttatatgataagaattatcataaaaagaaagttataaatctatatatcaacatcggttttttaaaaaaatcgatgttaacctccacagttaacatcagttntttaaaaaatcgatgttaactggcactaacaacatttgttttctatta

SEQ ID NO: 53336 - DNA, 334 bp, Glycine max
  unsure (1)..(334): unsure at all n locations
tcgattaccagtgactgtttctgaanaaatcaaaagatgtaactcttcaaaaaggttntgactntntcaaatgggttttaagtttttctaaaagttataactcttcagaatggtcttcttgaccagacatggagagtctataaaagcaaggctttgttttgcattttgaattaatctttctaacaacaatcttgaatacttttgcttttccaatcaatcctttacaagccttgaaatctctttgaagttcttcttcttcttcttgtgtaccaaaagctntctgaagttttctggttttctaaaccttgaaaacttgtgctatntatcttttcat

SEQ ID NO: 53337 - DNA, 462 bp, Glycine max
  unsure (1)..(462): unsure at all n locations
gcttanattcattctatgcacnnctaatgtgtccattcttgctntgtattgcttcatcttcattcttctactttcggtattcttttctttcattntaagcgagtttcaaccgaacgtttaagtcataatcgcacttaatcaatgtttaaatgaatttcaaccgatcgtttgtgttgtaatctcngttaatcgcctttaaaataaaattcaaccgatcgttcatgtncgaacctcggttaatcatcaaagaggcaagtttcaaaccagacatttactttgaaaatgagttgggaaataaccaagtgaaactaaggctaaaatcaactcacaaatcaagcccttttccacaaaatggtcaattcaaaccgtntcaaggtccaacgccttaacggtctttnnttactttatcggttaaaataagccgtttaaaagtctaaaatcaacgctccgcataactttact

SEQ ID NO: 53338 - DNA, 369 bp, Glycine max
  unsure (1)..(369): unsure at all n locations
gtttttacatgggaagcagtatctcatacttatcccttttacatagtgttctagagcaacaatacttttgtttatagtgaaatctggaaccaattctaacactagtatgaaagctccaattcttggagctatggggaaatctttgtgctgtgcaagaaatgaggagggttcatgatgtagcatcctgaatggagggattaacagaaaattcaaaactttggagaactttgtagcacaaatcanaggtcagaaaaccaagattcgcacctgaggatgtggaaaagagatgttagagcacataatggcttccccaaacaggggtcccaaaacatctgcaggacattctgaggacaatgcatagcatgatac

SEQ ID NO: 53339 - DNA, 362 bp, Glycine max
  unsure (1)..(362): unsure at all n locations
tgaaatttaaaatatggtatttactctctggtaatcgattaccagaggatgtaatcgattatcagtggccaaaacgctntctgaaatgttnttaaatatttttgaaagcatgtaatcgattacacaattcttttaatcaattaccagcagttgaaactgtttataacagctattaaaaatttgaattcaaattttaaagcctgtaatcgattacacaatgcttgtaatcgattactaggaggaattttcgaaaataactctcaagagtcacatctgttcaagagtttttttaatagctntcanaagcctataaatgggtgacttgggacacgaatttccttagagtntttctacacaaagag

SEQ ID NO: 53340 - DNA, 361 bp, Glycine max
  unsure (1)..(361): unsure at all n locations
attattctcacaagaacttgataatacttatacaaatattagaagttttactaattaaactaaaaaatgaacaatgacgatttgaacacgatattcaataataaagataaattaaaacaaaggtacaagttataatatttttgggatttnttacaagcattcaataaaatgatatgaaattcaaatgacaaanattatcggagttagatttcaccaaatcaaactctccttacactaagataacatactcaacttgttattcaatgttaatataagacatagttcanaaatgatattntaatccttaattccttaggtgagaatatctaagttcttccattanaagtcaatctctttgata

SEQ ID NO: 53341 - DNA, 455 bp, Glycine max
  unsure (1)..(455): unsure at all n locations
gctttctttctgtgtcattagtctattcttctttttacaagtgatntttttctgatataattattttctttgtattcttcattgataaatttttgaaaataaaaaaaaagatactgcagtttttaaaattgaccgttttcaattgttaattgtaaaatctagaaaataaaaaatattcgacgattttttaaactgacagtttttaatagttaaattggacggattcttatgtgcagaagcaagataagtattacacggtgcgttagtaatatagaccgtccgatattgcaagtgaattttaagtgaatgctatttgtctatttgtattaagtagaaggggtgcagcgctagtgaataataatcatatttttaatataaaaaaacgcttaactaaggttttatatttaaaatatacctgttattataactatctacattcataatgtaattgaaac

SEQ ID NO: 53342 - DNA, 243 bp, Glycine max
  unsure (1)..(243): unsure at all n locations
agaaggacagaagtggaactttgaagtgtatctcataagactttcattcatcaaagttacaacaagtgttacacatgcttctatttatagactaggtagcttccttgagaagctttcttaagacaacttgcttgagaagctntcttaagaaaacttccttgagaagtttctttgagagaacttccttgagaagctagagtttagctacacacacccatctaaaaactaagctcacctgcttga

SEQ ID NO: 53343 - DNA, 401 bp, Glycine max
  unsure (1)..(401): unsure at all n locations
gcttgactcacaccanacatggcaagttcatcatgctntcaacaanattcttcacaaataactcatgaagcagaaacctagcaaaactacccatcatatctcccaaaacccaatacccacgaaaatcaagtgagaaagaagtctacccaaacctgaaatttcgaagtcccacacgtagagatgcgcttcacgactccgaaaatgccttcctttcgcgatttggagcagaaatggctaccaaaggttggagctttgttggagcttcaatggtggaggaagaagaagagaatggcaacgtgagagagagagggagaaaggcttctgaaattntggggctgagtgaggagagagagtgtttgcttttggataaaaaaaggctcttctcttttcttaatatttat

SEQ ID NO: 53344 - DNA, 361 bp, Glycine max
ctgagttgtagctacctcatgcactcctctaatgattataacatcatttctggcgctaaactgctgggagttggaagccatcttctcaattaaatgtctagcttcaataggagtcatgtctccaagggctccaccactggcagcatctatcatacttctctccatattactgagtccttcataaaaatattggagaagaagctgctctgaaatctgatggtgagggcaactagcacatagttttttaaatctctcccagtattcatacaggctctctccactgagttttctaatacctaagttatccttcctgatggctgtggtcttggaagcagggaaaatgttttctaagaatactctc

SEQ ID NO: 53345 - DNA, 458 bp, Glycine max
agcttctcacaaattcaatggtatgacttttacacaattgtccgattcggggacataactcatctagacgctcgaaattgaacaacgcaagctctcgagaaattcgaatggtcataacttttcacacggatgtccgattcggggacaaaactgatctagacgctcgaaagtgaacaacggaagctctcgagaaatttgaatggtcataatatttcactcggatgtccgattcgaggacataatatatcgagatggtcaaaattgaacaacggaaactgtcgacatattcgaatggtcataacatttcacacagatgtccgattcggggacataactcatctagatgctcgaaattgaacaacggaagctctcgagaaattcgaatggacataactcttcacaccgatgtccatttcagggacataataatatatctagaacttcgatattgaacagcg

SEQ ID NO: 53346 - DNA, 499 bp, Glycine max
  unsure (1)..(499): unsure at all n locations
agcttcacaaatataaatttactatgaagtgtantctagggaatgtcanctcaattatgatattcgtagtattgagaggagggaaacacacggaatttatacaatatatatttgaagtgagtgtatagttatgatgggggataaagggaataaataataaaaagaaaaagcatgcacaagagtaatatgtattattaacaacagcatagtatgctattcgagaaacttaacaatattaacattagtgctttcaatacnncaatccttagaatgagtggggtgtttacactaagaactcctagtagtccattttattccaggaatttgaattattaanagtggaagcaccagtgagaacaatacatttcaaaggagcgtaacttatgagctaaaggaaaaacagtaacacaaagtaatagtatatacacatagagaaagttgcatgaagactcagcaatcatattagttcaatccattccatgtgatataccctcacaag

SEQ ID NO: 53347 - DNA, 344 bp, Glycine max
tgacaatgcttactaaggcgagctgcccggtgagtataatgatagttccaccttcaatgtctctgatttatcttattttgatgcagatggagaatctgatttgaggacaaatccttctcaagagggagagaatgatgatgacatgaccaagatcgagggcaaggatccacttgcaggacttggagggtctatgacacgggctagagcagggaaagccaaggaagctcttcatcaagtgttgtccatactatgtgaatacacacccaagtttcaacgagaaaagtccaaagttgtgagttgtatcatggtccagatggaggaagactagatggcaccactttgtc

SEQ ID NO: 53348 - DNA, 371 bp, Glycine max
agcttctccttcagattcatcaaacggccacttgttatagataaaggtactggaatgaagttccttgttaagctaccttgagaagaatgattggacatgttatacgcaattagggcatgacgatttacaggttggccacccccggttgaataaactaaaaagcacagcatcccattgcatatcacactctcattaccacctcttcaccccatcaaaacttccgttaaagaggtcacccaggttgcattttctgaatggtatagatgaattgagatatcccactggacaaagttctcagggacttgtttagattttacaattgccacagtataacagtgagattccctgttcactgagattgctaatgcact

SEQ ID NO: 53349 - DNA, 206 bp, Glycine max
tgaatctatgagctacagggagagatattggctgacatagtatttgagaaaatactaacaaaactgaacatgtgcctatgtatgttatgacactacttgtgatatctgagaataataaggacaaatgaccggatggactatactttcggatgaatagacgtgctttattttgagagtatgaaactccaatacacattctctatgat

SEQ ID NO: 53350 - DNA, 472 bp, Glycine max
  unsure (1)..(472): unsure at all n locations
agcttgcaagtcagcactgtatatgatgattcactcaagtcagtgtgataatttcactaaggaaagatcaatcaaaaaggaaagtgtactactntaatcataatcactcacccattttcaaatgtgggagcatacataagctcaaattttaaaattacagctgttgtaggtaaaacctgcaatttaggaaccacaaaaacacagttaaattagataagaaaattgaattgaagagcaaggtagtcacaacaagtgcactcttaattaaagaattagacagctctgtgttcctccagctatagtgatcctgttcctgcatcagaacatgatctgataggatcacatgggaattgtgttcagacttgtaaaatcacacactaacatgtccagcagaagtctcaaactccaaaaaagacatgttggtaggtggtgctgttaaaataaaacacaccagacaaaactttctatcatg

SEQ ID NO: 53351 - DNA, 328 bp, Glycine max
  unsure (1)..(328): unsure at all n locations
tagatctttgaagcttaatgacgtcctttaatggtggttntccaccatggagatgcagcgaaagacaaacgagaagaggtgagaggaggcaccatccactatggaataagccatggaagaaggagcttcaccaccaagatgagccttggataacaagcttggagagaatgcttctatggaggaaaagacagagggagagaaagagagagggaggagcacgaaatttactgaagataaagggagagaagttgaactttgagttgtgtctcacaagactctcattcatcatagttacaacaagtgttacacatacttctatctatagact

SEQ ID NO: 53352 - DNA, 457 bp, Glycine max
  unsure (1)..(457): unsure at all n locations
agcttgtagggttgagtctcatatcggntttatcgattacagtagtctcataatcaattacactattattcgagacaatgattgatttattcaggaatctttgctttaatcgattaccaagtggattaatcaattacttctctctcatttagttgttcaaaggtgaacaagaacactntaatcgattacctagagcatctaatcgattacattattcttgagttatttccaaatgttgggatgaacactttaatcgattaattagataaactaatcgattactttgttgaactaatcaattactttgtagatttaatcaattacaggcagttataaatggtttctctataaataaccaacttgtgttcacatcgatcaatagagaatactcaatacatctcgaaagtaacatcttagccttagaatgagcaagatttcatgttgtcattaatgaata

SEQ ID NO: 53353 - DNA, 386 bp, Glycine max
  unsure (1)..(386): unsure at all n locations
taccttcctcatgcataaacaactctcgaaccattcttttcagaatccgcatacctctcttcgatttttctaacgttttcctcgaataaacgttggtagcaactccatgcactttcttcatgagaagacacacatttacctttcgcctcgtctttccgtcatgagataggttgcaattcaattaattatatatttataattaatgaatctgaatgatatttaatntgattcctttaagaaagatctagaattcaagtcctatgaataaaanaataattgagaagagagaatccattaaaaatgatcagttatgatcaaatattccagcgaatcatgagcaaagctagtgtcaatgataaattattctatataacttataataatat

SEQ ID NO: 53354 - DNA, 231 bp, Glycine max
  unsure (1)..(231): unsure at all n locations
agctatatttaagttgattcctccataatattattaatgtgtgtgtgcgaatttatcccaaaatggtaaattatattggaccactggctaatatgaaatcgagacggcagcaggataaaaattggaatatctattatgattggaggttagatttagagtaactctaagatagtgacgggtgggtgattggaaggactaaagagggaaccccacacttttanctctgtctat

SEQ ID NO: 53355 - DNA, 313 bp, Glycine max
  unsure (1)..(313): unsure at all n locations
agcttatcttctgtgacacaatgctcctattccattaccanaccatcttgagctctttgcacactccttatatatttgagagagaattgctcagtcttgagcacactatcccctgatgtgatccaaatttcaaatgtgaacagctgcggagcttaacaatgcatccgtgctatagagagcaccatttaccacatgtgttactaccgttgtgtattggaaaacaaatgacaacagtcacatgttctctacctgtgtgcgtggcgacacgataactcgcatagccctttgaggccaaaagagatttatgactctc

SEQ ID NO: 53356 - DNA, 459 bp, Glycine max
  unsure (1)..(459): unsure at all n locations
agctctgcctattaagcctattggttcttctttcttatctccttttaattctaatattagccttaatcttcaccaattactgcatgtccttgctatntctaaaaatctgtcaagtgtcagtcaanttgctaaagacatttcagtctttttttgaattccatccaaatgtctgtttggtgaaatctcagggatccaatgagatacttctcaaaggacgtctcagttctgatggtttatacacgtttcccagcttgctgtcaagtccttcttccaaagtcaagacaaactctcttagaactagttctattntaccacatgctattgtaaactctgcatctgtacactctattacagcaaacacttggcactctangtttgggcatcctagtgctgctgttcaaaaacttgtaatgcaactttgtaagataccttttatcaataaaagtgagcttgattctg

SEQ ID NO: 53357 - DNA, 293 bp, Glycine max
cattctttcctttctaagctaattcttaattcttcttgacatcatcaaaatcttcatgagttacattctcccgactttttgatgatgacaaccacctgtacgttaggagcaacaacaaataaaaaatatctatttgcatatagattactccccctctggtttgcaatgattgcttatatgagacagttgaagatttcatattcttcatatgtaaacaaattgtctcataaacaatagataatttttcttactattgtatcctttatctttctctccccctgtggcaacataaa

SEQ ID NO: 53358 - DNA, 191 bp, Glycine max
  unsure (1)..(191): unsure at all n locations
actaatatatagagtgacaacttatacggaagggacgggtgatcgatgccgtacccgaatcaaataaacatgataatgcagtaactaggaagtgatcctatgtcgtttcccaacgagcagtgacaaaccaaatgttcataatatacttgcagtaacagtaacgattgtggggggggggttgtttttntttt

SEQ ID NO: 53359 - DNA, 433 bp, Glycine max
  unsure (1)..(433): unsure at all n locations
gcgtggaagagtcagtcttcctactnttgtttgtgaccacagagtggtacctggagatatgtcgcggggtcaggagaccttgnggacgtcaggtggggtgctattgcccaaaaccaagcttgactaatcccgacccaacccgggcataatcagtcagtgagaacttgtgacgtacctaaaccggcgagctcttggcagtcaaccaataaaagaacaaagtccacgaagcaaggaggcttgtgtggtggctggccagctatgtatcttgngtggtatctggaaattagcctctggtaatcgattaccatttgtgggaaatcgattacaggggttaaaaatggagacaggatgctaaatggcccctggtaatcgattaccaagggtgtgtaatcgattacacatggtgatagggcaatggtaatcgattacaccg

SEQ ID NO: 53360 - DNA, 478 bp, Glycine max
  unsure (1)..(478): unsure at all n locations
acctgcggcatgcaagcttgctacatgtgatgaaaattataataatatcgggagttggtaaaatgcattctaaattgatatcatgtaggtttgtgatcctggatgtcttagtgtattgagacttgagagntttttgctctttgcctctctgatccctgggtcatacttcatagtctgttggagggtcaagttggcctatatgcgataaacaacattacagttttcttatctgcaagaatnttaatactttcaggtaatgacaattttgagagcagcttctctctatgcaatcaagcttttttgaaacaccatccaaatagtacagttagtgaggaccaactggtatccaaggcccacgcatgggccttttcaaacacgtcattcatcactgngttctggtttcagtggctcagctgaagggtggatttgaaattgcaggttttgatgatgcatgcatatagcactaatatatctataa

SEQ ID NO: 53361 - DNA, 407 bp, Glycine max
  unsure (1)..(407): unsure at all n locations
ctgagttgtagttaccttatgcactcctctaatgactatagcatcatttctggcactaaactgctgggagttggaagccatcttcttaattaaatttttggcttcagcaggagtcatgtctccaagggctccaccactggcagcatctatcatacttctctccatattactgagtccttcataanaatattggagaagcagctgctctgaaatctgatggtgagggcaactggcacatagttttttaaatctctcctagtattcatacaagctctctccattgagttgtctaatacctgagatatcctttctgatggatgtggtcctggaagcaaggaaaatgttttctaagaatactctcttcaggtcatcctagctcgtgatggaccgtggagcaaggtaataca

SEQ ID NO: 53362 - DNA, 448 bp, Glycine max
  unsure (1)..(448): unsure at all n locations
agctntcttgaganaacgttcttgagaagctagagcttagctacatacacccctctaataactaagctcacctccttgagaagattcctaaagaagctagagcttagctacacacatctctctaatagctaagctcacctgcttgagatgagaagctagagcttagctacacaccccctataatagctaagctcacccccagttccaaaatacatgatagtacaaaaaaagtccctactacaaagactattgaagatgcgctataatacaaggctaaaaccctatactactagtgggagtgcttagctctactgagctttagaagattgggctaagatttggtaagacataagcacttaaacaatgaaggaaagctggagttgctgcacatgatgtccaacgttatgtcaaggaataagatcgggctgcacaatgcacaatgcaagat

SEQ ID NO: 53363 - DNA, 295 bp, Glycine max
ctctattggttaacttacatatcttccctactccctactctgaacccaacaataattaacttctttggtgggaaggtgggtgatttcaccagtgtcgcgctccaccctctgcaagcaaacaacttcgaccgcaacatagcaacatcgctgctggtagagccgagagcaacatgcagatggatccgagagaaaagctcatgtgctgccaacccaccccgacactattgttggattcggaatcctaactccaacatagtggcaacctgctgcttgatccaaaaactcagtcccttct

SEQ ID NO: 53364 - DNA, 319 bp, Glycine max
  unsure (1)..(319): unsure at all n locations
cacctgcggcatgcaagcttcatgaacaacttgtgataactctctctcttccaacctatagttctaaaaatgaaatctcttggttttacaagtttgagaatgttgtctcagcttcaatgggattggaaaatggagggaaatttgaatttctattcaaatttcacttggatttgaaattgaatttgtggagccaaattntggagccaaaatntcaaattatgattagtgaattttagttatggttcagcccactaatccaagatcaagtccaagaatctccactaagtgtgcttaggtgtcatgaagcatgtaaagcatg

SEQ ID NO: 53365 - DNA, 434 bp, Glycine max
  unsure (1)..(434): unsure at all n locations
agcttgcggattatccttctaccgaacactgtcgtgtntctgtctaggcccggattcaaggcgggctgcagcaccggctccgcttccctaactgtactagaggcggntgcggnggctttatcctctatggntttctgaagttttaacatgacctctgagatggaagctatttgatcttttaaggccgatagatcggccttcatttgttcctgcacgccctcnttattatccatttttatggatcgagtgttataggggtgctntggtgttttcttagttatgatgaaattcctaaagaaataaacaacggtgagtatgctaccaaaacatgagtatgcaaatggatgatcggagcacttggatccaccccaagaattttatgataacgtaatgagtccagaacttctattttataaaagaacatagcttcatct

SEQ ID NO: 53366 - DNA, 434 bp, Glycine max
  unsure (1)..(434): unsure at all n locations
agctgatgagaacaatgatgcctctatcatttcctaatatgcatgcgaattatgacgcatcatcaagaatcaagccaaggctattgtgcaagcaatcaatggcgcacaacacaacccataattatgatgatggatggctcaaattctcacagaggtgaactcatcactttcaaattgagctttctaaactatcatgacatgtagaggagaatcaaggatttcacgtcacaggatgtcaagaacttgtattatcaaaacaattacccatttcttgaacatattctataattcaaagaaaaacatgcaaagttgtacatgcacacagaattgacccanaatattaaactataaatccgacgaaactaacaacattataaaattaacacatctaacatagtaacagaaccaacagaactagcataaccaaagaacac

SEQ ID NO: 53367 - DNA, 291 bp, Glycine max
ctaactgggtcgctctcctacaaattgatgaagatgctttgggactaacttgaagaatcactttgggaagcccaaattacaagacacgaaccatccattcccgagttgatcaatcttggcgaactattaatattgggttgatgagataataattaagtccaacatgctcataaagtttagccaccgttttagaataagatatatttttcgttattaattgtattttgggcctatgttaggacttgtaatggactgctacctttttattgttatttttaagtcttttaatta

SEQ ID NO: 53368 - DNA, 392 bp, Glycine max
agctggcttgtgtggcttctatggaggctgtatctttgtgcttcaatgaggtcctttaatggtgattttccaccatggagatgcagcggaagacaaaggagaagaggtgagaagaggcttcatccactaaggaataagccatggaagaatgagcttcaccaccaaaatgatccttggataagaagcttggagaggatgcttcaatggatgaatagatagagggacagaaagagagaggggggagcacgaaattgaatgaagaaaaagggagagaagttgaactttgagttgtgtctcacaagactctcattatcatagttacaacaagggttacacatgcttctatgtatagactatgtaccttccttgagaagatttctggaaaaactttc

SEQ ID NO: 53369 - DNA, 315 bp, Glycine max
tatatcttgcccggcgtagcgatttctaccataacgcttgattgatgcaacaacgtttggtagccacctgactacgattattttagcttattgtgtacctttattatatgacgacgaatactatactgtttaattatttaatgactcaaagtagtcttgaatttttaatatgttaacatatggtttttacgttgtctcttattatagtatgacctaagttaaatcatgtataggtctgatacacgactgtgatgtcatattgctgacccaagtactttatgatgtttcgacatactctcactgctgctctctctc

SEQ ID NO: 53370 - DNA, 475 bp, Glycine max
  unsure (1)..(475): unsure at all n locations
agctatgcgaatgacgggccttatcttcggccaccacgttactgtccttgttgacggcgggagtactcacaactttgttcaaccacaggtggcgacacagttgggcttaccttgccggcaggcagagtcacccctgcgggtcatggttggcaacgaccaatacttggagtgcaccaaccattgcgaagatgtttcagtcgtgattcaggacacttattgtaccctccatttatacatacttccaatttcaggcgctaacattgttttcagtgtgcaatggcttaaaacgttgggtcccgtgcttaccaattataacacattggccatgcagttcttttatcaagactgcctcgtggtgctccaaggtgaacatgaaacacagtcaggccgtctcacccacaatcaacttcgtcggatntgccatcatcagtcaaacacatcgtacttccatataacgatgttgactgaccctttg

SEQ ID NO: 53371 - DNA, 368 bp, Glycine max
agcttagcctatctgcgtcttctggcacactctaaattttgacagtattgtatatctcaatatatgttgtcaaatatgcatatgggtcctcgttgggtagaccatgaaataaattccgttgtatcagctgaattaaagaatgtgggtatgtgatgttgtgtgcttgcacctctggccgcacaatacttgtaaagaattgcggcacaataaagcttgagtagtccttaagagtgactctgcgaggttgatcttcatccatcctatgagcttcagatgcacttgtgtgagattcccttggttgtgggaaaatagaagatgattatgatgaacaaggctcctcttgaataggtactgcactctcctgtaag

SEQ ID NO: 53372 - DNA, 314 bp, Glycine max
  unsure (1)..(314): unsure at all n locations
acctgctgttcgacgggcatcgttcacggctagccaagcagcttcaaaatctgtacaagttccaaagggctatcttgcagtgtatgttgnggaagaaacaaaagcggttgtggttcccgtatcatacttgaatcagccttcattccaagatctcttgtatcaagctgaggaagagtttggatatgatcatccctcgggtggcctcacaattccttgcagtgaagatgttntccaacatataacttctcacttgaattgagaccacacatctcactgtgggagactcacatagattagtagacattntacactat

SEQ ID NO: 53373 - DNA, 426 bp, Glycine max
tgcaagcttctagtatagttccagactgagatttttcaacacttctactccttttgagtgagagaatcagaatcttcagagcaaatgcaagtgacaccaacaaagtgtggccatacaccatagagttagaaatagagaaggcgagtggcatagaatagcattctccaattgatcgaattaaagatacaaatgagagagggtttgatctgtatttacagagctcattatagagcctacaatccaattaaataactacattttaactaatatcctgtaacaagaacagttttgtgatttttagacttcaagtcggaattcgaaaaggctgtgagtgtggtaggcgactcttcatctaaaggaatgttcatagactcttgctatgctcactgccaaacagaatcacaggagacatggtataagagtgac

SEQ ID NO: 53374 - DNA, 401 bp, Glycine max
  unsure (1)..(401): unsure at all n locations
aatacacttncaaggcattcaacacttactatgagcaacatggaataattcatgaggtaacgtcaccttatacatcacaacacaatggcttggcagaacgaagaaatagaactatccttgacatggcaaagagcatgcttaagcagaagaagctacctcattcattctggngagaagctatgagcacaacaacttatttgttgaacaaatgtcctactaagagattgaaagagaaagtcccagaagaggtttggtctggaagaaagccactggttagtgatcttaggatctttggatccctatgctacaaacacattcctgatgccaaaaggaggaaattggaagacaaaagtgaaccaatgatactgataggctatcatggtactggtgcctatagactc

SEQ ID NO: 53375 - DNA, 415 bp, Glycine max
  unsure (1)..(415): unsure at all n locations
agctntatgatagcctatcatctgcaagccatgtgccanaagtatatacaaaagcaataaaaaatatgcactcaactccattccccccctttttttatctttctttntactttgcacagcttctattattttctgatntagagggtacccttacagctctgcacacagatcatcatgatcaagcttatttctagctaacatgtggtctctccctatatgtaaaaagttagcagtttcgtgtaacgtttaaaataacaccaccaatattatttttatttaatgtctaatattggtgatcaagtaagaatgtatcactttcctttntatactttatccaatcctaataataatgtagcttactactccacctacgtgcattggcatatattaatatgggtgaggacatctcgtgggg

SEQ ID NO: 53376 - DNA, 475 bp, Glycine max
  unsure (1)..(475): unsure at all n locations
agcttaaagatccagcctccatagaagccctacaagcaagcttccatcanatggcttcaacaactgtcataaaaaatactntnttagtagtgattatttttctacatcatgaaaccaagctcaaataattctaactctcttcattttctctccatcgcataactatatcaatacaaccatcatctttaattactaaatttattccattcgaaaccttggctatatccccaaatttcattttgggaaacccttaatccaaattgaacaggcatagagcatgccaaagaacaagtctaagaagacaatctgcataatcctcttgacatgcttcatagggttaatgctcttgaaagcgccagaacttacttcgccgacatggcgatcaacctcaatgatgttgtctcagcacgcttcatactaatcatggtggcacctgtgtggatgtgaaagagtgcctaccctcatgcatgcaaat

SEQ ID NO: 53377 - DNA, 426 bp, Glycine max
  unsure (1)..(426): unsure at all n locations
cgttatgtgagatagagatcaacatgttagctcatatcagtaggtaccaagatgaattaaatctagccatggcccatgagcacaaagtggcagacgaatatgcccgagtgtacgcggaaaaagaagctagagggagggtgatcaactcgttacatcaagaggcgacaatgtggatggaccgattngctcttactttgaatgggagtcaagaacttccccgattgctagccagggccaaagcgatggcggacacctactccgcccctgaggagatccacggactcctcagttattgtcagcacatgatagacttaatgacccatataattaggaaccactaggaagtttgtattgtcgctcagatcttgactagttataactntntgaataaaatgagttccttgaaggggaatctcctcgatagtc

SEQ ID NO: 53378 - DNA, 476 bp, Glycine max
  unsure (1)..(476): unsure at all n locations
agcttataattaaatgtatagaanaataaatttatctcttttaaatgtcttattgtaaaatatatttntaaataagttatcataaatgttatattagatcttaaaaatatattntttgtgtgactttcttaaaaatatgtgtatatcatataaataattcttataaaataaatattcttgcttctattttagtatttaattaatttttattaacaatagataaaacacgggtaattaagttttctcttttgaataattaaacaaacatcttacatagaggagtataatatctttaccataatgaaacatcacattaataataattcattgaattgaataaaacataaccatacactcttaagtatatagatatgatgagtgctatcagcacactctcaaacatctcactcttatacacatgcactctctcgtattggtccacctcagcttaacttataactcattacttggttagt

SEQ ID NO: 53379 - DNA, 228 bp, Glycine max
  unsure (1)..(228): unsure at all n locations
ctcttacggatcaagttgatccggaagagtattaacaagcttacggatcaagttgatctgtaaaaagattacggatcaacttgatccggaagccatccgtacgtccgcgacgaacaaacgtcatctgcgtaccttggttgccgtcaccgaccaccgcanagcttgacgctgganacttcaccttcaccgctgcactcaaccttgctacccnctcgaaccagagacaat

SEQ ID NO: 53380 - DNA, 498 bp, Glycine max
  unsure (1)..(498): unsure at all n locations
tcttacagcacctgcggcatgcaagcttctacttatgtggcagggcgggctttcttcaccttcttgtctccaacgcgaactttgaccattgttcttccttcccgcaatgcttcttttcatgtctgcctgagtgggcttatagcctaaaccatacttcccacgatttccttgagtatttatcaggctagttatgccgccgttgttttttcctaaacccatcccgggttcaaaaccgttccccaacataactcgggccatcattaccgctgcatcggacagacaaggttgcccaaagagggagtccacggaggaaatgctgaccacctcaaaagactgganagcagtttctaacgattcttctgcggcttccacataaggcatggaggatgggcagcttaccaagatatcttcctcgcctgacacgatgaccaagtgcccctccactacgaatntcaactttnggtggagcgtagacggcacgactcccactgagtggat

SEQ ID NO: 53381 - DNA, 159 bp, Glycine max
  unsure (1)..(159): unsure at all n locations
aaatggaactgctaaggtagtgccttattgtggcagttgaatgactccttaccatgattcctatgcagtaacatgacgttgcgtttaaggctatgcactacggacttctcctacccatacaaatatanattcaagacctttggcttacgcaagaccact

SEQ ID NO: 53382 - DNA, 355 bp, Glycine max
tccttcagtcacctgaggcatgcaagcttgtgcttgttctattaaaattcctatgatcatgagcatctaggtgtgtcctacaatgacttgcgaaacaaaaggtgatcatataacaagcagagatttaaaaggtactaggttgcctcctagtagcgcttctttaacgtcttgagctggacgcctgatgacttgtcgatcacggacctagtactttgcttaccttcggctttggacttggtcgcctattggtcgaccatgtgtcgtaggcaatactctaacctttttgtggatgagctgaggggctctagaagtggcgacagtgcatttattgcctgttgctggccatccccaggct

SEQ ID NO: 53383 - DNA, 407 bp, Glycine max
  unsure (1)..(407): unsure at all n locations
agcttgtgctcgacgaccttctatgccgttttggctatagntgaacccttgaaggcaaagcctcgtatattgtctcgtaatactctgaacaatatcagaaatatgagtttcaggaaaaaatagcaacgaagcatccattataaccacaaaatatcagacaaataaaaacataaacaccgttttaataaaatcaaaatagaagaacctctatcttcctcttaacttcttcgacaacttctttgccaaagccgccattgttactgtagcctgtcccaaaaataaaaccacaaaaaatcagatcaataaaagagaaagaaccctaaccaaaatcacaaaaaataaaatgaagatggaagctctcagcagctttaaaactcaaccaaatacaaaagataaaagtggaagtg

SEQ ID NO: 53384 - DNA, 364 bp, Glycine max
  unsure (1)..(364): unsure at all n locations
atgtaaagatccaggtacattctacataccttgtattatagggaacagtaagtttgacaatgccatgctacatctatgagcttctgttagtggtatgcctttgtctatttttaattctctatctcttggncatctgcagtcaactgatgtggtaattcatttagctaatacaagtgttgcctatcctgctggtttcatagaggatgtcttacttagagttggtgaactgattctccttattgatttttatatattaaatatggaggaagggatttctcaaggatcagttctcatcattctangaagacgctttatganaactgctagaactaagatagatgtctatgtaggctcactatctatg

SEQ ID NO: 53385 - DNA, 426 bp, Glycine max
  unsure (1)..(426): unsure at all n locations
tagctttannaaacacttgtgtgataaagtgcgtcaaagaagacttgatgaaatacaagttaaagcttaagatagaagcatatacacttggtttatagtggttcacaaaaactaagctatgtccaattctccttcataaactgtaaagtattacactaatcaaaattgattacaaaataagtattctaacccgccaatgctagataaacaagtattctcaagaccactactgacacacttcttagactccccctgaatctaagaacacccaagtattgttttgtcatcaagccactcctggctttcacaaatagaatgtttgattgaatataaagattcacacactgaaagagtggataaacaataagcttgaatacacaagataacttttctaagcaaaggataaaactatttctagtggattat

SEQ ID NO: 53386 - DNA, 357 bp, Glycine max
  unsure (1)..(357): unsure at all n locations
acatgcncaactcctttgagtgacatttgtattggttgtaactngattggtgcatcttagtacatttcatatcgattntgcattgtgcatcatcatagtgtgtgtgaaggaaattttctaagttagaaaaatttctttagatgcaaatactgcgtggtttaatcgactactgagttgtcgtaatcgattacaacaagttgtttgaagcttaaggagttaagtctcgtatcggtttaatcgaatatggtagtactttaatcaattacactgttgtttgagacaatgattgattatttcaggagtctctggtntaattgattactcggtggattaatacgatacttctctcttgttaaa

SEQ ID NO: 53387 - DNA, 406 bp, Glycine max
  unsure (1)..(406): unsure at all n locations
agcttgcttatgagttaattaaacctgttgtcatgttcaaccaacaacgtctttntagatcttatggaaatggaaagaaccggagagaatcaagactttcttatggaggttggctcataagattcttttgatgaacacttgcagatttaaatatcaactaacgaatgatcctcctatgctcgatatgcaagtgtcatgaagatgtggctaagttagtgttatgagcagaaantttgctcaatggatcctagcgttcgaggtctaggtacctccagaaagagagattaaggagaggaaaattcttgttgtattgcttgcccgttagaattacattgcttctatatttatagatgttctgctacaattctagaagataaaattctaacaaattttggcatttctaaca

SEQ ID NO: 53388 - DNA, 448 bp, Glycine max
  unsure (1)..(448): unsure at all n locations
tcaatcatttccatatatgcatgtgaattaggaagcatcaacatgaatcaagccaaggctattgtgcaagcaatcaatggggcaaaacacaccaaatgattatgatgatggatggctcanattctcacaaaggtagacttatcacttccaaattgagctntcaaaactatcatgacatgtagaggaaaaacaaggacttcaaatcacanaatgtcaagagactnttattttcaaaacaattacccatttcttgaacatatcctataattcaaagaanaacatgcaaagttgtacatgcaaacaaaattgacctgaaatattaaactaggaacccaacataacaaacaaaattaacaaattaacacaactaacaaaattaacaaaaccaacanaactagcanaacccaagaacacttcccccatacttaaacaacacattngtcacaat

SEQ ID NO: 53389 - DNA, 428 bp, Glycine max
  unsure (1)..(428): unsure at all n locations
agcttgtcacttttttgagtcactcaggacatccctaagtttacttcaattggtgtctttatagaacttgtcttttcttaatacacttaagcaaactcataaatagggattaattgaaaaggcttatgatttgtgtttaaaaggcttgtaataattaaagcatcaagggttttggactcaacaaatttcccataaaataagatgtaaaaacaattatcaaagagacattggagaacattcaccatacaaggatagagagcacatatgaactaatcaaactgaatggtacacagattgaaatcataagggactaaacaataaatatctaaacttcatataaccggttaaaattacctgctacaacaagtcaattntggtgattcatcgtgcacttgccattttcaaacatttctaanacttatgatggg

SEQ ID NO: 53390 - DNA, 406 bp, Glycine max
  unsure (1)..(406): unsure at all n locations
gcaagctggtaaagtcccaatgaaccttccttcttctggtatttntgtcactttaggttatgcagttcggatttaattatctcactctcaaataagatatcttactcctgtatgatatgttctctctctctctctctctcacacacacacacacacacacatatatatatacatataatcttttccgatttggttttattaaattatgtttaaagcaataaattcaattagtatctttacaattcgttgattgatttggtttataaaatgatgttatgaaagcccatatatatatatatatatatatatatatatatatatatataatagccttgtatctaaaatagaaaaattaagactaaattagaattttgatcccncttgagtttcacatctattcctctta

SEQ ID NO: 53391 - DNA, 431 bp, Glycine max
  unsure (1)..(431): unsure at all n locations
gggatggaanatcgtaatggttcattctttggttngngagttaaccatattgattgtactaattattgtaaagtctagactattagtaacaagttgcaaaanaaaaagaaaaactaagttttatagtttgtttattattatagaatatgacatgtggacataaggtagttgggtgataaagatggtttgggagaatagacaaaatatccagtgttgaaaatgttcacaattntatgcatttatatggttaactgtgcaataaattcatttaatcaacaattttcttgtatcaanatttccccaatatttctaatttaaaatatgtgattgattataaattataactaaactacattgtggtatggttaaatatattatacacatacaaatttaaaacattntcaaatatgctaattgggattataagtgag

SEQ ID NO: 53392 - DNA, 441 bp, Glycine max
  unsure (1)..(441): unsure at all n locations
agcttgcttctacaattaggccatcaaattctaaccagaacaacatacattgtatgaaaatataattcctaacactattttaactatcaactatcctagcatcatgcaatcagaacaaaaatcaaagctttaaagtaataaactaagttgactaacctaaggcttaaaaaaaaaaaataaaaaataaaaacaaggttaaaggaagcttacttggtgttgaccctcttccacatttcctttttccaaaatttgtaattactctttttatgcggaagcgngttaccggaaagtgcctcggatcgccaagtaaataattaaaacggaatgatccgagtgtcaaacacagggaacttattccttnggcanagctttgttcaacaatcatgcattttgttgacagaaaataataattgttgaattgaagtanaagtatgatatatc

SEQ ID NO: 53393 - DNA, 319 bp, Glycine max
  unsure (1)..(319): unsure at all n locations
ntccctctntgaacaaattcccctcattcaaatagtatctatcttgggcctttctcccacaattcttgtaaatgggagagaaatgttcatctaaagcatacaagtccctaatgttatcaaatcctaaaatttgagctcctagggagcaaaacaatgtgtgtctcctagagagggcatcagctaccacaattgtttttccctttttgtatttgataacatatggaaattgctctatgtactctacccattttgcatgccttttgtttaacttgctttgccctctaatgaacttaagtgattgatgatcactatgaatgac

SEQ ID NO: 53394 - DNA, 484 bp, Glycine max
  unsure (1)..(484): unsure at all n locations
agctntcataaaacatganaatggntntgtgtatganaagctggcaacaacatcctgagtaatgaatttctgagtatagcattctaaacaatagcattctgagtattgcaacaacataacataaattgagtttttaaaaataatagtatttgagaaatgctttgacttaagtaatgatgttctgaataagagcaaatagaagtgatcagaatgtcacaaaagggggggggttgaattgtgactntgccaacttttgtaaaactntaacctttctgaacttttactaaagattaccatggtgttcaaaaagtcatgacacanaggttcaagcacttaaaaagtttgactttctaagtgattagtcataacactcattattaaatgtttgatatgattataagaacctaatgtaaatgtgcatttgctcatgtttcagaagatcattacatagataaatgtatctcgcagttggtatgaaaacaca

SEQ ID NO: 53395 - DNA, 249 bp, Glycine max
  unsure (1)..(249): unsure at all n locations
tgatagcacgttcacacaacccttactccccctatcttttggcatgtatgcctaactntacttaatgataaatntctaattgatttctaacccaagttctctcccaagttctctcccncttttgcaacatanaanagaactaagcaacacaattaanatccanacagagccaaacaatcaaccaaaataaatccatacattgtcataaccaatccanaacanagtcgagagatataataatacttaata

SEQ ID NO: 53396 - DNA, 466 bp, Glycine max
  unsure (1)..(466): unsure at all n locations
gcttaacatattntagaataatgcttcacatgtttcttctttagtcttaatcatttaataccacatacttaaagcaaaccattagtagtttaagtctagtatagacttagaatttgtttcttaatagtttgttgtcattaaaatcataactttttaaagggttctatttcaacaatatttaggttaggaagacaaacctaagtaattaattagacccaagtaatgtttggtgccaactngaatcgttacatggacaagctgagaaaatgtggaagatatgagggggttcgaacattaagtagcatggctttgttgatagtgatgttggcttaattgtgtacataaacctgcaaggtgatctataagtggtgcatgacttcatgggtaagagcttggcatgcatgtctgtaatgtcaacaacatcaaaggtgaggaagtggccaagaatagaatgaatgaactaact

SEQ ID NO: 53397 - DNA, 332 bp, Glycine max
  unsure (1)..(332): unsure at all n locations
gtgcattcatagtgacaccatagtcgtggagggaaactgcagtgttgtgattcaacgtatccttccaccaaaacataaggatccaggaagcgtcactataccttgttatgtaggtcaagtttcagtagtcaaggctcttattgactcgggagctagcattaatttgatgccgctttccatgtgtcgaanacttgnggagttggagataatgcctactaagatgactntacagttagcagatcgctctatcaccagaccctatggagtgattgaggatgttctggttcaggtcaaacatcttatctttcctgcagaatttgtggtatggatat

SEQ ID NO: 53398 - DNA, 476 bp, Glycine max
  unsure (1)..(476): unsure at all n locations
gcaagctggtagtatttgttggtataatttgcctgttccattatgctcttaatgtctttagaggttatttcctcattgacatcttttgtcttgaatggaattgccatgacaggtttattgttactgtctttgatgtttggtagttgatattgtgttgcgggaggtaattccgattggattaactcactatccttcacttgccaatttgttatgacatttgttgttggatcacctatgatgtcttgtttccaagggtaatctatatcctttctgatggcataagcatgaaaccaatcaaagaaaaggacattaattttgactctttcgacaaattcgtagaacttgtcttnggattgttttctgtttgtacccttgtaatgttggaaaaaccatctcctttggggttcattctccggagaataaaaatctttcctaagggtttccttatccatgctaaagttgtcagataacatcat

SEQ ID NO: 53399 - DNA, 437 bp, Glycine max
  unsure (1)..(437): unsure at all n locations
cagctcgcccaggcgagcatgtgtgcttcctccagaagccacaaccttctggaggaatcttctggagggcccaagtgggcctggttgctatttgcacccccatttttactaagtacaccccctgccttttttttggtgattcttttttcgtaaagttacggaaacttacgaatttcgtaacgatacttgttttctttccgtaatgttacggaaccttgcggattacataatcatcccctttntgacttacggaatgttacggaacctcactaattgtgcaacgatgcctccattttgatttccggtgtgtcacggaaccttacggattgtgcatcaatactttcttttgatttccagcatatcccggaacttcacaaactgcctaatgatgggtgccaagcacctcacaaggaccaaacaaaagttgcatgtcatca

SEQ ID NO: 53400 - DNA, 409 bp, Glycine max
  unsure (1)..(409): unsure at all n locations
gagctntatacatagaggaagttagttacatgtctatctaactactaacaaccataatcaactatcaactactgtttaaccatagttggttctctaatgattgacttctaacatgactaatatataagtacttattaagaaatttatccgagatattagttaatgaatatgtggagtagctgaaatatcgttatgtacatgctctacgaaaatcttcatttctattccgttcagagaaaatagacaaacggacgaatgtctatattctggaacattttggttacatttctttaggttctgtatatcttaaagttacanaattaatttccgtacttcttaatgaangaataattatttaatatgaatgtgggactaattaaattaatttaaacataaaatttagctgtac

SEQ ID NO: 53401 - DNA, 455 bp, Glycine max
  unsure (1)..(455): unsure at all n locations
cttatctatgttgaaacatttgngatgtttatgttcatacaagaaanaataaataacaaaagttttgatttcttggacgatgggtaagatctcaaaggagtcggtgtaattaaatgagttttggtgaatggtagcttgtcaaaaggccttttaatttggacccagtcatgtgatttctgggtctgctagcctaaccttccatgtagggcatattataactgaaagatatttgataatctttacctcggcgtactgaaagtacgtgaattcaatgctgtcagatgtttccttctctcaaaataaaaattagtacattagcaattgttcaagatgaaaaatagtcctaattgagttaatcactattagattcatcactctgcagtctgcacaaatgtgatggctacgtgtacagttcaacttttgatttctatcactatttgcactcatattgtaac

SEQ ID NO: 53402 - DNA, 357 bp, Glycine max
  unsure (1)..(357): unsure at all n locations
ctcaagctttcttatattctcttgcccttcttatatctttgtttgttataatgcaatttntgtagtttgatcgtaaacactcctcgaatgggttaatacagaatcaatgtgacctttcagatttttagcagtttgagctacttgttgtgtgtggctaccaattgaatcaagagaatcatgaatctgtcttgagccatgtgatacatgttctgatttctctttaatgctatctaacttgtgctcaacatattgggctgaattttttaattcagtcacaagtctctcagtttcatatttgaatgcatgtgccctgtgtatataaaactttatagtcaagttgagacaaacaaatcataa

SEQ ID NO: 53403 - DNA, 406 bp, Glycine max
catgcgagcttgcaagtcagcactgtagatgacgatttttctcaatgtatgtgtgaaaatctcactaaggacagatcaatcaaaaaggaaagtgtactactttaatcataatcactcacccattttcaaatgtgggagcatacataagctcaaattgtaaaattacagctgttgtaagtaaaacctgcaatttatgaaccacaaaaacacagttaaattagataagaaaattgaatcgaagagcaaggtagtcacaacaagtgcactcttaattaaagaattagacagctctgtgttcctacagctatagtgatcctgttcctgcatcagaacatgatctgatatgatcacatgggaattgtgttcagacttgtaaaatcacacactaacatgtccagcagaagtc

SEQ ID NO: 53404 - DNA, 324 bp, Glycine max
  unsure (1)..(324): unsure at all n locations
tctttgagcttttatgaagtcctttaatggaggntgtccaccatggagatgcagcgaaagacaaaggagaagatgtgagaggaggcaccatccactacggaataagccatggaagaaggagcttcaccaccaagatgagccttggataataagcttggagagaatgcttcaatggaggaacatatagagggagagacagacagagggaggagcactaactttaaggaagataaagggagagaagttgaactttgagttgtgtctcacaagactctcattcatcatagttacaacaagtgttacacatacttctatttatagact

SEQ ID NO: 53405 - DNA, 366 bp, Glycine max
acacaacgaagactgatagagttgctacacaatgcactagattaacaaataaataattaaaagctaatactcacgggagaattgcagcagagacggaatagctttcaaagtcatgaaccccattaagcagaggctctcttgcactcacaatctcaccacctgaccttgctttctagtgaaagtcaatgtgtttcaagcgttatgaaagggaaaataaacaccaaaagatagcaacaaattagtttggttgccagtaaaacaacacacagctctgcatgtgttagtgtgacagtatctgactgcaagcattcagcctattcttatttgcattttttatagagacaaaataaataaataatcaagagc

SEQ ID NO: 53406 - DNA, 491 bp, Glycine max
  unsure (1)..(491): unsure at all n locations
aagncacctgcggcatgcaagctttcataggtgaaatcatgtgcagccttttcccttatagtcctctcacgaggtggaggttgtgccatgttctcagaatgtgcaaaatcagaatgctcagaatcagaatgctcaaaattataatgctcaagatcaggatgttcaaaatcaccaataacagaatgcacagattcaccagttatggaatgctcaaaatgatcaaaaggtaaaaaatgatgcctaactaatctatgagatgtcctatctatctcaggatcaaagggttgtaagtcagatggattgcctctagtcatacactacattcagcatgcacacaactagttgccttgtcatgtaaataaaggtgtaggttngaactacagctaccctcanatgatatccaaatgacttgagattttgtgagcaaccttataaaatgatgagaagatagcacataanattttagacaaaaatgcaaagtctaactatga

SEQ ID NO: 53407 - DNA, 435 bp, Glycine max
  unsure (1)..(435): unsure at all n locations
ttcacacttaacatggccttcatcatcttcaaactcatgcattcattccataataagagattcatgcaaaaatcattacttaatgctagtcattctctcataattcaagatcacagactcaccgggttgtggttaatgagtaccttcacaatcaaactgttaaactaactaacattntcattcatgatcctaatccatgttctttctcttctaatcactgcatgcttattcaaaatatatgatttacacattccaattcactcaaatcatgtaatcgatcaattcaaaccaacaaacactataattttcaaaatcaaacatcaaaccactggataaaatgaaatatattgttcaaactagcttaaagcaagctacgatgcaatccaaaaactaaagtaaaaccataaactgaaatttaaaactgaacataatata

SEQ ID NO: 53408 - DNA, 375 bp, Glycine max
  unsure (1)..(375): unsure at all n locations
catgcaagcttggtcgcacatncgtcgcatgtatgatatccactcgacaagggttgaagtagaggagaccttcaatcctataacgcaacgtggcgaacaaaaatgggcagttaacttgaatggccattattgtcaatgcggaaggtattctgcgcttcactatccatgttcacacattattgcagcttgtggttacgtgagcatgaactactaccaatatatagatgttgtttacaccaatgagcacatcttaaaagcatactccacacaatggtggcctcttgggaatgaagcggcaattcctccttctgatgaggcatggacactaatccctgacccaactacaattcatgcgaaaggtcggccaaaatcaac

SEQ ID NO: 53409 - DNA, 469 bp, Glycine max
  unsure (1)..(469): unsure at all n locations
gctgttcttggacgacaacgagtgggggatacaggtaaatgcacctttaacattntcttgtatgtgatagtgggttagtgtgtcaataagttgttaatttggccaaaaatctaatcacacgatttttagatgctntattattattaattcagttggttctaataccttctttgtcctcggttctacagctaacgtgtcactgatcttcttgtattcattgccaagaagtctctttaaggtgttacttcaaaccaccttagacaggtttgtgtgtgcatgaggcaataaactaaatgaattggttattagtatacaactntatttctatattatggttggttgtcatttggaaattcataaatttttatgtaactctttccacaaatgttatagggaacacttcattccatttggctntctatataatgcatncaaaagatggatttagtggttccttttgtagtgtcta

SEQ ID NO: 53410 - DNA, 454 bp, Glycine max
  unsure (1)..(454): unsure at all n locations
catgcaagcttgcctgtccgangcagcagtaatgattgcccgagttatgttggggaacggttacgaacccggaatgggtttaggcaaagacaacggcggcataactagcttgataaatgccaaaggaaatcgtgggaggtatggtttaggctataagcccactcaagaagatgtaaagagaagcatcgcgggaaagaagagcggtggtcaaagctcgcgggtgagacaagatagtgaaggaagcccgccctgccacataagtagaagctttataagcgcgggtctgggagacgaacgtcaagtggtcgcgatatatgaagatgatgttccgagtacattggatntggtacgaccatgccctcctgatttccagctgggaaattggcgagtggaggaacgccccggcatttacgcaacgagcataatgtaaacctttacggtntaaaagctctat

SEQ ID NO: 53411 - DNA, 385 bp, Glycine max
  unsure (1)..(385): unsure at all n locations
ttctcaagttttaaatcatctttagatagattcttgaaatctttttcataggttgttgtaagcttttgagagaattgatgagttagataaaatctctcatgataagttgtactaagagattcagggtcgtggaaatttacctcatcttcctgataagaattagacatctcanaagttatattttccatcaagcatatgttggcttcttcatcatcttcatcagacgaggagtcatccaggtcctcccaagtactcataagaccttatttccctctattcttgaataatttcttcttatcttaactcttttctatttctaggcattcagactagaaatgtctaagctgcttgcactcatagcacatcatggaagctttatctttat

SEQ ID NO: 53412 - DNA, 473 bp, Glycine max
  unsure (1)..(473): unsure at all n locations
gcttgtaggttaaagtctcacgattgtcatgtgctcatgcaacaattgttagccgttgctatacgagacatcttgccaaacaaagtcaggttagccataactcgtatgtgctttttcttccatgctatatgtagcaaagtcattgatcctgtcatgtttgatgagctggaaaatgaggccgcaattatactgtgtcagttggagatgtattttccccctgctttctttgacatcatgattcacttgattgtgcatctggtcagagaaatcaaatgttgtggtcctgtttatctacngtggatgtacccggttgagcgatacatgaagatcttaaaagggtatacaaagaatctatatcgtccagaagaatctattgttgagaggtacatcgcagaagaagccattgaatcttgttcataatacattgagaaggctaaacttgttggccttcctgagtctcgacatgatgacag

SEQ ID NO: 53413 - DNA, 377 bp, Glycine max
  unsure (1)..(377): unsure at all n locations
accttaatgcttgcctcctgtaaaataaactatataaaactaatggtagaccaccataacctgaaaaaataattaaatacagcattggtttgaactatgaagggaactttctttctttataaaaatatattacctgaaagaattgtattngtatttctgtggatgctaatctgagaagtttcaattgttggagctctaggtagggtcgttgattcctaaaagctagtccaggaacacggctgaataaaacaaacaaattatctatatgtttgctcttttagaacaaaaaatagtttttattttattataacatccaatatatatatatataatatatatatatatcaaatagcattaaaactacggaacataagcaa

SEQ ID NO: 53414 - DNA, 393 bp, Glycine max
  unsure (1)..(393): unsure at all n locations
ccatatgtgctaaggtaataagaaaaagcaatcctgaaataagggcagaaatagagaagtgtcatacgtgccaagaagaaaagtgttgatagaggaataaaggctgaaaaataaataagcttaggcaggaaataagtgaaagtttttctaaggatgcatgctctcttataatcctaagtttttgaaatcccagaaaaaccatgatttcttgtttagccaggctccgttacaagccaataaaagtccttagtgatccaccaagtataagtaagcataactntaattgagaagaagttcaaaatttgggaatattaattgtaggtcgtagaatttcaaacactcaccccagacacttgtgcgcagagagaaacactaaccttttgaggaaagtga

SEQ ID NO: 53415 - DNA, 337 bp, Glycine max
  unsure (1)..(337): unsure at all n locations
atgagtggaagatcttgtcgcttgtggtacactncaacttgtctctctagaaagtgttcttgctagatttaggttctcaagccttgtccatccaattcttatctgacttcgatccagaaccagaaaacattgtcttgattgagctgtactttataagcatatctttatgatgagtttgtctagactctataatcattctctggcacctgatctgctactagtaataaataattcattaataaagagaaactctaattgtaacagcctataaatgccaaagacacctactaaacgatatatatgtgttctccaattataattgacacataccatctac

SEQ ID NO: 53416 - DNA, 403 bp, Glycine max
  unsure (1)..(403): unsure at all n locations
cttctacattcaagacttcaagggctgtcatttgatatacctgatgtccctntcattccttcttttggcaggtttcacatgcttggattccgctaatggccggtcggatggcgagatcgctatgatgaaattagtgtccttatctttacttaccttttcattttcaatgaaaaaataagtaaagaggggcaactgtcagaccctaattttcgtcggtgacgatcatttgctaatgttttgattcttgccagtcgaattgagctgcttaacaccagttgtcgagcaatctgcaaggttttntgacgttctggaaaagaatgtggaaaatacccaaaagggggggcacaatggtcatttggtgactttntcaagcccttggctcgcctgtgccaccagaaagctt

SEQ ID NO: 53417 - DNA, 354 bp, Glycine max
agcttgaagaaagtttggctattacatgctctactcccttgagtggtgtttgtattggttgattcatcttagtaaatttgatatttgttttgcatcatgcatcatcatggttagtgtgaagaaatatttctaagttctaaaaatattttcagaggctataatttctttgttttcatcgattacagagttgttgtaatcgattacaacatagtgtctaaagcttatagagttaaggctcgtatcggcataatcgattatggtagtattgtaattgattacaatgttgtttaagacaatgactacattgttaggagtctctgctctaatttattaccaggtgcgttaatcgattac

SEQ ID NO: 53418 - DNA, 480 bp, Glycine max
  unsure (1)..(480): unsure at all n locations
gcttctnttagactcatcttctccttgaataggcgtctcctctctctctctcttcctttttcattccgctgccattcatcttccaagaagcaaaggaatccattgatgaataagatccaaggcctacaagctcgaatggagtttacatcacttcatcttttgtagtaactgtgataattctcttttctctctctttnttctctcaattggtcttcattcttcttcatcttttcacttctgttccaccattttttttttaatttgagtgaactttcacattgaaaatcatttgtagtaattgtgataattctattttcattggtttggtgaattgtattgatgcttttacacttgaattgtattttgttcttgttttgttatgtttcttgaactctgtttntgagtattttcgcattcttttactatcgcctataaaatgtgtgatataattctcccctatctatctatatgtgaatgaat

SEQ ID NO: 53419 - DNA, 362 bp, Glycine max
  unsure (1)..(362): unsure at all n locations
gctcaacaacacttaatgttcaatgccccttcgaaactatgtgttcaactaagcaatgcattttagacatgttaatttaattgaataataaatgcgagtctttattacgaggtgtgattaattcatttaatataataaatgggcggattattcanggagttgttgaagacttgatttattctagactattactttttgttgaacaactgacctcaataacttaagagggggtgaattaattaacatttaaaattttcccgctaacaaattttaacccccttttaaatgatacatgatagactcagaatgcagaagaagaagaagaaacaatcaatttaattatgttcttttaaatgcgcaag

SEQ ID NO: 53420 - DNA, 442 bp, Glycine max
  unsure (1)..(442): unsure at all n locations
tcgtccgcanatatcactannaaaccattttaaagtccaattccttaagcgatcatttttgcttctatcagttaaacatggaccgttcaaaaagcataaaatcaatatgtaactttaccgcttttgtcaaaaaccccaagagatcattaatggtccaacgccttaatgtttctctcctttcaaaatcaaaagatcgtttaatggtccaacgccttanaacgactttngttcggttaaaatatatctggcaaaaaaaggataaaaacaacttaaccaacgtttagttcttaaagaactatgtaggtctgatttcctcatcgcaattgaggatacgtaggagcgagggaaatacccttgtcgaccacaaaaagataaaaaatacaaaagggcgtaaaagacatataaaacggaaaataaaacaaattgaagtcatatttgcaca

SEQ ID NO: 53421 - DNA, 362 bp, Glycine max
  unsure (1)..(362): unsure at all n locations
tatttcagaagggaattctatcaatagacctcccatctttaatggagaggggtaccactactggacaacccgaatgcataattttatcgaggcaatagatctaaatatctgggaagccattgaaatanggccttatatacccaccacagtagaaagaggttcaatatatggtagtncaccaagtgaaagcataaccatagaaaaacctagagatagatggtctaaagaggatagaaaacgagtacaatacaacctaaaagcccaaaacataataacatctgccctangaatggatgaatatttcatagtttcaaattgcaagagtgctatggaaatgtgggacactcttcgattaacacatg

SEQ ID NO: 53422 - DNA, 541 bp, Glycine max
  unsure (1)..(541): unsure at all n locations
agggcccaaggggtttgatacctgatnatctgaacntatgantactcaagcttgtangacccaagagctctctatcgaggcttgtagaacactttatacatcttcgcattgatcccaacggtcagatcatggacaagtgtcttgtgaagttgcaaaccaaatttcgagaagatccaacggtgaacaaaggctgcgcagcattattaccgaggcagcttcatgtagttgtctctagaagcttcattaagaggcttcctccagaagcttcctcatggtttctttgagaaactttctcaagaagcttctttgagaagctagatccttatctatccacacccctctattaactaaattaacttccttaaaaataattatggatgaaaataacgcaacaaataatcaaacatcaaatataattactaataatatatatatatatatatatatatatatatatatatatatatctatatatatatatatatatatatcagggtgttgcacgaagatacatggagaataaatgaatatacaactctcg

SEQ ID NO: 53423 - DNA, 440 bp, Glycine max
  unsure (1)..(440): unsure at all n locations
accttaagtcacctgcggcatgcaagcttcttatccaatgctcatcnntggggtgaaactccttcttccatggcttattccttaatggatggcgcctcctctcacctctntttctttgtcttccactgcatctccatggtggaaaatcaccattaaaggaccccattgaagctcaaagatccagcctccatagaagccccacaagcaagtttccatcacaacacctattcatccatctttatcatctccaagatcatccacattgttttctttcgatgatcagcgtctatggtatctctctcaattttcttctaagatcatcttagacgctaagtacctagatgtagagttctttaatgatgagatgtcttattgctatcaagtgtttcaaaattctggcctngttgatttcatgtcattaaaacctgcacattatcctg

SEQ ID NO: 53424 - DNA, 468 bp, Glycine max
  unsure (1)..(468): unsure at all n locations
tanggacaggtacgagcaagtgctagtattctctaatattgttccttaaaattcctgcttttatttatttgtttgtttccttgaattttattttaatttgcctagtgtcataccctaatttcatccgtgaaccttcatttgctaacattttgattcttgctagccgaattgagctacttaacaccattagaagaaatgggcaagaaactcaaagtaggggcaaaatggtcgcctgcgcccattacaagacttatgggagatgcaaccagcttgcctgggcgagcaagttgcttttggagtaagtcaccggctcgcctgagcggcaagctcctccctctattntgttacaaatangcgtgggaggcagaggggaaggggttcaacacccttactgagcatattccactgaaattggtgagaagagaaaaaagaagaaaaatcatggttgaagtgacgtttctgtgatca

SEQ ID NO: 53425 - DNA, 253 bp, Glycine max
caccgcgctgcagctgcccatggttgagcatttccttattcttaataaaaaaactgctatcagatttctaagcaggcgaaacgttatctatacgatatgagatactgctgcctcacaattatctctcattaacagaattcttctaaacttgactgcaaaatgtgatgtacttgtataggtaatactcttatacccaagatgcagctattaaaaataatctaacctaaaatcagaggaaggttactccttttat

SEQ ID NO: 53426 - DNA, 448 bp, Glycine max
  unsure (1)..(448): unsure at all n locations
tatatcttcattgattggaacattttgcaagttaacttgttagcaaaacgaagggactngagactccgctacaaatccaactagtgtttgcacttgttgatctaaacaatctccaccattgctcatcattgaaacaccaccaaacatgacggactatgtgctaagaatgaaaaattcattctactttggcctaacattacatatggatgacccatatatgacatgtttggnggaaagtaattagggaatggaaattgggaaaaatttctcatgtttgggttatttggagaataaagaggattttgaacattttgaccatttggcgtattacaattaagcatccaattgaagtaaaaatgggattgttgggattattgggatccacttatgttgtaagagaaagaaatacaaattatgaatttaatagagtatattgatgaactgagat

SEQ ID NO: 53427 - DNA, 311 bp, Glycine max
agcttcccgtatccgtacttggaaggatcttattaccgccttccttaggcagtatcaggacaattctgatatggctcctgaccgtactcaactgcagaatatgtttagaagagagggtgaaaccttttaagaatatgcgctgcgatggagggatttggcggcacaagtatctcctcccatggttgagagagagattatcaccatgatggtagacactctgccagagttctactatgagaagctagtgggttacatgccgtccagctctgcggatctggtgtttgccggagaaagaatccatggtggattga

SEQ ID NO: 53428 - DNA, 452 bp, Glycine max
  unsure (1)..(452): unsure at all n locations
ggcatgagntacattctccctctttctcaagagaatactttattcttcttgatatcatcaaaatcttcatgatttacattctccgcctttgtgatgatgacaaccacctgtaggttaggagcaacaacaaagaaaaaatatatgtgcatatagtgtactcccccttggttttacaatgattgcttatatgagacaattgaagatgtcatattgttcatatataaaaagttgtctcataaaacaatagataatgtgtcttactattgtatcttttatctttctctccccctttgtcaacatcaaaaacaaatcatgaatagaaaggagaaagatgttaccacttgttgcaatgtgtgagaataagtgataccaaaaggcattacaacaatcattcaatattaatcaaggcagaacaagtacaataacacatgaatcaaacacaatcaatcatc

SEQ ID NO: 53429 - DNA, 330 bp, Glycine max
agctatcttagttcttatgatgcagatgggcttgtagctacctcatgcactcctctaatgactatggcataatttctggcgataaactgttgggagttggaatccatctcctcaattaaatctctggcttcaccaagagtcatgtctctcagggctccaccactggcagcatctatcatacttctctccatattgctgagtccttcataaaaatattggagaagaagctgctctgaaaattgatggtgagggcaactggcacatacgtttctatatcgctcctactactcatacaggctctcttcactgagttgtctaatacctaatata

SEQ ID NO: 53430 - DNA, 471 bp, Glycine max
tggttacctctttcttcactatacttcatgaatcaccgtgttgagtcttctctgtggttgtcttactgggttagcctcatcttctaaatttattcgatgcatacatgtggatgggctaataccaggaatatctgccagggtccagcctatagctttcttatgcttcttgagaacaaataacaacttctcctcttgctcatcagcaagggaggcggatataattactggaaaacttttgccatcatccaagtaagcatattttaaattagatggtagaggcttcaattctggtgtgggcggctggatagtggtagaaagagatggtttctcagcctacacctcataaagaaagtcgaggtatgtgtacttactgaaacatggttagtttgatctgactctataaaatcaatctctagaggtaagacatcaccagacatgtaatcaatatctaattcatattcactctcaaca

SEQ ID NO: 53431 - DNA, 423 bp, Glycine max
  unsure (1)..(423): unsure at all n locations
ctatagacgcgaagaaactagaatcccttgccatgttggttgtgcattcactatatacataccatactatctttgaacctacactatttgcttgcggagccatatagaagtgatttcagctctagaatgctcactattgacgttgacttgatgagcaatgttgtgggtgagatagatttttcttaaaccggggaacctctctttatatctgcagttctagcaattgttacattgaaatttgaggcttccccttatgtcaacaatctttaaacaaggcgattgtccttttgcatgtatagcaaggaggaaaattagcccttgatatatatacgttgactcccatctgtgtgcctttcctttgacaccttcctttacaatgttgctatttgatccttgataaggtgttccctgtgctactgaacn

SEQ ID NO: 53432 - DNA, 525 bp, Glycine max
  unsure (1)..(525): unsure at all n locations
ggccccccggggttgaaccatgatatagagaccctgatcacgcgcccacggacgcnancatacggaccgtactaggcgcgagataatacgcagtatttgtcatctagcactgaatatcctgatgtgtgcgcacctactaaccactagtcataggcagacctgcacactatagcatccagcctactgtctccatcatgagctaattgctcactattgcaacgccatggggctacagtgcgtgacggactgcaatgcgccttaacatgcctattttactgcaaaaccaatagtactgcactgacacaaactcacacccatggtcagtcctatanacactttgacaacatgttccaacgtgataccctaaatgagtatgagcgcctcagaatcttagcaagataactgactaatttcatagagacagcacaccaacattctttgagatatcatctatcaaacagagaacatgatctcattgacactgacatatactctatattgccccatgaacataatgccaaactc

SEQ ID NO: 53433 - DNA, 444 bp, Glycine max
  unsure (1)..(444): unsure at all n locations
tcagcgtcggctcggccacccgatccaccacgagcgacgtctatttcaaggagctcgtgagggccgcgtcgctccggagctacggcaatcgcgttcagttcggtgatgctgctgccgccgcggtgaagaagatgaaaatgcatcggagtcgcagcgtgggaatatttggaaggatcgacgaggaaaaggtgtgtgagtttggagatgatggaatcaaggttaggcctaatgcttatccaagaagtaaaagttatgctgcacgtagagacggatcagcaaaggactgttttagttaacattaatgttaattacgatgtttttctctcttaactaanaatgtaaggaaatatgcatgacttgttgttctcttgtttaataatttgtganaatagttaatgtaaagccccggaatgctgcttgagttgaatgtatatccgtgagaac

SEQ ID NO: 53434 - DNA, 448 bp, Glycine max
  unsure (1)..(448): unsure at all n locations
gcttcttctccaccacccacgaccaccggtggccaccgcgagctgtcgttgctttntgttgaacccccacaccaagaggaacactntaatcagagcggaatattcaaaacttatctcgaggattcggtacaaaacgaagcctccaatcttaccttcgcggttttcttcgaggtaaccgtgattctaagcctgttccttgntagtttgagcctctctntgcatctcttctaacttgggagccattattggatgtttttacacttcctttgaaaaacccttgaaaaatgagacgttgtaaaagttatatttttatgaaatgggtgttattttcgtgaccttcactgaacctcggtcacattggcgtgatcgaaaattcaaaatgaatgtctcttttagtagaacccgaagcaccccttagccccctttatgtttgacagggatatttgac

SEQ ID NO: 53435 - DNA, 487 bp, Glycine max
  unsure (1)..(487): unsure at all n locations
tcaagcttatgtattgtttatcatcaaaatcactatttatactagaactaagttctagttatcacaagtcctagcactcaagtccctgtgattgcagcacaaaataatcactacaaatataaaaatttcacactatagttgaaagtctactgtatcattcagaagttacatgctcacaatttcaatgctcggggttcacactcctttcaatctccaatacaatttaatttaaaataaatacatcgcacacatcaattaacaattgcccaaaattcacacattgggtctttaatataacttaagacaacaagttaaacatttaaccataagtcaatcaaaagcaattaatatacttagtaggataacaattaaatttcatagagaagcaacattaaaattcttaagttttatgaaaatcagaacanaaaacatgatctaattgaaattagtcaaagaattttaaaatacaaactcttaacataaaatc

SEQ ID NO: 53436 - DNA, 383 bp, Glycine max
  unsure (1)..(383): unsure at all n locations
ctgcagctttgcaattggcatctgaagtctgagagctctaggcagantagtttgctaaatctggaagtggggctgaagtaaaagatgcatggatgccatctatnggtgcaaacgaagagggaacatcagttgctctgagcttggtcttcctttcctctggaaaattaactgtttggtcattcgcattccaacagttccttatgatataagttaagtcaatgaccgaccttaggttttcataggagataagagcatcagatccaactcccctcaatctacacaaggttgtgattaaagctgggaagcctaagcgagaagtgttagactgagccatcatggtcatttgtctatagatcanactgctcaatgttatgtccatcctt

SEQ ID NO: 53437 - DNA, 410 bp, Glycine max
  unsure (1)..(410): unsure at all n locations
gagatgcccgatgtatcaccatttcctagttaaccatgcattaggtaccatgttcaattattntgcctcgttgctgagtgcttttggttctttttttttaaaaatgggtttatgatcccaacatggttggctcatggtgcctaacacatgcaactaagaatgtagtgtgaagtttcacgcttccccttttttgtttttgttttgtagaggaaaatgcaaggatgagcaaacatgaaaacaaatggtatgcaattttgcagatcaaaaagtttgttgaacgcatatccatgatgatgccatgactcatgcaaaatgtgaggctgtaatatgattacagacaaatgcaggaacgatatgttcattatgatgccatgaagagatgtttatgcgatgcatgatatgaatgcatt

SEQ ID NO: 53438 - DNA, 331 bp, Glycine max
  unsure (1)..(331): unsure at all n locations
agctngcctgtccgatgcagcagtaatgatggtccgagttatgttggggaacggttacgaacccggaataggtttatgcaaagacaacggcggcataactagcttgataaatgccaaaggaaatcgtgggaagtatggtttaggctataaacccactcaggcggatataaagagaagcatcgcgggaaaaaagagcggtggtcaaagctcgcggttgaggcaagaaagtgaaggaagcccgccctgccacataagtagaagctttataagcgcgggcctgggagacgaatgacaagtggtcgcgatatacgaagatgatgttccgagtaca

SEQ ID NO: 53439 - DNA, 440 bp, Glycine max
ctcaagctcgctcatccttggcctgagtggttccaactcatgaagtgcttgctcgacaagggatacttctgtcgtgaagagggaaaaatgttatgcaatgctggtatgggcatgaaggatttcaacgtcattagaaccaagtgtgcctcaatttcggtagagaccactttcatcttttaaggtaaaatatacattttaaaagaaagtgttccttggattgcttatggcacatgatataatctgtttgatgtttagttaatcattggtgtattctgtttgtacaaaggtttggccgtgcttcagaactctgtcagactgtgatattcaattggacaagaacctaggcttgatttataccatttttatattccatatctgagttttatatagtttggagcgaaggtttattatgataatttattcttatattgtgcttctgg

SEQ ID NO: 53440 - DNA, 126 bp, Glycine max
tttaccatgtatgctctgatccggtttgtcttcttcagagagaacgggaagatattgtatcctgtatttaactatcaatgtgtgcgacttatggctctctacaaaaccaatattttgacaatccca

SEQ ID NO: 53441 - DNA, 405 bp, Glycine max
  unsure (1)..(405): unsure at all n locations
atagtttctgaacaaatcaaacgatgtgactctccaaatagcttctgagtttgtcaaattggttctaagtatttctagaagtcataactcttctaatggatctcttgaccacacatgaagagtctataaaagcaaggctatgattcgcatatcagatcaatcaatctttacatctatctttgccaattcattctttacacaagcaattgtttccacattgatttctgaggctctttgaacttcttcttcttcttctttttgacaatagctttccaaaggatactggttctctacaccttgaaaacttgcgctatacatccttttcattcccttctccctttgccagaaagaattcaccagagactaaccgcctgaattctttntgtgtctntcttctcccttttc

SEQ ID NO: 53442 - DNA, 433 bp, Glycine max
  unsure (1)..(433): unsure at all n locations
agcttcacagaatgtggagattaaggaagttatagtacaagttcctttaactagtgcttctattcaagaattgttgttccttatactgttgaaccacacaacaatcaagaagaacaacaaattaatgatcctgaggttaacaatgaacctatagtagaacaatcacaagaaatagtattaagaagatctcaaagagaaaggagatctgctatttcgaatgactatgtagggagagcaaccttccaggttatgatccggtgacaaattttttcctttcttgtttagtgttgtacaatattttacgtatttggtgtcaattttactctccggcattgttcttntttgttggttctgttgctgcttcagnttgtctttgttctgctctctgatgttgggatttctcttctcaccaatttgtgtgtgcctctattat

SEQ ID NO: 53443 - DNA, 454 bp, Glycine max
  unsure (1)..(454): unsure at all n locations
atcatgaaactacctttacttactcttcattctgagatcacaatagaatacgcccagttacctacgagtcaaaagacatctttacttggaagaatgaacatagttaaggtaaaaatgaactcatttcacctgaagcaagcaagtccttccatctattagaaggtgagtttcagctgcttcttcctccgcatatatttatagaaagaaagtgaagtataaaaactcaggcagaattcagcatcttatacctttcgccgtgttccgccattgattacttaccactgaaacatatatgccttgtcaaaattgtgaagcataacattcacgagaataaagtgaagtgcagtaacaacaaccattgatttaatgtgcaagcacgcgaaaaatgacacgttgctntggcatatggcttcgaggcacttcactgctttccctatttcccatagcccctctc

SEQ ID NO: 53444 - DNA, 307 bp, Glycine max
ttaagaaccatgctcaagaacatcgccaacgatgccgtgtgcactagcatggagatgcaaaaaaaactcaaaagcgagcccttaaccattggagtactgtatgagacactcacttcgtgctaatgagttctttgcaaagaaacagtcctctaccgcaaaagtatgtccattgcgataaagcagtgtattactatcttgagtacaagtggtgtgcagttgttctttatcatgcatcaattgttctacctttcaaaaatatatccattcgcaaacaatggcaatagcatgaatagtaaatcttgctagt

SEQ ID NO: 53445 - DNA, 318 bp, Glycine max
  unsure (1)..(318): unsure at all n locations
agctntgactngagtcatcaagagattatatatatgtgaccatggcataaatntaaaataggaatctatctntcaatcttctctcaacatcattcaatatctttcaactctntctacagaatnttctgattcatttctcttcatctttctaaaagttgttgttcaacactttctcttcaaagaaaagttctttgttcnaaaacttgtgctattcatctttttcattctcttctccctttgccaaaagaacaaaaggactaaccgnctgaattcttttgtgtctctcttctcccttacaaaagattcaaaggactaacc

SEQ ID NO: 53446 - DNA, 383 bp, Glycine max
  unsure (1)..(383): unsure at all n locations
ntatgtgaagagaatgtaagacaatttatggtttgaagagattgtatgcaccatgactgattctgggcgtttcgtgatttctctaattgttagtttcaattgtaatgttttttttattcttaatgcatgacttagctgtaaatgtactttatcgggacactaagggtaaaacctgtgtgaggtaattctaaaagtgaacctaataattacactgattttcttaaagaggcaaatgaccgctttgctctgtttggaatctgttcttggaactgggcaaatttggtgatgtagcatctgattttgcattgggtgactttgcataggacacctagaaaggtgtgaatatttctggtacttaaatttttcatcttggaggcttggac

SEQ ID NO: 53447 - DNA, 366 bp, Glycine max
  unsure (1)..(366): unsure at all n locations
ctganattttntcttcagctatagttagaaagcttttcaagaaaatataagttatggataatagttttctatatcaccttgtacactggtccaaagccaccttctccaagcttgcttttgtttgagaagttntcagaggcgttagctaaaactgacaaaccaaaagttggcaaatcaacatcttcctttctctgtatgtttttgtaaattttgctgtaaaattttcttgcagaccctgattggtggaaaaataaacgtgtgtaaccactgacacatgttacatttatatgcataataacctgtgtgagacactanactatatatacttaccatgatgaattttaatcatcaatatgcatacacatg

SEQ ID NO: 53448 - DNA, 373 bp, Glycine max
  unsure (1)..(373): unsure at all n locations
tggtaatagtaagctccatctaccttttcttaggttgtaggagagcattgtggttcanaagcaaattgttccaaatttgggggagattattgggtgaagataagagtggtaagacaaataacagcacgcataataatgtaaaaaagcagcaagtaagagctgctaaaattaaaaaaaaaaaagagaaatttcaaaaataaaagttgagtgtgtgctgttattgaagcaaagtgctataaatattgaaaggcaagtaatagagttggaataaaagagaaaaggagttgatctaaggatgaatgctctcctagaacttaagcttttgcatcctagaaaaaccatgattngtttgcagcccaacctcattacaagc

SEQ ID NO: 53449 - DNA, 217 bp, Glycine max
agacgccgggccttctgcctaatggtgtgcaatgacatcacatatatgagtcactgccactcctcggctatgtactcttatgtaggctttgcagccgatcaattagggcaccaatagctgctgaagaaagatattcctgtccccacatatggagccctgtgtaataattaagattgtcatacatgtatgcatcacacttcaaaaacctggttcaaat

SEQ ID NO: 53450 - DNA, 346 bp, Glycine max
  unsure (1)..(346): unsure at all n locations
agcttacttgtgaagcttctatggaggctgtatctntgagcttcaatggtgattctccaccatggagatgcagcggaaggcaaaggagaaaaagagaagggagacaccatccacaagggaataagccatggaagaaggagtttcaccaccaagaatgtgccttggataagaagcttgaagatgatgctttaatggaggaaaagaaagagagaaggggggagcacgaaattgaaggaataaaagagggagagaagtggaactttgaagtgtgtctcataagacttccattcatcaaagttggaaaaatacacacacataacctctatttataacctaagtgtcatac

SEQ ID NO: 53451 - DNA, 374 bp, Glycine max
  unsure (1)..(374): unsure at all n locations
tatgcgagaatcggttgtagacatggtattatagtctctctgaccaagtaaacaagagttcctcgtcatctgttgaatttcagtataaggtagctaagcataagaatatgcataaatattgtgttgtgattctaggtatccttacaaaataccaatataaccatcacgaacacatgacttgatatctgatctatgtgctcttcttagtaggatctgntacggaaaaaataactggctaacagtgacttcatgattcttcctcaactgaaacctctttattccttaacttttcagatgaggaggaaaaaaaactatatgtgatggctccgtatgttggggaccctaacttaatagggttcccattattctctaat

SEQ ID NO: 53452 - DNA, 343 bp, Glycine max
agcttgcttcaaggtggatgcaattgagcgagaagttgaccttggaagtacttgtcaatgcgactgtaccatgctctcagtgcttgttttagtccataaaaagccttctttagcttgagaactttgtcttcttctaatttcacctttaatcccaacggttgttcgatgtacacttcttccacgaggactccattcacgaaggtagacttcacgtccatttgatgaattctccactagtgttgagttgcaagagagattattagtacgatggtctccaggcgagcgaccagagcaaacacctcaacataattgataattgtgaaatttgagttaatttgatagt

SEQ ID NO: 53453 - DNA, 450 bp, Glycine max
  unsure (1)..(450): unsure at all n locations
taacanacttaganatttgtgatcatgaattccgaaatatatggggagtaaacgctctatctatatacaattgtttgttgcttgcttgaatcttgatttcacgtattgtattgtcatcatcaaaaagggggagattgtagatgcaattgcctttgatgttctgatgatgatgatgatgatgtgttgcaattgatgcaaatgggcttttcaagattaaattcaagacaatacttcaagattacaagtctcaacatcaagatgatcactagaatattaggaagggaattcctaattgaattagcaaaggtttggccaagtgatttatattaaaaagtgtttctcaaaggttntactctctggtaatcgattaccagaggatgtaatcgattaccagtggccaaatacgttttataacagctacaaaaatttgaattcgaaattntagactgt

SEQ ID NO: 53454 - DNA, 434 bp, Glycine max
  unsure (1)..(434): unsure at all n locations
ttaattcaagggtacgtggagggatgcatccatnttcactatcaagtgtcccttagcattnttttataatattttaagtatttaatatttataattattttcattaaaataaaattattaaatatatgaagagactgataataaattanaaaatatcttaattttatgaaagtaaatggttaagaaactntccacagaagccattgataattttcttataattntaaataaattaattcaagtacataataaatccctgagaaatttgaattgggtattcatgccatttgaaataatgttacaaaataacaanttttttntggagaagaaatttgtcgcatgtcatcatatntaanattgttaacatgtactatngatacacgtanaaatttgataaaactaataatatattttaatatagtgaagtacaaata

SEQ ID NO: 53455 - DNA, 401 bp, Glycine max
  unsure (1)..(401): unsure at all n locations
cattctctagcactctccaccccaccaatagtactcacaagcaccacaaacccaacaaggcatagcaacttcttcacacaaccctccattctcaatatatgtttattttttatgtctctctattaatttcacaatgcaataaccccttttgcctcatggggttctatagcctagacttgctccaaaaaagttattggccttgtcaccaccctctgattaatggagcttgcactaggactaaggatgagttttattattgcaccacttaggaacataaagcaggtgtaaacacgatttttttgctccacctatttgtccaatcaaggtaggcgtgtctttgccaacacaaattctttnttgttttcttacttccagatgtagccattttccacagtatgtaa

SEQ ID NO: 53456 - DNA, 272 bp, Glycine max
catgaatggtacaattcttagcaccttcgacagagttcattgaataaccacatggctcaaagtcaaagtcacaaatctcagaatctggaagaattattctaatgccagaattaacagtcataatggcagctgaagctgattgttctttgtagaaaacctgtgctatctctctatcaggccagtcatgcacatctctagagtgtaaacattgtcgcatggagttacagaatctgcagatgcagagtagacatgccagttctgtgatttgtctt

SEQ ID NO: 53457 - DNA, 468 bp, Glycine max
  unsure (1)..(468): unsure at all n locations
tctcagctcgatatatactcagacatacataatggaggcgagagacctttttacataacatattagatgatgtgatgagaaatactcaatacaattagtaaatattctgtgattataacatatgatgaaaatgacattattaacctcatcattattgtatattgcaaagagtattgtattaaaaatattaaaaaaattaagaccacaataaacagtcacttanatgatatttgcttccgtctgatttgtgattgtcccatttttaaatcctataatgaaatttaagtttggaaaaagactgggagtcattatcacttttcaaaggaaaaaaaaaaaaatttcttgtctagacagcacggcgtatctttttctctcttcttattgccctcctgcgtttgattctgatttgaatttagtgaaaggacaaatagtctcaattctctctctttttacagctactaactttaa

SEQ ID NO: 53458 - DNA, 407 bp, Glycine max
  unsure (1)..(407): unsure at all n locations
agttttagctagttaccttctatgaattactaacttttaattaccagattttgtttaattntcagctcacttttaagacattttctataaatataaccgtaataatgtggtgaattaagtcaataatatcaagcgtactaatcattatgatcactaatatggaaagagctgttaaattattatgatcactagccttcattatgatcactaattattatcacctcctgatagtcttctagtccttctaacatgtttgtttggtgaataccactccttctagctgatgccatgaagattggtttacacggatgtaattgttttgtgttatcccttagctcgtttgcttctagatactctcgcacttaatgactattattaaaataaatttattgaaactccttatcata

SEQ ID NO: 53459 - DNA, 467 bp, Glycine max
  unsure (1)..(467): unsure at all n locations
tactcagcttagaattaggaagaagcccacaaagatttcatatctctttctaccccattatttatttggtcctaaggcgagaacaaaggaagggaccgttttacattgagcaaaaaattaacttaattacaagtaatggggatggtagagatcaaacttctaactatgttcacagaagctctgatactatatcgaagaccaagatttttttaaatgaagaatatcaagaatgattntaaatatataatataatgcttcaaggggagaaggaaaattaaattaaataaaaagaaaagaaactaaataaatgattcccaacacaaaanaatgtcatatattataacactagtcatttaacaaattgtctaatagatcagcatgaagaagcaagaagcgtgttcatatgcacgtgtgaagttgtggcactatgttgaataaactgagagagagagaaggaagagaaaact

SEQ ID NO: 53460 - DNA, 382 bp, Glycine max
  unsure (1)..(382): unsure at all n locations
ctgcagctgtgtctacccgnttgcactggatttcntatctttaattattttttttatatagaagtgtttaactggaattagaatatttgatgtataatgtttggattttctttgtataagtattgagaactcttgttggttatgattatcaggccagcaaaggatgttgttaaaggtatacaaaagcggattggaagtaaaaattcanaagttcaacttcttgcactaactgtaagcaagagtgttgtaatacaaccttttttctcttanactctgttgttggcattgttctaaattctttttgtatttcagcatgtttgcttcaattgcaccattntgaccttctaaactntacattcttgactgatatatgaatgatgat

SEQ ID NO: 53461 - DNA, 389 bp, Glycine max
  unsure (1)..(389): unsure at all n locations
ntgatcttcctccaccgttgccaccatcatcttagaattatatttaatattagtactttgattttcagccttgtatttcggctatattattatggtatttgaacaatttactatttccctatttgcatggtatgtttgaacaaatattaattatgttatttgactatatggattctatagttaatctattcatgggtgtttgcttcatggtttttatggctcttggttcttacttcatgatttgattgatggttttttcatgaatgctatatgaatgtctaggtntatttgcatacttaaattctgatacatactttggctttttgttgatgccaaagggggagagaaatgggattaaatcaagaactcacatgagtaatcaatttaat

SEQ ID NO: 53462 - DNA, 540 bp, Glycine max
  unsure (1)..(540): unsure at all n locations
aggcctgatccttgagaccgagaccttaagtcaccgcngctgcaactctccattcgctctttatcatctgttacannnatcgaagttntcttcaagtggtcatggtgtccttgaccaaggaaccacaacttcacggaagcagaccatgaaggatagtttttccagttcaccttggcagtggtgatggttggggtcccggaaaaagaaaaaacangtccaaaggatgccattntagaggaaaaacagcataccctaacacacgagaggcaaacacacaagggctgaccaaacgacttgccggaagcgggatttgaagcctgaaacangtccaggaggtgacngcgangctgtcgggaccggaagggacagctcccgatgccggtacggcggcgcgtgagcagtaggcgccggaaatcncccggangaaangaagcgcgtgtgggcgcgtgccgcngnctacngcaacgcgagttccangggtggatcacgcttntcgaagcaatccgaccctttgtctcgccgagaaaaccaccngagttg

SEQ ID NO: 53463 - DNA, 492 bp, Glycine max
  unsure (1)..(492): unsure at all n locations
tactcagctgacctctagaatanaaaataagggtgctctctgtaatatatacaaaaganagatgaagaatntacttgctacttttacaagaaatttggacacatgaaaaaagagtgtccaaggtacgttgcatggcgtgtaaagaaaggtaaatctcttgctcttgtttgttttgaagttaatttagcagtctttcccatttatttgcatatctaatgatttgtttaattaaattgattgacacaatatattgtaaagtaatccctattgttaaaattgatttgattaaaattacatagattttgtataaaattatttatgcgaattgtgttcagcttaaaggaagacacaatttggccaaaaatattttgtacttgtgatgataaatgtgtgacaattataaggtgttttcatgtgaataatagtaaatccaaagaaagactgttatttgacagaatntattgtcaaaatattngcatgttctattatata

SEQ ID NO: 53464 - DNA, 334 bp, Glycine max
  unsure (1)..(334): unsure at all n locations
atgtgcaaaattcaagtgaacattgttgatagaggatatggtatgcacgctggtaatcataataatacattgtcaacataagatgcatngtaatctattagcttttactgattatccgtgcctgtaaaatggatgcattgcgacctgtggcccatgaacattgtggtaactgtatttttccgatctaatataagagtagagtgatatctgggtgaaacccatcgggtcatatattggcttggagatgggatggtaaaatgaatatctagtagtgtttcgttaaatgctctggctgatgactcatctctctgacacagtatcaaacgttattcca

SEQ ID NO: 53465 - DNA, 152 bp, Glycine max
  unsure (1)..(152): unsure at all n locations
gatgctgatcttctcactaccactagcagataacgcaggagacaacacatcttgtcgcggactttattcatcaagacaacttgntttgcacttcagaagtctactttaagaagcttccccaccttttgttcctcattccacagnctattttc

SEQ ID NO: 53466 - DNA, 164 bp, Glycine max
  unsure (1)..(164): unsure at all n locations
agcttctcaaggaagctacctagtctattatagaagcatgtgaacactgggtggaacttgatgaatgaaagtcttatgagacacacttcanagttctacttctccccctcttttattccttcaatttcgtgctcccccctctctctttctcttcctctttcttt

SEQ ID NO: 53467 - DNA, 326 bp, Glycine max
  unsure (1)..(326): unsure at all n locations
acaatggaagctgtctaganattcanatggttctatcttctcaaacggatgttcgatttggacacataatatatcgagacgctagaaattgaacgattgaacctctcgagaaattcaattggtcataacgtttcacacggatgtccgattcgggcgcattatatatcgtgacgctcgaaattgaacaacggaacctcttgagatatttaaatggtcataactattcacacgaatgtccgattcagggacttaatatatcgagacgttcgaaaattaagaacggaacctctcgtgaaattcatatgggaataacttttcacatggat

SEQ ID NO: 53468 - DNA, 402 bp, Glycine max
  unsure (1)..(402): unsure at all n locations
gatccttgagtcacctgcggctgcagcttgtaacacacctgatcagatttttgagtcctgtcagggtcctatatatgtataatctntgaggccacaagcttatgggaagaaaggtttgaaaaattaaatcattgaatcaaaatttgatgtacaacacgtgtctttgagattgagggtatgccctaaactcagacatgtcaaagggtgtggccccagagagaaatgaaacatatcacaaaatggtttatgattgtgatttgtgaaccctctgctgcattacattctcttaaggccaaacttataatcaatgaggtattcatttaanatttttttggcatgggtcgtactttcggaggcatagcaaatgtcatgagagttaccaacaaatccttgatataatat

SEQ ID NO: 53469 - DNA, 362 bp, Glycine max
gagggcatcattcatgactgcaaagtcatacatgtctacggacttctcacatttctagacagattattgtttgcaagagaaatgatagggttacactttctaatatcgtgtttgtttttccgtttcagacgtggtttttaaccatttgaacgtgattttcataagcttatagttatataatttccacgttacaaacatgactcatctatctttcaatgagatgggagtcatatagacatagtggtttggtgattcggggaggcacacaagattggaataataaagaggtcttgattttgaatcctcttattaacataatatatagtaattactaacatttatccataaaataaatatttgac

SEQ ID NO: 53470 - DNA, 336 bp, Glycine max
taaaaaacataccaaaggtggaggtccacccaagaacgtttgaaagacaactgaaggatatggtggtgcactcagtgaaatattgctataaagaaaacaaaaatatccaccagcctaatataatcaagttatgactttcttaaaaccattagttggaagcttcacaccaatattttgaagacaactcacagatcttggtgaaactggagaatattgctaggaatagagagctagaatacccatccacttatcaaaatccataagcagttctgatatgctttataccaagattatgaagcttcttatgaagtgtggagacccataatcattcatact

SEQ ID NO: 53471 - DNA, 158 bp, Glycine max
atgctacccgtccactatgtcttcataaaccttgccatcgtcatgccctaagccgttggagacgagcacacacttatgacatgctcggattatggaaggaagattattggatgctggtttatttataaatgagtgctctcactcaaatgatcctgatc

SEQ ID NO: 53472 - DNA, 536 bp, Glycine max
  unsure (1)..(536): unsure at all n locations
agcncccacggnnnnatgaaacccttantttgttcccttgtatcacctgacactagngacactntagactagctaagcacgagcaggagcggtctatatagttacanagtttctgtgttattacccgactgcctgagttggacacataagatatcgatactctcaatatggcaccatggaacctcgcgagacatatatatgatgagaactatgccttagcatgtattatttgggcgcagtatataactggacgtttcttgttctgctaccagaacattgagccaaaacaaactcacagggactattcctgaatcactcgccagacgttcaatctttatcaatgcgtatgtaaaataatagctgctacaactttgacatttctttaagagatatttcattaatggaggatctgattgagtatcaaacttctcttttgcaggctgctagatacagaaatctgagtggccaataccagagccactattaaagggcctaaatacaagcatggattgtgaaaccataacactatggtttan

SEQ ID NO: 53473 - DNA, 261 bp, Glycine max
cacattttatggccttcatcattcttaaactcatgcattcacttcataataagagattctcgcaaaaatcattacttaatgctagtgattctatcataatcccacaacacagactcaccgggttgtggttaatgagtacccttcacatcatacaggtaaacttactatcattttctttcatgatcctaatacatgttcgttctcttctaatcactgggtgcttattcaaaatatatgaattacacaatccaattcactcaa

SEQ ID NO: 53474 - DNA, 442 bp, Glycine max
  unsure (1)..(442): unsure at all n locations
ntccgcaagacttactgtaagatcttagagttgaccttagcagaggtatccatagaagccattgcatcactcacccaatactacgaccagcctttgagatgcttcacattcggagacttccaattggtaccaaccattgaagaatttgaggaaattctatgatgtccgctcgggggaagaaaaccatatctttcctccggatgtctcccctctttgagcagaattgcaactgtggtcaaggattcaacaagaggtttggaccgcataaaacagactcggaacggcatggcgggcctaccacagaagtacctataagacaaggcgaggggtatggccaatcaaggagactgggtcccgtttatggatgtngttagcttgcctaatcttggggtcgtcctctttccaaacgtggatgggttggtagaacctagcagcatcgacg

SEQ ID NO: 53475 - DNA, 310 bp, Glycine max
  unsure (1)..(310): unsure at all n locations
gtttatgcgagacggagactaacatgctagctattatcgccaagtaccaagaatagttaggtctagccatggcccacgagcataggatcgcggacgagtatgctcaagtatacgcacaaaaagaggctagaggaagggtgatcgactctttacactaagaggcaaccatgtggatggatctggttgctcttaccttgaacaggagtcaagaacttccccgcttgttagccaaggccaaggcgatggcggacacctactccgccccgaagagattcatgggcttctcggctatnggcagcatatgatagac

SEQ ID NO: 53476 - DNA, 469 bp, Glycine max
  unsure (1)..(469): unsure at all n locations
tagaatgcanaagaagaagaagaagcantcaatttaacaatgttttttnaatgcgtaagaataaattgattacaataaaataaatgagataggggaagagagaaatgcaaactcgatttatactggttcgggcatttcccgtgcctgcgtcaagtcctcaagcaacccacttgagattttcactaactttgtaaaatcctatttacaacttttgaacacccgaggaatccctttcccttgtgttcaggaaacttcacaattcaagagacaaccaatctcttgattacaactgactttctgagatgaacagaatgatttctctcctttagagtggatgatacaaattgaagttcctagatgaactctcaatagatntgtaagtgtttgccgaagatnttttaagagagcatttggcaatgaatntctcttagaatatctctctcttacattttgaagtcagacacacata

SEQ ID NO: 53477 - DNA, 262 bp, Glycine max
gagggagatatatagagaggggggttttcgaaattgaacgaagaataacggagagatgtcgctctttgagtcgcgtctcacaagactctgatacatcaaagttacaacgagtgttacacatgtgtctatttatagactaggtagctttcttgagaagcgtatttgagaaaactttcttgaacagcatccttgagaaaactttctctgaaagctagagcttagctacacacacccctgtaataactaagctcacctacttgag

SEQ ID NO: 53478 - DNA, 420 bp, Glycine max
  unsure (1)..(420): unsure at all n locations
agcttcaatgttaatgtcacataagataatgtctaaaactgtatcatattacngacatcatggtatggtattgtaagtgacatccatggcctgtgnttaatngggatggcactaagcacatgatcacagttgagaaagaaaatgcttggaatgaatattgaacagtaagtattttttaatatattgctatttgttattcaaagtaaattggatttgacttttttttttcttttctccagtcgcataaatcggttaaaccatatcgattcaaggtgcttcaaaactaggatgatatattggatttgtgtgctaaagatagagccattggtcatggaactgaaattgctatggatgttcatgaagcgatgagtagagatacaaatgaagtggaatctatgggtttaggtgctactactacta

SEQ ID NO: 53479 - DNA, 478 bp, Glycine max
  unsure (1)..(478): unsure at all n locations
aaagtgttgttnttcaccttctcgctaagccaatctgttggcttagcgagcgtccgctaagcgcaacactcatgggctaagtgtggggaagacactggaagaagatgagctatacaggttcgctaagtgcactgcttcgtctcactaagcgcaccgcttcagtccatccgctaagtgagaaaggcacgtgctaagccaaaattcactaatgttcgttaagtggtccataattgtgctaagcggtccataattgcgctaagtgcacgagcacaaacaagaccacctatttaagcctgaaatcaaattttagagagagagtttggactgggattcatagctttgcatgtctagagattctagagagagaaaggtccaagttccagagtgttttgagagattntgctatgtgaagatctgcagagactggagctngaagcangagccggtttgagagcttgagatgagtntgtgagtgatt

SEQ ID NO: 53480 - DNA, 377 bp, Glycine max
  unsure (1)..(377): unsure at all n locations
tgcggtcgaccaatgcgtcgactcgacctaatgtttgactgctggtctgacaatgtttgttgcctcgtcttacttcttgtgtcgtatttaggcgatagcggctaggcggtatcaggtcaccactaatgtggatcgaattaattccatcacgcctctgntcctttcaacagtactcgccgtgttcagtattcttgtttatcactggcaatctctcacgtatgtggtaattgatctgtctcttcaatggtgtcatgacttgtgtctattgccttgattacttgcccatctcaactgcgtggccataaactgttctatatagtcacattccatatgnatctgtttgctctattcgatggaccgtcgtagacatattcttg

SEQ ID NO: 53481 - DNA, 325 bp, Glycine max
  unsure (1)..(325): unsure at all n locations
ggtacaaactacattatctggatgganaagcaattccaagaacacggaacactacccatatgaagatctactntagttgacctaatgcaagattggatgttgtactctntttcctacttaattcttttgtccctgtcagaaccctaatttgtccggggactatcattngctaacgtnttgattcttgctaaccgaattgagctgcttgacaccagttgctacgcaatatgaaaggtttttcgatgtttcggtaaagaatgtagaanatactcaaatgggagggcaaaagggtcattttggagtttttctgacccctggctcgccc

SEQ ID NO: 53482 - DNA, 439 bp, Glycine max
  unsure (1)..(439): unsure at all n locations
gaagatgctgagagtagtgttttaaaacccanaccgaaccgataggtcagattggtccaagataaagcctttcgattgtagcttatcaccagaaagaattttccagtaataatttctagagaagaaaagaaggagaaggtggaatggcttggttccaattcttcatcccaaggaaccttatcatcacaaggataataggtatgacttaattccgaatctccaaaaacatatcaggaaaccaagcttcaagagatgctggaagagactaagaatttcctgagataaaatcttctaccttagcttccaacaagctacgtaattgatatggaatattacaaagattcacaacaaaatcactattagaaaataatgttttaacatcagttattaaggactttcaacatcagttattgacattgaaagtaatactggtaacatc

SEQ ID NO: 53483 - DNA, 279 bp, Glycine max
tccacatttattctatctagagtgtattttattcagatgttatttgatcccatcttatcttatcgagaccagattttattctatttcgtctatgggtctagacttaaaatagatgtggaagctttggggctgaggacctatataacagcaccaaggatatagctcagggagttttttttcggagaggagaataatgctaggattgtagactctcagttattattgctgatcatgcacactgttcacgtataataaactcattatttgcaaatcatctct

SEQ ID NO: 53484 - DNA, 373 bp, Glycine max
  unsure (1)..(373): unsure at all n locations
gcacttgttgtcactttgatgaatgaaagtcttatgatacacnactttacagtttcacttcccttccccttttatttcttcaattatgtgctttcccctactactctttctttcctccattaaagcatcgggttcaagcttcttatccaacgcacattcttggtggtgaagctccttcttccatggcttattccctagcggatagggcttcctctctactcttctcctttttcttccgctgcaactccatggtagaaaatcaccattgaaggacctcattgaagctcaaagatccagccttcatagaagcttcacatgcaagcctccatcagatcatatgcctggaacatccactatccaagaaccacaacta

SEQ ID NO: 53485 - DNA, 376 bp, Glycine max
  unsure (1)..(376): unsure at all n locations
agcttccacattnttacatagaatngatgttatttctcttatggaattggttatgcaaacatgcaataaatgaaactccaattcagattggagaatagcataaaaaatactcaattaattaatttggtccaggttttgttcttttaacttagggtaacaattattgcatagggtttatgttgaaatggaaattgtttgttgacgacatgttgcttgtntggttggtggatcaatcacgaggctaaggaacaagaagagaagagggccactactcagttgatgtttgatttgggttataaggcctatgggaagggcttctatggacatgccattgaatatcttgaagttgcactcactatcatacccaggcctacat

SEQ ID NO: 53486 - DNA, 467 bp, Glycine max
tatgcacgcagagttggagatgagtatgattagagaattatagttctttcttggacttcaaatcaagcaaacagatgaaggcatatacatacgtcaaaccaagtatgtgaaggaacttctgaagaagttcaagatggacgatgcaaagtcaatgaagaccctatgcatccaaccattatagttggactggatgaagaatcaaagcaggtggacaaagagacatacagaggaatgatagaatctcttttgtagctcactatgtccagacctgacattatgttcagtgtatgcctcttccaaaaggaaccaagggaagttcatatatctattgttaaatgcatatttagatatttagttggaactcctaaccttggtttgtggtttaagagagaaaaggaatacatgttgcttgattattgggatagcgaatttgtccgagatagagtggaaagaaagagcacacatga

SEQ ID NO: 53487 - DNA, 419 bp, Glycine max
tacctacaagtcctaattgtcattctaaactaggatcaactcacgttagactccaatgtacactaaccccaaatttagcttctctaaccctcagaatgtgacacttctctagctacaacattgtcattctcacattcaaccctaagttaactttccccttcatatctaccaatttgctatcagcaatttcagcacacaatcatcacaaagcatcatcataaaaccctacaacagaatgggtaaatgtggctcacatcaaacatgacaagcgtagcatgctttcaacagattccttcacaaataactaccataaggcataaacctagtagaactacccatcatatctcccagaaacccaatacccgcgagattcatgtgagaagaagtctacccaaacctgatatttggagtcccacaac

SEQ ID NO: 53488 - DNA, 403 bp, Glycine max
  unsure (1)..(403): unsure at all n locations
agcttgatcaanacaattatctaatcattctcttccactcaaatcatacaattgctcattcaaatcattctcaaacactcatttcatgcaaaacaatccactacatatcattttcaatcaattcattgttcaaacacgcttttggtacaaacaaacaactcaaagtgctgaaatttatataattgaaatttaaaaaaaatgaaatataaaatctgaaattaaaatgactgaacataaatcataaaataattgaaaataaactaaaatgttcgagatgcacaaatttaaatgtcctgctcctgtggttgctcctatgcatgctcattaanggccaacacctgagcagctggtgcagatggtgtggcataatcaagtatgggtgctanggatggctntgggatct

SEQ ID NO: 53489 - DNA, 443 bp, Glycine max
  unsure (1)..(443): unsure at all n locations
acaaggcggccgaaggaactagttccgctctggagtacgacagtcaccgcttcaggagcgttgtacaccagcagcgcttcgaagccatcaagggatggtcgtttctccgggagcgacgcgtccagctcagggacgacgagtatactgatttccaggaggaaatanggcgccggcggtgggcaccactggttactcccatggccaagtttgatccagaaatagtccttgagttttacgccaatgcttggccaacagaggagggcgtgcgtgacatgagatcctgngttaggggtcagtggatcccgttcgatgccgatgctatcagccagctcctgngatatccgatggtattggaagagggccaggaatgcgagtatggccagaggaggaaccggtctgatgggttcgatgaggaggccatcgcccagctgctatgtataccg

SEQ ID NO: 53490 - DNA, 361 bp, Glycine max
gaactttaagcaacattgtttaatttttttttccattaagaaacatgtggtggagcatctctcatggaagtgcttatatgagttgcttaactttaagcaatgttgtttaactttcttttcccattgaaggagatgacataatgttacttatataagcatcgttccttaacaaatctatactataaataacatatttttcacaccttacaggatccgctaaattaagttaaatactcattctaataacttcagcatttgagtaaatttttgtgtatagtgtttaaatctatgtggaattgtaagacccacaatattcagataaggaacccatatattcaactatatagtgtagatactctaa

SEQ ID NO: 53491 - DNA, 470 bp, Glycine max
  unsure (1)..(470): unsure at all n locations
atatatataaganaaagcttagtacaatttggtgttgatataagttataaatntcatttttcttagaattgataactttggccaccaccaagccataaacaatttgtagtagcatgtaagcttaaccagaggatgccactttttgctgattaattttgtctattttgcaacattaacaatgcaagggtgaatttactcgatttgttgctgataaaaagagcctcaaaagcctcaagatggaaggttgttctaaccttggaggttttgttctttgttcgtctagtctttctaccctttggttgtctaatttatactctttgtctaaaatggagattaacttttctgtcattctttattatcttgcgtgatgtgataaatttcttaatttgatatatccctttgatcttgtattctagttcctatctccatccaaatctgtattctagttcctatctaatcaattgatcaca

SEQ ID NO: 53492 - DNA, 354 bp, Glycine max
gcacctgcggcatgcaagcttgttttctacatcaagtataatatagcttcgtagttatgcataactatattttaacaagtaactcacgcagttatagtgtaaaacgtcacatctcacacactttgatgtgggttgtaggacgttgaagctacagcatctcttagcggtaataagttggagtcatttcaaaattagcagaagagtattcatcttgggtggcatattaagagcaatgtatctcaccttacaaatacgtgacgtctaacataaattacttgtagcaaccaatgaatgattaatcaatgtataaatatgcactgttgctttgaggttgcatcgaagacaatattatta

SEQ ID NO: 53493 - DNA, 407 bp, Glycine max
  unsure (1)..(407): unsure at all n locations
tctagtaagagtgcagtactcagtaaatgacgtctatctgttgttacagggattgctttatacgataagagattctcctgccattaagtgtctagggcttgatagcttgcggggagatgtggctgttttggctgtaatgttgactggatacagagttgtggcttatttatctctgaggatggggctgcatcattgactatagactgcatagctnatcaaggattcggggccataatattgatttacatctttgttgtttggaacattggtctcaatagtactgtaattcgattctagccacaacgggtatatcttatatccttgtgattgattgatattaaataaaagaatttcgtaccccattgcccagaggctctttgctatgcgaacgtatgggagagggatgt

SEQ ID NO: 53494 - DNA, 353 bp, Glycine max
  unsure (1)..(353): unsure at all n locations
gtcactaaatattgtttgaaagnttatcatctcagttttccttatcaagtaaatggatcatntttaaggtccaacgccttaaaatgatcacctttcaagtaaaaagaatcgcttgattcacgcttaagaaagaactacgtatgtttgatttcctcatcgatggagggtacgtaagagcaaaagccccgcttttgtcgacctcaaaaaataaaaagaaataaaagttaaggtaatacaatttccacaattctaaaaaatatgttgttgtcctttgagacaaacgtgagaggtgctaataccttcctcatacgtaaatacaactcccgaacttagagatttcaatttgatcggtt

SEQ ID NO: 53495 - DNA, 361 bp, Glycine max
  unsure (1)..(361): unsure at all n locations
taagagacgtccangaaggacaaggcagcngaaggaactaattccgctccgtagtatgatagtcaccgctatatgagcgcagtacaccagcttcgcttcgaagccatcaaggtgtggtcgtttctacgggagcgacgcgtccagctcatggacgacgagtatactgatttccacgatgaaatacggcgccggcagagggcaccactggttactcccatggacaactttgatccaaagatagaccttgagtactatgccaatgcttggtcaacagacgagggcgtgcgtgacatgacatcctgagataggggtcaaaggatcccgttcgatgccgacactatcggacaacttctgcgatatt

SEQ ID NO: 53496 - DNA, 263 bp, Glycine max
gagaccttatagtgatgagctcttcgtgtatgaccgtcatacctggttcatatctattgattgcaatccctctccacgtgtgagaattatggcatgattctgattatctggcttaccctcacacaatattgctggtccaggacgctttatcttatatatgatctgattgaaacaatcatatatagtatattattaagataataaatgatagtttacgtaagactcgaacagttaacgttaagagttccatttagttatataga

SEQ ID NO: 53497 - DNA, 360 bp, Glycine max
cctattgatatgggtgctctctggtaacaaataacacatcaattcacatagaaactctgacaaatatacctaaagcactctcagctagaacctaatctacgatcaagagcgcaatgcaacaagagtatagccgacaaacaaaaagctgaaaccgaatgtaaatacacacaatggggacctggaaaaagacaaagaatgagagagagagagagaattacttggaattggtgttactgtcaatgataattttggcaacaactacaagaaggggagagagagtgacaaatgcgacgaggaatattttttaagcacatatgactcatacttagtgacggtttgacaaatcttataaggagacac

SEQ ID NO: 53498 - DNA, 418 bp, Glycine max
  unsure (1)..(418): unsure at all n locations
agcttgtgttattcacagcctccaccgctagctnggagtcactttcaatccataactttctccacccacgatcaaacgcaatctcaatggctgacagttcgcttatatcactcttattatattcttcctaaaaatagaataaactntgttatactgatagaatttagtagtagttaggagactttgctgtagtaactagtaactacttgatgagtcataaatgcagctgcattatacaaatgcatagcatctgtattcatttcacaattttattcaatcaatacatgatgtgtggccatatcaagtgggtattgcatggaacgtaacatccattgaaattctaatatgaacttttcagtttatggatgatgttaatcaaatgatacagtanactagatatatagactttctgtacata

SEQ ID NO: 53499 - DNA, 406 bp, Glycine max
  unsure (1)..(406): unsure at all n locations
gttgcggatntggtcttcgtcggagaaatgatcgaagcgggtctgaaaagaggcaaatttgatcatcctgctttgatgaatgagaaaactagggccaatgaagaggatgagaatgaggaaggaacccatgttgtggctgccattcctacatggccaaacttcccaccatcccaacaatgtcatcgctcagccaatatcagcccttctcattacccatcacccaatcatccacaaaagccatccccaaatcagccacaaggcatgcctgcttaccacatgcccaatgcccaaacaccacctataacgcaaaccaaaaaggaattttgcagctaaaagcctgtaggattcaccccaaattccggggccatatgctaacttgctcccatatctacttgataatgcaatg

SEQ ID NO: 53500 - DNA, 392 bp, Glycine max
  unsure (1)..(392): unsure at all n locations
agctntacacattatatagaatcaaatgttatctctcatgagaattaccaatatccggaataattgctagcataaatctctaaggttatattcacatgagattattttaaagtacataattcattctaaagaataaagctaataatgttatatatcaataaacaaataatgatcgagtttatattacattatacatacatatatatatatatatatataattagtatataattataattaaggagtctagtctatttaattaaacatgtgttgagttagagtatactctcttatactcgtctctaattcttatgaataagaaaatataacaaagtataaataaaatataatattaatcattaatttttttacagaattactaaagtgatata

SEQ ID NO: 53501 - DNA, 384 bp, Glycine max
  unsure (1)..(384): unsure at all n locations
taacgagccacctccctcaccagataacgatatataagcttcttccttatatatacagcttgactcgtccaatttcccaccaaatttattcagccattatactgcaataaattntaacaaccatcaaagcctttccccaccaagtgggtcaattatatagatcaaaccatgccattgtgttcactcaaggactaaatgctcaacgattcatttaaatcacagtcctttgagataaatatcttcttaatcaaagttcattggatatcactcgttaaagtatataaaaatggccaaacttcacttataaaatcctggatgcaccactggcatctgtcaagtgcagcttgacattgattttggtaagttagcatatgttaactacta

SEQ ID NO: 53502 - DNA, 358 bp, Glycine max
agcttgagcatgcctacaaatccattcaatatgacccgacttcaatatcagccgttgatcctatacaatattcaaggcgttttcgtgatttcatatttagaatatttactgaagactcttgaaaaggtatacatgattcttcactttcttatttggatacaacatggttacaaatattcaattaaacaatatcagtgttgggttgttgcgagttacacccttcctggcttgacttagtacactttttgaaaatttccttgttgggaaggagaattctggttctacaattgagattcacatgaatttgggtactaattcaaacctattgtttattgtacgttcttaactatcttaattc

SEQ ID NO: 53503 - DNA, 409 bp, Glycine max
  unsure (1)..(409): unsure at all n locations
accattattaatttcaaagagcatattntctaacacgaagcttatgagttgcttggataaggctaacctgnggaggaagtcgtgacagaacaggccacgaaaccaaatagggctttaagtcatgaggtatcaagaagacaaaacgatgacgatgtcgcagcagaacgtgggtgaggcggtgacggtgtcgcaacacaaagcgggggatggcggtgagttatagtcatgagggagaggactgtcatgaggttgaagggtgagagtgagagtgagagctgaagcattgcggacagaaagagcaagagttagagtgagtgccaaaaacgtgaaacaatattataaataggataatacaacgtcggttttttccaaaaaccaatggtaacgtgactttgttaacatcgatttt

SEQ ID NO: 53504 - DNA, 290 bp, Glycine max
cagttttgtgcgtgccacggtttgacttttctcggaccgcagaggggaaaagggtgctgatcatgcacacaagcatgaccactctcatgcaaatctggatgacgttgctgcttatcaacattatcctcattgaccataactcagacctacccataccgaagtgtcaggtggtctacgccatactgacacacgtgagtgaacatgaggctcacctgatctctgatgctatgcatcgccttcgagggattgcacctacgatacacccggcggacccagagaagtccaacaac

SEQ ID NO: 53505 - DNA, 277 bp, Glycine max
  unsure (1)..(277): unsure at all n locations
ccagccaggtagntatgttgtccaatgaactatgaacctcacttgagtgctcttgatggaggtgaagcacaacatccatcttctgaatcataagtgactcaaaggactccattgatgtgcaggctcttgtggatcttctgcttcaggatcttcatccatctgttcaaaatatacagctatcggctgtcccaccattatctatatcatgatcaataaacttcattccaagcttcttgagatgcccttggtcatcatactatatgctttggtgaattcc

SEQ ID NO: 53506 - DNA, 267 bp, Glycine max
taagcttaagtgtatcatcaataacctcaatatgaaattagcaaatgaattcccatattgagtcgataacaaataaagaagaatgtaggattgatacaagttacatcacattaaccaataataagtgattcagataagccaccagctggaattatacaagaatttacttagaatacagcgcattaagacttaaagagatttgttgggaaatgctagaaaaacactttgagacattcttttaaggataaatactcattctgatccttg

SEQ ID NO: 53507 - DNA, 393 bp, Glycine max
  unsure (1)..(393): unsure at all n locations
cgagacatctagatatttagttcttgatcatctgagtatttttgtgtagcttcatcaaagtaaagggggtctttccactttatgtaccctgatcttattatctttggaagctagacttcattgcatgttgtgttgatgttccaaattcgtaactactgccctggttggatctaagtgatatgaggtttcttattgcaattgtaaggttaaaaacgtgttcattgagtgtcaaaacttagggttaaccttaaatctcacctggatcatagttntctagctaaagttatgaacaaaacaagtttaacgatatttttataagattaaatctgtcacaaaattaactggcttaatgagtgtatcattatttttcttaaagatctgactttaaatatg

SEQ ID NO: 53508 - DNA, 367 bp, Glycine max
  unsure (1)..(367): unsure at all n locations
tcaagctnttgaaccttggaattgtaaatgactgctcatataaaggcttgattaaacttccatcttccaacgagcacagtaacaccctatgaggacaaccacaggaatcatgaatatcaacaaaatttcgcatatgatgatcaaggaccacaatgtgcttccccttgctgtgcgtaagtctgacagggacctgaagtggttgactttcatcaacaaaaangttggaacaatacaaattggactccacaggaccatctaatgtcccagtaaaatatattagacctgtatcctcattcacaccggcaatatgctcaaccatccattcaccttcagtgatgggtcctaaacaagtcgcatttgcatcatg

SEQ ID NO: 53509 - DNA, 440 bp, Glycine max
  unsure (1)..(440): unsure at all n locations
tgacctttgtggntattgccatgtaattgctgttgaacatatgatatggctagttgtatatggatctagaaattagaaaaaccatataaaatacgttaggaaaggactctagtagctatcttaagattatattttgaaataagaaactaatttgactgcacagctcatgttatttcgtgtgacttcagtcggagtagaatgttaatgagttcttttggcctgttatcttttattaatattgtcggctgtttcttggtacaacaatggtcggccttacggtttcggtgatttaaaagaggatagccgtccatgatccatgatccatgatgaagcaantattttatagaacggtgcagtgtggtaaggggaaagatagatggaaattntaaacactaatatattaacacaccattgcatatatttataacatgtaatggatt

SEQ ID NO: 53510 - DNA, 235 bp, Glycine max
  unsure (1)..(235): unsure at all n locations
gctgttaccccatggttgaattgcttactatagagctngtcatagcaccactaaattgtctccttttgaaagttgttatgggtttaacccactaactcctcttgatcttttgcctatgcctaatgtttctgtttttaagcataaaagaaggtcaaagcaaaggcggactatgtgaaaaagcttcatgagagagtcaaagatcaaattgagaggaaaaataaaagctatgctaaac

SEQ ID NO: 53511 - DNA, 386 bp, Glycine max
  unsure (1)..(386): unsure at all n locations
tctagatgagttatgtctgcgaatcggacatcctgtgaaatgttatgaccatntgaatntctcgagtgcttccgttggttaatttcaagcgtctcgatattttatgtcctcaaatcagacatcggagcgaaatgttatgaccattcgaatttgtcgagagcttccgtttttcaatttcgagcgtctagatgagttatgtcaccgaatcagacatctgagtgaaatgttatgaccattcgaatttgtcgagagcttccgttgttcaatttcgagcgtctagatgagttatgtcaccgaatcggacatccgtgtgaaaagttatgaccattcggctttgtcgagagcttccgttgttcaatttcgagcgtctcgatatattatgtccc

SEQ ID NO: 53512 - DNA, 354 bp, Glycine max
  unsure (1)..(354): unsure at all n locations
gtgatcatgaattccaaatatagtggagtaacgctgccatttatctattacaattgtttgtgcttgcttgaatcttgattttaggtattgtattgtcatcatcaaaaagggggagattgtagatgcaattgcctttgatgttttgatgatgatcatgatgatgtgttgcaattaatgcaaatgggcttttcaagattaaaattcaagacaatacttcaagaatacaagtcacaacatcaagatgatcactataatattaggaagggaattcctaattgaattagcaaaggtttggccaagtgatttaaattaaaaaagtggttctcanaggttntactctcttgtaatcgatta

SEQ ID NO: 53513 - DNA, 357 bp, Glycine max
  unsure (1)..(357): unsure at all n locations
agatgaggaagtgtagaaggggtgaaacttcctgctttattcgttgaccacagtattggacctggagatatgtcgcggnggtcaagagaccttggggacgtcaggtggggtgctattgcccaaaaccaagcttgaccaatcccgacccaacccgggcatagtcggtcagtgagaacctgtgatgtacctaaacaggcgagctcttggcagtcaacagataaaaggaacaaagaccacaaagcaaggaggcttgtggtggctggccagctgtgaaacttgattgatatgtgagatatggcctctggtaatcgattaccaagggtgggtaatcgattacaaggcttaaaaatgaacaca

SEQ ID NO: 53514 - DNA, 116 bp, Glycine max
gggatccttagagtcatctgccgcatgcaagcttctcagcatcctctgacctaagatgcttgagcccctcgccatactgagaattaggagcttctgtctgctccatgacatgactg

SEQ ID NO: 53515 - DNA, 282 bp, Glycine max
tcttgaacagttcttgctgatcaggatgccggattgagtctgtatatctgagactctggagtcgactgactagaactttctggtggtgcaggatagggatttcgcctgaagattacatcatcactaatttgctctgaagtaaacatgatcatatcttggaaaactggctagtgaagattagaatcgtgcgctaaaacatttaagtattctaaatctttagccactatcctgggatggtgtaaatggactctaaaactactattctgctgagatgggatcaat

SEQ ID NO: 53516 - DNA, 273 bp, Glycine max
ctttatattctaatataataccttataaaaataatgatgattaccatggtttgacacctatatatttggttgcaattttatttttggtcccactaatgggatgtttgatgtccctcgacaattaatggtcaccaattgaagtaaccccatgttgcttctatgtcgtttgctcatttggacctttcctaatttatgtgtatcttggatgccattccaaagattcaatataatattttttatgtaaaaagttgtttttattgtgatacacttttg

SEQ ID NO: 53517 - DNA, 448 bp, Glycine max
tctgcaaaaggtatcgtgcctataatgattactatgttctttcatgatgtattattatgaaattggaggtgattattgattgaaaagctctatagtcttctatctttaaaacaagagtgattacctgctttgtattatgcttctaatattggtctctgttgtacctataaatccatggttaatggtaaacatataataaatgacattcttcattttttattgaaataaatttctgcctgttgacatatatttttctgttttgacatataataaatgacattcttcattgatatgggtgtatacgctcaaatcagaacaaaaggaagaggaaggtaataactatgttacaaaagggtactttcatgaaccatgcaacattggagtttagatgattttcaattgtgtattcaaatcagccactttggtttccattgtagatctatacttg

SEQ ID NO: 53518 - DNA, 374 bp, Glycine max
  unsure (1)..(374): unsure at all n locations
atccttaagtcacctgcacgcatgcaagctngcttcanagagatccaggaaggatatttcggctgaaggaactatttccgctcccgaatatgatagtcatcgtnttaggagcactgagcaccaacagcgctttcaagccatcaagggatggtcatttctccgggagcgacgcgtccagctcanggacgacgagtataccgacttccaggaggagatagttcgtcggcggtgggcatcactagttacccccatggccaagttcgacccagacatagtcctcgagttntatgccaatgcttggcctacagaggagggtgtacgagatatgcgatcctgtgtgaggggtcagtggatcccattcgatgcggatgctc

SEQ ID NO: 53519 - DNA, 466 bp, Glycine max
  unsure (1)..(466): unsure at all n locations
atgccttaatcatttccaaatatgcatgtgaattangacgcatcaacaagaatcaagccaaggctattgtgcaagcaatcaatggggcaaaacacaccaaatgattataatgatggatggctcaaattctcacaaaggtaaaatcatcactttcaaattgagctttcaaaactatcatgacatgtagagaagaatcaaggatttcaagtcacaaaatgtcaagaacttttattttcaaaacaattacccatttcttgaacatatcctataattcaaagaaaaacatgcaaagtcgtacgtgcacacaaaattgacccaaaatattaaactaaaaatccgacgaaactaacaacattaacaaattaacacaactaacaaattaacaaaaccaacaaaactagcaaaaccaaagaacactcccccccccccccatacttaaacaacacattgtcctcaatgtagcaca

SEQ ID NO: 53520 - DNA, 364 bp, Glycine max
  unsure (1)..(364): unsure at all n locations
ggctgcagctctattaagctgaccatttatcttaacacagtgagtttatttagaaaatagagtntatctcttttatcttagtgagagtgattctcctaagttcttgagtgattcaagaacacccctgttgtagcaaaggactttcacaacctttgtgtgttgccctcgcccagaaagagtgattctttccttcctttcatcttcaaccttgttctttcanaccacaattccagaaaatccacttctatccagaattatctcatggccataactcccantttacccactcaaattaagtgattcttgagcctaaattgaatntcanaacaatacctttcacctcattttggatcacctcatttga

SEQ ID NO: 53521 - DNA, 413 bp, Glycine max
  unsure (1)..(413): unsure at all n locations
cgcttctntnggtgcatagaatgctgtanaaaaaatagtatgtgtcatgaatctctgacataagcttgaaccaattaacattgtttgaatgacaactgttgtagttggacaacaatcacatagtttgtccacaatggtatgctttatgttcctattggttatagttttggtatgcttttgttcctattggttatagctttggtgctagaatagttcaattggagtccacaagaggaggatctccatatggtgctggagtttttgctggagatggtacaagacaagcaagtgaaatggagctggagcttgcagagtatcatggcaagtatatatgaaattagcccataaaagctagattgaattatgtgattaanattccattaagcccttctagctacgtcaacattctagtt

SEQ ID NO: 53522 - DNA, 143 bp, Glycine max
tggtattatggatggtgccttctaattcctatcatatcctttgggccttctgcctcctcctgaagtaaggagaagaaaaaattcttaggtaaaaaattttctttcttagggcaaactctctatttttatccaataccatccta

SEQ ID NO: 53523 - DNA, 460 bp, Glycine max
  unsure (1)..(460): unsure at all n locations
ntcaactgaatntacaacgttcctattgatttcaaaatgttgtaatcgattacaatgatttggtaatcgattaccagtgtgtttgaatgttgaaattcaaattcaaatgtgaagagtcacatcctttcacaaaaaagctttgtgtaatcgattacactaatttggtaatcgattaccagtgatagtgatgagaatcccgaaactggccaaatacaagctaaaggcccaagtggagaaggacgaaggcccaagtggagaaggataaagcccccgagtggagaaggatgaaggcccagaggaagagacactatcaagactattaattgttgttgaaggcccaaactaatttgaaagcccaagttaaatatgntttttagttataaattttatttattggaattttggctcanaactgttagaaagacccatgtctattttttcttttgttcagatacactat

SEQ ID NO: 53524 - DNA, 232 bp, Glycine max
  unsure (1)..(232): unsure at all n locations
agcttagcccatatgtgatggaccttntttttcttggagaggatcaataataatgcctataggttggacctcccaacagagtattgagtcagcaccacttttaatatttctgactcaattccttttgcaggtggagctgatctagaggaggaggaaccaacgagattgacgtctaatcctcttctaaggggaggggatgatgccatcctccctatgaaaggaccagttacca

SEQ ID NO: 53525 - DNA, 393 bp, Glycine max
  unsure (1)..(393): unsure at all n locations
tattctataaccgacgacatctctatgtggtgtgtcagttttcactactataaaaagagggttntacatcggatatttaagactttcaacatagattattaaccgatgttaaaagtaccaatgttgaaagtattatcgttaacattggttttccaaaactgatgttaacgaataaatacaacatcgattatttaaatagccgatgttatatgataagaattatcaaaaaagaaagctataaatctatatatcaacatcggttctttaaaaaaatcgatgttaacctccacagttaacatcagttttttaaaaaatcgatgttaactggcactaacaacatttgttttctattataaagtaaacgaatggagttttttgaattgaggggggggg

SEQ ID NO: 53526 - DNA, 309 bp, Glycine max
agcttcctcgtggtttctttgagaagctttctcaagaggcttctttgagaagctagatccttatctatccacacccctcttttaactgaatgaagctgcttaaaaataattacggatgaaaataacgtaacaaataatcaaacatcaaacataattactaataatatatagatatatatatcacggtgttacaactctctcacccttttagaaattgtgtcctcgaaaattaccttactcaaacaaggaagggtgagcttctcgcatctaactttctaattcccacgtggcatcttctcctgatgcacc

SEQ ID NO: 53527 - DNA, 311 bp, Glycine max
actcagcttcttgtcattacgagcgctttattattatgtgcctgtttcagacatccgagtgaaaagttatgagcatttcaatttctcaagcactaccattttttaatttcgagcgtctcgatatatcatgggcctcaatcgaacacccatgtcaaaagttatggccgtttgaataggactaaagattccgtgttcaattacgagcgtctcgatatatcatgggactcaatcggacatccatgttaaaagatatggccgtctgaattggactagaacttccgagttcaaatttgagcaggtcgatatattat

SEQ ID NO: 53528 - DNA, 396 bp, Glycine max
tttatcatttgtatctctcattagaaggggtatcaacatgttattatagtcaacatctctgagcacaatttataaaccatagaacagcttgtcagatatatcgatctctgtcatgtggatgtaccgtattactctcttaagtattatattaaatattcaaaaccttcattctctctataaactgtgcaccatcgagaacatttcgttggtccagaactattgataacacatatatccattttctacacgacttcaatatgttttgatatagctgcatttccatactctgtgaacaccattggctaacctatttatatagtagttagccatgcgtattttattggcaatcctaacccggcgtttgaatctttttaatgaaatcgaactcaaataaag

SEQ ID NO: 53529 - DNA, 406 bp, Glycine max
  unsure (1)..(406): unsure at all n locations
taacgaanactaagagtgtgagcacatcaaattcaagttgtttggagcgtacaagtgaacaggcatataagatgagcaggtgtacatttatacagaaaaactattcaccaccccgagacatgaatagcatgcttgatataagctttatctggcaacataaaattttttcttgaggttgaactattgttccttacctgaaagcacctcctgattcagcttaaaagattttcctaagtgcaccctttggcaacccctggatagactgtgcagagaaaaatgctttaagaatcagtgattaacagctgcatgaagcggtgcaaataataaatccattgctgcanaggtcatagcattaataaagatgcaaagagtgatatactcactgaaacgcgtgtaactagaatat

SEQ ID NO: 53530 - DNA, 376 bp, Glycine max
ctcttttcacagagagggatgaagacaactcacaaatattctcactaagagatctctcgcactgtattacataggtgcaatgctccaacctaattttcctagccctccatattgtctcataatgcacttgagcactattataaaaatgaatatatctgccccaatttttgacacaaaatttgctgcgatgttagcgaccgagtacctacttctcagggatgaagcaatcgcactgaatgtcaccatattctcatgaagtaatctgtatcccactaatgacgcccactaaagtcctgtacttccgctattcctgctaaatgtaaaataaatacttcccctggtccaccgattgtgaaatccccgaatttctcctttg

SEQ ID NO: 53531 - DNA, 392 bp, Glycine max
  unsure (1)..(392): unsure at all n locations
nggaggngtcgatggtgtcccggtgctgagtataatgattattaaggctacgtgggactacctgagctcaattgatggtgggcaactagggatggcgggttcatgtgtgatttgcgaaagtgggagagttgatttgcaccatcgcccaatcgccacctattaccacatatgacgggtgcctcatattccagcaagctggaagtgagaaagcgtggaagtgtcagtcttcccacttttgtttgttgaccacagagtggtacctggagatatgtcgcgggggtcaggagaccttggggacgtcacgtggggttctattgtccaggacctatcttgaccaatcccgacccaatccgggcatattcagtcagtgagaaccgtgtgacgtccaaaac

SEQ ID NO: 53532 - DNA, 198 bp, Glycine max
  unsure (1)..(198): unsure at all n locations
ggagcttcaccacccagatgaaccttggataagaagcctggagaggatgcttcaatggaggaanagaaagagggagagaaagagagaggggggagcacgaaattgaaggaataaaagaggtatagaagtggaactttgatgtatgtctcacaagactctcattcatcaaagttataacaagtgttacacatgcttcta

SEQ ID NO: 53533 - DNA, 440 bp, Glycine max
  unsure (1)..(440): unsure at all n locations
gttgaaggagctntagaagatattttggctnttacatgccaaactcctttgagtggcatttgtattggttcttaacttgattgttgcatcttagtacatttcatatatgttttgcattgtgcatcatcgtagtgtgtgtgaaggaaattttctaagttagaaaaatttcttaattgattacaaagttgtcgtaatcgattacaacaaactgtctgaagcttaaggagttaagtcttgtatcagtttaatcgattatggtattattttaattgattacagggttgtttgagacaatgactggttttttcaggagtctctactttaatcgattaccagatgaattaatcaattacttctctcttgtttaagttgntcagaggtgaacaagaacactntaatcgattatgtaggtaatcaaatcaattacattgttcttgagt

SEQ ID NO: 53534 - DNA, 439 bp, Glycine max
  unsure (1)..(439): unsure at all n locations
aagccccactctatcattaggattagtaccagacatctcanacaaacaaatcaaatgtaacaagacaattatagttgttgtttgaatacctcacccactcaagtgtatcacacaattatggcttttctctaatgaaaacactcttgtcttttaccactctaattccccttgagttcttaggcaattcaagagattatggccacatcaaagaacaattcaccaatatgtgtaaggtaaggctagagagacaaggaaaaggttaaccaagaaaaaggctaacaatgtttttaggcacaattgaaggaaataaaattcagaattaggaattcaagaacaatccttctacaaccaatatttaccttaaaatattttttaaagtcttcaacatgaacattcagccattnttattttttgcttatcaattctgtttttatatata

SEQ ID NO: 53535 - DNA, 475 bp, Glycine max
  unsure (1)..(475): unsure at all n locations
ntgagaatatggttgcagccattggtcaagatgagccacatttgcccattccttgctatcatgacatcagagttccactcttgaggaaggaagttgaatatactgaaaatttgataaaaggccacagggagcaatgggtcaagtatggttataatattatgtccgatgcatggactgatcggaaacaaagatgcatcattaattttttgattaaatctcaagttggtaccatgtttttgaagtctgttgatggctctgattttgtaaggacgggttaaaatatttttgagttgcttgatgccactgtggaggaagttggagaagagaatgttattcaagttgtaaccgataatgggagcaactatgttttagcgggtaagttgttggaggagaaaaggaaacatatttattggactccttgtgcagctcattgtattngattgatgcttgaagatattgggaagcttcccttgat

SEQ ID NO: 53536 - DNA, 386 bp, Glycine max
  unsure (1)..(386): unsure at all n locations
agctntgcttactaatgaatcaagacacaatttgngcctagcccgggttgagtntgtgtcctctttgtcaggaggcaaatgtgtctactattcatattctccgtgattgtatctttgcgcaacaagtttggaataagcttttgactaagttagcaggatctcagttttttgggagtgatctatgaccttgatgttgcattagaatatcactttgcctttgttttttgcagaaagggtttgagatgtagtgtttggtgtgacctcattntttgtggaggaatataattgatgtaagtttctatttcttttcttcatttngtaacaacttgctttgtcgcattagaaggatggttatgaatattaaaaacatgtggaaaaagcaattt

SEQ ID NO: 53537 - DNA, 476 bp, Glycine max
  unsure (1)..(476): unsure at all n locations
tcagcgtcggctcggccacccgatccaccacgagcgacgtctatttcaaggagctcgtgagggccgcgtcgctccggagctacggcaatcgcgttcagttcggtgatgctgctgccgccgcggtgaagaagatgaaaatgcatcggagtcgcagcgtgggaatatttggaaggatcgacgaggaaaaggtgtgtgagtttggagatgatggaatcaaggttaggcctaatgcttatccaagaagtaaaagttatgctgcacgtagagacggatcagcaaaggactgttttagttaacattaatgttaattacgatgtttttctctcttaactaaaaatgtaaggaaatatgcatgacttgttgttctcttgtttaataatttgtgaaaatagttaatgtaaagccccggaatgctgcttgagttgaaggtatatccgtgagaacttgaanaatgtntggattcagaatttgtacgt

SEQ ID NO: 53538 - DNA, 302 bp, Glycine max
  unsure (1)..(302): unsure at all n locations
gcttctcanaacattcctcctgccttctatctcctgcgcnctctcctatcaagtcatacgcactacgagttgagtaatgaccctctgaatctgcagaccattcccaactatctgagatcttgtggtggattttaaactctgccacatctttgaagaaattagctgctgaggtaatttcacttgtcaaccaggctcttctccacgcaaagttccactcccactccctatctcgaaatattcccatggatctaatgagctggtgctgctgcattgaaattgaatacaacctanggtacttcact

SEQ ID NO: 53539 - DNA, 388 bp, Glycine max
  unsure (1)..(388): unsure at all n locations
tactcagcttactatacctatagttnacaatgtttcttaaatatcttacaactgtttttataggaaagtgataggaagggaagacatccagatactatccagaggatgtaaataacatgctgaagtttctagcaagtttatctaaaagattaatgtacaagtctaaattgttagtcgttttatccatcaagtaagattntagtatggttaagagaaatatcaaattcacatttatgaaaaagataataattaattttcaattcttaagtacttgtaccatctcacaatgacataaatcctataacttactacgtatattcatatttttgtgggacaacaaaagaaaatatataattagtaattntctgaggcccaccanaagttaaaa

SEQ ID NO: 53540 - DNA, 350 bp, Glycine max
gcttctacttatgtggcagggcgggcttctttcaccttcttgtctccaacgcgaactttgaccattgttcttccttcccgcaatgcttcttttcatgtctgcctgagtgggcttatagcctaaaccatacttcccacgatttccttgagtatttatcaggctagttatgccgccgttgttttttcctaaacccatcccgggttcaaaaccgttccccaacataactcgggccatcattaccgctgcatcggacagacaagggtgcccaaagagggagtccacggaggaaatgctgaccacctcaaaagactggaaagcagtttctaacgattcttctgcggcttccacat

SEQ ID NO: 53541 - DNA, 392 bp, Glycine max
  unsure (1)..(392): unsure at all n locations
gcttgtgctgctgaatatgagtgcaaagagggagcaaatttgcaagcaatgcatggagattgaagtactatgcagagggtgaatganaatgcttagaggaagtaaaatggtaactgcctaaggtagttgccttatttgttggcagttttgaatgactcgcttagcgcatggattcgctatgcgagtcaacatgacgtttgcgttttaaggctcatgcacttagcggatcttctcgctaagcccaatacaaaattatcaaattccagagacgcttttgggcttagcgcanaggtacgcactgggcgagttctgcagctctgattagtcctgcaactctctcttagcggaccaaggccgtgcttagcgaataaaatgctccttaaatgcagtag

SEQ ID NO: 53542 - DNA, 347 bp, Glycine max
  unsure (1)..(347): unsure at all n locations
agcttataccanattcaaacgacaataactttatacacgngatgtccgatgagtcccgtaatatatcgagacgcttaanattggaaacggaagctcgtagacaattcaaacgacaantaacatttactcgaatgtcctacagagtccagtaatatattgagatgctccaaatnganaacggaagctcgtaccaaattcaaacgacaataactttttactcggatgtctgattgagtcccataatatatagagatgctccaaatggaaaacagatgctcgtgtcaaattaatagacaataactttttactcgaatgtataattgagtcctgtaatatatccaggcact

SEQ ID NO: 53543 - DNA, 424 bp, Glycine max
  unsure (1)..(424): unsure at all n locations
tactaagcttgagcaggantaaatgacaatacttttacacggatgttctgttgagtcccgnaatatatcgagacgctccaaattgaaaacggaaactcctagataattcaaacgacaataactttttactcggatgcccgacagagtgtggtaatntatcgagggatgctccaaattgaaaacggaagctcgtatcanattcaaacgacaataactttttactaggatgtctgattgagtcccgtaatatatcgagacgctcaaaattgtgatccgaagttctgagaaaattgaattgacaataactttatgcacggatgtcaagttgagtcctgtaatatatcgagacgctgcaaattgaaaacggaagctcgtaggaaattcacacgacaataactctctactcggatgtccgattgaatcg

SEQ ID NO: 53544 - DNA, 234 bp, Glycine max
taagctggaggagattatatattactaagacctatcatcaatggttgtatcttgtaagtatatgttgatgaacataatgaagttattagacaactgcatctctctttaaaatccattatgacaaatatccatatgcttcagaatgataccatcgagatactgctttgacttcacattgttacattctaattagggtgtccctacagtcttaatgaacaacaacactaccgattt

SEQ ID NO: 53545 - DNA, 405 bp, Glycine max
tctgcttctcttgggttatttatgatgcagacttcaattgtataggttcttaaatgttcttattattgaaatagttaacgatgttcgatgtacttttttttggtaagtgattcatttctcactgacttatttaatacaaatacactaacttttcagggtggctcaacttcctttattgctcctaaaacaaatcatggtgctgctgcatctgaatgtccttctgatgcaagggcaccatgttttgctagacctgcaagggaagaatcagtcttcacaaattcggtgatccaaccaatggctcgggagcagggctctgattttagtacacttgatcctcctacatttgctaggccaaccagacagattagaggagatcagttacattctgaaaagaaaacgggctat

SEQ ID NO: 53546 - DNA, 290 bp, Glycine max
  unsure (1)..(290): unsure at all n locations
gctnggatcccatcttgctagcaagtgctgtagcagctacagcaaggccagcaagaaatggtgtcgcctgatgtacatagcacgttgttaacacagacaaatttgatactaaagacaactaaatgaggaatgaaattgtgattaacattcttcgtgctaattatgatgtttagttcaacacattccaactgcaactcgacaagtttatcaagagtccagcactaataccattgaatatatgaaaccttctccacattttattgaaggctataacaagtgagtctgaaaat

SEQ ID NO: 53547 - DNA, 592 bp, Glycine max
  unsure (1)..(592): unsure at all n locations
aaaanaaatttgatcccctttgatnatcgagancgtttgngactgnacngcgcacactatagaaatagctgcaaggcttgactagcnatacntgagatgcaaatagtgttttacattagtgtaaatccagtcatggggctgcgatagacacgaaaagtctagtaaccatggtgcgcgatggtgtgtcgctgagattggcagctccctctgcgtgacacaccagtacaggacctttgacacttccatgcacttgctcagcatctatttatgcgcactgtaccttatgctggagattgtgcaagtgacctcctaaacctatacagcctatatctccttcaggcgaacacttgtgagctatacagctatagacactaccctgcagggaggaatcgaccctacctaatatggtgcagccctcagaaacatctacaggagaacgctgccttctttctaaatgctgattgccctatgncaacgtacatttctccaccagtccaacgaacagcacaaccctcttaacaatctacaatggacgatcctacacgagctcttctttaacaacatgtgatgcatatgactattcagtacatgn

SEQ ID NO: 53548 - DNA, 447 bp, Glycine max
  unsure (1)..(447): unsure at all n locations
agcttatgcgcatgttttcttacgaacgtttatttgcggaagacatcctattaactaagaaaaatgcacccatatacaatcaaggtagcttcattacctagattatttacatgtacttccaaggtgtatttgttatttacatcacacacgcctccttggctgaatttacatacatgcatactcaaagcatnttggggtaccaaaaactgcacatgcgctcatcttggtatttctaatacccctacatatacaaacttcacgatgaatcttgactgcctacacaataaggtgctacatttcatgctntttttcaagtttttactacctaaagccgcatgcaaattcaaacatattntcctttgttgactaannattgtattcaaattaaaaggtatatattnttttgtaaatatgtntcttcacataacatgcaacatatttatatat

SEQ ID NO: 53549 - DNA, 343 bp, Glycine max
  unsure (1)..(343): unsure at all n locations
ntataagtgcgggttcgggagacatatgtcaagcgttcgttatatgctaagatgatattccgagtactttggatttggtacgaccatgctctcctgatttccagctgggaaattggcgagtggaggaacaccccggcatttacgcaacaagcataatgtaaacctttacgggtttaaaagctctatagttgggcactaagctttagagttctcattttgataaggctttgtgtcttttgtttttgaatttataatacaaggatctttcttgatctgttcctggtctctacccattctcattcatttgcatgtgtacttctttttctgaaatggcagatccgat

SEQ ID NO: 53550 - DNA, 446 bp, Glycine max
  unsure (1)..(446): unsure at all n locations
cttgcaagcttgtgtgcgcagatcgatgtagtatgttttcctgattatgctacattgtctttgaaaagttataaataattataatttgtacctttatttcttggtttctaatttgaatntttagccccttgtaacacaaaaaataaaacccttatcaataggtcaaacttacaagcattacatgacaatttataatttgaaacaaatcaataaataatntatctttttatcctcatttttaattattttttcgctttatttttgctcgttttgtctttgtctttnttatcactgtgaggtttcattttactttccatctcaaatgctcaagtctagtgtgctatataaactntaagaaaatagattagatattgaattgcattaaatgtttgtcataaattttggcacaacatatacatttntntcttctaagcaaatattattta

SEQ ID NO: 53551 - DNA, 415 bp, Glycine max
gggcggcgttgcaatcgcatggtgatgtcatggctcactctttccatgagtcctgctatcaagcaattggtgatgtggatggattcagcttttgaaatctggaaagatctcaaagatcaatcttcgcattcagataagtttcacattgttgatcttcaagatcaaatccaaaattgtaagcaagttaactcaagcatttctgagtaatatactcgtctaaagattttgtggaaagaactagaattgtatagatgttttttgttgtgtacatgttctagtccttgttcttgtgggctcatttctaaacttaagaaagaatgtgaagatgactgtgtgatccatttttgcgtggcctcaatgatgtgtatgcacctgtcagatctcaagtcatgcttatggaacctatgccttcctt

SEQ ID NO: 53552 - DNA, 426 bp, Glycine max
  unsure (1)..(426): unsure at all n locations
agcttcaccaccgttgcaaatatcataatgttttacaaccatactagctgatcaacagacatcttctcaggaggatngttttctattagttgttgcacagccgtgaccaatacttgaaagcctgtagcaaaatggattatatgtaatatttttatctcatatttccaaatgaatatgtgcctttccttgagcgtatcctttaatataatctatgccanatcatacagtattctgtaaacatttgtatgtttgcttgaatatcttacaaagttaggtccatgttctcagattccagtatgatgaaaatatgtatagtgtaatgagtaaatagtctatggactaatagtgtaaagtggttttacagtcatccaatcacannatggcagttggtgacttttataagaactaccttaaaagctacacata

SEQ ID NO: 53553 - DNA, 472 bp, Glycine max
  unsure (1)..(472): unsure at all n locations
acactatgaaactcaagctggggctngggcatatgattataatattattaaagatgttngatatttgatattaatgaaccactggataagtggcacagtcagttatttatcatttctgtttatagtgtgttgtcaagttgttcatattgtgcatgttacttattctgcctaacacttctactactgcatattcatagtttctagtttattttcttgaaggatttcaatgaagttgtggtcttgcaactttaattcacagcttgcaaatgctttatcaattgaaggggactaccagggttcaatctctgccttagagtgtggatatgtctgtgctactgaagtatgcttcccggagttgcaggtatgttgtcataggttacaaattacaagaaaaggcatgccctttgcttccttgtctgctctttgccactgattcaatagtgaatttctaccatcaatagatagaactttc

SEQ ID NO: 53554 - DNA, 280 bp, Glycine max
  unsure (1)..(280): unsure at all n locations
agcttattagganacataatacaaagtattttgatgttctttgacaacaaacgaaccttaatccttgcctcctgtaaaataaattaaaanaaaactaatcttagtaccaccataacctgaagaaataattaaatacagcattggtttgaactttgaagggaactttctttctttagaaaaatatattacctgaaagaattgtatgtgtatttctgtggatgctaatctgagaagttcaattgttggagctctatgtagggtcgttgattcctaaagctat

SEQ ID NO: 53555 - DNA, 443 bp, Glycine max
tgtaagcccaaagtatttcttatcgaaaaagattaaaattattgcaaataaggcaaaaaaaaaggaggtgccataagtgctaaggtaaaaaaaaaaagtaattttgaaataagggcagaaatagagaagtgtcataagtgccaagaagaaaagtgttaatagaggaataaaggctgaaaaataaataagcttaggcaggaaataagtgaaagtttttctaaggatgcatgctctcttataatcctaagtttttgaaatcccagaaaaaccatgatttcttgtttagccaggctccgttacaagccaataaaagtccttagtgatccaccaagtataagtaagcataactttaattgagaagaagttcaaaatttgggaatattaattgtaggtcgtagaatttcaaacactcaccccagacacttgtgcgcagagagaaacac

SEQ ID NO: 53556 - DNA, 353 bp, Glycine max
  unsure (1)..(353): unsure at all n locations
tatggaaccatataacatttgtatttcttattataagggtaatcatcaggttattttagtcaacatttctgagcacaatttaaaagctttagaaaagcttgtcagatatattgatctttgtcatgttgatttgccgtattattttcttatgtattatataaaatattcaaaaccttcattcactctataaactgtgcaccattgtgattatttgtttggtctgtntctagtgataacagaattagccatttccttacaggtcttcgattattttattatgattgtctccaaatcccataactctgatgatcagcattctgtctaaccattaatctatgagaatatggttaccc

SEQ ID NO: 53557 - DNA, 470 bp, Glycine max
  unsure (1)..(470): unsure at all n locations
agctactgaanacttagatatagagcacataaaacacaagttgtttggaacatacaagtgataatgtatataagaaaagcaggtttacatttagacagaaaaacttttcagcaccccgagacatgaatagcatgcttcatataagctttatctggcaacatcaaattttttcttgaagttgaactattgttccttacctgaaagcacctcctgatccagttaaaaggattntcctaagtgcaccctttggcaacccctggatagactgtgcagagaaaaatcctttaagaatcagtgattaacagcagcatgaagtggtgcaaataataaatccattgcttcaaagttcaaagcaataaaaaagatgcaaagagtgatatactcagtgaaatgtgtgtaactagataatggactcaagtacctgaaaaatgcagaatgttccgaatcagcgggaagaattttatgttatg

SEQ ID NO: 53558 - DNA, 384 bp, Glycine max
  unsure (1)..(384): unsure at all n locations
actggatgcgttggtcatcttggtaacccagctgttcttgaatcagaaatctgtacctgtcgcaagggtttgtggcttgtgctcctctgctgaccaccatacagacctttgcccttccatgcagcaacctggagcaattgagcagcctgaagcttatgctgcaaatatttacaatagacctcctcaacctcagcagcaaaatcaacacagcagagcaattatgacctttccagcaacagatacaaccctggatggaggaatcaccctaacctcagatggtccagccctcagcaacaacaacaacagcctgctccttccttcaaaatgctgctggcccaagcagaccatacattcctncaccaatccaacaacagcaacaacccc

SEQ ID NO: 53559 - DNA, 479 bp, Glycine max
  unsure (1)..(479): unsure at all n locations
gcgagacaacaactttngcaccatctaactcttcaatacaagcctgcacttcatcttcctccttcttggtcaaacattctacatgattattcagtgctttttccaaaggagactgtagtaccatggcaagctgctaattctatctcccgttctaccttcttcacatcaaaataggccttctgatcacttgagtgcttcattgcttcaaataagttgaatgaaattttctgatcctccacactcagttctaacttacctttccccatatctattacacaactggcggttgacatgaaaggacgttccaaaattatggggatttcaatatccctctctatatccataaccacaaaatctgtagggaaagtaatatgtttaactctgaccaaaacatcttctatcactccatacggtctgatgatggagcgatcagctaactgcagagtcattctggttggcattatctctagctctcccat

SEQ ID NO: 53560 - DNA, 321 bp, Glycine max
  unsure (1)..(321): unsure at all n locations
tcagctcgtgctagggactcttccatttcagcactngtacattctagagcgcccgcgcccatccagagggaggccccccaagctccggctccaaccctgactcactcggncagcaacgcccactttagcgccggttccaacgcgataaggaactttcccccgaggccaactacataattaccctcgatcccaatgacgtacgaagacctcttgccgtccctcattgccaaccagatggctgtgatatctccctggaagatctaccaacctccttttccaaagtggtataaccctgacgcaacctgcgcataccatgggaaa

SEQ ID NO: 53561 - DNA, 423 bp, Glycine max
  unsure (1)..(423): unsure at all n locations
tgatctatatggactagtttagaaaggttttaactctgctttcttcaatttactcagacaaaaggatgagacttcaaaatccttagtgttctgcaaacaaaaaattccagatggaaccaactctgtaagattcagcaaaattcaaagtttgcaactgccaatgggtgatatttatgcctaagctccttaaatgtgcatttctttcactaatcatgactcacaccaccaaaaccaatttcaagggtcaattttcttgatggaatacacgtttatagaccaattcagaaaataaaatatttttccatctagttttcttgatgcaaacaggtggaattaaacaatttccttcactcaataccacatttgtcaaagaanaaaactaacaggaagcaatagcagaaaaatccagtgactaattaacag

SEQ ID NO: 53562 - DNA, 278 bp, Glycine max
  unsure (1)..(278): unsure at all n locations
tatgccctctcccctcggcggtgatttcttcttcggcatttgcgagatangtgntggcagtgatattattgaccagcccttcgaaaccttctaccgagatgtcttgggccacatgggcctcgttcaaaaccttcactaataaagcccgatgaggctcggagctcatgagtaactccaacagcgagaccctggccggggttttgttgtgctgttcgataaccttgaattcgctctgctgaattatacggaggaactcactggcttcctctagtgacacc

SEQ ID NO: 53563 - DNA, 353 bp, Glycine max
  unsure (1)..(353): unsure at all n locations
actcagcttagcacttctgtagggtttcagggctntccatcagctcttattaatctgccatatactcagccggtattaggcctcatgagctttctcatatccagcttactggatttagtttgggtgacttcccttttagatacttaggtgttccccttttatcatcgagattaaatgtatgtcattatgctcccttgctttccaagattactggcctgatttatggatggagcaagaagtctttatcttatgcaggtaagttagagttgattagagcagctattcaaggaattgtgaatttctggatggagatttttcctttgccgcaatctgttctggaccgaatcaacgct

SEQ ID NO: 53564 - DNA, 462 bp, Glycine max
  unsure (1)..(462): unsure at all n locations
agcttaaggagaattatctntttcagctctatactttgcatctcaggatcaagtacctaagtccccatatcaaccttatttatctagactntgttccaagtttgccatgccaagatttgatgtcatctaaacataaggtagaanttgacattaacatttggtttagcaagaatattcttgtagggaatagatggaggcaatgaccttgaaggaagtagtcactcagtagcttgttgttgatcctttctttttagacattgatcaatattttctaagagagttaatggtctaataggttctgtagtggcttgcatcactttcctttgttctagccctgcttatatatccacaatataatcaatggttaatggtccttatatatcctcaaagcgagtgatgttgtcttcatttaatatttctaataagacaacattaattgttctttcatcagcatcaaacact

SEQ ID NO: 53565 - DNA, 384 bp, Glycine max
  unsure (1)..(384): unsure at all n locations
ctttaactgaatntgcaacattctaaatgtgttttaaatggtgtgatcgattacaatatattggtaatcgattactagtgtatttgaacattgaaattaaaattcaattgtgaagagtcacatcttttcataaaatgctttgtgtaatcgattaccaatgacaagttctgaataaaaagtctagagatgtaactcttccaatgggtttctcaagattttctcaaggttataactcttctaatggttttcttgaccagacatgaagagtctataaaagcaagatcttgacttgcatttcaataacttttacaacttttgaacttctttgaacaacttttgagatatcttgaaaccttcgcttttgatctttcttcttcttctttt

SEQ ID NO: 53566 - DNA, 370 bp, Glycine max
  unsure (1)..(370): unsure at all n locations
agctntgttgggttaatggatatgggaactatcttctgaccagcagcagctatgggctaggatcatcaaatctaaatatggtggtctggaagagcttcagtcgggcagagatagaaggggctgctcatactggtggagggacttgaggaagatttatcataatgctggtcagagcatctttcaacaaaacttggcttggaagattggtggnggggatagaatccatttctggacagatagatggttaggggaagactgcaccctanagcagaaatataattccttgtttttgatcagcangcaacagcacagcaccatctcacagatggggaatttntctgaagatggntggagttgggatctcaattgg

SEQ ID NO: 53567 - DNA, 468 bp, Glycine max
  unsure (1)..(468): unsure at all n locations
nngcttggattgtattataaattattaatcttaatttatattacatagcaaaacttggcatatcataacagtgggtatctcatgcatttggttttaggcctaaatggatatcatcataactgcagatgaatcaaaggctatggattccagccactgaatatgcaagcagtataatatttgaagaggctatgttgccgttaagtgtctactaatagtgtgctctagagaggttcccctcgaatatgtttagtatactaagaatagctagtgccttggacagggtacgagcaggtgcagatttatttgttattgntcatatacaccattcttagaattgtccgtatcaaattaaatttctgtaaaaaaaattgtggaaagtttcttcttctttggttcatggttggtaattttttttccttacaaaatttatcatggtcaatggtattaaactttcaacgtttttctttg

SEQ ID NO: 53568 - DNA, 397 bp, Glycine max
  unsure (1)..(397): unsure at all n locations
agcttcaagaaaaatatggcctcagcanatttcttatttccagaatggaattctatcaatagacctccaatctttaatggagagggttaccactactggaaaacccgaatgcataattttatcgaggcaatagatctaaatatctgggaagccatagaaatatggtcttatatacccaccacagtagaaagagtttcaatagatggtagttcatcaagtgaaagcataaccatagaaaaacctaaagatagatggtctgaagaggatagaaaacgagtacaatacaacttanaagccaaaaacataatagcatctgccctaggaatggatgaatatttcagggtttcaaattgtaagagtgctaaggaaatgtgggacactctttaattaacacatg

SEQ ID NO: 53569 - DNA, 328 bp, Glycine max
  unsure (1)..(328): unsure at all n locations
ntagggatggaatacttacttgttggtgatgaacaaaagctcanaacggaatcaaaaaatgcgaanaaggatgaccctagggctgcaaattcgtcaatcccgcgggtatggcttttgaaaggggggaaaagaggtttttgaatgtaaaaacgccccccctttcgtcatttttataatttggtgcaggggtggctcgcccangcgagcccagctcgcccaggcgagctaacctgcattttttttttttttttatttttttttgaggggaacaataaccatgttccctccctttttatggattaacaatttgcctatcttgaacttactt

SEQ ID NO: 53570 - DNA, 460 bp, Glycine max
  unsure (1)..(460): unsure at all n locations
agcttgcaatgaattatattgnctatntattattctggtgtcaatctagacacacaaaccaaggccataattganaataggtaaggtagaaatgatcatagtcattggcgaaaatattgacttctgtaactgctactaagtttgcaatggaagacattgtatatatattgatgaattttgcattcactaaccataaattgtttaatttgtacgctcaaatctattagctcatgtgttcaacttanaatatgaaatttctattttacatcttttatttggcattatgtaaccttgtttggcacattacaaatttttctttgatttctcttggccatagaatagatcttgtttatatnagtctactttgctgtagtaaaatcaagatatagttgcgtaaccatcaatgactanaaattgcattgaatatcgacactgatttacaaacgtgatactaaaaaat

SEQ ID NO: 53571 - DNA, 407 bp, Glycine max
  unsure (1)..(407): unsure at all n locations
cttggttttgcagtatggtgttaaacaacatgggtcctatggcagcaccaaaatgggattatctttcacaatgagagccttgatgtggatagagtttgggacttgattgttagcaaatcataggcttagtcaacaagtaaaatcaatactttctcacactcatggcatgcatcggcaactctaccacgagtatgcatttaagggtaagcaactagtgggggctttgttttcacgggttgggtcaaagaaattatcaatatacaaacattcacacttcaaatgctattcataggggagcaatatggatactggattgacagatgggacatatagtattattgtaacgcttgttgggggaagggatcggngagcaacatggagaacaataatatggaggagaatcaagg

SEQ ID NO: 53572 - DNA, 331 bp, Glycine max
  unsure (1)..(331): unsure at all n locations
agctntctccctctccctcacgttngcttttcttccttcttcatccttcattgaagctccattaaagctccaaccttnggtgctcatttctgctccaaatcgtgaaaggaaggcattttcggagtcgtgaagcgcatctctacgtgtaggacctcgaaatttcaggtttgggtagacttctttctcacttgattttcgtgggtattgggttttgggagatatgatgggtagttntgctagggttctgcttcatgatagttatttgtgaagaaaattgttgaaagcatgttgaacttgccatgtttggatgagttaagtttacccattcagt

SEQ ID NO: 53573 - DNA, 438 bp, Glycine max
  unsure (1)..(438): unsure at all n locations
atgcttcatggaggattaaaagagggaaagatttagagatggnggagcacgaaattgaaggaataaaagagggagagaagtggatctttgaagtatgtctcacaagactctcattcatccaagttacaacaagtgttacacatgcttctatttatagactaggcagcttccttgagaagctttcttgagaaaacttccttgagaagcttctttgagaaaacttccttgagaagctagagcttagctacacacacccctctcataactaagctcacctccttgagaagcttccttaagaagattcctaaagaagctagagcttagctacacatacctctctaatagctaagctcacctccttgagatgagaagctagagcttagctacacaccccctataatagctaagctcacccgcatgacaaagaatatgaaaata

SEQ ID NO: 53574 - DNA, 360 bp, Glycine max
  unsure (1)..(360): unsure at all n locations
cgcatgctttctttgcctattaagcctattggttcttctttcttatctccttttaattctaatattagccttaatcttcaccaattactgcatgtccttgctatttctaaaaatctgtcaagtgtcagtcaatttgctaaagacatttcagtctttttttgaattccatccaaatgtctggttggtgaaatctcagggatccaatgagatacttctcaaaggacgtctcagttctgatggtgtatacacgtttcccagcttgctgtcaagtccttctttcaaagtcaagacaaactctcttagaactagttctattntaccacatgctattgtaaactctgcatctgtacactctattac

SEQ ID NO: 53575 - DNA, 461 bp, Glycine max
gtgcatggagttacattctccccctttctcaagctaattcttatttcttcttgacatcatcaaaatcttcatgatttacattctcccccttttttgatgatgacaaccacctgtaggttaggagcaacaacaaataaaaaatatctatttgcatatagtttactcccccttggttttgcaatgattgcttatatgagacagttgaagatttcatatttttcatatgtaaacaaattgtctcataaacaatagataatttttcttactattttatcctttatctttctctccccctttgtcaacataaaaaacaaatcatgaatagagaggagaaagatgataccacttgttgcaatgtatgagaatcaagtgataccaaaaggcattaaaacaatcattcaatattatatcaagcaaaacaagtacaataacacatcaatcaaacacaatcaaatacaatc

SEQ ID NO: 53576 - DNA, 409 bp, Glycine max
  unsure (1)..(409): unsure at all n locations
aagcttgtaagtcaaactgaacttagatattgtctggtttcaaacactntattaaanaaataaaatataactatatcaccgattttgtgaaacgtgatgagcatattggttcggaaacggatgggaggcgaactttaattattatcttttaagtatgatgacctttaatctttaataatgcaccgattgggagatgaaacaaacttttttttcttcttaaaaatgagaaacgtactaagaagaccaattttaaattgaaaggaaaattccattatggtggcataggtcattctacaattntcaataggttgacaatcacatgtatcatttatttttaggaaacgaatttcgcatcaccaaattggaaagattaannttttatattctggttttaaattttaatcacaaa

SEQ ID NO: 53577 - DNA, 459 bp, Glycine max
gggcaacttgtaatatgagttcaactatatttgaacaaatttatcttatcccattcaagataaaaccagtagtcaatatcaccaacgtgatttcgaagttatggctcaattcaacaagaactcaaattccatgtatgctatttatcatgcttgcaacaaattgtaaacaatttcttttgaaatgaatccatatcagttcatgaaactgctctgaacacaatggtggcaaggaattttgattcagaagttggaatgccacaacaacccaaaaaatgggcctaattttcattaaaggaagaagattattttgaatataaataatcttattggccacaaagatgtataataaattactgtggtaatgtaacatccagccagcaggttcagacaagaaagagggggcaatcagaaaacaaaaatagaacataaatactactaaaaatgtcaaaactgcttata

SEQ ID NO: 53578 - DNA, 517 bp, Glycine max
  unsure (1)..(517): unsure at all n locations
ccctatgacctttctagnacccgngagcctctgagtcacctgcggcatgcaagcttggataaagatctactattccatggtctatttatctaaaacacaatatcatggcgctgttgatcttttttctacgacaatattctagcactcatgtatatatggaccgagaagaacatacgacaaatattatagcactcatacattttaagaagagtgaagaattgaagaattcatgactaatataccaccggtgatgaatatgagaaggaagcattcttctctgagcggccttaagaactaattatctttgtaaactaatttagtagcatatgtacatattatttgcgctccaaataagatattatttttttttattgagagttaaagggaagatactcttaatcttaatactatatattgttcttacattaaaaaaattaaaaatctcacactcctttntgaagatatatatatatatatatatatatatatatatatatatatatatctctatatatcg

SEQ ID NO: 53579 - DNA, 393 bp, Glycine max
  unsure (1)..(393): unsure at all n locations
ngagaactcacatctgtttctggtacaatcttctatagattnttgcaccttcatgttctgcatgaatctctctctcagtccttattgccatggggttgcttaacaaccacccttcactgtcacacaacatagccgggtccaaaacttctatgtgtttgagtgttttaacttcatcaaactgatttctcatgtcaagtgccatttcaatcacatcagactgtatgaatacctgccataacacaataacaaacgtgaatttcagcaaagttgattcaagtacatgcatttaagatgcccttggatgtttctcatgcacatttcctggagatctcttgcattatgtaagacttatgagtgcatttgaagatagaaagatatntataaaccttgata

SEQ ID NO: 53580 - DNA, 421 bp, Glycine max
  unsure (1)..(421): unsure at all n locations
acattatcaatggntgtgaatggtgacaacaccaatgttgcctatcatggaaatcaacaactgggacaagcattcaccatgcttgaaaatgcctgtcgtgggagtcgctaaagaagggaacccaatgaatggggagaatatcctgcatcangagctcgatgatcatgctatgatagtggccatgcaaaaagagatgaacatgctcaagtgaaacaacgcacaagaaatggagaacctctaaaggaaaatgccacccttaaggaccagtacctgaagcttcacgaagaccataatgcaaccaggactgaggaggctaacacgacatggagagaaagaactccctctatcacacaaccaaccccaagagcaacaaatgccaaaaatcgactttatccctttattgatggtattatggaagcac

SEQ ID NO: 53581 - DNA, 387 bp, Glycine max
aatattgatgttgcctttgcgggacaatattaaaattattatcttctttttctaagtagatgggattaactacactaaacacttgcattggtgacatatatatggttcaccttcgtatcagtttctcgcgggacaccattttaaccatggagatgaagttacatcttactgcaggcattattattattattattattattattattattattatttagtttggttcatggttttcctttattactgatatttcctggttttttttcctctctgattttcccactcgcaaggtgatccacgaaaaaacatcccgtcgccaagattctttctttgtgctttgttttatgccatgttcttataattcgcgttcattttttctttacaatc

SEQ ID NO: 53582 - DNA, 368 bp, Glycine max
  unsure (1)..(368): unsure at all n locations
agctcggttcgaggtacttacccgttgaagatcgaagaacgatgaagttcgaatgaagaacgtcgaagaacggttcacacctttgcgaaattcttcacggaaaacgttacggaaacgtttcggaagcgcctcagcttagatactcttcacggaaacaaattttctaagcacaattcaaagagagagaagtgcctaaggggctgaacccttttccttctcacttcctcccctatttatagcaaaataggggagatggttgccgcccagctcgcccaggcgagccaggttgcttcctccagaagcaacaaccttctggagaaatcttctggaggccccangtgggcctgggtgctatttgcacccccatt

SEQ ID NO: 53583 - DNA, 180 bp, Glycine max
  unsure (1)..(180): unsure at all n locations
cttcatgggagatgtctcattaagattcccctgcatttcacgaatggagggataaaacatgcaattacagcttattttgtgaaccaaagtgccatagctaggtttatgataagagagtcttcatcatccctagcctcaaactntggacctcccctttcaatatggctcaacttcatatgc

SEQ ID NO: 53584 - DNA, 485 bp, Glycine max
  unsure (1)..(485): unsure at all n locations
tggcacgccnnncgttgataccatcattacgtaacacttatattagcgcatttgaagtcactttaagatcacggtcccatttcgaaaatcatatgtgagttctacaagggaagaaggttcttccccataacatagagacattactaatggtttcttacaagtcagggctaaagaatctaacctttcatgactttatggcaaagatcgcacgtacaacaaagaatatagttatatgagacgcacatatacacaataatttcagaaaagtcaaagatatttgacattacagttgtcaccaattacatcattgaactggatgaaattccacaagccaagaaatgtcagattagtaggtaaggacacctaacgcagtattgagtatacatcgtaaatggtttggaatattggatattagtggaacctatangaatattacaaatgtactcacttangacaaatttcagcttttagtagtatagtcaaag

SEQ ID NO: 53585 - DNA, 417 bp, Glycine max
  unsure (1)..(417): unsure at all n locations
ataactggagattattattatgttaactaaactagttaataagtatataaaagttactctttttgaacattataaaatgacttattcaattataatagttgattaaaactgggaattgaagtagtgtaagataataaaaatggacatatanttttacatatattntagagtaaaatatgtttttagtccttcaaaaaatatacaaatttgattgtagtcattaaaaaatcttattnttgtccccctaatatagaaataataatgtcacaaaatatactatcaagatcngaaatagagtatttccaatttagaggagcaaaaacaagacaaaagaattntagatgactctaanatcaattaagtttacgtacatttaaaataatataaaatgtattttatcctaaattctaatatcat

SEQ ID NO: 53586 - DNA, 352 bp, Glycine max
  unsure (1)..(352): unsure at all n locations
agctngngtgatgttgcgcgtactgatatgtaccatgaggtgtttgctggggtttgacccatgcgggtgttgaagagacggcatgggcctctccttcctttccttttgcccctggtgccccgattcttttggcgttcacgtntgtggaggaaacgtaatcaaactttcctctcttcaatcccacctcgattctttccccggcaaacaccagatccgcaaagctggacggcatgtaacccactagcttctcatagtagaacactggcagagtgtctaccatcatggtgatcatctctctctcaaccatgggaggagctacttgtgccgccaaatccctccatcgctgcgcata

SEQ ID NO: 53587 - DNA, 508 bp, Glycine max
  unsure (1)..(508): unsure at all n locations
nttganaccaatcgannccttgattncctttgctattacgtgcactatagatctcaagcttctgatgatgaatcaggtagtttggtgatggccaaatgtctctaagaatggtggccagaatgggtccaccaggttcagatccagatttaagaanaaaccttcagaagaatccagattccagaggagattgattccagattccagaggagaaacccaaaaggcaccaggtcagacttcacaagggatgtattggaaaaaaataatttcaaaacccaacatagcacaatttttgtttacaagaaacggttttcccaatttttctaaagtaccagagtatttactctctggtaatcgattaccaattacctggaatcgattaccagtgggtaagtttgatttcaaaagcttttaactgaatttgcaacattccaaatgttttttaaatggtgtaatcgattacaatatattggtaatcgattactagtgtatctaanagtgaaattcaaat

SEQ ID NO: 53588 - DNA, 586 bp, Glycine max
  unsure (1)..(586): unsure at all n locations
cactctacccattcatgttcactccaatacactatcatctcctactcaatgtaattccaatgcactgcantccatgataacctannnnantttgataccttctcgactcgcgatccttaagtcacctgcagcatgcaagctcttcgatctattggggaggctacatgcatgagaatgcacgttctttgataatagaaagcttagctttcagagcaattaatatagcacaagctatatagagagcttctataaattatgtgaaggcggagcatgattctcataaattagaccaagaaaagatcataaacgatgccatcttctcatttggcatgacatgaattgaattgtaaggggctcgatcctgtgacatatcatctttgtgtgaagaatgaatttttgaccacgcaacctttcggagaagaggacttaagtgggattcaataatacaccctctctattgctgaaatggatatgtttttggccacttgaaagatagataaatgctcaaagtacaaaaagagttgtcttaattactacaaaaggattgacnactcggaagtttatttgttgattatctaagacatcg

SEQ ID NO: 53589 - DNA, 331 bp, Glycine max
tcaccataactcgcatgtgctttttcttccatgctatatgtaacaaagtgattgatccacgaatggttgatgaattggaaaatgaagccgcaattatactgtgccagttggagatgtaatttccccctgctttctttgacatcatgattcacttgattgtgcatctggtcaaagaaatcaaatgttgtggtcctgtttatctacggtggatgtacccggttgagcgatacatgaagatcttaaaagggtatacaaagaatctatatcgtccggaagcatctatttgtgagaggtacattgcagaagaagccattgaattttgtcagaatac

SEQ ID NO: 53590 - DNA, 405 bp, Glycine max
  unsure (1)..(405): unsure at all n locations
aattcctggccacatcatggattcctctaaggacaatagcatcatttcttgcactgaattggtgggagctggaagccatcttctcaatcaaattactagcctcaacaggggtcatatcaccaagaactccaccactggcagcatcaatcatacacctctncatgttgctaagtccctcatagaaatattgcagaaggaagtgctcataaatctggtggtgaagacagcttgcacacaacttcttgaatctttcccaatacttataccagctctcttcactaaagttgctgatgcttgaaatggtttttctgatggccagtgttctagatgcanggaatactttcttcagaacacccttttaagtcatctcacttgtatggacctggaacanggagtccaccacat

SEQ ID NO: 53591 - DNA, 187 bp, Glycine max
cggggttcttatttcattgcaaggatttccgaatggtcccttgtaggggacaagggggtgcatcagatacaatcctgttcttgctataaggcaacttggctaccctatgagaagggcaccgctagaggaagagctcgcgcctatcatttcacgaggtttcaataagaccaacgtggagacacttcat

SEQ ID NO: 53592 - DNA, 154 bp, Glycine max
  unsure (1)..(154): unsure at all n locations
tgactacgtgaatattcctgatgcccttgacctatgtcccttttttgtttgaagctcattacaagccttangtgaaaaaccatgatatcaccttacccttaaagaattntggagcttttgaaattgtttggtaataagtgttgggggggggggg

SEQ ID NO: 53593 - DNA, 496 bp, Glycine max
  unsure (1)..(496): unsure at all n locations
ntgatccatctttagtgacctatgatctcagcttacaaaacttgatacggtggtntcttcaattaaaattggaatatttaccttttgcatattccacatattatattggattcctcttatgaaggggtgaggagccaccaataccattcttagtaatggattaaataaattatggttccagccttacctggtgatgccgaaggggtatgaaagccaaattggaatggatacttttaagtctggaatgctttaaagtagtgaatttttgaagagtaagtgcttacaagaaaaaaaaaatgtgcagtggagaagagaatgttgagatggggatgagttcattagaaaacagataagattagaaatgaatgtattcacggagaaagtggaatagcagctatccagttaagaagatagacacacattcatagcttattgntcanaaaacatgntatgtgaactgngtgcaatcttcatacttatcatgtatgtngcacgn

SEQ ID NO: 53594 - DNA, 229 bp, Glycine max
  unsure (1)..(229): unsure at all n locations
aaatatctcagggtgggaatatctgatgaaaaagtacgtatgtatgtaagtatgtatgcatgtggagatgggaagagagggagttacatcatctccaaagggagagatggtggataggctggggccgggagccaaggaatgagagagtgcangagcaaccaccttggcatgagctggagctggagaagtggctggtggagaggaaaggggtgtatgggtcaatgcgggt

SEQ ID NO: 53595 - DNA, 511 bp, Glycine max
  unsure (1)..(511): unsure at all n locations
nttganncccatgcattacgtgcactacatagtactcacgcgtaacacantgcaccattaaaaataggccgaaaacacatcaattattntaaatttcctaattcttaagtcttccctttcccgagacantttgaaatatccaattaaaaaatggatttggattccatggggccattcttggaaaattatattttttggcatttacttttttaataactgcacttttggtattgctttcttgcatgcaatcccattggaatatgctagtctgcttcctgtgaatatgaaactttatgtcacattggctgcaggatattcttcgacttttgacattatggttcaaccatggagctacagcagaagtacaaatggccctaaagaaaggaatttccctagtaacatcaatacttggctagtagttctacctcanataatngccaggatacactctaataaccatgctgtgagagagttgatacagtcacttttggttcggattgggcanaatcat

SEQ ID NO: 53596 - DNA, 434 bp, Glycine max
  unsure (1)..(434): unsure at all n locations
gctaatgatcactcgttgatcatggcccttgcanagagagatgaatttcttgaagcaaagaaatgccaagagatagataaccttcgaaaggagaatgtcattcttatagatcaatatctaaagcttcacgaagaccataattcanactcgattgcagaaatcataacccattagacccatctgactaagacaaacgaggctgatacgacattgaagggagcatccagtttagagagtagcatacattgaaactcgacatcatcccttcattgaagagattatggaggcacaactcctacctagatggaagatgctaaccatcgattgttacaatggactctcatacccaaacaaacttgttgacgcttttgtcacacatatgaatctgttcataaatgacattggaatcatgtgtcgagtgttccctacaacat

SEQ ID NO: 53597 - DNA, 209 bp, Glycine max
tccagcgtctcgatatattatactcctgaatcggaccccccagtgaaaagataagaccatttgaatttctcgagagccttctgtggtcaagtttgagcggctcgatatattatgcgcctgaatcggacctccgcggggcaagctatgaccaattgaattttctcagagacttccgtgcttaatttccagcggttccatatattatactc

SEQ ID NO: 53598 - DNA, 302 bp, Glycine max
agcttgtaagagaatggcggacgcttcatatatagtactatggggatttctttcactgggcttctcgattcatgaacaatatctatacgcacgctttcacatgatcacctgatgctctcttcaaactgaactgacgaactatcaccacaccgatgttctattttcgctcatcatatagtcccacgctctactgtcaaacattccaaacatgcaagtcttacgacattcaaacatcacagtctcatacaatctcgcgatgcaaagctaaggccaagggcgttggactgagaaccatgcaatac

SEQ ID NO: 53599 - DNA, 510 bp, Glycine max
  unsure (1)..(510): unsure at all n locations
atttgtnncccctcgcangaccgtgatcccnttagacgacctgcgatcctcagagtcgcctgcggcatgcaagcttgaacatatacttgtcttcattaacttggcttgggctggccggcacgcttcacaaagtattttcgacacctactgtatgttgatttaaccaacgctgtatgggaatggtgcgacaatcccttcaaaccttaattatacattctgagagggttggtgtcatgtggccataccgacgttcttttctatcataagccatcgtccatttttcttttgaaatgcgatcaatccattgtgctatggctggactcagttcacgaaaattttctagattttgataaaaaatgtgcttgcaaggagtgtaggctgcatcaaattacttatgaattagaattntaagtatatatcaaactctaataaatatgaccactcaatatgaaatcctacccatttctttacattttttttgggtgcattattgaattccaatgaagtgct

SEQ ID NO: 53600 - DNA, 447 bp, Glycine max
  unsure (1)..(447): unsure at all n locations
cccatcaggccaggtctctcnaggtctattccaaccatagaattccaaaggtggagaatttggttggaaaccctggagctgggccttaaggatggattgccgaagatcaccaaataatccaggcctataagctatagatccggaggttggatttattattctacctattccacgatttaccttgatatgatctttacaaagaaaaacattcttttaatttaggtacctaccaatgattctaccgggtaagatcatcaaactacaaacaatcttagctagagggtgagttgaaatatagtactatattttaactatatatatatatatatatatatatatatatatatatatatatatatatatatatatatagatagatagatagatagatagatagatagatatatagaatatatcatccttatgttattntaatagcacgttgat

SEQ ID NO: 53601 - DNA, 420 bp, Glycine max
  unsure (1)..(420): unsure at all n locations
attattttganaggcacgcactacctatatatatgtgtgtctgatttcaaaagccagagagagatattccaagagaacttcattgtcaaatgctcntctcaacaacttttgggcaacacttgcaaatctattaagagttcatccaagaacttcaattgtgatatcctttttctaaagagagaattctttttcttcttattaaaagagattgattaagggaccgagagtctcttaagttgtaaggattcctgaacacaacggaaggattgtccctgtgtggttcaaactttgtaagaagattttaccaagagagtggaaaatctcaagtgggttgttgaggactggacgttngcaccggcagtggcccaactaatataaatcacgntcgcctctctctcttccctatctcattgatcactg

SEQ ID NO: 53602 - DNA, 120 bp, Glycine max
tatgggtgatgcatcttatgtcatcgacattaagattcatagagatagatctcgaggtattttgggtctatcacaggaaacttatattaacaaaattctagagagatttcagatgaaaga

SEQ ID NO: 53603 - DNA, 389 bp, Glycine max
  unsure (1)..(389): unsure at all n locations
agctntagtcatacanaataatccanaaatgtcaaagaattgggtgttgaaaaagcataacaagactttctgtgattggtttaanagatacaatctttgcaaatgagaattgcttagaaacattaaaaaagctagcagatgggcctaaaagaaatgttatatcttggaaaggatatgacataaacatgtattcattttacacaaaagcacaagatgacaaaagtacaatgcagaacagcggggtcatcctaagggctgaatctcaacacttcgcaagtgtgaatgacgccaatccctgtgtagcttccatcccttactttgggttcattgatgaaatttgggagcttaactatgggaaatttactatatgttttttcaaatgtaaatgg

SEQ ID NO: 53604 - DNA, 433 bp, Glycine max
  unsure (1)..(433): unsure at all n locations
agcttcttctncatcaccacaaccaccagtatccaccacgaaccgtcgtagttctccgttgaaacctcacaccgagaggaacccttcaattggagcgaaatcttccaaacttacctcacggtttcgggtgagaatgaagcccaatctgaccttcgcagttttcttcgaggtaaccgngattctaagcttgttccttggtagtttaagcttatccttgcatcattttctgactttggaaccaccattgtaagttttatgcttcctttggaaaaccctagagaaagacactttgtaaaagttatctttttatgaaatgggtgttattttcgtgaccttcactgaatcccagtcgcattggcatgactaagaattcaaaatgatgcttcctttgtagaactcgaaataccccttagccttttcatgtagtgacatg

SEQ ID NO: 53605 - DNA, 252 bp, Glycine max
atttttcaaatggaatcattgatgttttgtagtcggtggggatggaatgagttcgctacaacaagcaataataaggtggatggacttgttcaaggaaatgaggatcttccaaggatacatcatgagttcaaaaggggtatatgatgaatttagtttatggattcattgctctcggtcttactcatttcttgtatattagagagggtagactagactttcgttcatgatgtattaaacttttggatctgactt

SEQ ID NO: 53606 - DNA, 346 bp, Glycine max
  unsure (1)..(346): unsure at all n locations
agctntgatgatatggtcttcaccgaagatttgatcanagtgggtctaanaagaggcaaatctgatcatcatgctntgataaatgcaaaaaaaaaaaaaaaaactatggcaaatgaagagggtgagaatgagggagaagcccatgctatgactgccattcctatacaaccaagtttcccaccaacccaacaatgtcattactcagccaataacaaaccttctccttacccaccgcccagttatccacaaaggcaatccctaaatcaaccacaaagcctacctaccgcacttccaatgacaaacaccacctttagcataaaccaaaacaccaaccaagaaatgaatt

SEQ ID NO: 53607 - DNA, 372 bp, Glycine max
  unsure (1)..(372): unsure at all n locations
tgcttccataaaattcctaaaaccctaaataaacatatttcacttaatatgggtgagaaggaagagaaaaaagaagaaagtcgagtcctatacgcttccgtaaagcttctgtaacttttccataaaattacgaaagaatggggctgaacttatcaaaagggggtgcaaataacaattttcaaattttcgaatctaggcccttccataatattttcgaagcagggttgcttctggagaaagcaacccagctcgcctgggcggcaacctcctccccctttntcctataaataggcgaaagggggttgttccaaatatccatcatccccctggctatgcatttcaactgttttgggtgaaaaaaattgttttcgt

SEQ ID NO: 53608 - DNA, 258 bp, Glycine max
  unsure (1)..(258): unsure at all n locations
ctatactctgatatgattgacagagagaggctatgaaacattgtgcaatatttgttgacaagtgacctcattaacttaagaggaggggtgaaataagtctcactaaccaaactttaaccctcttctanatgataggctcagaatgcataagaagaagcaacaatcaatttaataatgggtatttaacatgcaagaacaaattgattgcgatanaataaatgagatanaggaagagaaaaatgcaaactcgatttatac

SEQ ID NO: 53609 - DNA, 300 bp, Glycine max
  unsure (1)..(300): unsure at all n locations
tcatataggtgaatctcaaaataagtatcttgaaatcatttgtgaagaaaatgggaatcaccacaatttttcaacccaagaatacctcaacaaaatggtgttgtggagaggaaaaatagatcccttgaagaaggtgcaagaacccttctaaatgaaacaagtctacctaagtacttttggacaaatgttgtacatactatgtgttacaccttgaacagagtacttattatgacctatttgaagaaaaatccttatgaactgtatanaggaagaaaattggacatcacctgagagtttttg

SEQ ID NO: 53610 - DNA, 268 bp, Glycine max
  unsure (1)..(268): unsure at all n locations
atacagatctctgtccttctttgcaactatctggagtcaatgagcaacctaaagcttatgctacaaacatttataatagaccccctcagtagcanaaccaacaacagcagaataattatgatctttcaagcaacagatataatctatgttggaagaatcatccaaatctgagatgggcaagtccttcacaataacaacagcctatccctcctttccagaatgttgttggtccaagcaagccatatgtttcttctccaatgcagcagca

SEQ ID NO: 53611 - DNA, 508 bp, Glycine max
  unsure (1)..(508): unsure at all n locations
nttgaaccccatgcattaccgtgcactatatatactaagcttgcacccaacttggnccgtgaagaagggtggtttcttcatagccacaggcctcttgaagagatctccggaaggccccagtgggcctggttgctatttgcacccccaattttaataaatacaccccttgccttttttggtgattcttttttttgtaaaggtacgggaacttaccaaattccgaacgatacttggtttcttttcgtaatggtacgggaccctgtggattacataatcatccccctggtgacttacggaatgttacggaacctcactaatggtgcaacgatgcttccatttgatttccggtgtggcacggaaccttacggagtgtgcatcaatattttctttttgctttccgcatggtccggaatttcacaaattggctaatgatgggtgccaagtacctcacaagcaccaaacaaaagttgcatgtcatcaagcaaaagtcccccgacgaaattatgga

SEQ ID NO: 53612 - DNA, 444 bp, Glycine max
  unsure (1)..(444): unsure at all n locations
agcttttggagtagaaacatgggaccaactctttntattttcaaaatgaaagtcgtatctagtcaaggtctgagagaccatacaagtttcctaacgatttctaattatgtgggccattaagtctatcatatgctgacaatagccgagaagcccatgaatctcttcgggggcggagtaggtgtctgccatcaccttggccttggctaacaagcggngaagttcttgactcccgttcaaggtaagagcaaaccgatccatccacatggttgcctcttggtgtaaagagtcgatcacccttcctctagcctctttttccgcgtatacttgagcatactcgtccgcgatcctatgctcgtgggtcgtggctagacctaactcttcttggtacttggcgatgatagctagcatgttggtctccgtctcgcataaacgctgagacaagct

SEQ ID NO: 53613 - DNA, 499 bp, Glycine max
  unsure (1)..(499): unsure at all n locations
nttgaaaccccatgctattacgtacactatagaatactcaggctggagcacnggctcgcatcttcaaccaacaataataactctgaatccctaattggagaacagctgctcccctgaatcccaagttgaaaaactgctattctctcttaattcccatctggagaggctaatggtcttttttgtttcccaagtttccatttgatagatgaggaggaggcttaactcaagataccaagaatctgctcgggacttttaaattcctgatgggtttgctttttggataatgattataactatattagtttcagtacattggttttagtgattttaatttacgttcatatatacttgtgttttttggggatatttggtatgcttggtttgaagcatatggaacagtntaactntgacttgatgaatatgcagngaaacacttttatctntttgtgaaatgggtgtatagactgattttggattaatgcatgattaagatgaagtn

SEQ ID NO: 53614 - DNA, 368 bp, Glycine max
  unsure (1)..(368): unsure at all n locations
atgtactagaaattgaggttgatcagtagtgctatacaataccatatcagttgcttctggatcanttgtcaaacaccattacgtaacctagtactctgcttaattaaaaaaaaaaaattgaggtcaggttatttaagtttatttaaaaaaaaataggtttttcttatataaaataagtaatttttataatatttcgatatgtttgttntaaattgttttacttaaaataaatgtttcttttgtttttttttaaaacaaatactatctacttcttataaaaaaaaggcgtttataaaaagcactctttttaattttttttttttttagtatacccttctttgttcttgtgcaatatgtgagttataata

SEQ ID NO: 53615 - DNA, 510 bp, Glycine max
  unsure (1)..(510): unsure at all n locations
ntttgggccccttctattacgtgacactacttagtactcacgcttgaagattatgggggacccaatacattgtggactanggtgctggtcggccgatgttctccacaaggttttcacattcaccaatcgcacattaacccacaattccctggtggccaccttcaactgaacttacggacttccacgtaacccataatcttggttcttttaacaccgggttcccaataattcctccaaggtttccccacattcaagtaatttaacattccaacagcacaaactatcacaggcaagaaaacagggcaaaggcagaaaactctgccaaaacaccaaccaaaatcacagcttttcccacttaaagaccccagtaacattttctttcgttcaattcgttaaccgttggatcgactcanaaattttactggaagtctctagtacataagcctacantttgaccggtgggattngctagcaaatatccagaaatcattctgcactactctttccaca

SEQ ID NO: 53616 - DNA, 416 bp, Glycine max
  unsure (1)..(416): unsure at all n locations
agctngagatgaggaagtgtagaagggtgatacttcctgctnttattctttgaccacagagtggtacctagagatatgtcgcgggggtcaggagaccttggggacgtcaggtggggtgctattgcccaaaaccaagcttgaccaatcccgacccaacccgggcatagtcagtcagtgagaacctgtgatgtacctaaacaggcgagctcctggcagtcaacagataaaaggaacaaagaccacaaagcaaggaggcttgtggtggctggccagctgtgaactttgattgacatgtgggttatggcctctggtaatcgattaccaagggtgggtaatcgattacaaggcttaaaaatgaagacaggaggctaagatggtctctggtaatcgattaccacggggtgtaatcgattact

SEQ ID NO: 53617 - DNA, 505 bp, Glycine max
  unsure (1)..(505): unsure at all n locations
attgaaacccttgagaaccttgatntcctgaagaaccgcgatcctcagagtcgactgaggcatgcaagctttctatttgtaacgatggatgtatatgtttgccgacattataaatgaaccaaaagaanagagaaagaagaacctcgagggccgcatggtatgatcatangaagcataaatcattcatagagagccaacatatcttttggaaacaaggggactaacactaagagtttatttttcagaatacccgagataagactggatggattcattgaactgatgaaaaacataatttggaaatattccgtctacttgtgtaaatcccaagccctagtatcacaatgccataaactggatgcttgagtacccacctagctgtagccatgactaattttgcacgtggtccccaatcatcaatgtacgcgtgcctctggaaataatatggaaattcaccccgagacgacacctcgcacgcgaatattgtttgcccaaattaaatcgn

SEQ ID NO: 53618 - DNA, 196 bp, Glycine max
  unsure (1)..(196): unsure at all n locations
ttggatctgacaatcaactaccaaaccctgagtgaccctttggacttgtgctgcaactggtgccaaacacctaaattcaattagcaatgatcaaaacatcatatctgaatgataaaagtattatacccagatgaaattagggtctgacaatgccaaatcaaacaacanttatacatctcttgtcttttcttctctt

SEQ ID NO: 53619 - DNA, 174 bp, Glycine max
tttgggaatctcgcatttgaagtcctactttctattgacttctaaaaactgagctttactaaacctctaagttaaactataaaagactacagcattaataacaaatgtttccgtaactatagagtctatcagaaacataaaccctggtacagatcatctagtgtaggtgaactt

SEQ ID NO: 53620 - DNA, 418 bp, Glycine max
  unsure (1)..(418): unsure at all n locations
cgtgtcctgcgttgacaacgccgaacccattgacttgttctgattgaagaaaaaaatggttttttttttggcggngttcaagaaaacggcattgcgcggaatcacggtgagatgcgaaaagggtttgaggtgggttttgaaaatgaggagagttggtgcagcacagacacaagaagaggaggaagaagcaagaaatggcttcaaaaccaaggcttttgtttccttcccaaacaaactacttgtttgttcaatgactttttagttttggatacaatgcagtcaaatattattatgtcaagcagaactgtcaactntcatatatatatatatatatatatatatatatatatatatatatatatatatatatatatatatatatggataagagacacaagatntgcagattttttatttn

SEQ ID NO: 53621 - DNA, 467 bp, Glycine max
  unsure (1)..(467): unsure at all n locations
cctatgggtatgtgttaagccgtgaattagttgagccaaggaaaccttgatatatttgagaanaagaagcccaacagagaaggagaannnagagaanaggttgtggcccttctttaaagagctcgaccccgtgcctattggaacatgggccatactggacttgctaaccatgctatttttcaagaaacctcctatcaacgtcatatatttgagcataatagcacgacccatattgttctagagccaaaaatcaaaatcagtgtcacatatctaagcacaacaagttgtcctcaacccaaccaatgcttattaagcatgacctgtgttgaccttcngtgttgtgttaattgtcattattatacataaaaaatgggaggcatttttaggttagctnttacttattttcaatcagcaagggtttctgagttctggagctggactaggaacaattagagtactaatctatn

SEQ ID NO: 53622 - DNA, 339 bp, Glycine max
  unsure (1)..(339): unsure at all n locations
agctngccgctcttatngctgctccctgctataaaatatcatccggtctacttcccaagatctcctctatctcttcttttatgtgacccttttctttcaaagttgagatttgtgttcccattcgcacaaaatgggtttatcctcagtagatgtattggtttgttttcaagcataatcggttcaaatcaaagtaagttagttattctttaccttgaaagttcagtttcaaagggaaaattttgatcgggtaatcccgtacgaagaaatgagtaggtnttcttctgcattattctcggttgcaaatgatatcgttacacaagttgaacctgtaactcatct

SEQ ID NO: 53623 - DNA, 223 bp, Glycine max
  unsure (1)..(223): unsure at all n locations
tgcttaatntatgccttcattatgtctttatcattgntttcaattttgatgtcctattcctacttcttccttaccgctatctggattgggaaaaggttttgctcttttctttccggactaaaaaaatggcaccctacttgagaatgtctcttgaatgtatatatatctatatatatatatagctagatatgtatatatatatatatatatatgtttttttttt

SEQ ID NO: 53624 - DNA, 379 bp, Glycine max
  unsure (1)..(379): unsure at all n locations
tattataatgcagaatggcatttttttaactctatntactctatataactatggataatattgaaaaataaatatttgcctatggaaatggctttcataaataatgtattgatgaatgacgactcttttttggaggaatactatataaagccagacccaagggtgcttgtttattgaagtcagttatttaccattntaacccaatttgcactgttgaaacaggtaagtcatgtaagtgagcgggaagtttaaaccagcaagcatacatgttgttntatgttcgtgatagaaaaagtattgttccaaggaagcctgttgacattgctaagaaggaaaatatgaagactaattngaatgtaaatagagaatcttcaacttc

SEQ ID NO: 53625 - DNA, 292 bp, Glycine max
  unsure (1)..(292): unsure at all n locations
gaaaaaaaaagagagactaaagggtatattttactgcggccccatggtggatgccaaatatacttaccaaaatttgaagctagcacacgtcanggtagacgtggctaaggtgggctcctatacttcgcatgtcagctagagagtggcctttgttaggagggaaaaaggggaggaccagcaaaataaaggactctagcgctcaagtaagtatatttgttagaagagtaagtgagaataccacgagttgtgagcaggtatgtgcatttgattgcgtaactggtgtgagagagta

SEQ ID NO: 53626 - DNA, 198 bp, Glycine max
aaaactaaaaaagtaatgaagggatggtaagatattaacatgccattttttatcaaatcatatggttgggaaaaataaccaggccaaacagtgagaaataaatataataatcagaaattttcctaaaacaggaaacagattcccgtgtaaacacactgcaagtctgcagccataaaaaaaaagtatcatgtacaatca

SEQ ID NO: 53627 - DNA, 355 bp, Glycine max
  unsure (1)..(355): unsure at all n locations
agcttatgttgcaaacatttataatagactttccttagcagaaaaaccaaccacaacaaaattattatgatctttcaagcaacagataccatccaaggtagaggaatcaatccaatctgagatggacaagtccttcacaacaacagcagcttgtccctccattctgaatgttgctggcccagcaagccatatgttccttccccaatgcagcaacagtacaacaacaaaggcaacaagcaactganggatcctcctcaccttccttagaagagttagtgaggaaaatgaccatccagaatatgcaattntagcaagagacaagagccttcattcagagtctgacaaatcagatggg

SEQ ID NO: 53628 - DNA, 258 bp, Glycine max
catgtacattttaaataaatttaatttataaaaatattgaattttaaaatataataaacagtaaaatgctttcattcgttaactcaatccacactaacctttttgtgaacgagttgatttgtgttggattttatcattttttttaaatagacccaattcaactcgttcaaatttgattggattgagtcatagtcaaacctaatccaaactcaactcatgaatatccctataattcattatctttatcctaatacctaa

SEQ ID NO: 53629 - DNA, 271 bp, Glycine max
  unsure (1)..(271): unsure at all n locations
tattatcatcattctactttataaaccatatttcatatatggtgtatagcaactataattaaaattactgtaggttgggaaaaatgaaaatatatattctacttgcttgttaatggcttaagtgaggctacaaagatatttccctttctttntattcccctattntttcttgcttagttctatgttacttctcatttggaaatatcttttattaatcttctaaaatatctcttacagaatcatgggtgatgttctacccttcaagtcttca

SEQ ID NO: 53630 - DNA, 326 bp, Glycine max
  unsure (1)..(326): unsure at all n locations
ttatacctaatattttgaattgggtaaggtgtggatattacataaaagttatattttattaattaattgacacttaagatggtattattttgctatgatatgaatttgaaaattatttcagtcgatgtatatgtatatggggtgggtctttgtaacattgctacgaatgtataatatgatatatgagaataagtgaagtatgcgatgaatngtgagctatgaactgtgtagtcacacaactataataccctttaagggcgacgagttcatgcgcaatgagttttgtgatgggctccactatgggaactcgacgagtttaatcactg

SEQ ID NO: 53631 - DNA, 432 bp, Glycine max
agcttgttgtttggattgagtctgcctgactgtgtctttacctaactaaatgagtttgtcatttgaccaactttaaactgtatgtattagtcagattttttgctgtataagttactgttgctagtgtatggtttgtaatcattgacagaaagagtagtatccattttgacattaatcttttgtaattggccttgtcattattttatttgttctcctgtgacatgatttgacagatttgaagtactagatgaggaaccaggtgatgatgaagaaagcagtggccaaaggtaacctaacctattaggagaattgtcatgtttaattatctagagtgctcatgtcatgtacttgatttacttgaggcgctactttatacttaaatgggaatttctttcacatgtcttccattgtacgcatttgaatgacgtgtta

SEQ ID NO: 53632 - DNA, 585 bp, Glycine max
  unsure (1)..(585): unsure at all n locations
cccacctaccctncaccacaaccttattaccaccctaganaatatgcgntctccgactctcncactagccnnnnngtannnngttgataccttggatnactgacctctatannaccacgctgttctacattgacccctggatgacaagaccacctgtaattcagagacacatacacattcctttttcctagccgatcactcatcttaattctccatattctcccccctctgtgtttgtgttaaagcttctcgggaaaataagtcatttaattatatgagntcttgattaaatcccaatttctcttcccctttagcataaaaaaaagccaagtgcgtaaaacctacatgaataaaaaataatacacatagtatgcactggaaatcaatcataaaagattcttaactaatcatgaagcaagacatgattaacctaaactaatatggaaaccacatagccatataacataattcataaacggtcagtcatactaagcacatattaacagaaatactaaatgttcaaattgcataataatatacccaaatacgcggcttagaaatcagagtaacaaactaaaaatatag

SEQ ID NO: 53633 - DNA, 366 bp, Glycine max
acctggccagcttagcggaccaaattaaccttagatgcaagggttgggcactaatcgcttgagactcgcgacttagcgcatgaacttagcgcgaggcttgttcttagcaaaaggactatttttcagaaaaaaaaatttctaagttatttttcagtcctttttccaagaaattgaaacccttatgttaaacattcaaagataggctgatatgctcctatgtacagatcagacaacatgttcaaaatgattaatgcatgaaaaacaaagataacaaaaattcaaaactgggttgcctcctaagaaatgcttctttaacgtcattagcttgacgctttacctcactgggtgtcttatgtttggtcttac

SEQ ID NO: 53634 - DNA, 293 bp, Glycine max
  unsure (1)..(293): unsure at all n locations
ataaacgtcagatctgctggtatcgataccatatgtgtgtaatcgattacacagtgcaattttgaattcaaattntaatagctgttgtaaatcagntntggccacttggaaatcgattacatcctctggtatcgatanagagagaaatttgtgaaaagacttttaacttatatttcttgaccaaaccttttgctacttcaattggaattctcttcctatttaatataccctttctaagactctagagactgtcttgatcatccatcttgaatatctttaatntctttgtcttg

SEQ ID NO: 53635 - DNA, 309 bp, Glycine max
  unsure (1)..(309): unsure at all n locations
aaaaatgattgattggaaactttatgccaaactggtcatgcatgcccctatgcggacgctcaagtgtcaaaattttatggtcatgtgacgctagggctcangattcatttcctctattttaaatcaacccaatgtttccaaaatatgttcttttatcaatttgtgcattcatccgagtccatttcgggcgtccggggaaatttcacagtattcacccttcaagtgtagacacatttttttcaaaaactagttatgaatcaatgaatttttttcaaagaaaagttggaaatcatctcttttcaaaagcat

SEQ ID NO: 53636 - DNA, 158 bp, Glycine max
agaaggagaagaagagagagaaacaggagaaaaaaaggaagaaaataagaggggagagaaaaggaaaaagaggataggaaaaaagaaggaagaaatggagggaagggcgaaaaaaggcgaaaaaaagaggaagagaagaggagagagaaaagaggaaa

SEQ ID NO: 53637 - DNA, 323 bp, Glycine max
  unsure (1)..(323): unsure at all n locations
agcttgccttgcctcttgatatattngaggtattcatggtcactattaatgacaaattccttgggataaaggtagtggtgctcatgtttcaaagcccgtactaaggcatacaactccttatcataaagtgaaatagtaagggtaggaccacttaacttttcactataatnagcaattggatgggctttttgcataacacagccccaaatccaacatttgaagcatcacactcaatttcaaaagattttgaaagtttggcatgcaagtatggggcattagttagcttttgctaaaaacatgaaagattcttcttgttctctccc

SEQ ID NO: 53638 - DNA, 418 bp, Glycine max
  unsure (1)..(418): unsure at all n locations
ttttgtaagcttataacaataaacttggccttctcttaatagtctttggtcttgtcgaccacgatcaacaaagtactttcttcacctactatatgnngacttgaccaatgttgttattggaatgctgcgacaatctttcaacaccttattcacacattctgataggttggttgtcatgtgaccatatcttcgtccagatgtatcgtaagtcatgctccatttttcctttgaaatgcgatcaatccatcttgctatggctggactcaattgacgaaatttttctaagttntgatcaaacgcatgcttgcaaggagtgtacgctgcatcaaatttgttaccatcaaaagtgatacgtagatatgaaactcaaataaagttaatgtataaaataaaacttacccaatttcttgaacatctc

SEQ ID NO: 53639 - DNA, 179 bp, Glycine max
gattcatgtctgacaggtcaccatctaattacatgccatgcattcgctcgatattacttatttcgtgctagccactcgcctgttacgggcaaccataactgctctaaacaaaatacgccctgcctgacacaactggagaccgtgtgaattagtaagtctacgtcgcaaggaagcctacg

SEQ ID NO: 53640 - DNA, 280 bp, Glycine max
  unsure (1)..(280): unsure at all n locations
ttatagactctccacgtctggtcaagaagaccattcagaagagttataacttttagaanaactctaaactcatttgaaaaagtcaaaacctttttgaagagttacatcttttgattnttcagaaacagtcactggtaatcgattaccaaataagtgtaatcgattacacaaagcttttgagtgaaaggatgtgactcttcacattaaaatttgaatttcaacgttcgagggcactagtaatcgattaacaaaacattgtaatcgattatagtcctttgaa

SEQ ID NO: 53641 - DNA, 167 bp, Glycine max
  unsure (1)..(167): unsure at all n locations
taccatcgatctagtgaagctgaaatattcgaaactgccttagacccgtatagaactatgagatctagatctagattttcttcatgtgactatgccttggtggttatgatacataatanagcttcaccctacttgatagttgtggagatcataatgaatttgatact

SEQ ID NO: 53642 - DNA, 402 bp, Glycine max
  unsure (1)..(402): unsure at all n locations
aatctattatgttatatatatttattntcatataagagtttttagatataaagtattntgaccccttttcaaatcctttcactctaagaattcattcagcacttagttctcctaaaatgctctctggtaatcgattaccacaatatgtaatcgattatagcgagtcaggctaagtgtaatcgattatcaaaagatgtaatcgattacaacgtgtccctgctgcttataaatacaaatttcagagaaaatagggattaaatcaagaactcatataattaaataacttaatttcaagtgaagcttaaactcaataacaaagggggagaatatggacaattaagtgagtgatcgactacgaaaaagaatgtgtatgtgtntcttgatttaggggtggcatcatca

SEQ ID NO: 53643 - DNA, 360 bp, Glycine max
ctgcagctatgacgctatccagctcttgaaccaggacggagaatgatctatatataggcttgctaagggtagagagaggaagactagagatttggatcaagtaaagtgtgttaaggatgaagaaggcaaagtcttagtgcatgaaaaagatatcaaggaaaggtggaaagcgtatttccacaacttatataatgatggatatggatatgactctagcagtctagacacaagagaagaggaccggaactataagtactatcgtcggattcagaaacaggaagtaaaggaagcgttgaatagaatgagtaacggtaagggcggtagggccagacaacatacctattgaagtgtggaaaactc

SEQ ID NO: 53644 - DNA, 276 bp, Glycine max
cctttttcgaaagcccatgaattggcgtatcggtcatgtgtcctccaccttcgaggttggagctatgcgtagtgattgcttagagaaattcttcattctcaacccctttttcggaccccatgaattgtgttttcgttcatgtcgcctccaccttcgagttgtgagctatgcgtagagattgcttagagaaattctccattctcaacctttttcggagccacatgaattgcgttgtcgttcattgtgcctccaccttcgaatttgaagctatgcgta

SEQ ID NO: 53645 - DNA, 326 bp, Glycine max
  unsure (1)..(326): unsure at all n locations
cgagcgtcacgatatattatgcncctgtatcggacctccgagtgaaaagttatgaccatntgaattgctcaagagctttcattgttcaatntcgagcgtctcgatatattatgcgcctgaaactgacctcctagtgaaaagttatgaccatttgaattgctcaagagcttccattgttcaatttcgagcgtctcgatatattatgcgcctgagactgacctccaagtgaaaggctatgaccatntgaattgctcaagagcttccattgttcaatttcgagcgtctcgatatattatgcgcctgaaaccgacctccatgtgaaaagt

SEQ ID NO: 53646 - DNA, 93 bp, Glycine max
atttcttcttctttctttcttccatatccatttctaaagttccaagtactttctccatcacccacatccaccattagccaccacaaaccatca

SEQ ID NO: 53647 - DNA, 356 bp, Glycine max
  unsure (1)..(356): unsure at all n locations
gcagctttcgatcattctatgacccgagtggtccacatggtttcgtgcattttattctcgntatgttaacttttattacccctggtgacgtgcttaagccatttaacttaagtcgttctcgctcaacttaaaagtaaaataaatttccaccgaacgcttgaattgtattatccattaacttcgggtaaaataaattccgaccgttcggtcatgccgtaaccacgttggaaatcaaaaagagggtaaaaataatataataatcaaaaagacatcttttagtaaaataaagcggaaaatcaatcggacgttttctctttgggagttctcattcttaatcgaattgttaataactaaag

SEQ ID NO: 53648 - DNA, 361 bp, Glycine max
  unsure (1)..(361): unsure at all n locations
gcttcgtttacctaaattatttacacctactttccaggtgtatttggtacttacatcacacacctncttggctaaattcacacacatgcatactcaaagcattntggggtaccaaaaattgcacatgtgcacatcttggtatttctaatacctatacatacacaaacttcatgatgaatcttgactatctacacaataaggtgctacattttatgctcttttcaagntnttgctacctaaagccgcatgccaattcaagtatattttcctttgctgactaannatgtattcacattaaaaggtatacatttttggtaatgtatcttctttacataacatgcaacatatttatggatatttt

SEQ ID NO: 53649 - DNA, 334 bp, Glycine max
  unsure (1)..(334): unsure at all n locations
agcttgtaaatatttattggtataatttgtctgttccattangctcttaatgtctttagagggtacttcctcgctgacctctttcgtcttgaatggaattgccatgaaagggtgtattgcttctgtctttgatgtctcggcacttgatattgtgtcccgggaggtaattctgactggatnaactcaccatccttcacttgccaatatagtatgacatttcgtgatggatcacctatgatgtcttgtttccaacggtaatctatatcctttctgatggcataagcctgacaccaatcacagaaaaggacattaattttgactctttcgacaaatt

SEQ ID NO: 53650 - DNA, 511 bp, Glycine max
  unsure (1)..(511): unsure at all n locations
tgatatgccnnnccnattggcccttcanagctgataccttgtattacggaccttaanactcagctttttgtcagtgacaccataattttctggccatgatgttatggcttccatggtctataacccaggcccatggcataaactctttctcatatgccgacctggaccgaattcgtacttccaacgccctactaaagaaactattggtcggttggcctggaataaaaatggccctataccaactccagaggcatcacactcaaatacaaattgtttactaaagtcaggtaaagcccagacaggtgttgtagtgagcttctctttcaattcttcaaaagctctttgaagtttcattccccacttaaacccgtctttctttggtaactccgttaacagtttagctatcctgccataagtcttgataaattntctgtagtacccagtcaagcctaagaaacctctaactcccttcacattcttaggtgtaagccatggggtcacactgattacn

SEQ ID NO: 53651 - DNA, 475 bp, Glycine max
  unsure (1)..(475): unsure at all n locations
ctcactccttgatcatgttacaccatctcacacatagataacgattaactcatactgaactctgactggacttaagcacgcgctcagccaccgtctcatctgatgattttcgaccctttagatagccggggtgagaaggtcccctacggggctataaattcttagcgtctctgcgactccccttgctagcgacaccccttcccttaccttctcccgtaacaataactttagaagccggccagtcaaatattatcaagcagctccacattaaaaaagcatggctggccagagaaacaaatagatcagtcctttgaaaataaccaccccacataccccaaccccacacacaaataaaacccctttctatctaacaagttattcacttaaattgcacatatgaattacaaacaacactcttgtgtggtaattaaatgaacccaacagattttaatcatttatgtggagaaggaatcan

SEQ ID NO: 53652 - DNA, 150 bp, Glycine max
ggctgatgatatggctggatcttaatatcactacttttcaaaaaaaaaattatacagtatattgctttatatataatacacaatttgacatatatgataaaaaagtatgatatagatttattgtatttattaaataaattatttataatt

SEQ ID NO: 53653 - DNA, 415 bp, Glycine max
  unsure (1)..(415): unsure at all n locations
agcttgcctctttctggtgataaagnactctgtgggattcttgatgctaaagatggtctggcatcaagaattatctttggactcaatgcgcagggtccatgaatatttgtcctctatatgcctatacatgcatngttatttaggatttggttggtttccgagaagaggtatgtttgagccatatttcatcaacatctagactcaagcatgtttgttattttttttaagcaagtgttggtagaatgctgtttaatgtttcaccgatagtgagtcatcaattggataagaattcttttgaagcagctgtcattggtggtactcagttatgttcaagacgtttactgcagcagataatatactgcgttggtggggatctgtgcttttcctcttattacccagtttgtaattgaaatga

SEQ ID NO: 53654 - DNA, 429 bp, Glycine max
  unsure (1)..(429): unsure at all n locations
tggatccaccanatccatntattacagaaacccattcgggacatcatatagctaagaaaaccccaggaaaccgcatcataggctctctcaaaatccactttgaacaacatacaaggtttttgccccctttttgcttccttcaccacctcatttgcaacaataacactgtgtagcagctgtctgccttctatgaaggcagattgtctctcgtcaatgatgtttggcaaaattttcttcaacctgcttgataagagctcggccacaatcttgtatatgcatccaataagcgagataggtctgaactcatttagtgtttggggatcggaaaccttatgaattaaggtgatgaatgatgcgttgcttcctttagggaaaatcccacttgcgtggaattcatggaggaagcgaatgatttgtcatacatttgac

SEQ ID NO: 53655 - DNA, 263 bp, Glycine max
  unsure (1)..(263): unsure at all n locations
aaaaaatataataaattcttaaagaataaaaaaaatctcgtgacttctaaaatttggaaatcaaattcatcaataccaaaatattaacacagaccaaaagtatataataaaaaacttgtgcttaagatcttgtgtgatgtgggcttaacccactangaattaacactanaatgggcccttctgtacaattgggcctttcgcttatgtgttgctagcaacacctacgctatactacgcatgacatgacaatacaggattacatt

SEQ ID NO: 53656 - DNA, 147 bp, Glycine max
aacaattataatgtgtgaaggattaaacgaatttctgccctcatacgcttattataattaatcacggctaccaccctgcgggttaggggaccatatacttcctaaaaaaacacccccgcccgcgccccactcggctcggtgattaat

SEQ ID NO: 53657 - DNA, 338 bp, Glycine max
  unsure (1)..(338): unsure at all n locations
tctcttttgaagttgttatggttttaacccactaaactctcttgatcttttgcctatgcctaatgggttctgtttntaangcataaaagaaagtcaagcaaaggcggactatgtgaagaagcttcatgagagagtcacagatcaaattgagaggaaaaataaaagctatgctaaacaagccaacaaaggaagaaagaaggttgtcttctaacccggagattgggtttgggtgcacatgagaaaagaaaggtttccggaacaaaggaaatcanagcttcaaccaaggggagatggaccatntgtgcttgaaagaatcaatgacaatgcttacaaagttg

SEQ ID NO: 53658 - DNA, 395 bp, Glycine max
  unsure (1)..(395): unsure at all n locations
agttattagagacccctagatattgtcctataggttcccaaataggggcacggagcaaacacgctgcgtgccattttaaacactgccatgcatgtagtcctaaatgtcatgtacgcctttgcttgtaattatttgtggatattgccatgctgtataaatccncctgttgcgcttttgcgcatctgcatcatgctgtcacacaggcgttgtatgtgggtctcgtcttttgtcgtaggaagtcgaaagatccatatcgtcttcttaactgcacacatggngcgtcgcgcccccaaatgcgcaagtaaagagagatgatttttcgggctctcgtgtccgtaaatgcattcatatcatgcatcgcataaacatctcttcagcatcataatgaacatatc

SEQ ID NO: 53659 - DNA, 393 bp, Glycine max
  unsure (1)..(393): unsure at all n locations
agctggccacccagctcgcccaggcgagcatggttgcttcctccagaagcaacagccttctggaggaatcttctggagggcccaagtgggcctgattactatttgcacccccatntttactaagtacacccccctgccttttttttggtgattcttttttcgtaaagttacgaaacttacgaatttcgtaacgatacttgttttctttccgtaatgttacggaaccttgcggattacataatcatcccctttttgacttacggaatgttacggaacctcactaattgtgcaacgatgcttctctttgatttccggtgcgtcacggaaccttccggattgtgcatcaataccttcttttgatttccgcatgcccggaacttacaaaatgctaat

SEQ ID NO: 53660 - DNA, 389 bp, Glycine max
  unsure (1)..(389): unsure at all n locations
gtcacctgcggcatgcaagcttccaagtgtcaaaggtaaagtcccagatagtgaatttctacttatatcaagaattaataactcgcctaatgcactaaaaatatctggaatgtgtccactaaaatggnttccagcaagaacaagcctcttcaacttgttcaagttaccaatatctggtggaattttacctgttaaaccattttctaatagtactagtgactgaaggttcttgagggcaccaaaacttgaaggaatttttccaatgagacctctgtttgatctaaactcaagtgattctaagctgccagcaagctttttccagtttgcattgnggatggtaacttgatgcctgtgttgtgattcacagcattngaatagggatagagctt

SEQ ID NO: 53661 - DNA, 475 bp, Glycine max
  unsure (1)..(475): unsure at all n locations
tgacccttaaaccttgncctctgaccggatccttaagcactgcggctgcagctgaagaaactgatgcattgttaacttggtacccagctggtctttgaataaaaatttgttcctgtcgcaaggagtttgtggttgtgctcctctgctgaccaccatacagacctttgtccttccatgcagcaacctggagtaattgagcagcctggagcttatgctgcaaacatttacaatagacctcctcaacctcagcagcaaaatcaaccacaacagaacaattatgacctcttcagcaacagatacaaccctggatggaggaatcaccctaatctcagatgggctagcccttaacaacaacaacagcaggcttgctctttctttcaaaaggtggtgggccaagcagacatacattcctctcccattcacaaccagatatcccccaaacaacacaagtgggggcgtccaccttccttaaaaa

SEQ ID NO: 53662 - DNA, 175 bp, Glycine max
ttatccattcatgatcaacaaacctcattccaagcttcttgagatgcctttcagtaatttcactcgacgctttggtaaatccacaatctcattagagacatcaacattgaagtagtcaatgaatcttgaggcaagtacaacataagtgtcacaacgtgggccacgatgggatgac

SEQ ID NO: 53663 - DNA, 369 bp, Glycine max
  unsure (1)..(369): unsure at all n locations
ctatctgatgatctgagcagcttgtgtgaacaccttgtctaatcttgaagcaccttgttgatattctttggctcatcaaaatcatgtattcatacattcacnaaatctacgaaggaaaatctcctanacctaaaacccatataacaaaggtccaaattatagcaagaatagagaatgcaacaacactaaaatacctaatactcataacaaaaggtccaaattatagcaagaatagagaatgcaacaacactaaaataatatgaaaagaaaaaagatattaatggcttcgaaaagaagaaaactntaagtaaggtgaattgaatgggtctcgtgagataaaggaaattctgagtagtaatttgtgcggat

SEQ ID NO: 53664 - DNA, 501 bp, Glycine max
  unsure (1)..(501): unsure at all n locations
ttgaccccctggnnnncttgancccctgctttacgtgcatatagatactccgcctaagtagcctaatatgccttctttcctttatatacctgggaagagaccaaagaacacttacaccaatggcagccaaaaaatttcccttttccgcatctttgggataacctgaaaaattcctcaagcacctattaatcacctccacattatggtagccaagtcaattgtataggtaaacattccgagccaccataaaaaatcccattatcatgaaatataccatagatatcccatagatgatacaaatccaatccttttaacaaagagactcccacagaaacaaaataaacagaatttaatagtattcaaatcgtaggactgcaaattcattggcaagtatgaatatagatagcagaagccaaacacccaaataaaagagaactannttttgtgtagctgatatcnattttctcaatcacaactatangtcttgacctgaggaccttg

SEQ ID NO: 53665 - DNA, 384 bp, Glycine max
  unsure (1)..(384): unsure at all n locations
agctgtgaatgttgtaaaattcaagntcaaggttcttgtattgcaacttgcaaggttcttgtctttataaataccagacatacaaatcaataggtattaaatataacttgttgccttctagccgatagctgatagccgatttgagcgtaattactttcaataaaaaatatttgtgatctataaaaagagaaataattgttgtcattattgcatacccttctttctcatttaaccgtgtatgtgaggtacagtttgaaatttgaataataataattgttttatccgtaagaagagaatccaataccaaatgagtctaactcgattgggtgaacaatatgcgaaagtgttataaacttgttgataccatattcaatacatttaaaa

SEQ ID NO: 53666 - DNA, 330 bp, Glycine max
ctcaatgggaaatgaatcaatcagccataaagacaaccatataggacaactatcttattttaattaatttatttcatcaattggtctatttttacacttctagcgtctattcaagcataagacagtaaattggccataataggcatggcactaatatttaaaaaataaaacattgaaattttgacaataaaattgtcataagacagtaaattgcccataataggcaaggcactaatatttaaaaaataaaacattgaaattttgacagtaaaattgtcacttttttactatgagatgttgataaagtgtaaaacataaagcaatgatgac

SEQ ID NO: 53667 - DNA, 53 bp, Glycine max
attttatctttgatctttctctccccctttggcaacatcgaaaacaaatcatg

SEQ ID NO: 53668 - DNA, 267 bp, Glycine max
  unsure (1)..(267): unsure at all n locations
agaaatgtgggaaaaaaacaaaaacttaaaagactaaactgaaacctgagttaaaattagacaaccaaaatactaattntgctttctaaatttgagaggaacttttttcttttaaaaacaagagtcaaccctatagtttagatcaatcatataaaccacaacctacatgttntaagtactaaaccagatcctggcatatacacataccttctttgactcttcagatataaacattgttttccgctcagtacccataactattctgtc

SEQ ID NO: 53669 - DNA, 432 bp, Glycine max
  unsure (1)..(432): unsure at all n locations
agctagaaggtgtgtatcccaccatctnttcatagtagaatactggtaatgtgtctactatcattggccctcatttttttccgtcattgagggtgccacttgggttggcaggtctctccacctttgggcgtattctttgaaagatccgtgcccctttttgcacatgttctgtagttgcatcctatccggaaccatatcaaaattgtactgatactgcctaacgaaggcaaccattatgtccttccaagaatnggactcggaaggctccaagttagcgtaccaggtaacagctacccagtaagactttcttggaagaaatgtatcagcagttcctcatcttttgcatatgcccccatcttccaacaatacatctttagatggttcttggggcaagtagtccccttgtacttgtcanagtccggcaccttgaac

SEQ ID NO: 53670 - DNA, 368 bp, Glycine max
gctccttcaactgcacaaggttcttaatattcgaagagtatccttgcggaaccttcacccgacgaagacactgacaaaaacttatctttaccttcttggacaaagcatggcaggctgggggcaagctaaatttctttccatcagaccttggatgcaactgtgatcgtatacccatatcaactagatcttgacgggtattcaagccatgcttcgtcttgccttgaatggtaaagagtgtcccaatcacactgtcgcaaacatctttctccacatgcataacatcaatacaatgtctaacgtcaagatcacaccagtacggaagatcaaagaaaatggatctcttcttccatatgcaactctgactttta

SEQ ID NO: 53671 - DNA, 321 bp, Glycine max
  unsure (1)..(321): unsure at all n locations
tattaaatgatgcatattaatgtgtgcaggcctacaatgctacaaccatgaatcatctattttactcaccaagcaacttatcttatgagaagatgcttgctcaacattcagcatataaatgctacttattctcttaccaatatggagagctttactggatatggcttcacttataagacaacaatttctattgaattcaatcttgaaacctttatncacaaagtggctaatgcttagaagaaatatgcttagtttatccacatataacacattctttatctgagttgtcgcttgattccctatacttccttctcccattat

SEQ ID NO: 53672 - DNA, 169 bp, Glycine max
agcttgtagaatggctagacatgatacatgttcatggtttggttgggttcaaggataaaagggataccccacattattccatgaccaaatgcaaaatgatgatttggaaattttatgcaaaactgggcatgcatgcacctacgtggtcgctcaagtggtaaaattttat

SEQ ID NO: 53673 - DNA, 449 bp, Glycine max
  unsure (1)..(449): unsure at all n locations
nttgaaaccgctagctattacgtgacactatagaatacctcagttggaggatatattccaccaatcttttataatagaacactggtcacatgttcattatcatcgggacatctcttttctggcatagggcactacttgaagttgcangtctcaacaactttgaacatactctttggatgactaatggctctctggacaggtttgcactgcttctgctgcatacgtaaatcgatgtatgctaatgaagcatcatcaaatcctcaagactaatctaagaagggtccaggtagtgtaccagataatagtcgcctcagccaggctttcttgaaaaanatgcatcagcagcttatcgtccttcgcataagcccccatccttttgtaatacaaccttaaatggttcttatggcaagtggtccctttgtatttatcaaaatctggcatcttgaact

SEQ ID NO: 53674 - DNA, 498 bp, Glycine max
  unsure (1)..(498): unsure at all n locations
nttgaacccctctaagacccgtgatcccttagcgactcgcagcatgcaagctcacagttaaattcgagcgtctccatttatttcgggactcaatctgacatcccgagcaataacggttgtgtcggctggtatagattcaaagctttttaattcaatttcgatccggtatatatttaccgcgtctaattcaacatcttatgataaaagttattggccgttagaatttgctgagaacttctacattcaagttggcgcgcttcgatgtattactggacttaatcagaccatccagttaaaagttatcgttgtttgaatgtgctgagagcttcaacattcaatttcatgcgtctcgatattttacgggactcaatcaaacatccgaggttagagtcttggtcgttgcatctgctggagcttcaccattcaatttgagcggctcgctgtattacgcacttaatccgacttccagccaaatagtgttgtgcttgagtatctccn

SEQ ID NO: 53675 - DNA, 323 bp, Glycine max
  unsure (1)..(323): unsure at all n locations
aagccaaaccacaacccaacaatttcacacaccanattctaattctaacagtttttacctgctcttagagagaaattcacttccaagagaaaagtagggaacagctaacactgtaataaaatgcatgccagtgacaaaacattaaaatgtctaaatccactccctttattgtctcatcagagctataactactcaattttccatctaaagtaaatcagaacccanatccaattcttattaacactacgacaatggtcgccacgaaaaagatcaacatcatagtgataaaaaaaatccgaagctctgaatggacacattcaaac

SEQ ID NO: 53676 - DNA, 498 bp, Glycine max
  unsure (1)..(498): unsure at all n locations
nttgannccctttgcattacgtgcactctagntcctcagcctcttgggaacctttccatttttcgctcccggaccaaccctattcttttttggttggatattaaattaaggttagaggaatattccttaattaccttttttttcctcttccgtttttggtttttccaatttcgccggggtattgttaagggttggcgtttttcttttgttgggtatgccaagttgggaaccatctcggattacctccgaagttcttatgaatctaaaatggttgtgtgcctgctgggagtggaattggggatacttggtttatcttttcagntcttttgtagggtttgcccgttgattttgggtttgaatgtgtcaattcagagcttccgattttttttatcacttttgatgtgatctttttcgtggcaccattgtcgtagtggtaataangaatggatttgggttctgatttactttagatggggaaatgagtagttatagctctgn

SEQ ID NO: 53677 - DNA, 386 bp, Glycine max
  unsure (1)..(386): unsure at all n locations
agctntaattattctagactactaattctatttctaaataagtttatttattatttaaactcgtcatcaatatctatatactaaagttggagtatgatgaatatactaaaatgcccatggctgagagcttgacagttgtccattttcttgactctttggtcattttatgcccctccagcttggctcggttttgtgccaccttgctgccatgtgtcatttcatggctatggtagcttggcgtgttgatgagtgattanaatgccatttctagtttgggtgtgtcgcaacctacccttcggcgggagggcgacgcgtgactcgcgggatgcgtgttccacgaaaggaatacgcgcggagtcgccaccaacgtttatttgaggaaaacg

SEQ ID NO: 53678 - DNA, 329 bp, Glycine max
cctcaatcatttccaaatatgcatgttgtataccctaatttcgtccggggacctttgcttgatgacatgcaacttttgtttggtcctcgtgaggtgcttggcacccatcattaagcaatttgtgaaattccgggacatgccggaaaacaaaagaaaatattgatgcacaatccgtaaggttccgtgacacaccggaaatcaaatggaagcatcgttgcacaattagtgaggttccgtaacattccgtaagtcaaaaaaggggatgattatgtaatccgcaaggttccgtaacattacggaaagaaaacaagtatcgttacaaaattcgt

SEQ ID NO: 53679 - DNA, 487 bp, Glycine max
ttggccatgcatagtgaacctgactacctcttggacttgacacggaccacctcttttcaaaacagccatgggctcgttattgtgtcctttctttccttcgcaacttgaagtcactattggttccccattaaacttcgcgaaatttggttcggccctactttttcttgcgaacccttttggtcttttggtcaaaggcttttgggggaattggattctttttccggaacccggcgcactcctttcgaacgtgtgtaacagccaacttgaacttctccttggcgagttttgcctttcctaactcgcttttgagagcttggacttcttcgtcctcttccggtgcttcaaaattctcttcgctgacgacttttaacttggcgagccaatctaaacctcgtatgcgaactttcagccattcgtggtacccaccaatgatgccattacgaatgcctctaagctcttgatcttttcttaacggaggtgtccatgc

SEQ ID NO: 53680 - DNA, 378 bp, Glycine max
  unsure (1)..(378): unsure at all n locations
cgatggtgcacaacaaggtttccacatacacaatgcgcgcataaacccaccatcccctattggccacctncaactgagctcacgtactcccacgtagcccatattctcatttctctcaacaccgggtccccaataattcttccaagctttcacaacatccaagcaaaacaacattcaaacagcacaagctatcatagccaagcaaaacagagcaaaggcagaaaactctgcttaacacatcaaccaaaatcacagcttttctcacttaaagaccatagtaacaatttcttcgatccaattcgttaccgttggatcgactccaaattntactggaagtctatagtgcataagcctacattgtgaccggtgggatctact

SEQ ID NO: 53681 - DNA, 295 bp, Glycine max
ctaaaaaattgttctaaaaagttattaaaatgccagtcaaggtcttgcttttatagactcttcatgtctggtcaagataaccattggaagaagtataaccttgagaaaaacctgaaaaccattggaagagtacatctcttgactttttattcaaaactttgcactggtaattgactaccaaaaccatataatcgattacacaaaacattttatgaaaggatgtgactcttcacaattgattttgaatttcaacgttcagatacactggtaatcgattaccaatatattataatcg

SEQ ID NO: 53682 - DNA, 232 bp, Glycine max
  unsure (1)..(232): unsure at all n locations
cccccacaaagcaagttccatcaatatggataacatatagatatgacaataatcactgaaataaacttcatgaaacaagacctcaacatcgggcaacatgtcgagcacaatgttgatgaaacttaagtcacttgagcatttcagaacaactgaatttttatactttggttggaccttgattttanaggcaagcacattacccaggaacttatcaagtgcttcagacgatgca

SEQ ID NO: 53683 - DNA, 396 bp, Glycine max
  unsure (1)..(396): unsure at all n locations
tgcagctaactgttagcaaagctcgagattgttatatatctaattcaagaaatgagccacattntaaattgattgtttctatatattcatcacaacaatagaacctgactcanatatttttttaacaaaatcttcttaatatatctctagaagctagagcagtgataataagggagatgcatcaatacatgacatcaagatagatagcaaccgtgatgttgtaataattctacaaagttcactaatgtgataggactttgattgtgatccctactaaaaaccaagcttaacaaaaggaaactttctcagaccttctttctccagtttttgctcctaatggaagccaaggtttacttttccatgaattaatgtaatagccactatagaagaagtgct

SEQ ID NO: 53684 - DNA, 446 bp, Glycine max
caagccaagcccgactcttgttgcttcagaagcctcttaagaaaaaatggccaactcccctccaaatatcttaattccaacctaaatatgggggttgggccctgcctccgtgcttaacacacaatttaatcgcttaacgcgccataagggattttggcttaacgcacttctctcgcttaacggatgagctgaaggggtgcacttgatgacctggagcggtgcgctcaacgaacctgacagctcatcttcttctggattcttcctcgcacttaaccactgagtgtcgcacttaatgaatgctcgctaagccagcagattggcttagcgagaaagtgaaaacaacacttttgcccaattgcctaattaacctgaaattgagagtaatttattattaaacacaaaaaataaaagtataaaatttctattacctatatttaacagaaagg

SEQ ID NO: 53685 - DNA, 283 bp, Glycine max
agcttcaattatggaataacaaaaaatcttaatctatcatggactaaaagggtgaggaagaagatcaccaacttccaacatgatgtcgaatcaatatatgaagcataagagcaatacaaaggttacttggaagaatgtcaacaacatgggttgagtgaaccattgacaatccattttttctttgaaggattgaatcatcaaagtgtgtcaacacaaaactaacaacaaccctaaggctcccaacaatgaatgtcataattagaaaacctaatggggggggggg

SEQ ID NO: 53686 - DNA, 455 bp, Glycine max
  unsure (1)..(455): unsure at all n locations
tgcctgtccgangcaacangtattatgggctccaggtatggttggaaaccggtatgaacccggaatgggtttgggccaagaccacggcggcattactagccttattaatgcccaaaggaaatcggggaagtattggttaggctattagcctactcangcagatataaagagaaacctcgcgaggaggaagagcaatggtcaaagcttgcggttgagacaagaaagtgaaggaagcccgcccttgcacataagtagaagctttataatcgcgggtctgggagacgaaggtcaagtggtcgcgatatacgaagatgatgttccgagtacattggatgtggtacgaccatgcccttctgatttccagctgggaaattggcgagtggaggaacgcccccgcatttacgcaacgagcataatgtaaacctttacggtttaaaagctctatagttgggccn

SEQ ID NO: 53687 - DNA, 245 bp, Glycine max
ttgtccgctttctccaccggtaatcaagtcggccaactgtcattatgaattcgtcaacgcgataccattgatgccttcactttcctcgttccgatcatggatgatctgatcctgcatcaatttctgacatacaaccatctttgtataattttgagggcgacttgggatttgtgggatatacatggaaaaaatatcactccccctgccgtccatatgtgaattttaaagaacacctattgggaggg

SEQ ID NO: 53688 - DNA, 403 bp, Glycine max
agctttgagccaattcagacaacaataactttttactcggatggcttaatgaagcccggaatatatcgagacgctcgaaaatgaatgttgaacctctgaccaacttaaacgaacataacttttactccgatgtctgattgaggcccgtcatatatcgagacgctcgaaattgaatgttgaacctcttagccaattcaaaccacaataactttatactccgatgtctgactgagtcccgtaatatatcgagacgctcgaagtgaatgtttaagctttagccatttcaacgatataacttttactcggatgtctgattgagtcccgaatataacagacctcaaattgatgttgagctctgactaatcaaacgacatacttttactcgatgctgattggcccgaat

SEQ ID NO: 53689 - DNA, 494 bp, Glycine max
  unsure (1)..(494): unsure at all n locations
ttaatcttaggaacttgnncccttgaanccncnnnnnnnnttgatncctgctatacggccttagatctcagctcacgtcttttcagcgtctgatagtaccggactattcaaccttcgagaaaaagtattggccttggattagcttagaagtccacattcatttccagcctcttgatattgtacgggacatcatcagacattcgagaaaaagtcattggccgttgtattggctcagagcttcaacattcaatttcgagcgtctcgatatattacgagcctcaatcaaacatccgagtaaaaagttatggtcgtttgtattggctccgagcttcaacgttcattttcgagcgtctcgatatgttacgggactcaatcagacatccgagaaaaaagttattgtcgtttgaattagctcagaggttcaacattcaatttcgagcgtctcgatatgttacgggactcaatcagacatccgaggtaaaagtcattgtccn

SEQ ID NO: 53690 - DNA, 155 bp, Glycine max
caaaattagtacaaacaatcttaatattatctagatataatttaataattaaactacaaaaaatcatagttcatatcagatcataaaataataaaataattatcaaaataataaaatcatattttatatcagattataaaataataacatattta

SEQ ID NO: 53691 - DNA, 458 bp, Glycine max
  unsure (1)..(458): unsure at all n locations
nttgaacccttgaanacgcgaccttaaaactaagctatgcttaaaataaattataagtgggcctccatataattatcacaaaagcgcttaaatatgtgaataaatatcacaaatgggcttcaatataaatntaattctcatctaataaaatttacaaaattaccattaaatatataggattatactacacatataaatttttcaacttatctctgtgttcacgcgggcataagttcaacttcacaactatgcacacgggatactgagctagtactttatattcatgtggatggataataaaacaagttgttcttttaagacgctacccttttggttgactcaggcctncttctcttatagtctctatacactgtttcttcctggtcagtggaacttcactctataatctatatgcaccttccactctctcacatcaccattcttctttcactctcctn

SEQ ID NO: 53692 - DNA, 430 bp, Glycine max
  unsure (1)..(430): unsure at all n locations
cctcctagttcatatgatgcagatgagntttgtagctaccttatgcactcctctaatgactatggcatctgatggtggnggaaactggcacataanttcttaaatctcttccagtactcatacaggctctcttcactgaagtggctaatacctgagatatccctcctgatggctgtggtcctggaagcagggaaaattttttctaagaatactctcttaaggtcatccagctcgtgatggaccttggagcaaggtaatacaaccagtcctttgccactccctctaatgaatgaggaaaagccttcagaaatatgtgatcctcttggacatctggnggtttcatggtggagcagacaatgtgaaattctttcaaatgtttgtgcgggtcttcacctgcaaggccatgaaactttggagcanatgaatcggt

SEQ ID NO: 53693 - DNA, 316 bp, Glycine max
taaatctagatgaaatacatctggataagataagatttgataaataaattgctgcttcttcagttcagctcattccggattcaagcccaattgcttataatttcttctaaaattaaattaaaaacacaaaattatgtcagtaggcccaaatgataaaactgcataattaatttgacaattaaggctaatcagtaattaaaatggtgacacaaagggttaagaaatatgagaaaataatgacacatcagctgcttatccatgtgtctaaaacaaagaaatacctaccactaataggaattactattctaacactccc

SEQ ID NO: 53694 - DNA, 471 bp, Glycine max
  unsure (1)..(471): unsure at all n locations
atgaacctcatactgcccttatctccctggcctgattcggtcaccccgagtggcttcgtccaacgctactcttttaaatttggccccccgggcatcttcctcccttgatctctttgatatcgaggaagaattgcgaaaagcttatcccttcccatgaaaatattggctagcttcatggcgaatcggtcccgctcttggatccggcaaaaaccgaccaaaaccgatcttttacccatcctatttcttcttgtcggaatcaccaccctttgcaagtcaccataactcctgagactgttgaacagtgcttcgcatcatctcctccgcaaaatggtaatgtaaaatcgtggtgattgtagttgctccttactcncttggtccctggattggataatatctgggttggtataaccagagcctctccaccatcccacctcttacgatatngcacaagattccacccatcatcatatg

SEQ ID NO: 53695 - DNA, 353 bp, Glycine max
  unsure (1)..(353): unsure at all n locations
agactgttagggggaagagatggtctctatttcttttattactacagttttgagaaaataaatgttactcttcacacaatgtgtatcatctccatttcatttgtttttccaaaaggtaagtaatgttcttagtgctagggcttatttgatctaattaccaacattatgactatattggcttgttgaattattgcttgcaacaataagcccttgtgacccaaactcatgcacctcttgcatatcacaaaatggtatataaacacctgagccaaagttatcccaagcaatgtgggatttggccttttgtgatatccttcgnactataacactntttcctttttcacaatacaatc

SEQ ID NO: 53696 - DNA, 315 bp, Glycine max
  unsure (1)..(315): unsure at all n locations
acgaagaacagcgaagaacggccaccgattccatcacataaatgtcacggaggcgcctccgcttggattggttccttctttcttcttctcttcactaattttaagtgaattatgagtgctaaaagagttgaaccccttcccctcagccccaaagaactttttatataaaaatggggcgaggtggttgcttccacctgaagtaacccccctccaaaaccttctagataggcctanatgctaaggacacccgccagtttgatcaatgcacccctcatttttatgttactggctgatttccttctgaaacatcacgaa

SEQ ID NO: 53697 - DNA, 384 bp, Glycine max
atctgcagaagaacatagaccacaaacccttgcaacaggtgtaggtgcagatgcagatttctgattcatggcaagctgagttactaggttgaccaaggcatcaagttttccctcaagctttttattttcagcagatgaagatgaatttgtggccacctcatggactcctctaaggacaatagcatcatttcttgcactgaattgttgggagttgaaagccatcttctcaatcaaattcctagcctcagcagaggtcatatcaccaagggctccaccactgacagcatctatcatactcctctccatgttgctaaatccctcatagaaatattgaagaaggagttgcttacacatctggtagtgatgacagcttgcacacaattt

SEQ ID NO: 53698 - DNA, 588 bp, Glycine max
  unsure (1)..(588): unsure at all n locations
aggttgtgnnnnnggttgaccccttgtatctcgngcactntnaanacncagggtagtatatatggttagggctatagacgcgcgcgttaanctatcatcatgctagganggactcaaacagaaccgttactgggccggcgctagtaaaaaactgttctgtgtctagggactgcactctgcgtgtctaagcactataacaactaacatcgtatgatgctacagactatgaatanntaggagcatctgttctaactactgctatatacaacgatacgccccgcggcgctcaatgatatactctcgcatgcatccacatgcacatgttatttatgcacatgttgaacgctcgtttcagtgtccaaattggagagcggagaggcacctttgcacattcatgttgtcacgggtgcaccacatgagaggtcacaggagcgttctgaaggggatagacaagaacactctaacgtagcggtgacctgatatgcaacttgctggattgtgtgtcaagagaatcatgctatatagcttgacattactcacttctacacaacgcgttctgatttgtgaacgtctctactctgacaccgg

SEQ ID NO: 53699 - DNA, 182 bp, Glycine max
  unsure (1)..(182): unsure at all n locations
gagcattgacttcctagcctataagggattctcatgcatacttcatattgcgaatgaattataaagctatttngcgtgttccgttggagatccaaaacgatacttaagactcgttctagctcattgacatgaaccacagttgcaggtggttgatcttccaaattggcctccaactaggtatc

SEQ ID NO: 53700 - DNA, 414 bp, Glycine max
taaaccaagaatagctgataacgcgctctacttatgacttctgtgatatctcagaacttcagcaagatgagttttattccactagtattataaggagacaaagctatgtttctatctgtctattacggcgagaagctgagtcatcacgaactttcacaatagctatgaatcggaattgaatgcacaatcgcatattttaattatttgagaccttcttcagtctgagcaaaatatgccagttgtgcaactgttcattgatatatgcgtatgagcatgaaccatcacaacacaaaggccgatcagtattaaagatgagatacgtccctatacggagcacatgtgttacattatatattagatcagatatcaactcctacatatgttaatatacaggcattatatctatatatttat

SEQ ID NO: 53701 - DNA, 468 bp, Glycine max
  unsure (1)..(468): unsure at all n locations
agcttgctaacccatggaagctcctaatatctcccacactttttgnggtgggccattcttggatggccttgattttctcagggtccacttggaccccatttctaccaactacaaaacctaagaagactatattatctacacaaaaggtacacttctctatatttgcatagagggtgtttttcctaaggactgaaagaacttgcctgagatgtcctaagtgatcatctaggctcctactgtacactaaaatatcatcaaaataaacaactacaaatctacctatgaaatccattaagacatgatgcataagcctcataaaggtgcttggtgtgttagtgagcccaaaaggcatcactagccattcatacaaaccaaacttggtcttgaaagcggntntccactcatcaccctttntcatcctgatttggtgataaccacttttaagaatcaattttgaaaagatattgg

SEQ ID NO: 53702 - DNA, 419 bp, Glycine max
ataatagctaagcacacctccttgagatgagaagctagagcttatctacacaccccctataatagctaagctcacccacatgacaaaaaacatgaaaataacagagaaaagtccttattacatagacaactcatcatgccccgaaatacaatgctaaaaccctatactactagaatggccaaaatacaaggcctagacgaaggaataacctattctaatatttacaaagataagcgggctcatacttagcccatgggctcgaaatataccctaaggctcatgagaaccctagggcctttccttggatctctagcccaatctacttggagtcttctagccaatgcccttgcggggtaagagagcatcattacttttcactcagatgtgcgattcaggcacatcatatatcgagacgctcg

SEQ ID NO: 53703 - DNA, 275 bp, Glycine max
  unsure (1)..(275): unsure at all n locations
tgcatctgacttcccaagagctttctcaccattaacatatcaccctacatagcttcctcctcaaggtctttttccacgtcttcttcttcaccgatttcagattcactgttgatttctccatctgccttcatgatcatggtcctcctggttggacactcagaagcanaatgtcctctgcctaagcatttgaagcattntatgtctctggtaccagcgttggatgatgagacataattatgcttggtttcagcactggaaactgctgactttccatg

SEQ ID NO: 53704 - DNA, 448 bp, Glycine max
gattcacaagggaggtaccttcttcttgttctctctgaacaaccaagtggatgtaccctccacttgaactgatccacaagagatgtaccctctcttgttctcagttacaacaacccaagtagatgtatcctctacttgtaccacaaaggatgtaccctccaaaaagaattcatgtgattagtccttgttgaattctttctggcaaagggagaagagagacacaaaaagaattcatgtgattagtccttgttgaattctttttggcaaagggagaagagaatgaaaagatataacacactttgttttctgtagaattttcacttgcagaagaacaaggtttggaaaatagaaaacttacaaagctttttggcaaaaggaagatgaagaaagatgagttggaaagaattcataaagaattgtaaaggttgtaaaggtttaaaggtttctc

SEQ ID NO: 53705 - DNA, 442 bp, Glycine max
  unsure (1)..(442): unsure at all n locations
agctcaccttctggccttctatagttgttgtatgagaaacatgctctatttcatctcccactccaagtaggcctccggatcattctttcctttaaatggaggaatgttgagtttaataccatcaattcggttttgtctaggaacaccatcattccctcttctcctcctttcttcttcattatgatctctattctccatttgatccaacctctcatggagcgcatcatctcgttgtttcattaacctctccatatgttgcatcaaagcttgcatttggaattgcgaaagccccactccatcattaggattagtacctgacatctcaaacaaacaaatcaaacgtaacaagacaattatagttgtttgaatacctcacccactcaagtgtatcacacnaatatggcttttctctaatgaaacactcttgccctttaccactcta

SEQ ID NO: 53706 - DNA, 473 bp, Glycine max
  unsure (1)..(473): unsure at all n locations
tactcagccttgtatgactccaaaggctgaaacaactgaagtatatctatttcttaaccgaaggaggaatacattattaatctttcaagaacttgtgaaagtaaaaactctactggtaatggaagcactatgcattctatgctaagacaataaatactaagttctacaactatgaatagaaatgctcatttcaacttcgctaagacaagatagccctgcagcttctatgatatactctgtatgcatccacatgcacatgttattttacagaagtagaacacttgatccaataaaagtcaacgtcatggcatgacaccaagtaaacatataataaaccacatataaagcataagaatgcagcaggaagtgtactgaagcatttaaatcaagcaacttcgacctaaggttgaacatcanataattatcaagacatgtaatataatagcatattgcttatagcatgtaatatactc

SEQ ID NO: 53707 - DNA, 281 bp, Glycine max
aagatgatgacaaaggtgatgacaaaaagctcaaagatcaatcaaagaacaactcaggtgaaacaaagaatcaatcaaagaacaactcaagtgaatcaagaacaattcaagagttcaagaatagaatcaagatgaattcaagactcaagaagaaagtttagagtcaagaatcaagtttcaagattcaagttccaagaatcaagatcaagattcaagacttaagatttaagaatcaagagaagactcaatcaagataagtattaaaaagtttttcaaaaact

SEQ ID NO: 53708 - DNA, 446 bp, Glycine max
  unsure (1)..(446): unsure at all n locations
tgagcncatatgctatgcccatcatcttggtgccaaagtattatgatactntgagaatatgcacaaattgtagagccatcaataacatcactgcaagtgatcatgaatcccttaagcatctaaagggccagggcaaactcaataagtggtatgccaaatgggtagagtatctagagcaatttccttatgtgatcaaacataagcaagacaatgctaatgttgtggctgacgcctcttctaggaggtattatttactttccatgcttgaaactaagatgcttgcatttgatcatataaagaagttgtatgcttgtgatgatgacttctttaatttgtttaaattatgtaaaaagggtgctcataatagatactttagacatgatggttacctattcaaagataagcaattgtgtgtgcctaagagttccatgcttgagttgtttatt

SEQ ID NO: 53709 - DNA, 465 bp, Glycine max
  unsure (1)..(465): unsure at all n locations
ccggaccttaagcacctgcagctgcagcttgcttggctctattattctnaattatttntaacaatattgataatatgtgcaatcttttagaaaaacattatcccattaatttcaatgaaaaatagaagattaatttgcaatgtgaacttcaacattttattatatatacatactcattaaaaatctaaaagataataaacctcgaagaatttatcaattatctaaaattgtgtactggtttggtaactaaaagaaagtcacaaaatttagtacttgaattacaacctactgtattttatcatgactcttctaatttctcctactacaattgaaatatcttaatttcttagtaaaggaaatatcaaaggttgaaaaacaagatcaaagctttgtttataaaaaaaataacatgatagtctatattaaaagtgagaatactagaagtcttagttctaattcaattat

SEQ ID NO: 53710 - DNA, 526 bp, Glycine max
  unsure (1)..(526): unsure at all n locations
actcagcttcagtttcacagcctgtagacgaanagtcaataattggatcgtaagggaatatacggccaatgcttaaaaaaaaaatagctcattgacagtagaaaccattaactattatcaacatttctctattttcaagacaaaatattaagctgtaacaatctcaatttctaactagtgttcattctgtttcaatcccttgatacaaaacattntgttgatcgatttctacattaaattaccaaaaacagaacaattaattctcttaaaaaaaactataagattgttttgtttttcattgcatgtaagtgaatgaattatatgaaaccatcatagagcttattttaatagattctgaacgcttaaaccaatgataaccgaccagtgctggtattaatggctgttttctcaagtattcaacaaataattatgccagctctaggtacaaagtgtttattagtattgttacaaatagacacttatagtgatattgaaagtaatcctttgtgcattttgcattataaaa

SEQ ID NO: 53711 - DNA, 463 bp, Glycine max
  unsure (1)..(463): unsure at all n locations
ataatgcccttgtagtatgaattacttgtggagttgaagaaagcttcctttttggactcaaagatctcttttttcttccttttcttcatctcaaagcaagttcctttggtttgataggtaagagaagctttatccttttctatgcttaggttgctttggcttggtttcaaggttgcttgaaaatgaataatgttgttaaaaatggaagtttaagcttttgaggttttcagttttgaaatttgggttgttgattatttgatgaaaatttcatatttgtaatgagttttgatgttgtttaggtatttgaatttgatagaaaagggtttggagttttttagatggtttggaagccatgagagaccatatacaaaaatttgaaattcaacagaatntatgtccattgatcagtttcgcatccagtgacgagtttcacatccaccgattagttntacgtccaatgaat

SEQ ID NO: 53712 - DNA, 373 bp, Glycine max
  unsure (1)..(373): unsure at all n locations
agctntgaaacatacatcatggttatttattgttgcaatngctngnagaaaagncatactaggtaaccataaggatgcatggacatttggagcggttgatcccaatagtggcactgcagcactgcttgaggtaacaatggatttgtttgtaggcattgctttgcttatttatatcaaaccaatggcacaagtgacatgtctcatgaaattaggtggctcaaaggctacggaagcttcagaaaaaagggtggagacctagaagaacaattttattatgtaattgggatgctgaggaatatggcctctgaattntctttacttctttngtctctccttgntactcacaaaggtgtgtgcaacatgaaagtttgat

SEQ ID NO: 53713 - DNA, 535 bp, Glycine max
  unsure (1)..(535): unsure at all n locations
aaggatgtgnnnnactaagacgcctcagcancaacgngacactatagagtagctatgctggagagcatcatggctggaaccaccacgcctttgtgcacaatagacggagccggaccgaaacatctatattaccctggatgactcaacaccttggcgatgtgaaccatagtcatgtcatgcacgcagaaaatgagaaatctagcccatcattactaaagcaaaaccgggctcgttggtggctgaactctaactgagcagtcatcagaggggatcccctggctaattatataccacactacatgtgagagtatcatatagagctagttataagccgcagcgacaacctctatatcttgcaggcacgacgtagtatccggcatgtgacccatgagtgagtctaatccacataataacgggcatcactggaatatccatcacgctgcgagagcaccaggctaggccatgaggaacaagatcctcatatagaactatggaaccttctggtgcgatcacgctaaactgagtgcaccttaan

SEQ ID NO: 53714 - DNA, 314 bp, Glycine max
  unsure (1)..(314): unsure at all n locations
ccccaagagactcagcataaggatgcacaggtcaaagntgagtatgtgaaaagaatgtatgaccaagtgaaggtgcaaattgcaaagaagaatgaaagttatactaagcaagccaacaagaaaaggaaggaagtggtacttgaacccggtgatgatcctggacatttgaggacaaatgttttccaagaaggagggaatgatgagaatcatgaaacaggccaaatacagtctataggcccaagtggagaaagacgaangcccaagtggagaaagacaaagcccccgagtggagaaagatgaangcccaagtggag

SEQ ID NO: 53715 - DNA, 507 bp, Glycine max
  unsure (1)..(507): unsure at all n locations
tgtagaanattganacgacananatnnnnatctaatagttcctatataattccgtagtatatcgagacgctcgaaattcaaaataaacctctcagcaaaatgaaacgacaataactttttactcgaatgtccgaatgaatcccgtaatatatcgagacgctcgtaactgaaaacagaagctctgagcaaattcaaaagataataacgttttactcgtacgtccgattgtttcctgtagtatatcgagaccctcgtaattgaaaccagaagcccgtagcaaactcaaacggcaataaatttttactcggatgcccgaatgaatcccataatatatcgaggcgatcgtaattgaaaacagaagctatgagcaaattcaaacgacaataactttntactcggatgaataccgtaatatatcgagacgctcgtaattgataacaaaagctctgagcaaattcaaacgacaataactnntttacttgatgtccgaatgttcccgtagtatat

SEQ ID NO: 53716 - DNA, 513 bp, Glycine max
  unsure (1)..(513): unsure at all n locations
tatagccgacaaggaagtgcgatggaaatgcgttttttattcattaattaaaacgctaacttattttcgacttttttttttggtacaacgactagtgacattgatattatggacttgatattttgtttcttaaagataaagttttttttttctaattaataataataataattacatactagaatttttaaataattttttagaaaataatattacgggtgaattggattaagattttaaaagattatttttgtctaattttttttttctaaattttagaagactttggactttaattttttttaaagatttctaggattatgattttataattcgaatttttaatgaatttataatatatgaattcaaaagatttgaaaaaatattatgaattttgaaaattcataaattttaaaatatattttaaaattattaataaagatttatgagattttttcacataaaattttaaataaaattcatcttatacaaaaaantttaaacttattatat

SEQ ID NO: 53717 - DNA, 311 bp, Glycine max
cctgattactatatggacccccatttttactaagtacaccctcctgccttttatctggtgattcttttctcgtaaagctacaaaacttactaatctcgtaacgatactcgttttcttttcgtaatgttacagaaccttgcggattacataatcatccccttattgacttacggaatgttacggaacctcactaattgagcgacgatgctttcttctgatttcggagcgtcacggaaccttgcggattgtgcatcaatacctgtttttgatttacggcatgtcccggaacttcacaaatggcctaatgatgg

SEQ ID NO: 53718 - DNA, 449 bp, Glycine max
  unsure (1)..(449): unsure at all n locations
ctactacatctcatctctagcatgcattttctttctttacccactcctcacgtttggtttnttagggaaaacaccataactaaacgcgccgcaagggatccctatcgcaccagatccaaatctagaacgatgggtgatcaagaggagacacaggaacagatgaaagccgacatgtcggctctgaaagaacaaatggcctccatgatggaggccatgttaggtatgaagcagctcatagagaagaacgcggccaccgccgccgctgtcagttcggctgccgaagcagacccgactcccttggcaactacgcaccatcctccctcaaacatagtatgacggngaagggacgcactgtggcacgatggcagccctcacctgtgatacaaccgagcggcttacccttatggattgccgcccaactattcaccacccatcttgcaagaagatgc

SEQ ID NO: 53719 - DNA, 399 bp, Glycine max
  unsure (1)..(399): unsure at all n locations
gcagcaaaggagcacacaaaccacanactcttgcgacaggaacagatttctgattcaaggccagctgggttactaagttaaccaatgcatccagtttgccttcaagcttcttagtttcagatgatgcagatgggcttgtagctacctcatgcactcctctaatgactatggcatcatttctggcgctaaactgttgggagttggaagccatcttctcaattaaatttctggcttcagcaggagtcatgtctccaagggctccaccactggcagcatctatcatacttctctccatattgctgagtccttcataaaaatattggagaagaagctgctctgaaatctgatggtggnggcaactggcacatagtttcttaaatctctcctagtactcataca

SEQ ID NO: 53720 - DNA, 435 bp, Glycine max
gattgccgctcaagacatttatagaacatgttgaagatatttgttattgatgatcattaagtgtaatttaccttatttattttactgacactcttagttcatttatgatatgtttctaaatatttgtgctctatgtttgcatgaatatttgtattagaataatgttagcaggttttgttttgaataaagacattatgttgtatcaattatgtactcctaactaatgatcatatttaggagaagactaatttgtaatacatggaaggaactatgtagattaagtgatgtacaaccgccacgacttgaattggtttctatttttaataatgaaattatgatgtatccaatgtatagaacaatttactcatcttaatgtgcattatgttagtttaatctatttatctatatagaccacaacgtgtagtaatgttacac

SEQ ID NO: 53721 - DNA, 409 bp, Glycine max
  unsure (1)..(409): unsure at all n locations
catgcaagcttgaaattgaacaagggaagaacnngattattcaatttttcttaacttttcactcggaagtccgattcgggcgcataatatattgagacgctctcgtgaaattcaaatggtcataacttttcactcagaggttcgattcaggcgcataatatatcgagaggcgcataattgaacaacggaagctgtcgagaaatacatatggtcataccttttaactgcggagttctgatttaagcgcataatacatagagacgctcgaaattgaacagtggaagctctcgagattttcagaggggcataacttttaactcggaggtccgagtcaggcgcataatatatggagacgctcaagattgagctacggaagctctcgagaaattcacatggtcgtaacttttaa

SEQ ID NO: 53722 - DNA, 493 bp, Glycine max
  unsure (1)..(493): unsure at all n locations
actcagcttctatccaggctcatcttggtggtgaagctctttcttcctgtcttattccctagtggatgacgccgcctcttacctcttctcctttgtcttccgctgcatctccaggtggaaaatcaccattaaaggacctcattgaagctcatagatccagcctccatagaagctccacaagcaagcttccatcacatgggcaaaggctgtgtccactattctttgtaaatgttagaataggttttccttcttttgggccttgtattttgatgcaatcttaccccccaagcttattggatagaatactccaagaggattgggctagagcagctaaagaaggccctaggattctcatgaacctcagggtagatttctgagcccatgggccaaggctgggtccactcttctttgtaaatattagaataggttttctttcttttaggccttgtatnttgatgcaatcctacccctcaagcttattggatagaagact

SEQ ID NO: 53723 - DNA, 464 bp, Glycine max
  unsure (1)..(464): unsure at all n locations
agcttatgctagatcaaaatgttggcttgtttttaagggtatttgaacaggagggcctaaaggtgagggccaaatttgatatcacccattgaggcatatgcgtcaagctaatgacgttaaaagagcgcttcctgngaggcaacccagttctaatttctttcatttgtttttcatgcattgcataagttggaatttgctttatgatcattgaaaaaggggtatatcagcttatactaagttatagatattggggtttgatctaaatgttttgagaaagtggactgaaaataactgaaaaaacattttcttgaaaatagtccactcgctaagcgtatatcacgcactgagcgcatctcctccatgtgctaagtgaggctagcctacgctaagtgctcaaatccctgcatctcaagctgattgggctcactaagctggccatgggtgagcttagcccaattcaattc

SEQ ID NO: 53724 - DNA, 498 bp, Glycine max
  unsure (1)..(498): unsure at all n locations
ccctctttgaacaaatacccctcagccaaatagaatctattttgtgcctttntcccacaactcttgtaaatgggagagaaattttcatctaaagcatacaagtccctgatattatcaaatcctaaaatttgagctcctagggagcaaaacaatgtgtgtttcctagagagggcatcaactaccacatttgtttttccctttttgtatttgataacatatggaaatttctctaggtactctacctattttgcatgcctcttgtttaacttgctttgccctctaatgtacttaagtgattgatgatcactatgaatgacaaattccttggaaataaggtaatgttcccaagtttggaggactcttattacggcataaaactctgtatcataggtggggtagttgagggaggcactatgaagtttttcactaaaataagcaatagggtgcccaccttgtaacaatacaactccaactcccactccagaggcatcacattct

SEQ ID NO: 53725 - DNA, 535 bp, Glycine max
  unsure (1)..(535): unsure at all n locations
agaaactaagcttacttgcnagaataccaagaaattccttatctgtctttctatcatatttcctatgttntcttttccattgtttaatacaaaacacttgcaaccaaagacatgaagatgtgagatgtatggtttcctaccattgaacaattcatatggagttttctttaagatgggccttattaaagccctattcatgatgtaacatgcagtattaacggcttcagcccaaaaatattttggaagaggaatatcattcattaaggttctagcaatttcttccgaagacctatttttcctttcaacaactctattttgttgaggggttctaggtgcagaaaaattatgttcaatgccatgcttttcacaaaataaatcaaattctttattttcaaactcacccccctgatcactcctaatagatataattntaggattnttcttattttgaataacttttgcaagtttcctanatgcttgaaatgcatcattcttatgagtgataaatagtgtccaagtgtatctagaatagtca

SEQ ID NO: 53726 - DNA, 425 bp, Glycine max
  unsure (1)..(425): unsure at all n locations
agctntcataggnaanancattgtgcagccatttcnccttagagncctcncacgagggggaggttgtgccatgttctcagaatgtgcaaaatcagaatgctcagaatcagaatgctcaaaattataatgctcaagatcaggatgttcaaaatcaccaataacagaatgcacagattcaccagttgtggaatgctcagaatgatcaaaaggtataaaatgatgcctaactaatctatgaaatgtcctatctatctcangatcaaagggttgtaagtcagatggattgcctctagtcatacactacattcagcatgcacacaactagttgccttgtcatgtaaataaaggtgtangtttgaactacagctaccctcacatgatatcaaaatgacttgaaattttgtgagcaaccctataaaatgatg

SEQ ID NO: 53727 - DNA, 485 bp, Glycine max
  unsure (1)..(485): unsure at all n locations
ngagatgaggaagtgttgaagggtgaaactccctgcttttangttgaccacagagnggnacctggagatatgtcgcgggggtcaagagaccttggggacgtcaggtggggtgctattgcccaaaaccaagcttgaccaatcccgacccaacccgggcatagtcggtcagtgagaacctgtgatgtacctaagcatgcgagctcctggcagtcaacagataaaaggaaaacaagaccacaaagcaaggaggcttgtggtggctggccacctgtgaattttgtgtaatatgtggattgtggcctctggtaatcgattaccacaggtgagtaatcgattacaacgcttaaaaattgaggacaggaggctaagatggtctctggtaatcgattaccaaggggtgtaatcgattaccaggcttgaaaacgaagtcaggaaacttatggagcctctggtaatcgattaccagccggtgtaatcgattacac

SEQ ID NO: 53728 - DNA, 362 bp, Glycine max
caaaaaaaatatcataaaagagcatattttgaattaattaattgttacaacataatctaatacaaaactcatgtctgaatctaaaaaatgaaatctagatttaagataaaaaaaatgtccattttggacatttccacaaaaataggaaaaaggatcgagaagcttatatgcatgacgtaaaaggatcctcctgtagatcgttgagctctttcaagatgtatttggaagccatacctaagcttcaaagaaaaaaaaacaaaatctgaaaacggcatattttatctatagactaaagggaggtatgaaaagtaaaagaaagcaaccaaagcaattatggcaatctaattcaataacggaagcta

SEQ ID NO: 53729 - DNA, 512 bp, Glycine max
  unsure (1)..(512): unsure at all n locations
nggaacaattgctagcaatctgtctccactctccattatttattatggaaggaaagcatgnttgaatgcaagttgtaaaacccatctaaaacacagtgtgtctaccatctttggatagtaagtctagtggagatgcactgtagctaaggctagaagttgaaagttggttgtcttgatcctttcaaacaaaacccattccagtacctaagtctcttttaagttttaactattgcatcaaaattaattataaaaccatcactaagttatggaggagaccagtttacaaggtgttgtgcaagtggttgttgatcctcatctatctctgggctcatgttccaatatacactctgctaaaacaagttccagtctcttctagccttatctattttttctataaaaaanaacccaatcatttcttcggtgccaaatggaccataacaatcatctaaaaacaagcataaacatcatatttttcaactcataacactcagccaaccacaaattaaacttca

SEQ ID NO: 53730 - DNA, 288 bp, Glycine max
  unsure (1)..(288): unsure at all n locations
agcttacacgacctngnttgttcagagatgtttttattatttatanggacaagtttgaatatgatgtataagaaagtgaatgtgagccttttacccctttgaaaggtttgcatttaaaaatattttaaaaaacttttaattaatatttgaatttttattcctttattagtatatatgtgaggggtaaagggtgttggcaaaatcaccaaattgggtgcctcttactaatcatgtaccgcagtgggtttgtttcatattaatttaccatgggagtctctgtattttact

SEQ ID NO: 53731 - DNA, 500 bp, Glycine max
  unsure (1)..(500): unsure at all n locations
acactataaaactcagctgtttcttgaattccagacacaagagagcttccttttttgggatgtaatttgcaacctgcacaatcagaatctctatatcttgactcatccactgatttacctttctcatctaagtcaaggtaggttgaagttgtcgttggagtatatggttctttgcattttttatgccaaatttcttaattagttctataaagtatttggtttgacatangaaggttccatgtttcatctactggacttggagtccaaggaagaaatttaactcacccatcatagacatctcaaattccttctacatacaactagaaaattccttacacaaaatttcattactagcaccaaatataatatcatcaacatatatttgaacaattaacaactcactatttactttcttaataaacaatgttttgtcaacttggcctctagtgaaagaatgcttaattataaaactgtttaatctatcatacgatgaccttggt

SEQ ID NO: 53732 - DNA, 402 bp, Glycine max
  unsure (1)..(402): unsure at all n locations
aacggagctccacgaaaaagaactttctttatacaacggcaaacgggcgggcggagcaacgaataaggaaagcaacccatcgggacgctcaaaattnaacacggaagacacgggcgaaggccgacgggctaaagagttgactcggaagaccgatagacgcccacaatacatcatcgcccctcgaaaggagaaacggacggaccacgcaaattcggacagccataacgtgtgactcagatgcccgactgaagctcaacacacaccgagacgctcttaggataaaaatgaagcccaccgcaacacacacggnaaaacgatgcctccggatctcagaaaaggaaagaagctaaccagaggtcaaaaaaaacaggaagacacggggaacctaagggcaaagacaga

SEQ ID NO: 53733 - DNA, 422 bp, Glycine max
  unsure (1)..(422): unsure at all n locations
agcttctcaaggaagctacctattctataattataagcatgtgtaacacttgttgtaactttgatgaatgaaagtcttatgagacacacttcaaagttctacttctccccctcttttattccttcaatttcgtgctcccccctctctctttctctccctctttcttttcctccattgaagcatccttccaagcttcttatccaaggctcatcttgggggtgaagctccttcttccatggcttattccctagtggatggcgcctcccttctcctcttctcctttgccttccgctgcatctccatggtgaaaaatcaccattgaaggacctcattgaagctcanagatccagcctncatagaagctccacaagcangcttncatcactacttatgtgcgatggcaactacaagaggcaacaaca

SEQ ID NO: 53734 - DNA, 535 bp, Glycine max
  unsure (1)..(535): unsure at all n locations
tactcaagcttggatgcttgtccaanaggcaaacaagtcaaagtcncttttttataaaaaggtgtaagtttctacatctaaacctttggaacttttacacttggacttgcttggcccctctagaactatgagtttgagagttgactattatgctcttgtcattgttgatgattactcaagatttacgtggactttttttcttgctttaaaaagtgttgcttttaaagctttcaagaaacttgcaaaagttattcaaaatgaaaaagatttgaaaattaagaccttgagaagtgatcatagaggtgaattccaaaatgaagattttaaaactttttgtgaagaaaatgggatttcacgtgatttttctgctactagaacttcacaacaaaatggggctgcagagaggaaaaatttgtgtttgcaagaactagcaagaactatgttaaatgaaactaacttagcanattatttttggacggatgccataagtacaactggctatgttctcaatagggaatttaataatacctattta

SEQ ID NO: 53735 - DNA, 373 bp, Glycine max
  unsure (1)..(373): unsure at all n locations
tcttcatcaaatnngaaaacaatgtctttgtttagcagattactcagcagccttgcaatcttagagaagtccttgatgaacctcttatagaaccctgcataccctaggaaactcctgatgcctttaacatttgatggtggtggcaacttttcaatgatatctatctttgcctgatctacctcaattcctcgggctaaaattttatggcccaagactatgccttcttgaaccatgaagtgacacttctcccaatttaacaccaagtttgtttctacgcacctttgtagtaccattgagggccttacactggaatggnggtataagaactgattgaaaaaggggtgaaagaaagaaatggagaaaatggtgaaaa

SEQ ID NO: 53736 - DNA, 436 bp, Glycine max
  unsure (1)..(436): unsure at all n locations
tcacattgaattagcacctaaggcatatagatggtttngtgtatcttaacataagagatttcagatggactttgatcctaatcccacagccgaccttttcacgagatctctacttaaccctttggttaaatgatcggccaaattctgctgagttctcacaaactccactggtatcacaccatgcatgattaactcccgaaccatgttgtttctaacacccaagtgtctagacttcccattatacacttgactatatgccttagccaaagtagcctgactatcgcacctgatagacatgggaggtataggtttgggccacaatggaatctcatagatcagatttcttagccactcagcttctttaccagctgctgctaaagctacaaattcatattccattgttgaaattgtaatgcaggtctgtttcttggatgcc

SEQ ID NO: 53737 - DNA, 512 bp, Glycine max
  unsure (1)..(512): unsure at all n locations
agcgccttacacatgctcaatgcacgtagccttgtgtgattatggatgtggaaccagcacaccacgaagacactggctctatattatctgcatctacgaaggcggagaatggaaggctggtggctgaacctctggccgctcatcacacgatagatactgctgcgaccatatactcgtatcatctagatatggaacgctatgagagccatctttagccatgacttgagtgttaaagagcattgcaagagaactgtcgcatgcatgtgaattcaaagacgatggatcaaaacagtgagcatcttcaagaaccgatgctactggactatcatgcaaaaggtacctcttctttcataggaagcttgactaaatgcggcttaagtgctatcccaatgcaacgaaatgagctgaacacgctgatgtactactcactatctgcagcatcagtgcactattctgctatggactgacattctaagctattctcattctgtctgaaagatgaatgagtgttn

SEQ ID NO: 53738 - DNA, 357 bp, Glycine max
  unsure (1)..(357): unsure at all n locations
accatgacccttgctcaaagtaanttaattacctcctaagtttaaagacccagttagttttttgtaccatgtgttattggatacacgatgtttgaaaaatcctcgtgtgatttgggggctaatgttaatctaatgtccctattntaattgtttcaaaaagcttgctattgatgagctgcaacctaccatatgttattgcaaaagacgaatcgacccgtcaaacatcctgtgagaattgtggaggctgttccagttaagatgaggggttgttctattccatgtgattttgtggtgttagaaataatggaggagacatncaaaatctccattatcttaggtaaacccttcttatcaacg

SEQ ID NO: 53739 - DNA, 453 bp, Glycine max
  unsure (1)..(453): unsure at all n locations
tattgatataaaaacattagtcataatgaatgattatggtatgtggggcaaaggatcattangagtggaggtgtcaacctagttggaatttctaatcctagtgtgatgttcaagcatgccttcttttgattagaaaaaaaaatgattatggtacaattttatttgattaaagattcttggaatagtaatttaatttaagatgttgcatctcctttgtatagacaccaaataaattcaacaggatccatccaattttgagaattgccacaaaaaaccagcaactagaccaaccaattcttaattttcacaacttccattacaaacttcgtactcttgtcaactaaatcatacacaagatgaataaacaacacattctgagcacctaacacacatgcacgtacatcagcatggcacaaatctatccataagcaagcacactngtgcctctgacat

SEQ ID NO: 53740 - DNA, 483 bp, Glycine max
  unsure (1)..(483): unsure at all n locations
agtcacctgcangctgcaagcttggccttttacgtctggaatgtgattgtagcatatatatccaaagaccctcaggtgctgtgttgatggcttcttcccgttccaagcttcaattggagtcttgtcttttacagacttagttagacatctgttgagtatgtaaacagcagtgtagactgcttcagcccagaatgtgttaggtagtcccttatccttgagcatcgatctagccatttctataactgtgcgattctttctcttggacactccattntgttgaggagaatatgcgactgtaagttgtcgctcaataccttcatcctcacaaaatctttcaaactagcgagaggtgtactctntgccgcgatcacatcttagtacttttatccattttccactntgattntcagcaagggccttgaactctttgaatactccaaagacttctgattnttcttttagaaaatatacccatgtcattct

SEQ ID NO: 53741 - DNA, 384 bp, Glycine max
cctcctaccacaggttttttttaatactgtattaaaaagtgaatttgcattatttgcttttctatatttatttgatctcacctgtcttatttattaattcaaggtattaaaaactactgtatacatgtcagtatatactaaactaacgtcgcaactctcacataactcagtatatgcttgtatcatgctctcaagacttcatgatccgtgcgatgcgcggatatgatacataaactaattcattaattcatttaacggctgagcgaaaattcaatttctatatattaacaactgacctatgaaacatccacaccgacacagacaacagacactacacatacacgtggacacctgtaatgtccaatatgtacgacacagacactg

SEQ ID NO: 53742 - DNA, 428 bp, Glycine max
  unsure (1)..(428): unsure at all n locations
aaaaaaactctagattctcaagtcataggcatttacaacaacgatcacattagagaggttgaataatatattaataaaaaataataactttttgcaaataaaagttttatcacaggtttagaaatatatatgntttggagtcatctactcatcagtaaaataagtttaataaaacatagtttgatcatccaatatatctatgaagtaatatttccaaaaaaggtttttaagaaaacacttggtcagaaaaaaaggtaacaaagaaaactaagataatacttaataaaatggtttaatagagatatattagcatttgatttgtactagttcacttaaataaaactaccttcaattcttctttacacaactataaagggttccattaataaaaaaaactttgattacaaataagtattttgtcttgtcac

SEQ ID NO: 53743 - DNA, 466 bp, Glycine max
  unsure (1)..(466): unsure at all n locations
agcttctcccattagctaaagttcgcttacttgttaaaattttcttttgtgaaagaagcttatttcaattttacttcttatttttctttctccataaagtgcttatggagaagttcatccaaacatgatctatgcctaataatattttgtaaggatgctttggggataaattccaaatatgattagtatatatcgttttttgttgacactatgttattcaacttaaattatcctagggtggtttcttttgaacaatgtgttaatgcaggtgcatttgaaatttatgctaaaataattttttcccctagttaaatgatgatcatggtgatatgtttccacaagtcttgtagatttggttgagattctgagatcattgttatgtcagaaaatgcagatctttntgagagtacagctgaagaaacgcagggaaattntgggcaagatggtgaccgaggtgctatctatg

SEQ ID NO: 53744 - DNA, 494 bp, Glycine max
  unsure (1)..(494): unsure at all n locations
tgatgacaatggtaataatggatatatattaagatcttttctgttgtgtgcactagaagatgactntaatgtactcaggaatagcttaatttcttcactttcttgcacaaaataatcctccaattattaacttgtttctcaacaaatatccttatctttctattctttctatggttttagccttttcactatcccaaaaacatgatngttacaattattgaactttttgattaattttttttctccaatcgatcgattatttgttttggcagggaagcgagcaaacattgttgatgcaaacctgaacatcctaagggaaagaattcaacaagtgagaaagagagagaggctgatacatacacaagagtggaattataagcgtagttatgaccgtaagtacaagagagattcaatgatatcacaatcttctgaggttatatgtntgtcatgcggtgcaatngggcttgtctttctcngtggttctcttagcatct

SEQ ID NO: 53745 - DNA, 395 bp, Glycine max
catgcaagcttgatcaaaacaaaatctatacattcaattctactctattcatacaatttctcattcaaatcaatcacaacacttcatttcatacaaaacaaaccactgaatatcatattcaatcagttcactgttcaaacatacttttgtacaagctactactacaaacaaaataactaaaatttaaaactgaaatttaaataactgaaacataatgcataaacaaaataaactgataaaaataaactgttcaaaatgaaaaaagataaagatcttatcaatcctcctatggatgatcctctgcatactcattaagatccaacctggagcagctggtggatcctgtgaaatgagctgctcttgctccaatgctggtgcagatggcagggtatcct

SEQ ID NO: 53746 - DNA, 440 bp, Glycine max
tcctgatatgacagtcaccgctttatgagcactgtacaccagcagcgcttcgaggccatcaagggatggtcgtttctccgggagcgacacaaaatataagcaaaaaaacacttcacaaaatatatatatgtatgtttaggtagtgaaaataccttagatatgcatgtatgtaagcaaaaaaacacttcacaaaatatatatatgtatgtttaggtagaaagataccttagatatgcatgtatgtaaacaaaaaaatacttcacaaaatatatatatgtatgtttaggtagaaataaccttggatatgcatgtatatagcaaaaataccttacaaaacatatatatgtatgtttaggtagcaagataccttggatatgcgtgtatatagcacaaatacctcacaaaaatatacacatgtgtaggtagcaaaatacctcatg

SEQ ID NO: 53747 - DNA, 345 bp, Glycine max
gatggcaccgcctcttacctcttctcctttgtcttctgctgcatctcgagggtggaaaatcaccattaaaggacctcattgaagctcaaagatccagcctccatagaagccccacaagcaagcttccatcaagtggtaatcagagcacaagagcttcaagtaggtgctccttaaacctcccttgattttcagatttaccttctcttcgattggtgtttcttcatttttctccgcgtatctcctcacatgtcttgtgctaaatggtgttaacatgattctttagagttttcaccgattaaacttgctatagaagctagattcgattttctatgggtcaaatttctt

SEQ ID NO: 53748 - DNA, 402 bp, Glycine max
  unsure (1)..(402): unsure at all n locations
tggaagtactaagnatgtattacctatacttaacagaaaatacttataacactacaaaataaccataaattggaagagcttgatacaatttacacaagttttatacacaaaagttagtcgtattcaccgactaacaactgcctaatgaaggaaaccattaagtccttccaagaatggactcaggaaggttccaaattagtatatcaggtgacgacttccccagtaagactttcctggaagaaatgcatcaataatttttcatctttcgtgtatgcccccattttcctgcagtacatcttcaagtgattcttatggaaagttgtccccttgtacttatcgaagtcctgcaccttgaactttggagggataacgacgttagaaactatgcacagttctgccatg

SEQ ID NO: 53749 - DNA, 380 bp, Glycine max
gcttctagagaaagccacattgagccgcctttgtaaaattgatgcccagcgctgtaactggtggatcttctcaaaatttggtctgcaactccacaagacacttttccattatctgaccgttgggatctttgagaagatgtctagagtgtgctaaaagcctcttaatgaagcttttggaggaagcctcttaatgaagcttctaaagaaaactacatgaagctgcctcggtagaaacgctgtccagccttcgttaaccgttggattttctcgaaatttggtttgtaacttcacaagacactctaccatgatttaaccgttgggatctttgagaaaatatctggagtgtgctagaagcttccgttcccgagagcatctcttat

SEQ ID NO: 53750 - DNA, 514 bp, Glycine max
  unsure (1)..(514): unsure at all n locations
tgagaataanaatgaatgtgttattaaatntctctccttatatcacggttgttgggtgtcagtcagccatagactaagctggaccactttntttctttttttctttctctgcttctcgctttcgcgctccatatataccaatgggcaataactactgatcaaagtaacagtataattctataccaagtcaaattttacgagcttccgaggcacttagcacttagcactgttatttgagttagacccagcacgtgcattcatcaatcaaactttcaatttcatatacatctatgtatctttcttaatttcgttgactggtggagctggctagcattgcttcttcacgttgccattgcctagagtacttgctaatgtttttagaagagagaccttcctaataaatttcatatatttaactttggtttatcatcttaataaaatatcagttacaattaaaatnttcaagatatacgcaatatgttcattaatatacaagcaaaacccctaagttatt

SEQ ID NO: 53751 - DNA, 446 bp, Glycine max
  unsure (1)..(446): unsure at all n locations
agcttctntgagaaaactttcttgagaagctatatcttagctacacacacccagctaataactaagctcacctccttgagaagcttccttgagaagattcctaaagaagctagagcttagctacacacaccccctataatagctaagctcacccccatgcaaaaatacatgaaaatataaaaaaaaagtccctattacaaagactactcaaaatgccctgaaatacaaggctaaaaccctatactactagaatggccaaaatacaaggcccaaaagaaggaaaaaccaattctaacatttacaaagaagaatgggtccaaccttgacccatgggctcaaaaatctaacctaaggttcatgagaaccctagggccttctttagtagctctaggccaagcctcttggagtcttctatccaatacctttagggggtaggattgcatcat

SEQ ID NO: 53752 - DNA, 525 bp, Glycine max
  unsure (1)..(525): unsure at all n locations
tataaaactcagctttatggggctgatcttgagcttaatggtggnnttcanttggagagcagcggaaggcaaaggagaagaggagaggggaggcaccatccacaaggaataagccatggaagaaggagcttcaccaccaagaatgtgccttggataagaagcttgaagaggatgctttaatggaggaaaagaaagagagaaggagcttcaagttaggatgctctaatggaactttgaagtgtgtctcataagacttttatttatcaaagttacaacaagtgttacacatgcttctatttatagactaggtagcttccttaagaaaacttccttgagatgcttctttgagaaaacttccttgagaagctagagcttagctacacacacccctctaaaagctaagctcacctccttgaaaagcttccttgagaagctagagcttagctacacacacttctttaataactaagctcacctccttgagatgagcagctagagcttacctacatacccccaataatagct

SEQ ID NO: 53753 - DNA, 397 bp, Glycine max
  unsure (1)..(397): unsure at all n locations
ttgaattagaatttcaaatgattttaaaagacttttttaatcaggattttataaaaaaaagtcttgtggtattcaatcatgatttttatatagtataaataagtattttgctattcaattaagacatttgagattttttaaggaagacaacaaaatccggttgtatttaatcgggattttttttataacttataaaaagtcttttggtattaaaaaatatatgaattttgatggatttttttaaagaagatttttgatagatttcattgaattttactagattttttctttctttttctanttggtaccagactttattttctctcatcgtcacacatanccgcttctctctttaatattttttaatatacgtgtgttatatatatttgccctattc

SEQ ID NO: 53754 - DNA, 514 bp, Glycine max
  unsure (1)..(514): unsure at all n locations
ntatctnttaagatctttaagtgcagaatttcaggaataatttatatctcatccagcgcaagttgctgcagcccagatacgcacactgctatataaacatgaaggctgcacgagttctgtaccaagtccgggattgaagagttattttgtgagttttgggacttgagtgttttgtgagccaccttgatgtcaccctaacatcaagtgttggacctgagtgtgtagagttgatctctattgttcagagagcaatctctggtgtgtatttgatttaactgtaaacacgggagagtgattgagagggagtgagaggggttctcatatctaaaagtggctcttaggtagaggttgcacgggtagtggttaggtgagaaggttgtaaacagtggctgttagatcttcgaactaacactattttagtggatttcctccctggcttggtagcccccaaatgtaggtgacgttgcaccgaactgggttaacaattcacttgtgttatttactatgttaatct

SEQ ID NO: 53755 - DNA, 224 bp, Glycine max
aacagccttctagaggaatcttctggacggcccaagcgggcctggttgctatttgcacccccatatttactaaacacaccctcctgcctttttttttctgagattcttttttcgtaaagttacacgaacttacaaatatctgaacgatacttgttttctttacgtaatggtacggaaccttgcggattacatgaacatcccctttatgacttacggaatgctac

SEQ ID NO: 53756 - DNA, 467 bp, Glycine max
  unsure (1)..(467): unsure at all n locations
ctcagctgcctcaagagtccggaaggacaaggcggccgagggtacatttccgccccggagtacgacagtcaccgctttatgagcgttgtacaccagcagcgcttcgaagccatcaagggatggtcgtttctccgggagcgacgcgtccagctcagggacgacgagtatactgattttcaggaggagatagggcgccggcggtgggcaccactggttactcctatggccaagtttgatccagaaatagtccttgaattttatgccaatgcttggccaacagaggagggcgtgcgtgacatgagatcctgngttaggggtcagtggatcccgttcgatgccgacgctatcagccagctcctgggatatccgatggtgttggaagagggccacgaatgtgagtatggccagaggaggaaccggtctgatgggttcgatgaggaggccatcgcccagctgctatgtatacc

SEQ ID NO: 53757 - DNA, 453 bp, Glycine max
  unsure (1)..(453): unsure at all n locations
agcttaccttgaatataattctatcatnttcaccctntgngagctgaatgagtntgaaataattngaaccccgaacttaaatgattctctccagataccttgcttagattctaggagagcatatggttcaagtcaaatttaccccaaatttgggggagtggaattaattgggatgcaaagaaagagataatgcatcagcacacacaatgcataagttgtctgttaaaaaaaaaaaagaaagaagaaaaatgtgctgatgtaacaaggtcaaaagcaaatgaaagtgaaaagctagcgagcaagccaattgtattaaaaagaccattgngataagtctaggatttgtgctctcttagaatataaacctttngaatcctagaaaaaccaatgaattttgtagccaagcctcactagagcctgagaaagtctttctgattcttgttatacatttct

SEQ ID NO: 53758 - DNA, 478 bp, Glycine max
  unsure (1)..(478): unsure at all n locations
ctggttccaatgctctgtttaggctctcccatatcttatgtaaatctaggatctttatcagacactatgctagatgacacaccatgtaatctgataatctcactaatatacaaggaggtcaacttctctaaggtaaatatgatattaatgggaataagtgagtagacttggtcagtctgtcaacaataacccagatagaatctacacctctaggggttctaggtagtcctacaacaaaatccatggaaatactgtcccacttctattgggttatctccaagggcggtaacttccctgaaggtctctgatgttctatcttagccttctgacagactaagcatgcatacacaaactcactaacctctctcttcatgttgggccaccaaaacatcatcttcaaatcctgatacatcttggtagcaccaggatggatgctcangttactcctatgtccttcctctangatcatcttcctatg

SEQ ID NO: 53759 - DNA, 347 bp, Glycine max
  unsure (1)..(347): unsure at all n locations
atcttcctttccatcattgggggcgctacttgagctgccaaatccctccacctttgggcgtattccttgaaagattcatgctcctttttacacatgttctatagctgcattctatccggagccatatcagaattgtactaatattgcctaatgaaggcaatcttccaagaatggactcgagaaggttccaaattagtataccaggtgatggttgcccaataatactttcctggaagaaatgcatcaataatttttcatctttcgcatatgctccccattttcctgcaatacatcttcatgtgattcttggggcaagtggtccccttgtacttatcanagtctcacac

SEQ ID NO: 53760 - DNA, 424 bp, Glycine max
cttctctacgagccctcttggtctcttgttccaaggccttggcagtagctatatttgtatctcttaggtcggcattctcctttcggattttagagagctgctgatttgaacctttctttgactgtatgggcttgctcgagttctgccctaagaggcctgcacctcttcgtcttcctacagtgcctgaacttcctcccttttagcggttcaaaaaacacaggagccaatccaaaccttgcgtgtgggctttcaaccaccttctgtagccaccgataggcccattgttactgcccctgagttctttatccttcttttgcaccacctcccatgccttgcggaccttctgaagtgtctccccgttggtcttattgaaacctcgtgaaatgacaggcgtgagctctttctctagcggtgcccctctcat

SEQ ID NO: 53761 - DNA, 357 bp, Glycine max
  unsure (1)..(357): unsure at all n locations
ctctaaattgggggagtgtgctcaaatatatggggcaattttgatttgttttcttgcttgattaggttgaattaggggttggtatgagatggccctaggcctataatgcattttgaaacaataggacatgccacattgtccccgttctcttgctattgatgcctaaacgcgcgcccaccaagtgttcggtgaaatgcctcaatggcattagcgtgtgacttttgtaaggagacaacccatggngtattttggtttgtgcatattttctatnnttttggaatatgtattcattcccgaanaaggctagagtaattgcccacatatatcctagtcctagaaactgaaatttatgcaaaa

SEQ ID NO: 53762 - DNA, 452 bp, Glycine max
  unsure (1)..(452): unsure at all n locations
gttttccttatcaagtaaatggatcatttttaaggtccaacgccttanaatgatcacctttcaagtaaaaagaatcgcttgattcacgcttaagaaagaactacgtaggtttgatttcctcatcgatggagggtacgtatgagcaaaagccccgcttttgtcgacctcaaaaaataaaaagaaataaaagttaaggtaatacaatttccacaattctaaaaaataggttgttgtcctttgagacaaacgtgagaggtgctaataccttcctcaaacgtaaatacaactcccgaacttangaatttcattttgatcgggtcccttcggtttttctgatgttttccacaaataaacgttggtggcgactccgcgcatctntcctcctttggaaagcgcacccgtgagcctcgcctctctcgcccgcgaaagggcatgttgcgacagttggcgac

SEQ ID NO: 53763 - DNA, 411 bp, Glycine max
  unsure (1)..(411): unsure at all n locations
atgntcaaaggacactttatatccctttttaatcaactgacctacactcagcaagttttggtcaatgttaggtacataaagaacatttgatattaatttggtacctgaacacgttgaaattgcaatagttccttttccttttactggaatatagccactatttccaattctaacctttgagacactagttggcttcaaatctttgaataaagtcttatcatatgtcatgtggntcgtacaaccactatcaatcaaccaactttcacttgattcgctactcaagaagcatgtggccacaaacagttggtcctcctcttcttgattagcaatctgagctccctcatcatggtgaattttgttggcgcagatcaccatttcatgccctatctggttgcacttgttacattttgc

SEQ ID NO: 53764 - DNA, 461 bp, Glycine max
  unsure (1)..(461): unsure at all n locations
agcttgtgctcgttntatntaaatncctatgttcatgagctactaggtgtgtcctactatgaaaagtgatcaaataacaagcatagattcagaaggtactaggttgcctcctagtagcgcttctttaacgtctttagctggacgccttatgacttgtcggtcactgacctagtactttgcttacctttggctttggacttggtagcccgctggtcggccatgtgttgtaggcaacgctctaacctttntgcggatgagctgaggtgaactctagaggtggtggcggtgtgtctattgcccgttaccggccatcccaatgctgctgtggtgtttcgccctgcgcctgcctgngggcgcagtacttcttgatgaaagctcgattggtagggggggtctgatgactntgctggnggcgatagacactccgtagaactgacagagacccgtaattagagcttgac

SEQ ID NO: 53765 - DNA, 287 bp, Glycine max
tgagctcacgtactcccacgtagcccttatcgtcgttcctctcaacgccgggtccccatcaatcctcccaagctttccaaacatccaagttattcaacattcaatcatcacaaactaacacagccaagaaaacagggcaaaggcagaaaactctacccaaaacacaaaccaatattacagcttttcacattcaattatccgagtaatattctctatgttccaactcgctaaatcgtggatcgactcgaaaattttactggaagtctctagtacataagtctacattt

SEQ ID NO: 53766 - DNA, 408 bp, Glycine max
agcttgctaacccatggaagctcctaatatttcttacactttttggggtgggccattcttggatggccttgattttctcaaggtccacttggaccccatttctaccaactacaaaccctaagaaaactatattatctacacaaaaagtacatttctctatatttacatagagggtgtttttcctaaggactgaaagaacttgcctgagatgtcctaagtgatcatctaggcttctactgtacactaaaatatcatcaaaataaacaactacaaatctacctatgaaatcccttaagacatgatgcataagccttataaaggtgcttggtgcattagtgagcccaaaaggcatcactagccattcatacaaaccaaacttggtcttgaaagcggttttccactcatcac

SEQ ID NO: 53767 - DNA, 500 bp, Glycine max
  unsure (1)..(500): unsure at all n locations
tcagatccctcttgttggactaggcgtcaattattatttcctcctaggtttagactaacttaaactaagcttcatcctcaaatccctcttgttggactagacttagcttaaatagcttacgaatgtttagactaatttagcctaagctttgttctcagatccctcttgttggactagacttagatcaaacaacattattgtaacaacatacttaaaaccaaaacttaatccgcagatccctcttgtaagacaaagtttcaattctgtttcattcaagttttagggcaacaatacatttctcaacgctaaagtcacctaactaggcacacaaatggttgattagaccaagagcatacaaaatttaagcactgaaagaagcattgaacacaagaaacacaatcaattagatattaaaataattacatcagttgttcattagaaatccccaacaagggtggttagccagccattacaaaanaatccctaataataataacgag

SEQ ID NO: 53768 - DNA, 300 bp, Glycine max
  unsure (1)..(300): unsure at all n locations
gacacgannaataagataaatagagtgtttaatggcataaaaccaatatcgttttggtaattgagattgaaacattaaagcccgggcaacatttaaaatatgttgatgcttacgttcaacacgtccattctgttgaggagcatacacgcaactagtgtgatgtataattccttttgaagagaataaatctttgagaagaaattatgtgccgttgtttgaacgtatgcattttattttggaatcaaatagactttctattagaacaatgaagtgttggacatgggttttaacctcagattt

SEQ ID NO: 53769 - DNA, 515 bp, Glycine max
  unsure (1)..(515): unsure at all n locations
ttntgctctgttccatttctatacgaaatattttgcttggttttaccagaaagaagggctagttcagatttatgctggttcacttttccctccatcagtatttcaaactcaggtttgttaacaaattgacatttgggaaaatttcatgggaaccaattttttgctgccttagtttggtaataatgttttcctttggtaacatggtgccttcgtgggactgtgtacacatgacttgaatggctgcggtagagaactgcattgtggttttctaaaattggtatgttatttgtgtttatattagattttattctggtactttataaagtttggatcaaatatggtctatatagaatacagtaattatttcctcacaaaaaaagaaaaaagaattcagttgttatgtttttatggaagggaattcttattaaccactgaaggatataaatntctttatctttgtttcattacaggtagtaccattgtctatcttcatctgtcactgtatacacaccttg

SEQ ID NO: 53770 - DNA, 353 bp, Glycine max
  unsure (1)..(353): unsure at all n locations
tcatcaatatcatttcatgttctagtaactttccaaacaaagtagcaagagacatattagatagatctcgcgattcaataatggttggtaccttgggttgccattccctgcttaagcatctcaaaactttatttggaaatttttttcctaaagatgcaagatgattaattatgtgtgtgaacctcttttgcatatcttgtatgctntcatctggattcattctaaataattcatattcatgggttagtgtatttatcctagatctttttacatctgttggaccttcatgtgttacctatagggtatctcacatatnctttgcacttctacaatttgataccctaaagtactca

SEQ ID NO: 53771 - DNA, 504 bp, Glycine max
  unsure (1)..(504): unsure at all n locations
gaattttctntaaacattntacactgaagagaaatctctttgttattctgaagacagtttaggatcttgatgtttagctcaataataaggaaatgtgatttcataccaacaagtccttggatcccttgatcgctatcattttttattcttgagttcttgtaagacagttgaggatcttgatgtttagttcatcatcttcaaacgtttttttgaaaccaagtaagtgattcactatatgggtgaatgatgtgccatcattttcttctatttcttaaaccctttttgcaccattttaattactgattagtcttaattgtcaaattaattaggcagttttattatttgggctcatttagctaatttgatgttntaaatctaatttcaggaattaatgaaacattgggcttaatccagattatggttgtggacttgaagagggcaaataaagcagcgcttaccttagttaatttctaattaggagattgcaactttattttatgtact

SEQ ID NO: 53772 - DNA, 446 bp, Glycine max
  unsure (1)..(446): unsure at all n locations
agcttaccacacagcgcgaatttctaactatanggtataactacaaaggcgcccacgaatagaaaacgataattacaggccagcccctgaatgttaataaactaaaaaaatgacggaaaataactcccatcattcatattcctctatcgatttagataggcccctcagagccatcattaaaacgcagctaaacgtgaggactaaattgcattttaatgataacatgtgagaactcatttcaaatatataaagatgaatataaaagacggaagctgtcttaagagactattttctattttatttacattaagggaataacatgaaatgtaatacatttctagggatcaaagttactatcctattttattttaatatataaatattttctttaaaagagaaaatatactatcgaatatctagatcaattgatgtaaagttattccaac

SEQ ID NO: 53773 - DNA, 528 bp, Glycine max
  unsure (1)..(528): unsure at all n locations
agatgtgnannttgatacttagcatcacgcgacacaagaaactcagctatgctaggacatgtctacagtatccgcacaggtggtcaatgcatcctagcnggctaccaaaggagcactctccacgaacgtgatagactcgggctgcccattgagtgaccatccattgactacatagacttctcgacctcacttccggggatttcacaatgtggacccacacatataaattagccgggtaaaatgcacacgctctctgtgaggcacttgcacaataatgactctaaacaatagagcatgggggccatcaaaaacaaaggttataagctgctcttagaatcatatcacatgcgccgccccaaagactattgcgagatacatctaactccccatctgtgcgctcatatgatatagaaaaaagctctatcacattcaatgcgggtcgcatgacatanacttcataaacaccatgctaacttgtatatcacaagtgagtataccgatattccacatgtacatggaccaaactag

SEQ ID NO: 53774 - DNA, 262 bp, Glycine max
  unsure (1)..(262): unsure at all n locations
cacaaacataaaaaagaaaggtatattgtagccgatgctctttctcggcgtcatgcattactttctatgcttgancaaaatgattggcttgaatgttaaaagcatgtatgaaaatgagaaacttttgggaaatttttaaaattggaaaattttccaaaatggttctttagacatgaagctttttttcaagaaaacaattggtgtgcctaaatgttctacaaaatttcttattcggaagacatgaagacgtaatgggcatttg

SEQ ID NO: 53775 - DNA, 196 bp, Glycine max
cacagccttttattatataggagccagacaagggcgttgtaaaaatgttgaccacgaaggcaaatgcaaaagaagaagcttgccagcagccaaaaaaaggaagaagggactcgaacccggagatctgacattgaggacaatgttcagaagaggatgagaaatataaacagccaatcagctaagcccagggaaagac

SEQ ID NO: 53776 - DNA, 354 bp, Glycine max
cgactaacttgcgtatacaaaacatatgctaaaactggtatagtcccccaatttataggtatttgagtaggaatatgatataaatcttgttttgatagaatagttgtctttacagtatctcctatgtgactcaatgataaaaattgcacaatttcatgtcaagaggagtgaaaaggagcagttgcgctaaccggacactgttggctcagcgcgcatccaccactagaagtagcttcagcgcgcttagcgtgacaagggaatctggaagagcacgaaaatcaaggtccgccgctaagcgcaagatcagctagctaagcgagacgtttgtctcttgccatgcttatcgcacgactg

SEQ ID NO: 53777 - DNA, 464 bp, Glycine max
  unsure (1)..(464): unsure at all n locations
ctatctcttcacacataatntaaaaaccctttttggtcattacataacttgctgaaataaatcacaatcacaagcaagatgtcctaactacatgcaagaaataaaaatgaagatagagaagggaaagaaaagctgggttgtctcccagtaagcacttctttaacgtcactagcttgacgcatcatcctgttatctaagatccaataaagatcccacttcaaggaccttcttctcaagtcttctttcctccattacatgaactttaaaatagacattctggtcaagtggctctttatcttcatgaaatagatcaaagctgattttctgatcttctatgcccatttgcaacatcttctttcccatatctactacacagcttgcaataaacatgaatgggcggccaaaaatgagaggaatatcaacatcctcttctatgtctatcaccacaaaatcaactggaaata

SEQ ID NO: 53778 - DNA, 476 bp, Glycine max
agcacctgagcatgcaagctatgcgcatatttcctacaacgtttcttgcactttaatcctttaactaagaagaagcacccatatacaatcaaggtagcttccttacctagattatttacatgtacttccaaagtgtatttgttatttacatcatacacgccatcttgtcaaaatttacacacatgcatactcaaagcatttcggggtaccaaaaattgcacatgcgctcatcttggtatttctaatatctatacatatacaaacttcatgatgaatcttgactatctacacaataaagtgctacatttcatgccttttttcaagtttttgctacctaaagccgcatgcaaattcaagcatattttcctttgctgactaaaattgtattcaaattatatatatatttttcggaatatgtcttctttcattcaacatatttatatatatgttttgtgagacattttgactaccaaaaa

SEQ ID NO: 53779 - DNA, 464 bp, Glycine max
  unsure (1)..(464): unsure at all n locations
tatatatataangaaanatanattataataataaatgtatcattagataaatatttatttaaatatatatatatatatatatatatatatatatatatatatatatatatatatataagcacataaaataattaaatgtgctaaaaacattaacatgaatatactaaaatataaatgtaagtgtaataatatatatatatatagaagtaattttacatgtatatatataatttgaatgattaaatgcattaaatataaaataataagaacatgctaaatatatccttagataaaaataaaatatatatgtataatatatgtacataacaaccaaaagtttatatacatatatacatatattctaaatgcattccaacgaagccatgaagacccaacaatgagaaacgaaagtttgatctcaagcactacacgattatcatggagattaatcacaaatttttttt

SEQ ID NO: 53780 - DNA, 416 bp, Glycine max
  unsure (1)..(416): unsure at all n locations
catgcaagcttctaaactttatacaagaangaagcnctgataccacttgttggacttttggcctcaganatcttaagaagggggggggggttgaattaagatatcacaaactattccccaattaaaaaattctactttaaatntaactaaacaacccaagattccttttaaaaaggaactcctaaataataatgcaaattaatcttactaaataaaaataaaaagaaataaacactaaaggagtttaagggaagcgaaaatgcaaactcagatttatactggttcagccacacccttgtgcctacgtccagtccccaagcaacccgcttgagagttccactatatttcaaaatccctttacaagatctgaaccacacaaggacaatccttcctttgttttcatatttctttacaac

SEQ ID NO: 53781 - DNA, 463 bp, Glycine max
  unsure (1)..(463): unsure at all n locations
ctcagcttatctatgtctgccttgacttaccccncggccttcctgaatatttaagccaagcccctactcttgaggggcaactcccaccttatgaagactatcccgggcaagacgatggggaaggagataccaattntggccccctgctccacctcaaagagccatccccgcatgaactaccccagccgaacatagtccgccatatctcggcctcacccacacccgtaaaagaatctgttcccttcgcggaagataagggaaagattgaggcgcttgaagagaggttaagagcagtcgagggccttggcaattacccattctcggatttagcggatttatgtctcgtgcccaacatcgtcatccctcccaagttcaaagtaccggactttgataagtacaaaggaacgacatgtccgaaggggcatcttcagatgtattgccgaaagatgggggcgtattctgc

SEQ ID NO: 53782 - DNA, 380 bp, Glycine max
acaaaacgcccagagaatgatttctagattgagtcaacacgttcaagatcaagattaatttcaagtttcatagaagaaatgaagaagatttaagaatcacgagaagtttgatttcaagattcaagagaagaaatcaagaagacttcacaagggaagtattgaaaagatttttcaaaaaccaaacatcgcacaattttgtttttcagaaggagtttttctcaaaattttctaagttaccaaagttgttactctttggtaatcagttaccagtttcctgtaatcgattaccagcggcaaagatcgatttcaaaagcttttaactgaatttgcaacgtttgttgattatgtgaaacaaacatgactgattttccgtatagaaa

SEQ ID NO: 53783 - DNA, 454 bp, Glycine max
  unsure (1)..(454): unsure at all n locations
ctaccatggagatgcagcggaagacaaaggagaagaggtgagaggaggcgccatccactatggaataagccatggaagaaggagcttcaccaccaagataagccttggataagaagcttggaaggatgcttcaatggaggaaaagatagagggagagaaagagaaaggggggagcacgaaattgaaggaataaaagagggagagaagtggaactttgaagtatgtctcacaagactctcattcatcanagttacaacaagtgttacacatgcttctatttgtagactaggtagcttccttgagaagctttcttaagaaaacttccttgagaagcttctttgagaaaacttccttgagaagctagagcttagctatacacacccatctaaaaactaagctcacctccttgagaagcttccttgagaagctagagcttagctacacacacccatct

SEQ ID NO: 53784 - DNA, 504 bp, Glycine max
  unsure (1)..(504): unsure at all n locations
ctcagcttacagctaggaggcacaattttgtaatttacacatcaaattctttacatcagttttcttttcattttttaaaatatttatatatttttcttattcttttatttaaaaattaaattatagctaggattatactgacaggtgtggaccagcgggtgagtattgtagctaagatacagagtaatctcaaccatcattatgtcgtttntatatatataaaaaaaaaatagagtttaagaccattaaatgttcaaaccgaatcttattcctagtgatggtataggtaaatgtggatctgaatctgaaaatgttgtttgatgtgattgagtgggtaaattacctaaatatgatatgatatgatgatgcatgcctcaagcaaaagcaacatatacacagtttatgtcgcctgagcatacaaattgaatgcaagcgttttcatttgtacaagaaggacttaaacattatntgcacaactttgccagagtgtcatttcataaatat

SEQ ID NO: 53785 - DNA, 399 bp, Glycine max
  unsure (1)..(399): unsure at all n locations
taccttcaaacagggggaggatattccctcctgcttccattatcgtcatgtatgatctgtatgtgtcctcattacctagggattctgaatgatcagagcatatagttcattctttttagaaatgattgtcattttccattctcccataattgcactttttatcgtaattatatactatattgcatgattgctggatcagcagatttccacttgccatgtgttactgtctaacatatcttgaaatggaagaggttagatcagtgcgccctcaacttcattggtgctgattgctgaatctggaaagtggaactgtgactggtcagtataatctcactgctccctattaccagtcaaccaactgattctagtttgantggctcaactgcttatctcttactc

SEQ ID NO: 53786 - DNA, 467 bp, Glycine max
  unsure (1)..(467): unsure at all n locations
ngatgatgttccagcagggttatattcagtccattgtttatcncttatgttggctggngctgagggatcaccaatacggtgcattctgattaaaaattagggtatgtgtggataactcggatttacattttttggttctcttttgtctggaacctatgaagcacgaacactccacgcccttgtcatgtctggtatctgacaccgacacgatactcatactacattctatattttgaacattacaggtgtccacatgtctgtgttcggtgtccgcgtcggtgtcggtgcttcatatgctggaactgataaattggcatgggggtgtggtgtccttatggagcaagatagtttcaatgttgtgcaacaacttttgtagcttatgtttacacttactaaaaacatgcataagcacttcaaaaaatcattttgaaaaggaaaataatgtatatatagataatttgcacatt

SEQ ID NO: 53787 - DNA, 438 bp, Glycine max
agcttatgctgcaaatattttactttagactcttctcaaccttatgtatcaaaaacaaccacagcagagcaattatgacctttccagcaacagatacaaccctggatggaggaatcaccctaacctcagatggcccagccctcagcaacaacaacagcagcctgctccttccttccaaaatgctgctggcccaagcagaccatacattcctccaccaatccaacaacagcaacaaccccagaaacagccaacagtggaggcccctccataacctttcctcgaagaacttgtgaggcagatgactatgcagaacatgcagtttcagcaagagaccaaagcctccatttagagcttaaccaatcagatgggacaattagctacctaattgaatcaacaacagacccagaattctgacaagctgccttctcaagctgtcta

SEQ ID NO: 53788 - DNA, 460 bp, Glycine max
  unsure (1)..(460): unsure at all n locations
aacctcattgtctctcacagtatttagattgngatttctttcttccttgtgtccggactctcagccacttatgatagccgccgatgatcccattactgcttcccctaagctctctgttctttcttcacaccgcatcacatgccttgcaaactccttggagtacctttgcattggggtcactaaaaccccgtgtaatgaaaggcgtgatgctttcgtcaaatggcgctcctctcatggggtagccaagctgtcttatggcaaggacaagattataatttatacaaccccttgttcccattaagggaacatttggaaatccttcgcatgaagatagaatcctgattctttcttccttctagcgagggaaccaattaacagacgcccctctatgctaaccaagagttggtcccaattcgtctttcttttttcggcgcacaagcggtgaccttgtagcggatag

SEQ ID NO: 53789 - DNA, 453 bp, Glycine max
  unsure (1)..(453): unsure at all n locations
agctnngccaaaagggcctgtcttanganatcnatttgtcttaanngnngctcgaggttaggaaaaagatcaactaatgattgtggaactttccagctagctagatgaataatatttgccacattagcttgcatcttggagtgaatagaaggtgggatatctaatttgtccaccaacgctttccttaaccaattatcattccaaagatgaattgtagccccattgccaacaagccacttggattccctccaaactactaggataaaatggtttaaagcaacataaatcgaggatttatggtacctaactttgttagtagagtttgtcaggaatttgttccttaagaaattggaccattggctatcaatagacaatgttttccaaggcagggacaacattattgctttgttaatcttcctaatggaccttanacctagatccctctcttttact

SEQ ID NO: 53790 - DNA, 518 bp, Glycine max
  unsure (1)..(518): unsure at all n locations
taaaactcagcttcatctcagaacctaccctacggcccatccattgtcggcccattttccattccctctccttatttgggcttaccaaagacaattaaagtgatgggagttactattggcccattcaaattgctcttgggccatatcaagcagcagacactttttttattccaaaaatatcttcttcaaggaatcgtgatttcattgaataaaatgcacaatgaaatcatgattctgtcgtgcaccaattttttccccagtacaatagaatcacaacttcattatataattttttctcaccccaaatataacaaccgaaatcatcatttgttgttatattttgtgacaccccccttaacataaaggaattgtgattttattggattaagtgggggtgaaaaaatatatacaatgaaaatatgattttattatacaattctattgtatattttattttactcctcttaatccaacagaatcacgattctgtgctagcaaatatccatgcanaaatgtga

SEQ ID NO: 53791 - DNA, 450 bp, Glycine max
  unsure (1)..(450): unsure at all n locations
agcttatgctgcannaattttatagacctttctaaccttatcagcaaaatcaaccacagcagagcaattatgacctctccagcaacaaatacaaccctggatggaggaatcaccctaacctcagatggtccagccctcagcaacaacaacagcagcctgctccttccttccaaaatgctactggcccaagcagaccatacattcctccaccaatccaacaacagcaacaaccccagaaacagccaacagttgaggcccctccacaaccttccctcgaagaacatgtgaggcaaatgactatgcagaacatgcagtttcagcaagagaccagagcctccattcagagcttaaccaatcagatgggacaattggctacccaattgaatcaacaacagtcccagaattctgacaagctgccttctcaagctgtccaaaatcccaaaaatgtca

SEQ ID NO: 53792 - DNA, 532 bp, Glycine max
  unsure (1)..(532): unsure at all n locations
ctcagcttgtggccttggatcttcttcatcaatggagtccttttcttcttgtttatcaatgacagnggaatgcagaaggaggaaaggtgattggagatgccacttcaaggagaagagagtcaagaacaagttcaccaccataggaagccatggataagagcttgaaggttggagaagatgagtggagggagagggagagaatgggcacgacaattatgcctcgaatgaggtctaaaatttgaagtgtaatttctcaaatgatcaaagtagaaataatgcacacaaaaggcctctatttatagcctaagtgtcacatgaaattggagggaaatttgaattntattcaaatttcacttgaatttaaatttgtggagctaaatttggagcctaaagttcactaattatgattagtgaattttagctatggtttaggccactaatccaagatcaagtccaagattctccactgagtgtgtngttattcgtcttgtacgactaacttttgtatagaaaaatattttcaaaatatggg

SEQ ID NO: 53793 - DNA, 373 bp, Glycine max
  unsure (1)..(373): unsure at all n locations
agcttctagagaaagcgacatttagctgtcctgngttaaaagcgcgccagccttcgntaaccgctggatcttctcgaaatttggtctgcaacttcacaagacacttgtgcatgatctgaccgtacgtaccacattgcattcgagtggttgagataggtgcatgcatcattatgtgcagtcttgattgggtccatggatgaatgatgagtaattgtttggatgtggatgatgaatattcgttggatatgaatgttgtgtgtgctcatcatgttngcctatgttccttgctaattgtggttatttggaaatggtattggttctttntataatgaactcaccctcgcaattttgtatcgcgtgggtgatacctgtg

SEQ ID NO: 53794 - DNA, 522 bp, Glycine max
  unsure (1)..(522): unsure at all n locations
ctcagcttttatccaggctcatcttggtggtgaagctccttctttatggcttattccttaatggatggcgcctcctctcacctattttcctttttcttccgctacatctccatggtggaaaatcaccattaaaggaccccattgaagctcaaagatccagcctccatagaagccccacaagcaagcttccatcaagtggtaatcagagcacaagagcttcaagtaggtgctccttaaacctccattaattttttttctttaccttctcttccattgttgtttcttcatttttctccatgtatctcctcacatgtcttgttctaaatgttgttaacatgattctttagagtttccaccgattaaacttgctatagaagttaggtttgattntctatggttcanatttcttgttcttgttcttgaaccatgaattgtgttgagtttaagttcctttgagttttgtcttgttattntttgtggctgaaacctacaccatanaattcttacaacaatattaaagta

SEQ ID NO: 53795 - DNA, 418 bp, Glycine max
  unsure (1)..(418): unsure at all n locations
agctngngtgatgttgcgcgtactgatggtanccatgaggtgntngctggggntngacccacgcgggtgttgaagagacggcatgggcatctccttctttcctttntgcccctgtcgccccgattcttttggcattcacgtttgtggaggaaacgtaatcaaactttcctctcttcaatccaacctcgattctttccccggcaaataccacatccgcaaagctggacggcatgtaacccactagcttctcatagtagaacactggcagagtgtctaccatcatggtgatcatctctctctcaaccatgggaggagctacttgtgccgccaaatccctccatcgctgcgcatattctataaaggtttcaccctctttcttgaacatattctgcagttgagtacggtcaggagccatatc

SEQ ID NO: 53796 - DNA, 507 bp, Glycine max
  unsure (1)..(507): unsure at all n locations
agaaactaagcttttgagtactctngatgagaatcctaaactacctaatttctttacctatgactaggagtaggaccaaacagtcagtggataccttccaacaaatggtaacaggcatacttagcaaggcccaagtggagaaggatgtangcccaagtggataaagacgaaggtccaagtggagaaggacgaaggcccagaggcagaggcactaccaagaatattaatttttgctgaaggcccagattaatttgaaggctcatgccaaatatgttctatttttttatttctaattattttcgttgtaattttggcccaaactgttttgaaggcccatgtctatttttatctttttgttcatatacactacatgtattggtttttgttttcaataaagggaacttttggcatttgaataaaattggtgagagcttctctttgggttccttggtgaaccaatctcagacttatcaagataattcttgtggcgtctaccctgacttatct

SEQ ID NO: 53797 - DNA, 320 bp, Glycine max
  unsure (1)..(320): unsure at all n locations
attcagaaaannagagtttatctcttttatcttagtgagagtgattctcctaaattcttgagtgattcaagaacaccctgnctgtatcanaggactntcacaacctttgtgtgttgccctcgctggaaagagtgattctttccttcctatcatctccacccttgttctttcaaaccacaattccagaaaatccacctctgcccaaaattatctcgtgaccataactcccatttcacacactcaaattaagtgattcttgatcctaaattgaatttcaaaacgagatctttcnacctcgtttggaatcacctcatttggag

SEQ ID NO: 53798 - DNA, 497 bp, Glycine max
  unsure (1)..(497): unsure at all n locations
aaactcagcttacaagatgatgccgatcgaactttcctaacctttttctgcttttttcgncccggatcggatggaaaactcaatagccgacatgggtcgtgaaatagctccgactgatatttttcagccgacattgagcaattttttttgaaaaactctcgccggtagataattgttcttttacggcagaggaagatttcttgtttaggtgttgcatataaatattacaatgtagggtcggttatgcttttttgagcgagctcaaccgacgttttgctccggccgaaactggcatgttcccattaattcggccaggaaaatattagcccatctcggcaataaaaatattattcaccgatattgatcgaaaataatgacagtcgacatcggccaggaaacatgactgatcgaggtctagaatagaagcttcacaagatgatgccgatcaaactttccctaattgatatcatgcaaacttcgtccatggattgaattga

SEQ ID NO: 53799 - DNA, 429 bp, Glycine max
gatgaaggcaagagtggttttcgaaatctgcactttatgcagaattttgctgttgaaatgtgcagcagatatttgtataagtgcagaaaaatgcttgtgtatggttggttgtgaaaagggtagtacatatggggttttggatattttctagcagatcccaacggtcaaaatgtagacttatgtactatggacttccagtaaaattttcaagtcgatccaacggtgaatgaattggaacgaaggaaatgttactggggtctttaagtgagaaaaagctgtgatttttggtttgagatttgggcagagttttctgcctttgccctggtttgcttgggtttgttagtttgtgatgagtggatgttgaattacttggatgttgtggaagcttgagaggattgatggagactcggcgttgagaggaacgaggat

SEQ ID NO: 53800 - DNA, 295 bp, Glycine max
  unsure (1)..(295): unsure at all n locations
gcttgagccattcaaacgacaagaactttatactcggatgtccgatttggcccggagaaancgaaacgcacgaagacgaaccgcgaagcccggagccaactcaaacgacaataacacnccactcggatgactgaaggacgccccgagaaaatcgagacgctcgacaaagaaagctgaacctctgaacgaaatcaaacgacaataactctttactcggatgtcccgaagagacccgaacatatcgagacgctcgaaattgaatgctgaagctctgagccaatacaaacgacaataa

SEQ ID NO: 53801 - DNA, 499 bp, Glycine max
  unsure (1)..(499): unsure at all n locations
ctaagctaaacattcaacttcgagcgtctctgatatatacgagtcttcaattgatattctagtaaaaagntattcgnttgaatntgctcatagcttcaacgctcaatnttgagcgtctcgttatattacgggactcaatcagacatccgagtaataaaatattgtcctttggataggctcaaatattcaacattgaaattccaagcgtcttgatatatgacaggactcaatcacacatgcatgtaaaaagttattgtcgtttgaattggctcagagactcaacaatcaaatttgagtgtctcgatataacacgactcaatcagacatccgagtaaaaagtgattgtcatttgtattatctcacagcttcaacattcaatttcgagcgtctcgtatatcacaggactcactcatacattctacttaatagatattgtcgcctgtataggcacacagcttcaacattcaatttctagcgtctcgatatatgacgggactca

SEQ ID NO: 53802 - DNA, 468 bp, Glycine max
  unsure (1)..(468): unsure at all n locations
agtgctatgtcgagtcctcacccaaactagttagatttcactatcgcaactctagntacactggtacacaatagcacaacacctcaactcaaggtttcaacgacctagaacttcacctaagtcctagaacaacattttaaaaattattcagtgacaattccactgacttaaggtatacacatttgctccctcaccatagcaccaacacttggccttggattggagtcttatactaggctatagcaaaaaggtttttgtgtaaaggtacttcacatatataggttcttcttaaaataggagttttctactaggaatacatatctcacttctcacatatttacaatgtaatcttaagttggaagtgggtcactctcaacagaaaggtaaaagcagattttctcactcagaggaggctagtgtttacaattcttgcttcaatggagttgcttgctttgaatggcaacttgg

SEQ ID NO: 53803 - DNA, 459 bp, Glycine max
  unsure (1)..(459): unsure at all n locations
atagaactctntacatatcaaatacattcgttagaataaatgaaacaaattagataaagcagaagctcataataacactttcacaagttaagtatggtcaaataactgacatatctcacattagaaggtgaaacataacattttcttgcctccatatcctatcttgcatctaactctgtgatagaagcttcattgaccgaccacagtttgtgatttgccgacgaagaagttgcttcagatgtaacatttgttccggagtaaaagccaggagccattggctntggcaacaatttatcaccactcaacattgaaagaactgatgacatgtgtggcctatcttgtggtctttgttgcacacataataggcctacctgtatgcatcgtatgacttcatagggcttacattgttctcctaccacatcatccagtagttccagtgccctatcttcagtccataat

SEQ ID NO: 53804 - DNA, 518 bp, Glycine max
  unsure (1)..(518): unsure at all n locations
tcttatccaatgcaattcttggtggtgaagctccatcttccttggcttattccctagnggatggagcctcccctctcctcttctcctttgccttccgctgcatctccatggtgtaaaatcaccattgaaggatctcattgaagctcaaagatccagcctccatagaagccccacaagcaagcttccatcaagtggtaatcagagcacaagagcttcaagtaggtgctccttaaacctccattaattttttgctttaccttctcttccattgttgtttcttcatttttttctccatgtatctcctaacatgtcttgtgctaaatgttgttaactctattctttagagattccaccgattaaacttgctatagaagctagatttgattttctatgggtcaaatatcttgttcttgttcttgaaccatgaatattgntgagattaggttcctttgagtntgtcttggttttttttgtggctgagacctaaaccatataattcttacacaaatattaaagta

SEQ ID NO: 53805 - DNA, 458 bp, Glycine max
agcttgatgatcggagtgagaaacatgtgttcattggctattatgtaagctaaaaaggctacaaattgtacaatccaaacaatggaaagacaattgtgagccgagatgtcgagttctatgaagaaggcacatggaattgggaggagaaagaagacacttatgattttttcccgtactttgaagaaatagatgaagaagccttgactccaaatgattcaattccagcactttcaccaactccttcaaccaatgaagcctcatcatcttccgaagggagttcaagtgaaaggccaagaagaatgagaaatatttaagaattatatgatgaaactgaagttataaatgatttgttctgtctttttgttgacagtgaacccttaaactctgatgaagcaatgaaagacaaaaggtggagacaagccatggaagaagaaatcacagccattgagaagaacaac

SEQ ID NO: 53806 - DNA, 418 bp, Glycine max
tctgagattgtttagaagagaacacatgctgattatttatagagaaaacaattgtaatcatctgtaatcaattaaatctacaaggtaatcgattaattcaatgaagtaattgattagattatctttttaatgaattaaagtgttctttccaaaatctggaaacaagtgaagaacaatgtaatcaattacatactcaaagtaatcgattaaagtgttcttgttcacttctaaaacacttatagaaagagaagtaatcgattatactacatggtaatcgattaaaacaaagactcctgaacaaatcaatcattgtctcaaaaacaactatgtaatcgattatgataaggttgtaatcaattaaaccaatacaagacataactctgcaagcttcagataacttgtgtaatcgattataata

SEQ ID NO: 53807 - DNA, 429 bp, Glycine max
agctttaacaatatactcgaccttcaatttactgtcttttgtcttggcggccacgctcaacaaagtacttttgacacctactgtaccttgattacaccaatgctgttatgggaatgttgccaaaatcctttaaaaccttattgatacattatgagaggctggttgtcatgtggccatatcgacattcttctctatcataagccatcgaacatttttcctttgaaatgcgagcaatccatgttgctatggctggactcagttgaccaaattgttctaaattttgataaaaaaatgtgcttgcaaggagtgtaagctgcataaaagatgctatgacataacaattctaagtatatatgaaagttaaataaatgtgaccatcaaatatgaaatcttacccaatctcttcaacatctatttttgtggacatta

SEQ ID NO: 53808 - DNA, 472 bp, Glycine max
  unsure (1)..(472): unsure at all n locations
cacactctttataacacactctcttctgttggtcctcaatagatggagaactataaaatcagaataatgactgatcatatgagtagtgggacctgtcaaatttgtgatttttaagaaatatgcgccaacaaaaaagagtggtcaagagaatgtgttatagacagaggagctaccatttctctgtttaggaatggtgttngtagctattagtgaaaatagaaatagagaatattttccttatgtcaaacaggcttctgcattactatatttagttattacaacatgatgatagatcattatatattttttctttctataaaacaaatgatttctttattgacttggggtggtgtatataaaaacttatcaacacattttacttttctttctatgcctgttcattccaatgtacaaatgattggcttatgatgcaacaaaatctatatcaggaactaactagctcttttaatat

SEQ ID NO: 53809 - DNA, 524 bp, Glycine max
  unsure (1)..(524): unsure at all n locations
cgcanagcagtagtacttgtaatagtgactcctcatgtttttttctttctcagcaaaagtggtgaagctctctctaacttttagacaagggtacaacaaactatgaaattcttttttaactctcagtttttattttgcactttttatttaggtcataaatataacgatgagggatagtaaaaataaaagtgtactagtaggtaaaatatgccatgaaatgaaaatagataatttcacaaatatctatggtttgcagtaaaataaattatttttcctctacttgcttattaatgaagcatggataagtaacaatgtacacgaacctacgggtacagtaatttgaaattacttaatttgttctaatttaattaaaatataaataattcagaattatttatttttagtttaaatatatgtttgaaaagtatttaattttttataatacattcttcaaactntnttagttntatttaattaacagatattcaggtataaccgtagatatactcacaaatatntataaa

SEQ ID NO: 53810 - DNA, 453 bp, Glycine max
  unsure (1)..(453): unsure at all n locations
ctcagcttgaatgcctattcatggagttgcaagaacatcnctgatttatcaacactngcacagnggccaaagatgcatgggagatcctgaacatcactcatgaaggaacctccaaagtgaagatttccagattgcaactcttggctacaaaattcgaaaatctgaagatgaaggaggaagagtgtattcatgacttccacatgaacattcttgaaattgccaatgcctgcactgccttgggagagaggataacagatgaaaagctggtgagaaagatcctcagatccttgcctatgagatttgacatgaaagtcactgcaatagaggatgcccaagacatttgcaacatgagagtagatgaactcattggttctcttcaaacctttgagctgggactctcggatacggctganaagaacagcaagaatctggctttcgtgtccaatgatgaat

SEQ ID NO: 53811 - DNA, 392 bp, Glycine max
  unsure (1)..(392): unsure at all n locations
agcttaagacagccagnaacttatagaaaatanctgcctgtcctgggtaaggtcgttgttgtgaagccagccagcagctgaagaagaagaagttgaagtgatcttattgaccaaagaaaccaaaagtgtgctcaagtaaaagccaaatgagtaagagcaatatgtgatggctgtaaagaatgcttgcatccctttcaaggactgtttataaaagaactcaaggaggccaatggctgtgaacatctctgacaagccaaatatcaagtattgtggggttatccaaaagatggacaaaactttgtgatggttcacagctgcgtcccttctctttttctccaacagagcagctgcaaccatagaaaaggtagccagaaaaagaccaaagcctattc

SEQ ID NO: 53812 - DNA, 479 bp, Glycine max
  unsure (1)..(479): unsure at all n locations
tccacaactgctcataagctccgtcctgctgctatgtanctccttctctcgtagcacgtcatatgcagatttatctgtgtaccgcccgctcggatccgccttccacacccattgatcttgatgttgaggctggattctgtaatcttcaatctctcttaagaatgctgccgccatgtctatttcattgtcgaataatggcctcctccatctaatatcccattcccacccattatctccaacagcccccatattttgtatattttgattttgctgtgaagatatcacatacaacctacgataccttgtaatcagcggaacctccccttccatccagctgtactcccanaacttgaacttgtccccacatgctaccttccatgtaagtgtgttcttcagagactcaccctgtggcgaatgtngaaccatgagctctagatccgtccaccagatagaatcatttctttgtgtcgatccctcac

SEQ ID NO: 53813 - DNA, 450 bp, Glycine max
  unsure (1)..(450): unsure at all n locations
agcttctntacatggccctatgtaccaatttctcttgaaactgacggaggtcgcgactaaccgtagtcccaacgatcatatcatcatgttgtacttgagaatatgagccaggagaatgattttgcatgtgtcttaaccacgacgaaagttccacatatgactcatcccgatcgccatatgtcaatcgcaatggctttctgtgtctccaaccacgcttttttgtacgacaccttgcacggcaatacactgctgatcctctctcgaatcagacaaatggtgattgatggcgcttctctgatcatgcctgtgaataacattacacacttgacatgactcttaacaataactgagcatgatatgaacatataatacgtacctactacacaagtggcagatatatctgaatcaggtgtctcgtgatcttgtgtcatgctcatatacagacatgtg

SEQ ID NO: 53814 - DNA, 466 bp, Glycine max
  unsure (1)..(466): unsure at all n locations
acactatgaaactcagctgagctgcaaaaacttgagacgtctgactttgatttgtacaacgcgcttgagggacatttgtataggctgcatctctaatccatatcgtatgttctgtgcatcatgcatcatcataacgaagtgagaagaaaaatttccaagttagataagtttcttcagaagacaaagctctatgttgtaatcgatcacaacctcatcgttagcgatcacacaagttgtcttaagcttgaagagatatggctcgcatcgggttaatcgattacgaccttatcatgctcaattacacaaccgtttttgtgacaatgactgattcatgcaggagcctgtgctntaatcgatcatcgtgtgatataatcgatcgattctctgtctataagtgttacagacgtgaacaatcatactttaatcgattactcttagtatctaatcgatcacatcgntcttgagt

SEQ ID NO: 53815 - DNA, 167 bp, Glycine max
  unsure (1)..(167): unsure at all n locations
ctctaatctntgctttatatactcaagtgtgaatatatttaagatctacttgcttggctctcctttgagttgcttatatttgagaattgacgtgactacttttttttggaaaaacatacccttttctgctgttttattatttctccacatgacttcttgaatcttat

SEQ ID NO: 53816 - DNA, 496 bp, Glycine max
gggtgggagtgaccgacactccatagaattggcatttgcttgttatcaaagcaggaaaccccagtgccctgttggacttctccgagtccactgggtgtctaagcggtgtgatccctgcaaactgatatatagcgtctgagatcaattgggctacatggacactcacctgggtcaggatggcatagaccagctggcacttccgcaaggggaggtcaaaattatggtctctggagaggatgttgttgagcagtaacgtcatccaaatctgcatgagggtggtcatgctagtgcgcatgatccgcacctgttttcctgccatgctctgggcaaagtcctgccccggaacacacaacagctagctgatggcctcttcgtcgaaccccaaggcctggctcctcctctggctaaactcacaatgttggccctcttccaaaaccaatggatgccctagaaactaattaatggcatcctcatcaaaagggatccattggcccct

SEQ ID NO: 53817 - DNA, 520 bp, Glycine max
tcagcttagctgctaaggaagcttctcagagaggggagcacagtaattagatgggtgtgtgtagctaagctctagcttctcaaggaagtattctcaaagaagcttctcaaggaagttttcttaagaaagcttctcatggaagctacctagtctataaatagaagcatgtgtaacacttgttgtaactgtgatgaatgagagtcttgtgagacacaactcaaagatcaacttctctccctttttcttccttcaatttcgtgctcccccctctctctttctctccctctttattttcctccattgaagcatcctctccaagcttcttatacaaggctcatcttggtggtgaagcttcttcttccatggcttattccttactggatggagcctcctctcacctcttctcctttgtcttccgctgcatctgcatggtggaaaatcaccattaaaggacctcattgaagctcacagatccagcctccatagaagccctacaagcaagcttccatcaatagtttca

SEQ ID NO: 53818 - DNA, 389 bp, Glycine max
attatcacctgatgcaccatcatcaatggaatccgctactccattgcctgaagccactatcatggcagactaacaacaccagaggatcacccctgaggattattcaagcagctcaatgccgcaattctttactagcattgcagatccttgaagtgcaagctcacaacatcaactacccgcattctttgatatatataatacacgcgaatttattccaaggattacctaatgaagacccctatgcacatctggcaatgttcatttaaatatgcaacacagttaagattgctggtgtgccatatgaagctattagactcaacctattctcattctcattggcatgagaggccaagaagtagcttcactcgtttaaaagtaacactcttaaa

SEQ ID NO: 53819 - DNA, 259 bp, Glycine max
tcctacacttgacctattcggacccactaagactgcatccctctttgacgtatgtatggtcttgttctaattggatgattacactatatggacatgggtctggctcataacccaccatgatgagtcttttgatacctttcatgaacattggtaaaagattcaaaatgacaaagacatttgttctttttcatataaagtatcacatgggagaggctgaaatgatcttttgaaaatttgtgacacaatggattactatact

SEQ ID NO: 53820 - DNA, 467 bp, Glycine max
  unsure (1)..(467): unsure at all n locations
tttctttagacnctgattggggctatgctgattgttgaacctgactagtagtaggtgatcatggctgaacaatgttataaccaccaccatcattatcaatggcactaccattaccaataccaatggtgatgagtaggagtaatatttgtctttgatattttctgctagctactgtgacaacctattttgtttggtgaatgatgaagatttgggagttaaagagatcgattaatgattgttagtatatatgtatcgatgtagcctctggtatttgtctataatatttggcctatatttgtcctgcctcgacaattattttcaattaaggattgttagtatagacaattattttcaattatttgacacntctttggtacttgtatcattgtgctntgaagcattttacttctaaatgttcaatcacatcgatggggtttgtaggatattaacgattatatagaactgat

SEQ ID NO: 53821 - DNA, 453 bp, Glycine max
  unsure (1)..(453): unsure at all n locations
ngctatgaagaaatgggatacgaacctacgcttctatatttttattctttctataaaaactataaattcttgtatagttcgaaaaaaaactctcaaaacagcttgaacacctcgagatataaaacatcgtgttgagattatatatccatctacaagatgattaagagttattcattgtgcaaacaaacaaaaaatcttttgatttatgtagagccagcagtggcttggtaggacaaagaatgctgggttgtataaatcatagcatagagcttgagttgtaaagccagaagtggtagtgattattatttataacttgctgaagttagtggaacttggtggttgagacaccccaatataaactctttgcgactatttatcttctttctttcctttgaaataatagatatctcactagatgggaggattgaatagcgtgttagataaaatgaaaca

SEQ ID NO: 53822 - DNA, 69 bp, Glycine max
aaaaaagaaccgcagggcaaaacgaggcaagacaagcaacagcagccaacaaaaaacaggcaacccaca

SEQ ID NO: 53823 - DNA, 557 bp, Glycine max
  unsure (1)..(557): unsure at all n locations
agctcgtnnnntttttgatttctttgagagcgnggcanngaanannnangcggcnggccccncaacgagacaccaacgacaaggccgacgatttttttttttcccacagaacgaaacgaagggccacttgaggtgacgctccgccaaacactgcagacaaatactgtaagcaagttggaattccttctgacaagttattccttgtgagaacaacaatcgaattctctggaagagacatgagatcagtggggggacttcctgagaggtgatatcgtcacattttgaacactatcaattgctgcatacgttctccaatccatgatgggattggacccgactacatattttcactcatctgcagcatagaaaaactgctgcgattgtgcctgagacaatgagctactccattgaaccatagttcgcagaacaaggcttgatataacaagggcctcagaggaaccgtctgtgggataatcaagtgccctcgacactgcaagttacagggcatgactagccagacggtcgatgatggcagagacttatcactcaacaccccg

SEQ ID NO: 53824 - DNA, 458 bp, Glycine max
agcttgcccagagaaggagtctcacgaaggatttgcttaccacctcacaagactggaaaggggtttctaatgactcctctgcggcctccacataaggcatagaggatgggtagctcaccaagatgtcttcctcgcctgatacgatgaccagatgcccttccactacgaatttcaacctttggtggagtgtagaaggaacaactcccactgagtggatccacgcccgccccagcagacagctgtagggggggttaatatccattatttggaaggtaacttgacaggtgtgagggcctatctgtaccgggagatcgatctcccccctaacctctcagcgggtgccgtcgaaggcacgaaccaccattgaactcggctttaggtgggaagcattgaatggtaatttctccaaagtgctcttaggcatcacgtttaaactggaaccatcatcgatgagcact

SEQ ID NO: 53825 - DNA, 473 bp, Glycine max
  unsure (1)..(473): unsure at all n locations
tctaagccncatttctctctccctttggcaacatcataaatcctttgttgtggaaattaacataaggcagaaaataacacaaccataatcattcataagtcaaaatcaaacataattcagtcataaaatactaagtgccaaatacttaaatataactaaagttctaagaataatgtcttaaaaaacatagccaaatacacggcgtagaatcaaatataataataatctaaatctatgaagatggtggaggaagattgaagcactgacgaacataacttatatcctcctcaagctgagtgatgcgggtatccatgcctgcaaagcgagcatcaatggcatcgatacgaccatccaaggaatcaaagcgctcaccaacataggtgcagaggccttgtaactctgaaagaacttcatgcatgagggctgaggagtcatctcgttgagtcggaggagagggagtacgctcatcttgc

SEQ ID NO: 53826 - DNA, 448 bp, Glycine max
  unsure (1)..(448): unsure at all n locations
agcttatgcgcatatttccttacaaacgttttcttgcacaatacattctattaaccgaaaaaaatgcacccatatacaatcaaggcagcttcgttacctagattatttacacgtacttccaaggtgtatttgttacttacatcacacacctccttggctaaattcacatacatgcatactcaaagcattttggggtaccaaaaattgcacatgtgcacatcttggtatttctaatacctatacatacacaaacttcatgatgaatcttgactatctacacaataaggtgctacattttatgctcttttcaagtttttgctacctaaagccgcatccaaattcaagtatattttcctttgctgactaaaattgtattcaaattaaaaggtatacattttttggtaatgtatcttctntacataacatgcaacatatntatgtatatttt

SEQ ID NO: 53827 - DNA, 526 bp, Glycine max
  unsure (1)..(526): unsure at all n locations
gtgagccanaatcctgactcaccatanaccttgacccagtgtgttaatgtcaatccttaccctcggaagcaaaaaaagaatagaggggaaatttccaatcaaagaaaaagagaaggaaaatttccaatgaaagcaaaaaaagaaaagaaggaaaattccccaatcaaagagtgggagaaagcaaaaagaaaagaaaggaaaattcccaatcaaagaatgggagaaagtaaaaaaaggaagaagaagaaggaaagaaagctcctgatcaaggatcgaaagaaaacagaagaaatgtgcagagaggtctttggaccggacaatatctgaacaatacagaattgccaccaaatgaacgaaaaaagaaggaaagggaaccacgacctanaatagtcttctccctttgattaccaaccaaaatcccgtgcgctagcgacccttnttttctcgccccgcactaaacaaaanaaacagaanaagaaaaagccaggaaaatcaaaagccaaaaacacacaaaagccgaaagaag

SEQ ID NO: 53828 - DNA, 423 bp, Glycine max
  unsure (1)..(423): unsure at all n locations
ggcctcanagaggtccaggaaggacaaggcagccgaatgatcatttccgctccggagtatgacagtcaccgctttatgagcgctgtacaccagcagcgcttcgaggccatcaagggatggtcgtttctccgggagtgacgcgtccagctcagggacgacgaatatactgatttccaggaggaaatagggcgccggcggtgggcatcactggttactcccatggccaagtttgatccagaaatagtccttgagttttatgccaatgcttggccaacagaggagggtgtgcgtgacatgagatcctgngtaaggggtcagtggatcccgtttgatgccgacgctatcggccaactcctaagatattctctggttgtggcagatggccacgaatgtgagtatggccagaggaggaaccggtctgat

SEQ ID NO: 53829 - DNA, 473 bp, Glycine max
  unsure (1)..(473): unsure at all n locations
actcagcttaacatcagaccacttccagggtgctggaactacttcacatggtcttgatggggcctatgcaagttgaaagccttggaggaaagaggtatgcctatgttgttgtggatgatttctccagatttacctgggtctactttatcagagaanaatcagacacctttgaagtactcaaggagttgagtctaagacttcaaagagaaaaagactgtgtcatcaagagaatcatgagtgaccatggcagagagtttgaaaacagcaagtttactgaatactgcacatctgaaggcatcattcatgagttctctgcagccattacaccacaacanaatggcatagttgaaaggaaaaacaggattttgcaagaggctgctagggtcatgcttcatgccaaagaacttccctataatctctgggctgaagccatgaacacagcatgctacatccacaacagagtcacacttaga

SEQ ID NO: 53830 - DNA, 383 bp, Glycine max
  unsure (1)..(383): unsure at all n locations
agctanggattttccaagtgtttattcgtctttctttttagnccagncttcttctggcttcaattcatcagtgggctttccttctgtgtccagcatcttgggatgttcccagcctttgatgacagctttccaggttctgctatccagtgatttgaggaaggccaccattcttgctttccagtattcatagttgcttccatcaagaattggtggtctgtacactggtcctccttctttctccatgttcatcagaatttatctccccagatctcactctgtgatttcgagtgttggctctgataccaattgaaattctgataccaggggacagatgtcgtacaggatgtcacgacatcacgcttcagaacatgcagtttatgtgt

SEQ ID NO: 53831 - DNA, 510 bp, Glycine max
  unsure (1)..(510): unsure at all n locations
tgcatgaattcacattctcccctttctcaagcatattctttattctttntgacatcatcaaaatcttcatgatttacattctccccctttntgatgatgacaaccacctgtaggttaggagcaacaacaaagaaaaaatatctatttgaatataatttactcccccttggttttgcaatgattgcttatatgagacagttgaagatttcatatttttcatatgtaaacaaattgtctcataaagaataaataatttttcttactattttatcttttatctttctctccccctttgtcaacatcaaaaacaaatcatgaatagagaggagaaagatgttaccacttgttgattacatacatatattntatcttttatctntgtgatngcaatgtatgagaatgaagtgataccaaaaggcattaaaacaatcatttaatattaatcaagcaaaaacaagtacaataacacatcaatcanacacaatcaaatacaatcaatcatcanacatt

SEQ ID NO: 53832 - DNA, 497 bp, Glycine max
  unsure (1)..(497): unsure at all n locations
agaaactcagctggcatgcttctcatgcaccaatagattgtgatcttattgattctgccatagcaactcaatgaaagcaccagttgttatgttcctaaaattcgaggactaggagacctccagaaaaagggggattaaggagaggaaatttactgattgttattgcttgcatttctattacaatgattgtccatttataggcatcaaatgcttattctagttccttctacaggtcctacgagggaggctagcaataacggattntggaaatatcctaacagaaagatatattccagtagacagaatattctaattgtccaatgctaaggtgtcagctcagcgcttaggagcaaaatcagttacaaaatcgtccaaatggtgtggcctgcttgtctccttcttgtctgctagcaattcttctgtgctgggttgcctcattataacagtccatcacccactcttatgtgttagtggcttttccccatacattgtgctcc

SEQ ID NO: 53833 - DNA, 486 bp, Glycine max
  unsure (1)..(486): unsure at all n locations
actcagcttatgtttccttgcctcctctaactggaaattttatttgttttgaaatgatgtcactntaagtcacttattgtaaacgtcaatgaatagcctcgactgtcgatggttccttaattcatttaaaaagcttaaggaatgtttgatgaacataaaagattaactcaacatgttcatatgagacaataagctggaattttaaaaccatcaacataatggtctcaacaagaactaacaatatgtcaaattgcccatagttgagaatgatggagaagctgggatcaaagattatcaattggctattcaaattcacgttttttttaaaaaaaaattgtagttctctccatgaagtcgctgagtgactcttcctcgtcttgctgaatggttgcaagtgccactacagtcangtggtacaagcggcttgttgcatcttgggctccgaaacgtgtaatctgcattgaaggagtctatcaagttttcagt

SEQ ID NO: 53834 - DNA, 432 bp, Glycine max
  unsure (1)..(432): unsure at all n locations
agttgagcatggtaaaaagattcgtcttttttctcttagaggtgactntgagcgtttgtttatggaggagtccgagtcaatttctgattatttttctcgagtattggccatagtcaatcaacttaaaagatatggtgaagatgtcgatgaggtgaaggtcatggaaaaaatacttcgaactttaaatctcaaattttgacttcattggtaccaacattgaagaaaacaaggatttaaagaccatgactattgagcaactcatgggttccttacaagcatacgaagcaaaacaaaagagaaaaattaaacaaaaggaggctacggagcaactactacaactcaacgtaaaggaagcaaactatgcaaattacaagagccaaagaggacgaggtcgcggccaatatcgtggacttggactatgacatggaggag

SEQ ID NO: 53835 - DNA, 416 bp, Glycine max
  unsure (1)..(416): unsure at all n locations
tcgaaggagagagggagaccaatcacgtgtacatagcatggccttaaaggaagagttagctgctggctcaagatccaagaagagtttagcccaacacttagaagccacggagcanagcatgctatctataatagaggacttcgcacaagcatacgccgagaaggaagcaagagggagggtgattgatgcattgcatcaagaaacgaccatgtggatggttagtgtcataccctaatttcgcccggggattattactcgatgacatgcaacctttgtttagccgctctgaggaacttgacgtaacttgatttacataaaatgaagaccctatacattcggaaattaaaagatgctgcttgcgcgactgtgaattcctaatgtggccaagcataaatagagttttaccaatctggact

SEQ ID NO: 53836 - DNA, 408 bp, Glycine max
  unsure (1)..(408): unsure at all n locations
agctnttctttgtggatggatgaactctgcttgcagaatggcatgattgctggctgacatattctcaattagctcagttgcctcttcatgggttttcaactctatttttccccctagtgaagcatcgaacagttgcttggtttgtggtctcagcccatctataaacatattcaattgatttggctcacagaacccatgggtgggagtctttctcaataaacctctaaacctcttgtcgcaacctacccttcggcgggagggcgacccgtgactcgcgggatgcgtgttccacgaaaggaatacgcgcggagtcgccaccaacgtttatttgaggaaaacgtccgaataatcggagaagacgccatctaccaactttntagtgaaaggttcgggagtcgtatttacaca

SEQ ID NO: 53837 - DNA, 463 bp, Glycine max
  unsure (1)..(463): unsure at all n locations
ctaagcttctcgggccattcctgcgaaagcaatcattgaaagtttnnttattttgggacattactcttaaagcagaaatggcatataacctcctcccatcaatgtaaatttagggcaagcttatgcgcatattttcttacaaacgttctcttgcacaagacattctattaaccgagaaaaaatgcacccatatacaatcaatgcagcttcgttacctaaattatttacacgtacttccaaggtgtatttgttacttacatcacacacatctccttggctaaattcacatacatgcatactcaaagcattttgnggtaccaaaaattgcacatgtgcacatcttggtatttctaatacctatacatacacaaacttcatgatgaatcttgactatctacacaataaggtgctacatttcatgcgtcttttcaggttatgctacctaaggccgcatgcaaattca

SEQ ID NO: 53838 - DNA, 448 bp, Glycine max
  unsure (1)..(448): unsure at all n locations
ctgctacccaggaagctcaaatttcttacattttgtgggggccacngcgggaaggcctngattttctcaaggtccacttggaccccatttctaccaactacaaaccctaagaaaactatattatctacacaaaaagtacatttctctatatttacatagagggtgtttttcctaaagactgaaagaacttgcctgagatagcctaagtgatcatctaagcttctactgtacactaaaatatcatcaaaataaacaactacaaatctacctatgaaatcccttaagacatgatgcataagccttataaaggtgcttggtgcattagtgagcccaaaaggcatcactagccattcatacaaaccaaacttggtcttgaaagcggntgtccactcatcaccctctttcatactcgattggtgatgaccactcctaagatcaattttttaaa

SEQ ID NO: 53839 - DNA, 465 bp, Glycine max
  unsure (1)..(465): unsure at all n locations
tatctgctgcatntgttatggtgcactgcttnngttatctttagtgcaacacacatgcatgtggtgatcttggacatatttcgagaccttggttagagtggaagctatgcatgggaagctaccaccctagtgcatatgcacaataatttgaatgatgcatctaagagcagcgacaaacaacttgctagatatatcacactattacagataattgtaactgaattgatatgggattttttgttgtctatgaattgatttgatttgttgttgttacaaaatatgtgtagtgggggatttatgagcattntccatctgttgttgaggttattactgttgaagactaatatgaaaggaaaccacgtgccaatcgatggacctctatgaaggcattaccagcgtcgatgtattggaagcgtctagattgactaacgtctgatgatgtatggtggatgccttacggtgacc

SEQ ID NO: 53840 - DNA, 353 bp, Glycine max
  unsure (1)..(353): unsure at all n locations
gcttagtgtgaaactgtgatcaaagtactgttacggtagtacccataagccgaaggaagcataaaggagataaatggtatgctcgagagaagaagacgacaatgggagtgggggcgagtccaattccaccactactactaggcttttaactgcttcagatcatgaaaacggtatttaaaggacggttcttttaacaagccacatgttcaagaattaaatatttaaaattntaagaaaacaaaantttactttttggaacaattatgttgtaagcattttcttataaggaaagagagatggattttntcttcttctattgaacgaagtanttttttatgtaaatcttattaaat

SEQ ID NO: 53841 - DNA, 433 bp, Glycine max
  unsure (1)..(433): unsure at all n locations
ttaagtcacctgcggcatgcaagcttcggaagaaagtgatgaggtacaagttctaaatgcagagcnttgaaaagcccgagtagtcgaagagaagttcaagtccatagccatcanagtctgaaaagagtatgatgaactaagggacgtcaatatggccaccgctgaagccttggaacgagaaaccaagaaggcccgaaaggaagaacacgtgccagcaaagttntgaggggctttatagggcagcaatagtaagctcaagctccgaagaggtgaaaggaatcatcacgggtcaaaggcatgatcttgaaggacgagctaaaggcttaccttatgtcgaaaagaaatttgtcccaacagttaagcgagactgaagggaatatgtgggccgtcatcgatgagtgcaaagagaagctaaatctagcggcgactcacg

SEQ ID NO: 53842 - DNA, 440 bp, Glycine max
cgcgacgataagaccgcttaacgaggtttgcagatctgaaattctacaactctcgctaagtcaggctctggctagcttagctaaaatgatgcatcttaaatacagaggagcatgcgcttagctgataaggactcacttagcgctcacattatcgcaaggaattcagcttagctgccatgactggcgcttaacttcatggacctcagttatggacgtaatgaatttagcttggtgacaataggtcacgcttagccaaggataagttgtcgcttagcgatcaggctgaagcttagtcaaattcagattgaattgaagttggcttagcttatccttggccagcttagcggaccaaatcaaccattgctgcaagaagtgggcgctaagcgcttgagactcgcggcttattgcatgaccaaagatgcacttagcgcgaggctcgc

SEQ ID NO: 53843 - DNA, 201 bp, Glycine max
  unsure (1)..(201): unsure at all n locations
cgacgggtcgataccaattctgatgtttgacatgtatcatcgaattatgcgatgatgccttatatcactagtacgcgtacatccatgctttagggcccaattctgcctaaaaagtaccctctgctgacctatagagtctgtggtatatcacatctgccgactgaccactacatggaatgactgatancactcctttacatt

SEQ ID NO: 53844 - DNA, 415 bp, Glycine max
  unsure (1)..(415): unsure at all n locations
agctntcttgaganaacttccttgagaagcttctttgaganaacttccttgagaagctagagcttagctacacacacccctctcataactaagctcacctccttgagaagcttccttaagaagattccttaagaagctagagcttagctacacatacctctataatagctaagctcacctccttgagatgagaagctagagcttagctacacaccccctataatagctaagctcacccccatgacaaaaaacatgataataacanataaaagtccttattacaaagacaactcaacatgccccgaaatacaaggctaaaaccctatactactagaatggccaaaatacaaggcctagacgaaggaataacctattctaatagttacaaagataagcgggctcatacttagcccat

SEQ ID NO: 53845 - DNA, 258 bp, Glycine max
aacctataaagactatattatctacaccaaaggtacacttctctatatttgcatagaaggtgtgtttcctaaggactgaaagaacttgcctgagatcgcctaagtgatcatctatgctcccactgtacactacaataatctcaaaatgaacaactacaaatctacctatgaaatccattaacacatgatgcataagcctcataaaggagcctggtgtgttagtgagcccaaaaggcattactagccattcatacaaac

SEQ ID NO: 53846 - DNA, 313 bp, Glycine max
  unsure (1)..(313): unsure at all n locations
agctggccacccagctcgcccaggcgagcattgttgcttcctccataagcaacagccttctggggggatcttctggagggcccaagtgagcctggttgctatttgcacccctatttttactaaatacaccccctgcctttntttggtgattctttttttcgtaaagttacggaaacttacgaatttcgtaacgatacttgttttctttccgtaatgttacggaaccttgtggattacataatcatccccttctttgacttacggaatgttacggaacctcactatttgtgcaacgatgctttcttttgatttc

SEQ ID NO: 53847 - DNA, 447 bp, Glycine max
  unsure (1)..(447): unsure at all n locations
tcactcctacatctcatctctagcatgcattttctatctttaccctctcctcacgttgggttntttagggaaaaacaccataactaaacgcgccgcaagggatccctatcgcaccagatccaaatctagaacgatgggtgatcaagaggagacgcaggaacagatgaaagccgacatgtccgctctgaaagaacaaatggcctccatgatggaggccatgttaggtatgaagcagctcatggagaagaacgcggccactgccgccgctgtcagttcggctgccgaagcagacccaactctattggcaactacgcaccatcctctctcaaacatagtaggacggtgaagggacacactgnggcacgatggcagccctcacctgtgatacaaccgagcggcttacccttatggatggccgcccaactattcaccacccatcttgcaaga

SEQ ID NO: 53848 - DNA, 239 bp, Glycine max
  unsure (1)..(239): unsure at all n locations
tcttctctctcccctattnttcggtttttagntttaggccttttcttctctttctcccttaattntcggttatgcaattcccggttgacttttcattttagcaataaaatttcgttctctaatgattaatggaaggttaagtccccaacgctgctttctcttgaggatcaagcacagntctctntgagggtctattattatggtaaattctgttcagttttcctcttcgtaattactct

SEQ ID NO: 53849 - DNA, 312 bp, Glycine max
  unsure (1)..(312): unsure at all n locations
ttaaactcaaacgacttanataacattcttattgcaaatcttntttctcccctcacaccctagcacactcccccctgctcttcaccccaacaatacactccttgcattgaaacaaaatattcttcctctctctcattagaatccttcatctcttccccaccatntgttactctaatttgatatcttgctccattcttcctcactatcttggtgtacttatntaataaaaagagtgctacaagcttcgaattccatacatagttcgcacttgtatgtaattcggctagagcatcaagaggtagaatatagata

SEQ ID NO: 53850 - DNA, 420 bp, Glycine max
  unsure (1)..(420): unsure at all n locations
tgtcctatcanggctacattctcttgagctgctcanacttgtggccaatgaagaaagatttgacacatgtgttctcaccttacttgattcctctacttcttgatgaaacatgttttccaaagccactgagaaggactggttagttctgtcactctcaattctcggnggaatattctgctcaagttgctgagaggattgttggtagagaaccatcttccactgatcattntgggtctcacagctcttctgatgcatcagaattgcagcttcttgagtgtcctcatatgcagaaggcttattgtgattntgatcaatgtactgagttccattgtccgtcgtctcttggttgcgcctagcgagctcgctgctaagaaaggtgctgcttgccatgattntctcaacatcatatcttgttatgtc

SEQ ID NO: 53851 - DNA, 450 bp, Glycine max
  unsure (1)..(450): unsure at all n locations
agctggtgtcgctatcttcatcatggtgatcttnctcgccgccttcctccgacgttacctcctccgaccatgcgtcggacggcagggttcgtctggagttcgaatccacatcgcccccaacctcctgcaccatccacaccttatacgtgatgccatcaacgcacacgtggacctccttcgaaatcgccggcgggaggtggttcgaatcaacaagcgagctctgtccagacgccggcggtcttcagtgtcatcgtcaggttcaacgacgtcgccgaccgtagatacgactgtcttatagtgctgcatgtcccacacctcaatcgggaagccccacagttgcatccaaacagtccggtttttggtccgacagcccggtctncacttctccagggcatagaagagcgtgttncggtagtggtctcatgtaatggatctctgccttttcgttcg

SEQ ID NO: 53852 - DNA, 437 bp, Glycine max
  unsure (1)..(437): unsure at all n locations
taagcacctctntccttacctcttccttcattgttgggtctagccttctctagggttgtcgaactggcctatagtcttcttccatcattatcttgtgcatgcagtagacagggctaatacctttgagatctgatatatgccacccaattacttccttgtgtttcttcagaatttctactaacctattttcttctttggatgtgagtgcattgctgatcaccacaggcttagcctcatcttcttccaggaaaacatactttagatggttggataatatctttaattcttccttcttcttctcagatggagtcttgctctttagttcctcaaatctggtttcctcctcagggatgctatcttatcaatccaagtcttctaagcaagccttgagatcttcttcttcttcactggttaggcaatctaccgcattcaccatg

SEQ ID NO: 53853 - DNA, 279 bp, Glycine max
  unsure (1)..(279): unsure at all n locations
ctagtttttggtttatntttcgtatctctaccatcagaggaatcttcaagctatgaaaaaatcctaaagaccataaccaattatgttatgcattttgaaaatggccgagcactatgataacagtggatcatgagacaaaagaatatagtggacttaactcaagcacatacatgcactttccaaaatatttctctttaatgttaatactattagaaatatgattaaataaaatattataagactgcaataataatgatttcttaccataatcatatttac

SEQ ID NO: 53854 - DNA, 465 bp, Glycine max
tggatcaaccacgaccacctgtgaacgtcaaccctattactggtagaggatttggccctcataaagaaaaattccatagttacctgcgggtagtggcgcgggagaaaatccctattgtgcattctacttggaaagttgtccctgaatgtctaaaaaacttatatgggatgacattttggtaagtgcacttaagcaaccactttgagtttttatgtttaatttaggtgcacatgtcattaatgcaataagtgtttcaaaactatttattattttagggtaaatttgacatccctgaaggaacatctgggaaaaagaaggtgatgtccatggttgcgaccagatggaggcaatttaagtcccccctcaccactagatatgtatatgctgagaaagacggtgaacataaccatgatccatctgctaagtatggtttggatcgagaaacatgggaacaatttgcacaga

SEQ ID NO: 53855 - DNA, 350 bp, Glycine max
  unsure (1)..(350): unsure at all n locations
agctngagaatggaggatttccttgagggtcctctcttaggcaatcatggaacacagctccaaactcaaaaatggaggacacatgaatgacaacgcaattcattcatggggctccgaaaaagggtaagaatggaggatttgcttgagggtcctctcttangcaatcatggaacacaactccatactcgaaagtggaggacccacgaacaggcctaagcaataacattcatgtggctccgaaaaaggatgagaatggaggattgcgttgagggtcctatcttangcaatcatggaacacagctccaaacttgaaaatggaggacacatgaatgacaacgcaattcattcac

SEQ ID NO: 53856 - DNA, 386 bp, Glycine max
  unsure (1)..(386): unsure at all n locations
tctttgggaccttgaacaagccatcaattcctctntcagaaccatgctatgtgctcgcgactggtccctttcttcccttcgcaacttgagttcactattgctaccccatagagctccgcgaaatttgttccggccatactcttccttgcgagccctcttggtctctcgttcaagggctcttgcggtaattgcattctcttcccgtaacccggcacactccttccgaacgtgtgtagcagccaacttgaacttctccttggcgagttttgcctttcctaactcgcttttgagagcttggacttcctcgtcctcttccggtgcttcaaaattctcttcgctgacgacttttaacttggcgagccaatctaaacctcgtatgcgaactt

SEQ ID NO: 53857 - DNA, 321 bp, Glycine max
  unsure (1)..(321): unsure at all n locations
tctctcactacaacaatcactatgatgactcagtctttttctgactntgatttttgtgtgggcttttggtgtttttgttggggatggggattaatgtgtgggccgatggggttttgttgtggctcaagagcgagtgctgctaggtgnnctnnnnncnattncncnnnngctgnnntcnantccccnacnggaatttcanacacatacttctcatagtcatcacttttcaaaggctttactcatgaccaccaatggcctatatatatgtgacttacacacgaaattgctcatagatctttataacaacagagtgtttatcct

SEQ ID NO: 53858 - DNA, 366 bp, Glycine max
  unsure (1)..(366): unsure at all n locations
agctnggntcatgtcataaatatgctatatcttgaagaagtgtgagattctgacttaatattattcctaacactatatttattattggaatattctatttcctattaattagtaattgattgatcttgtaatcaatattgactccttcttcatattataaataacatgaggtgtggtctactttgacacacaacacaacagttaaaaatactgttataagtagtaactcattgacctattactctgacgtagataaatgatggtatttttataactacataacacaggcattacatctaaagtttgttacagggagtgtgactntaccagtgcctntgtatgtcattgggctgacatactatgaat

SEQ ID NO: 53859 - DNA, 444 bp, Glycine max
  unsure (1)..(444): unsure at all n locations
gttgccaatntagttntcgctagcgaaaggatcgaagtgggtctgaanagaggcaaattagatcatcttactttgataaataagaagcctgcggcaaatggagagagtaagaatgagggaggtgttatacaagtggcctcagatatcttaagaagggggggttgaattaagatattccaaacttttctcctaattaaaaatctatcttactttttactaaagttatgaattcccttaataacaatcttcttaaatattaattcaaatgaagcaacttgaatatgaatataaagcaataataaataaaggagattaagggaagagaaaatgcaaactcagttttatactggttcggccacacccttgtgcctacgtccagtccccaagcaacccgcttgagagttccactaacttgtanattccttttacaagttctaaacacac

SEQ ID NO: 53860 - DNA, 133 bp, Glycine max
atttaaaaaagaaagtcgtatctaagtcaggtctgagagaccatacaaagttcctaatgaattctaaatatgtgggccattaagtctatcatatgctgacataaccgagaacccatgaatctcttcgggggcg

SEQ ID NO: 53861 - DNA, 370 bp, Glycine max
  unsure (1)..(370): unsure at all n locations
tactcagctntactctctggtaatcgattaccagaggatgtaatcgattaccagtggcctaatacgttntataacagctataaaaatttgaattcgaaattttaaaagctgtaatcgattacacaattgtggtaatcgattaccagcagttagtaaacgttttaattcaaattttaaaagcttgaatcgattacacaattgctgtaatcgattaccagacaggaatttcagaanaataatttcaagagtcacaacttttcaaaggctttactcatgaccaccaatggtctatatatatgtgacttaaacacgaaattgctcagagattttcagaacaacaaagtgtttatcctctcaaaaagcaatttca

SEQ ID NO: 53862 - DNA, 376 bp, Glycine max
  unsure (1)..(376): unsure at all n locations
gtcacctgcggcatgcaagcttgtaatcattgtggaatgaacattcttataattgtgcaacacgtagatgctctctttagttacattccagacatggttcaagaaggtgctaatgctacctcctcacatcaaggcaactcaattgcttgcaaaacatctctcacagccaacccatacttaaagctttaaagccacttaatgttaagaatgacgtggtatggtttagtaatagaagttatgtgccactagatacaactaatcaacttggtggtatgtaaagcttagtcaagaattatttctgtcaagaatcgaacttgggaactactcanaccatgtaatcttaactntaacacattaatcacttgcactcaatcac

SEQ ID NO: 53863 - DNA, 448 bp, Glycine max
  unsure (1)..(448): unsure at all n locations
tatgcatggaanatgtaattataaaatcgagatgcccgatatacaccatttcttagttaaccatgcattaggtaccatgttcaattattttgtttttaagagaaacgggtttatgaaccctacatgggtggctcctaacacatgaaactaagaatgtagtgtgaagtttcacgcttcccccttctttgtttttgttttgtagaggaaaacgcacggatgagcaaacatgacaacaaatggtatgcaattttgcagatcaaaaagtttgttgaacgcatatgcatgatgatgccatgactcatgcaaaatgtgaggctggaatatgataacggacaaatgcaggatatgtccattatgatgttatgaagagatgcttatgcgatgcatgatatgaatgcattntacggacacgagagcctcgaaaattatctcttcttacttgcgcatt

SEQ ID NO: 53864 - DNA, 372 bp, Glycine max
  unsure (1)..(372): unsure at all n locations
agctntatgaagcagcagaggagtacatatataggtttctactntatgtaaattctataccaaatcagtatgcatagagcggttccctctcagaatattaacgtctggctgtggaaccactcatatggtcctttggtattattagtacctctggtactttatgcaatagatatattatgtgtgctgagcaaaaaaaaaaagcacctctggcactccgcttaatatgtctgttacctttgctgatcaaacaagaaaatggcggcggaggggagatgcaaaagcaaaattatttgtaacaatcagctgctggaagaggcccaacaattatgggacgtgtggacaaccatatgcttggaagcagacacatgtcac

SEQ ID NO: 53865 - DNA, 424 bp, Glycine max
  unsure (1)..(424): unsure at all n locations
ttgatggtgcttacgcgtntagcgcaactctggaccgtttagcgcgcattagagaatatcggcttagcgcgcgtctgctcgctcaacggatggactcaagcggtgcgctgagtgggatgaaccctcactgagggaacacgcatagctcatccttcttgcagattctttctcgcgctcaaccaaaggagcggtagcgctcaacggatggctcgctgagcgggcaggttggcttaacaagacgatgaaaatcagcgcttcacaaacttgtctaatgaacctgagattgagaggacatgaatattaagtacacaaaatgggagtactagatagctattacctatctataacaaatagtaactgcgactctacaacatatccataaattggaggagtttgatacaacntacacatgttntatacacac

SEQ ID NO: 53866 - DNA, 341 bp, Glycine max
  unsure (1)..(341): unsure at all n locations
agcttcgatgcaagccaatggttggaggatatagcttgatggtgaagntgactcggggagtgcgtaatcatgaataggccaagtcattagtgtggacatccatatgcggngcgattgactaaagctganaaaacacttattgctgatatgacgaagtccagggtatagccaagaaacattctgctaattctgaaggaacacaatgccaatagctgtatgaccattgaacgaatatacaatgcaagaagtgcattccgttcttccataagaggaagcgatcttgaaatgcaacatctgatgaagcttcttgaacgtgatcagtatattcattggcgcaaaat

SEQ ID NO: 53867 - DNA, 447 bp, Glycine max
  unsure (1)..(447): unsure at all n locations
aacgttctagaaaattctacacttttctaganagctctagaattttctataacctctccaattaaggagggatcccaacagacttcatatcccatcactatttttgtttcatttgcataccctcttattaaaaaaaaagaaagaaggttagggtgttttggagacaaaaaaaatcatttataaaacatgtgtcagtcacacgatgtattctataaatagaggtaacacaagatgtattctataaatagaggtaacgtcgtttgcggagaaagatgctattggaatcaaaactgaaagattatggggttagctgtagggtgaaaaaaacaataagagaagatggatgtgtaattagtgcaaacctcaacgcgtgtcatgagaaataaatccatttatccaccatccatccaatccattcataataaattcattcaatccattcattac

SEQ ID NO: 53868 - DNA, 383 bp, Glycine max
  unsure (1)..(383): unsure at all n locations
agcttaatccttacgatcactatttctctcataagctcaagtgttttaaggaattcttcaaatcaacaaccaacacaagtctcagattttgcatttcatctcatgtcatacaatcacaaacacacaaattgaatctaaaggactntcttggtttgtaatgaggctaggctacaaataattcatggtttttctaggatgcaaaacttatgttctaggagagcattcatccttggatcacccttttcccttttattcctagcttctattgatatgccatactcttataagacacttagcttaagcaacaacacacaaaaactgtgcttattcttgaaactataattntttgtgcaagtgttttttacttactgcttctttatata

SEQ ID NO: 53869 - DNA, 369 bp, Glycine max
gcttatcattgcgagctagatgtgtgaaaggcggttcgccattatccacaatgaagtcccttaagagcaatcaaattgggtacgactgtgtcccccagagttcgagttatggaactggcaaattatcgagcaacccgaaatttctgtggcgaacataatgtaattttttagtccaagccctatagctgggcctaggctttagggttttccccctgtttgggcttgtcttttgctatcaaatatatataaatacaatcttccttcatttgttcttgcactatcatccattctcattcgtctgcctgtttatttttgttgcgatcaaatggtacagatccgacaatgagtcctatgaaggtactaataccg

SEQ ID NO: 53870 - DNA, 289 bp, Glycine max
  unsure (1)..(289): unsure at all n locations
gtgtttcttatattcttgaaatgaanaacaaagccttgctnttatagactcttcatgtctggtcaagaagaccatctagaagagttataactgttagaaaaacttagaaccaatttgaataagtcaaaactcttttgaagagttacatctttngattttttcaganacagtcactggtaatcatttaccagattagtgtaatcgattacacaaggcttttaagtgagaggatgtgactcttcacatataaatngtgaattcaacatttcagggcactggtaatcgatta

SEQ ID NO: 53871 - DNA, 344 bp, Glycine max
caaattcactatttattgtatttctttagcaaaaaatttatgccaattgcttaaaccataaggtataactaacttgatctctctttttttccagtaaaaaaaaaaacgagagctcttcttaaaagatatatgattatttatttgtaccacgtattattttcattaaaaataagtaagatttatgtatatcctaattttgtcatttaatcaaacatactctaagtatattggaaaattctccttaatcttaatggaaaaagaaaattcttaattgattattctgttaattggcgacactaaaaaccaacattacaaaaaggacataattggggatgttattcttt

SEQ ID NO: 53872 - DNA, 275 bp, Glycine max
  unsure (1)..(275): unsure at all n locations
agcttcattcatgtatccacgtattttcgtgcaggtactgtggcgtcttcctggtgcgtactggcctcgaggtggttactggtatcgacggagaagacngtgcctgtgaggtgccggtggtgctgtctgtggtgctaacagtttggaatttcaacagtgttgccggaacaaattccgcagctttactcgcagatgggagtatatgttagaggaggaaagatgcacaaatggaaaattctgttttggtacgtgacgttatagtgcatttggaatct

SEQ ID NO: 53873 - DNA, 318 bp, Glycine max
  unsure (1)..(318): unsure at all n locations
catttacctggggtgaaaaacaagaaccagcctttggttttctcaaagaaaagcttactaaggcacccggtctaacttttcctgacttttctaaaacttttgaactaaaatgtgatgcctctggagtgggagttggagttgtattggtacaaggtgggcaccctattgcttattttaatgaaaaacttcatagtgccacccttaactaccccacctatgataaagagctttatgccttaataagagccctccanacttgggaacattaccttggttccaaggaatttgtcattcatagtgatcatcaatcacttaagt

SEQ ID NO: 53874 - DNA, 369 bp, Glycine max
  unsure (1)..(369): unsure at all n locations
agcttaccttgaattataattctatcatttttaccctntgngagctgaatgagtntgtaaataatttgaaccccgaacttaaatgattctctccagatacctngcttagatttaggagacatatggtcaagcaaattaccccaaattgggggagtggaattaattgggatgcaaagaaagagataatgcatcagcacacacaatgcataagttgtctgtttaaaaaaaaaaaagaaagaagaanaatgtgctgatgtaacaaggtcaaaagcaaatgaaagtgaaaagctagcgagcaagccaattgtattaaaaagaccattgggataagtctaggattngtgctctcttagaatataaaccttttga

SEQ ID NO: 53875 - DNA, 442 bp, Glycine max
  unsure (1)..(442): unsure at all n locations
tgctctgtttaggctctcccanaatctagatgtaaatctaggatctttatcagacactatgctagatgacacaccatgtaatctgataatctcactaatatacaaggaggtcaacttctctaaggtaaatatgatattaatgggaataagtgagtagacttggtcagtctgtcaacaataacccagatagaatctaaacctctaggggttctaggtagtcctacaacaaaatccatggaaatactgtcccacttctattgngttatctccaagggcggtaacttccctgaaggtctctgatgttctatcttagccttctgacagactaagcatgcatacacaaactcactaacctctctcttcatgttgggccaccaaaacatcatcttcaaatcctgatacatcttggtagcaccaggatggatgctcanngtactcctat

SEQ ID NO: 53876 - DNA, 355 bp, Glycine max
  unsure (1)..(355): unsure at all n locations
agcttgtagccaatagaagagaatgagcatgtgattgaaagtatgactganaatgttagtcagatggtcagaaatgatgtgaaggaatgcattaaccatatcccaatgagagtgtgatctttaaattttgagagaaacgaatgtcatttagtacttgattttgcgtgaatctctgaagtatggactgaatgcatngaaatgatgatgatgaagcccatgtttgattgtgatagccacttagccaaaaagctaaccatgtgtttgaatgaattatcccttgtactcagttngagctaaatgaattattggttgattgaaccctaagcctatacagtgttatctcctgctaccttga

SEQ ID NO: 53877 - DNA, 431 bp, Glycine max
  unsure (1)..(431): unsure at all n locations
gttagaanaganacatcactntacaccattttgaaacggctctacgggcctatatatgtgngtctgactgtaaaaggtaaaagaaagagatattctaagagaacttaattgccaaattctctctccacaactcttgggcaaacacttgcaaatctgttgagaattcatccaataacttcaaattgtattatcatctctaaaagagagaaattcctctaggaactttaatttgtgtcatccaatctaaaggagagaaatctttttgttcatatcaaaaattcaattgtaatctagagactggttgtctcttggattgtgagaattgaatcaagagacggattgtctcttggagaatctttgaacacaagggtgagggatcccaaggtgtgttcaaagtctgtaaaggatgtatagagatagtggaaaatctc

SEQ ID NO: 53878 - DNA, 427 bp, Glycine max
  unsure (1)..(427): unsure at all n locations
ccttaagtcacctgcggcatgcaagcttatgcatggaanatgtaattatgattttgagatgcccgaagaaacaccatttcctagttaaccatgcattaagtaccatgttcaattattntgtttttaagtgaaatgggtttatgatcccaacatggttggctcgtggtgcctaacacatganactaagaatgtagtgtgaagtttcacgcttccccctttnttgtttttgttttgtagaggaaaacgcaaggatgagcaaacatgaaaacaaatggtatgcaattntgcagatcaaaaagttggttgaacgcatatgcatgatgatgccatgactcatgcanaatgtgaggctggaatatgataacggacanatgcangatatgtncattatgatngtatgaagagatgcttatgcgatgcatgatat

SEQ ID NO: 53879 - DNA, 409 bp, Glycine max
  unsure (1)..(409): unsure at all n locations
ntgtgtaatcgattacactgagttggaatctattaccagtgattgtctctgaataaatcaaaagatgtaactcttcaaaaaggtttttgactttttcaaattggtttttaagattttctaaaagacataactcttctaatggttgtcttgaccagacatgaagagtctataaaagcaaggctgtgttttgcattttaagaatcttgaacacttattcatacaatcctttacaagccttgaatctctttgaacttcttcttcttctttataccaaaaagctttccaaagttttctggttttttaaaccttgaaaacttgtgctattcatcttttcatctcttctcctttcgccaaaaagaattcgccaaggactaaccgcctcgaatctttntgcgtctctcttctctct

SEQ ID NO: 53880 - DNA, 195 bp, Glycine max
  unsure (1)..(195): unsure at all n locations
gtacacaatctcattagagacatcaatattggagtcgacaatgaatcttgaggaaaacaccacataaggaaactcataatccaacaagcgatgacttttcagcataatatctctaatcaccaatacccaactcatcttgatacctaattntagaccataaactatctgtagatcatcatacattacctgagtatg

SEQ ID NO: 53881 - DNA, 425 bp, Glycine max
  unsure (1)..(425): unsure at all n locations
tactaagcttataagtgcgggtctgggggacgaaggtcaagtggtcgttatatacgaagatgatgttccaagtacattggatttggtacgaccatgccctcctgatttccagctgggaaattggcgagtggaggaacgccccgacatttacgcaacgagcataatgtaaacctttacggttttaaaaactctatagttaggcctaggctntagagtttcttttgttaaggctttgtgtcttttgttttgaatttataatacaaggatctttcatcatctgttcctacgtctctacccattctcatccatttgcatgtttacttctttatttctgaaacaacggatccgatgacgagtcccccgaaggtactaatacctgggacccgcctatcaacttcgagcaagaaacgaatcanacggaagat

SEQ ID NO: 53882 - DNA, 67 bp, Glycine max
  unsure (1)..(67): unsure at all n locations
ctgcagctgttcaaatgtgctttgtgtctatcacaantgccggtgcaccacaacatagtggagtttc

SEQ ID NO: 53883 - DNA, 339 bp, Glycine max
  unsure (1)..(339): unsure at all n locations
actaagctagatgaggcgcaggaacacattgagcatatgaacttctgnttcattgactgtaccatgttgttaatgtttttaatcagcttatgttgtaagcttaggattgcggccataaataaggcatgggaccttatgggtgtggggaaatcattacatgtgcactggattttgagtgacaactaaaagaaacgcaagtgggaaaacaaatggaggctgagttttactgaagtcttataatgtagggcaaaactgaaggtttctgtgatccgctaatttgatccataagtgatttcggatgaaccaatggtgacctgaatggtggtctttatttagtct

SEQ ID NO: 53884 - DNA, 327 bp, Glycine max
  unsure (1)..(327): unsure at all n locations
agcttagcccactagaactaatgatgctaattgtgttgcagattttgtcagatctaatctggtttgcatggttggagtacctaaagcaatcgttactaatcaagaaacccgtttttgcaacaaatcaatgcatgccttgcttaaaaagtaccgggttgtacatagggtatccacaccataccacccccaaaccaatgaacaggtagaaatttctaacagggagatcaagagaattttagagaagattgtgtagccaagcaggaaagattggagtaccaggcttgatgatgctctntgggaacatcggactggctacaaagcacccat

SEQ ID NO: 53885 - DNA, 451 bp, Glycine max
  unsure (1)..(451): unsure at all n locations
aataattcactattgttgtcacctactccttctataatggacttgttcattcttagttccctaatctttngtttagctntgtcgctaattntgaaaggtttgaataagggtttttctatggggatatttgattgagattcttcaggagatttttgtctagaaatcgtctttgttttgatagactctcctaaaacttgcaaatattntttggtataattagcttgttccattangcttttgatatccttggaagttacttcttcgttaatatcctttgtcttaaaaggactggccatgacaggtttatcattactgtctttgacctttggcagtcgatattgtgttgtgggaggtaatttcgattggattaactcaacatcctttatttgccaattggtgattaccattngttgtggatcacctatgatatcttgnttccacgggtaatcta

SEQ ID NO: 53886 - DNA, 106 bp, Glycine max
aaaaattacgccccgcctgcactcatcgcagactgttgtatcataagcatctgcgactggagcatacaacggatgatgacctgatgcagcgataaacctgtcgctg

SEQ ID NO: 53887 - DNA, 228 bp, Glycine max
atcaaggttatataatataacttggtttgtgtgtcattgataatatagcttttatatcatacaacatttgctagggtgaacattccaaatcataaaacttttattccaagtgtggggattgcaacccctaatggtacctttagaagtccaaatgcaattgccaaccttctcactatgccataaaagaagatgtgctttcagctcctttttgcatcatgcacacaaatt

SEQ ID NO: 53888 - DNA, 382 bp, Glycine max
agcttatctacaaaggctggagtattgcctacgacctgtggccgaccagctggcgaccaagtccaaagccaaaggtaagcaaagtactaggtccgtgaccgataagtcatcacgcgtccggttcaagacgttaaagaagcgctactaggaggcaacctagaattggctacggagaagctccctgcgaagcggtccaggaagggcaccatcgaagaggattccagtgcggccccgcaagccgacgcaggcttcgacaaacaccgattccagagtttggaacatcattaattgcctctgagcctaacttgcgttcatgcttaatggacgaagggctaactcgtgtatgtggtgcctaatcacgtattgaaaaccctaagttgat

SEQ ID NO: 53889 - DNA, 429 bp, Glycine max
  unsure (1)..(429): unsure at all n locations
ttcctaagttcttaacaagcttagaatttatacttggccttcgtttaattgtctttgggcttggcgaccatgatcaacaaagtactttcggcacctactatatgttgacttgaccaacgttgttattggaatgctgcgacaatctttcaacaccttattcacacattctgataggttggttgtcatctgaccatatcttcgtccagatgtatcgtaagccatgctccatttttcctttgaaatgcgatcaatccatcttgctatggctggactcaattgacgaaatgtttctaagttttgatcaaacacatgcttgcaaggagtgtacgctgcatcaaatttgttaccatcaaaagttgtaggtagatatgaaactcanattaacttaatgtataaaataaaccttaccgaatttcttgaacatctctt

SEQ ID NO: 53890 - DNA, 405 bp, Glycine max
  unsure (1)..(405): unsure at all n locations
agcttgtagtctcaattntagcgtctcgatatattacccaattcaatcggacatccgagtaaaaagttattgtcatttgaatttcctacgagcttccgttttcaatttggagcatctcgatatattagaggactcaaccggacatccatgtataaagttattgtcaattcaattttcttagagcttcggattaaaattttgagcgtctcgatatattacgggactcaatcagacatccgagtaaaaagttattgtcgtttgaatttgatacgagcttctgttttcaatttggagcatctctcgataaaatacgacactctgtcgggcatccgagtaaaaagatattggcgtgtgattttctaagagtttcgtttaatttggagcgtctgatatattacgggactc

SEQ ID NO: 53891 - DNA, 410 bp, Glycine max
attcacggatgtctaattgagttctgtaatatatcgagacgctgcaaattgaaaacggaagctcgtacgaaattcaatcgacaataactttttactcggatgtccgagtgaatcaggtaatatatcgagatgctcaaaattgagactataagctctgagcaattgaatgacaataactttatgcacggatgtcctattgagtcccgtgatatatcgagacgctccaaattgaaaatggaaactcttagaaaattcaaacgacaataactttttactcggatgcccgacagagtgtcgtaatttatcaagagatgctccaaattgaaaacggatgctcgtatcaaattcaaacgacaatgactttttgctcggatgaatgatttagtccccgaatatatcgagacactcaa

SEQ ID NO: 53892 - DNA, 398 bp, Glycine max
  unsure (1)..(398): unsure at all n locations
ctctgataactaagctcacctncttgagaagcttccttaagaaaagtcctaaagaagctaaagcttatctacacatacctctctaatagctaagctcaccttcttgagatgagaagctagagcttagctacacaccccctataatagctaagctcacccgcatgacagaatacgtganaatacgaagactactcacaatgccacgaaatacaaggctaaaaccctatactactagtatggccgaaaatacaaggcccacatgaaggaaaaacctattctaatatttacaaagatgagcgggctcatacttagcccatgggctcaaaatctaccctaaggctcataagaaccctagggccttcccttgggatcctaacncaatctacttggagtcttct

SEQ ID NO: 53893 - DNA, 339 bp, Glycine max
  unsure (1)..(339): unsure at all n locations
agcttgtgccggcgagaagaagacttctgttacggagaccactaaagaacaccaacgaggaaggagcgcggaagaagactctggaccaagaagaagaagtcgaagaaggggagaagggtgttgctgggtgcacggacgaagtatgagcgcggaagaagaaaggttttttttttaaaaaatttattaagttttgaattttaaatgaagggcatnttcgtaacttcaatgaatggctgggtgcaccagcaattttgctgggtgcacctagcaacagccggcccccaaagagnaaaagatcccaaatnttaatttagtactaatatancctcaaaaaaaaat

SEQ ID NO: 53894 - DNA, 354 bp, Glycine max
cggaaaacccagagcactattggacttcttatggtccaccgggtgtctcggtggtgcaatacctaccaactagtggatggcatctaagataagttacgccatatggacattgatctgggtcatgatgttatagaccaactgacatttgggtagcgtgagatcagagttatggtcactgctaaggatgttattgagcatgagcgtcatccagatatgagttacagtggtcatgctagtgcgcatgatccgcacccgcctgcttgctacgctccatgcaaaatcatgtcccggagagcaaagtagctgacttatggcctcttcatcaaaacctaaaaattggcttcttctctcaat

SEQ ID NO: 53895 - DNA, 86 bp, Glycine max
tatacatataaacggatcgagggaagtacttggccaattggccagccagcattatggatagggtaaatcatggatctctctaatat

SEQ ID NO: 53896 - DNA, 174 bp, Glycine max
ccatgtagatcatgatcgacactctcctgtcttccggactgtctgtggactagccctacccatggatcgaaaaggtgggaacacatgtatagaacttttcgccacgacacgattaatggcgttgattcaaaacacaacgaggcaagatcacttcatagcccacttcggagatat

SEQ ID NO: 53897 - DNA, 296 bp, Glycine max
  unsure (1)..(296): unsure at all n locations
tttttcccattatacttactacttagagtagctctctatntaaaaggaaaaagatgcatcctattcataacaatattcaattttaaggtgtctcttgattttattagtgtttcgcactcactaaaggtcaagagaaacatgtttagattggatgttgcacacttaaatntgaactaaacttagatntgtaacctgaagttacaaaaatatattaatagttattttctcaaactcagatttcaggttaaattttaacctcacacatatgtctagaaggagagatcanacacgatatg

SEQ ID NO: 53898 - DNA, 256 bp, Glycine max
  unsure (1)..(256): unsure at all n locations
catcatcatcatcgncggcgttattattattaaatagtaaagagatcttttgccccatagagtgcttttcatggaactataaatctcgttagaagtgccattgcatcatcattccatagaatgacgtgtcttgaacactacattatagttgcactaggtctttataacattgatctcggcatgtggataatcttaccttatagaataacatacaagctttgaatagatgaaagaccctcccttctactctgtaaaa

SEQ ID NO: 53899 - DNA, 438 bp, Glycine max
tactctgcacaatggtggcctcttgagaattatatcggctattcctccttctaatgatgcatggacacttatccctgacccaaccacaattcgtgcaaaaggtcggcaaaaatcaacaaggataaggaatgagatggattgggtcgaaccgtctgagcaccgaataaaatgcagtagatgtggagccgaatggcataacaggcgtcgttgtccaatgcaatctgagcgtgtgagatgttcaaatcattgatttatgtatgttagccgagtgacttatatttgtttaagttctcttcaatgtattgaatttgtggggttgaatacatttgttagttaaaaacattacttattatggtttgtgtacattacctatatgtgggtttcaatgaattcgttacttaaaaacacagtcatacacacctacactagaacctaatg

SEQ ID NO: 53900 - DNA, 363 bp, Glycine max
  unsure (1)..(363): unsure at all n locations
agcttccatcaactacaatcaacaacttttatgtactagcaatgttgagtacaccgaggagtttgtgggcttaatatagctcatagagagagtgagtatggccctacacggtaatgcaaattacactntattgaccaaatgtagtgccctttaccatagactatntattgacatgttatatcccatgggaactctcacctcatgcaaagctctaatactatgatgatactcatttgtatctcagattgaaagagccacgttctgctntggaattcttattgaatccagaggagtacaatgaacaagacaacgtttgtcgatacaacatgcaacgagtacacccagtggaggttatagagaatc

SEQ ID NO: 53901 - DNA, 391 bp, Glycine max
  unsure (1)..(391): unsure at all n locations
tatacctcacanaatatatgtatatgtgtttaggtagctttcttgtggngcttctatggaggctggatctttgagcttcaatgaggtcctttaatggtgattttccaccatggagatgcagcggaagacaaaggagaagaggtgagaggaggcgccatccactatggaataagccatggaagaaggagcttcaccaccaagatgagccttggagaaaaagcttggaaggatgcttcaatggaggaaaagaaagagggagagaaagagagaggggggagcacgaaattgaaggaataaaagagggagagaagtggaactttgaagtatgtctcacaagactctcattcatcaaagttaccacaagtgttacacatgtttctatttatagact

SEQ ID NO: 53902 - DNA, 365 bp, Glycine max
  unsure (1)..(365): unsure at all n locations
agcttggcatggctcctaccttttctctcataagcatcanattatagcaactccatgaagcctgtttcacagcaagaaagatatttgttcttagcttttagttntactagatatggcatacttcanagggctacatgacaactgtaattaagatgaccctaaagccaaattgattgtgttntctgttgaaagttcaaaaagattactttatctagcatacttctgcacaactaattaattacatcaacttataattaattagaaattggtgaagggttacattntatgaagttgatatgcagatgagaataattaanacctaggaaggacatggaatggtcaaacaaaatgagtatgcaacaata

SEQ ID NO: 53903 - DNA, 413 bp, Glycine max
  unsure (1)..(413): unsure at all n locations
cttgcagaattggtcttcgctgggtaaaggatcaaagngggtttgaaaagaggcaaatttaatcatctgcttagacgaattaganaactggggcaaaggaagagggtgagaatgaaggagaaacccatgctgcgactgtcgttcctaaatagaaaatcccttaccagctcaacaaacatcattactcagccaatatcgaaccttctcattccccaccacccaattatccataaaggccatccctaaatcaaccacaaagcctgtctaccacacaaccaatgctaaacaccacctttagcacgaaccaaaacaccaaccaaaaaggaattttgcagcaaaaagcctgtaggattcatcccaaattctggtgtcatatgctaaacttgctcccatatctacttgataattcaatg

SEQ ID NO: 53904 - DNA, 393 bp, Glycine max
  unsure (1)..(393): unsure at all n locations
tctaagtcacctgcggcatgcaagcttgctcgtcttgctgatatttatcattctacttttctgatgatgaccgaggaacaattagggatcaactngaaacttatgtgcttcaagtgagaagaaatgcttctttttccactagcgaagatgttcaaagtctggctatgaagatggttcaaactgagaagcatctggtatttccattggattataaacttattgagctagctatgatattgccggtgtcgacagcatccgttgaaagagctntgtcagcaatgaagattatcaagtctaaattgcgcaataagatcaacgatgtgtggctcaatgactggatggtgtgttacatcgagcgggagatattcaagtcgcttgatgatattgatatta

SEQ ID NO: 53905 - DNA, 429 bp, Glycine max
  unsure (1)..(429): unsure at all n locations
tttagatntcattctcttcctggtgtctccagaccaattntcttcaaagtataacaaagttatgaaatagtacacaattagaaaaatacgaattttacaatttcaaataaaataaaataaatcaacactactatccatttcaacctttgaattaattcatcaacacaagaatatttaccttaaaatgttggaaaaaaagttcatgatgatcttttggaatcgcttcctatgtagccaaggctgaccaaattgtttcctaatggacaaagtgatagcctttgccgcaaccttagatggatgaaacctatatataaaaaataattaatcaaaatagtataagaccatatgatatatcatatataatgataattatataaattgtggaatatttatgctcgatagattaacataaccataagacgatcatta

SEQ ID NO: 53906 - DNA, 306 bp, Glycine max
  unsure (1)..(306): unsure at all n locations
agcttaccagaagcgccaatcagnggactttgttgctggcgaattcgtctgagctatcatgagtaaagatcgtttacccactcattaatacaactagcttattgctagcaaaatcgagtcatattcatagacctgatgctttcaatgttaatttacttattgtgagaacgcttcttctgatgatgagatggcttttgatctgacgatgaatcttctccaccccaaaaaggatcctgcagtgcaagattgagcaaaggtgaccacaataagtcatgcgtgtccattntttaacaaaggagtacacct

SEQ ID NO: 53907 - DNA, 471 bp, Glycine max
  unsure (1)..(471): unsure at all n locations
tgaggaattcctaatacaacgtttactcttcttactactgagaaaatattgataaaatgtgtgaatttacctcttttagtgaagtaataagtaaaactggttacaacgatgtctttattttagcactttcttcgtcactagcatgctgtaacctgagcatgcacttgtgtccacatattcaaaatgtggtttgaaaaaaatatcactaagaatgtacgaacacatttttattttaacaaaagaaaaagtaccagacatctggctatgaatatacattgaaaaatcaaagttgctagctagtttgttggaatctgtggnggaattgctgaactatcttccattgaggcatttgaacatctatcatgaacttccatttgagattttggtatcgatgggtaattagactcgtcacanagcttttataaaagaaccatggatgctgcaagactacttttaataaaaattctcagt

SEQ ID NO: 53908 - DNA, 409 bp, Glycine max
  unsure (1)..(409): unsure at all n locations
agcttgcatgatttacattctccccctntctcaagcttattcttcttgacattatcaaaatcttcatgatttacattntccgactntttgatgatgacaactacctgtaggttaggagcaacaacaacaacaaaaaaatctatttgcatatagtttaattccccttggttttgcaatgtttgcttatatgagacagttgaagatttcatatttttcatatgtaaaaaaattgtctcgtaaagaatagataatttttcttactattatcttttatctttctctccccttntgtcaacatcaaaaacaaatcataaatagagaggagaaaaanaatgttaccacttgttgcaatgtatgagaatcatgtgataccaaaaggcattaaaacaatcatttaatattaatcaag

SEQ ID NO: 53909 - DNA, 474 bp, Glycine max
  unsure (1)..(474): unsure at all n locations
tctagcacactccagatattntcccaaagatcccaacggtttaatcatggttaagtgtcttgtgaagttgcaaaccaaatttcgagaagatccaacggttaacgaaggctgggaagcgtttctaccgaggcagcttcatgtagttttctctagaagcttcattaagaggcttcctctagaagctttattaagaggcttctagcacacggcagacatcttctcaaagatcccaacggtcagatcatggagaagtgttttgtgaagttgcagaccaaatttcgagaagatccaacggttaatgaaggctangcagcgtttttaccgaggcagcgtcatgtagctttctctagaagcttcattaagaggcttcctcgtggcttctttgagaagctntctcaagaggcttctttgagaagctagatccttatctatccacccctctattaactaaattaacttccgtaaaaataatta

SEQ ID NO: 53910 - DNA, 397 bp, Glycine max
  unsure (1)..(397): unsure at all n locations
gcttcacagaagatggccctgacaaccatgttggcatcaacatatacagcatcaattccattcaacaggttccattaatcaacactgnggtcaatgtttcatcaggtataaatgtaacattcaaaattcagtatatgaatgacatgataacggtttttggttcgatgactggttntgaagaatctatgaagacccttttggtatctccacctcttaatctatctaactatcttcaagaagtggtttaccttggtttctcagcttcaacaagtaactacacggagctgaactgtgtaagatcatgggaattcagtggtgttgatattgcagatgatgataataaaagtctcttgtgggtttatattactggtccattagtgatngttattatcatcat

SEQ ID NO: 53911 - DNA, 273 bp, Glycine max
agccatcaatggggcaaaacacaccaattgattatgatgatggatggctcaaattctcacaaagggtaactcatcactttcaaattgagctttcaaaactatcatgacatgtagaggagaatcaaggatttcaagtcacaaaatgtcaagaacttttattttcaaaacaattacccatttcttgaacatatcctataattcaaagaaaaacatgcaaagtcgtacatgcacacaaaattgacccaaaatattaaactaaaaatccgacaaaac

SEQ ID NO: 53912 - DNA, 250 bp, Glycine max
aaagtatgagattggaggatgggtggcttggatgcttcattaataaggtgattatacctattaatggtataaaatgaagacaattggacaactcgagggtggatgatgtgctgacctgtggtggatatataacgtgttttatataattgaatatataggttacaattaaagccttttttttgggaagtgggaacgccaaattttggtcaagtttgacgactcttagactcagcaatgagataacaacttc

SEQ ID NO: 53913 - DNA, 369 bp, Glycine max
tacggaccttcaaactcagcttcccggagatatggatgcaagaaaagtagtgttcttatcaggaacaaaaaacctttgaaacaaagaacctcgaagggttttctgaggctctctgtactatttatgagatttcacttttaaaagggaaaaaacactataataagaatcaagggtcagaaatcaattacatcagatttcccttatagctccccagcgagacacgtgtgccactctgcctataaaggtggaattaatgatgggtagtgggaaatcgacgcgacggctatcagtgaacgtgcgatcatgacgccgcttcataaaaactggtataagaagagaaaatgtcaacttctcatcttccttcgatct

SEQ ID NO: 53914 - DNA, 173 bp, Glycine max
  unsure (1)..(173): unsure at all n locations
tcgattacaaaaatctggtaatcgattactagatagtaaaaactctttggtaaaagggtttgtcaaaaaatcatgtgctattcanagttttaaaanaactttntaatacttatcttggttgagtcttctcttgattcttgaatctngagtcttgaatctcgatcttgattctt

SEQ ID NO: 53915 - DNA, 430 bp, Glycine max
  unsure (1)..(430): unsure at all n locations
aattcatgcaggtggacgttctactaattattctgacttgcagcaacctnctatcccacttncatttccacctagagcaattccaaacaaaaagatggaagaagtggataaggagatcttggagaccttcaagaaagtagaggtgaacatacctctgctggatgccatcaagcagattccaagatataccaagtttctaaaggagttatgcacccacaaaaggaagctcacaggcaataaaaggattagcatgggcagaaatgtgtcagcattgataggtaaatctgttcctcacattcctgagaaatgtaaggacccaggtactttttgtataccttgcattattgggaacagtataattgagaatgtcatgctagatctangagcatcagntagtgtcatgcctatgtccatttacaattctttatct

SEQ ID NO: 53916 - DNA, 375 bp, Glycine max
  unsure (1)..(375): unsure at all n locations
agcttcaactgtgaagctatcttcgtatctatcatggccaaatatgcatgacagtcggtttgcgctttacaagttgccattgcgggttcccaaagatgaccaagaatatgctggtttatggngaggaacttttggttggcctcctgganagccttctgaagacaagcctgganaggctntattctttcttctgctctcttatgaggagttccagggacaacagcttctcattgcaacaaaaattttggaaggcacacactatgtgttacatcctaacggttcagcaatgtttacagcanatatcaatgatccttcatccgaaccctttccctgggacactgatgcagactcngttccagtgaatatcaagcaagc

SEQ ID NO: 53917 - DNA, 460 bp, Glycine max
  unsure (1)..(460): unsure at all n locations
tatcagcaacgaactgaggagtcccaaactcttcaagagtcttaagacgaactgngtttaccacaaccccaatattgttacttcccatatctgcctcttgaaacaacacagttgcccctgctttatcaacctgttaaaccacattagcaaagactgttcctttaagagaaaaaaaaaatacaattattcatgatatgcttattttgtcttcgccataaacacaatggtaaaaaatcaagggatgtcagtttcatgtcatttctgtttcctgctcatttcctaacagtttttcctttatttttctcactttctagttgaaattgtagttatattattggtactattgaaatattattttatattattaataaatactattatataacaatcaattcccacttgcaacaagtatctatcaattttgctaactctctanattgtgtgaatcactagaaatatt

SEQ ID NO: 53918 - DNA, 435 bp, Glycine max
  unsure (1)..(435): unsure at all n locations
agcttcatcctcagatccctcgtgttgaactatgcttaacttacacagcccttgtaggtttagactaatttaatccaagcttcgaccgcagatccttcttgtaggactagactcagattaaacagctttcgtaagtttagactaattcatcccaagcttcgttcatagatccctcttgtaggactaggctcggcttaaacagcattatcattacaacataataagaaagctaacaccccgtaatccatccctagtaatgcagttattcaaccctgcttctatcaagttctgaggcaacagtacatntcccaatgctnaagtaacctaacagtacacacaagtgggtgatcaaaccaagagtatgcagtaattaagcgttgaaagaagcattgaacacacaaaacacaatttaatagatatagagatttatatcaa

SEQ ID NO: 53919 - DNA, 380 bp, Glycine max
  unsure (1)..(380): unsure at all n locations
ctttatctcttgtgcttgtgcctacattcgttcttttgngcatatttctttccgcgcttcaagatatcttttgcatactttntgctctcatcttgcatttccatcacaatccaaagaagcttcttgttatagtttcattttcttttcaaagcttaaaccttagggtagacgatctattgatttttagtttgcatttctatttaactttagtttatttaagcttagggtttacaatgtacggtttaggtaagattttagagccccatgggggcaatgcctataagaggggtgaaaacccctcatttctgttggaaatcacgatgaacgcgctgagcgcgcctgctgcgctaagctggttcatcgcaattgacaaatttttg

SEQ ID NO: 53920 - DNA, 408 bp, Glycine max
agcttagtcaggtctgtgccagagtcttgttcagtgcttgttatatcaaaaggaaaagttcagaatattcgacgtgcagatcattctcaaaatattagtaacgcactatcaaaatctttgaaaggtatcaggggaagttttcggtctgatgaagatataaacaggtgcgtgcacaagttttacacttataacttccacattcctttcagctattgtgttcaaaataatttacaatttgatgctggaaaagaaaatgttgatgaattatctagtcgttatcctggacttgtgcattaaaattcgtaacaatacttttccaacttatctgccagccttaattgtttactacaattccattagcttaacatagatatattgtattattaaaagtcaaatataaattatcta

SEQ ID NO: 53921 - DNA, 457 bp, Glycine max
  unsure (1)..(457): unsure at all n locations
ttcggggcgcttgttagacatgctcaaacatatattcaaacattntaatatgtacgtatggcattacacgcatgcatgacttgagagacccgtagccatcaagggaaggtaaaagtgtcactgtcactaaaatatgctcaatgtatatgtttttgacgttgatcaatacaacgatttatattatttgtataaataattctttgtaatatttatttaatagtaacattttttacattatcattctttattttacacctttttttatatcttaatcataatttttatatgtatatatataataaaaataaaatggctccttttaaaaactcctattttcttgagaatgatacgtcaacaaagggtaattaatgtggaccacatgcttgagttcgaaacaacctncaataagctagagnttgcctacaatattattcttgaaatctcaatagaatagtaa

SEQ ID NO: 53922 - DNA, 373 bp, Glycine max
  unsure (1)..(373): unsure at all n locations
agcttattcttnccttaatgactgtagatattaatggaaatctatatatgtgagacgatagacatatatagcaaatcatggctggctataagaaagaacgagtaagcaaaatattatacatacaagtgtttggtactgagaagcatatcaagaccaggtgtactgccactngatatgggaatggntccttcaagctgattgtcagctatatctaaccaattcagttttggtagattaccaatagaagccggaattcctccactaaagctggtagaatttaaagatctgccattaaaagtacaaattaacttactttcactgtcacattcacataacagaatattaattcattctggtatgatcatatatacta

SEQ ID NO: 53923 - DNA, 393 bp, Glycine max
  unsure (1)..(393): unsure at all n locations
ctcagcttagaggttgcttgatgagctttacgacaagactgccattgtgtttgttaacaccaagaggaatgcggatcatgttgccaagagtttggataaggaagggtatcgcgtgactactttgcatggagggaagtcgcangagcagagggagattagtcttgaagggtttaggaccaagagatataatgttcttgttgctactgatgttgctggacgtgggattgacatacctgatgtggctcatgtcatcaactatgatatgcctgggaatattgaaatgtacacgcaccggattgtgcgtactggtcgtgcaggaaagacgggtgtggctaccacgttcttgactcttcaggactctgatgtcttctatgacctcaagcagatgcttat

SEQ ID NO: 53924 - DNA, 477 bp, Glycine max
  unsure (1)..(477): unsure at all n locations
agcttaaaggagtactcanagctggtgtatttacccccaaggcctagactctaaagagtctgtcatggcctttctcttctaatttaggaccaatccaaaaaacattttaacacatagactctatctatgaactatacaaaatacacaaatcttctattgttctcaaaataattttaactcatcgtgcctcaaagtgatcaactttgttgggttaccatagtggatcccatcacaatactcgttgcacattaactcgtcgcccttaaagggtcttacaatccattgattgtatgattcatagctcacaactcaatgcacacaacatctcaatacacatgtgatctcacaatttaacacatagtcaacttgtcacttacacacaattcatcacactttcataatcctaatacatcatgttatcaagcctcatgcatcatatacatatcacacattaataagtataatatgctatggtct

SEQ ID NO: 53925 - DNA, 388 bp, Glycine max
ggggtacactaagaacacaaaccctatcctgaaatctcattactccattaggccccactctaaaactactctctctccctgtgactatggactctaactgggctgacaagaatgggtcagacttctgaccctcacggatctcgctcaagagttcgctggttactctcaacataccaaacttaatgctactagaggtgatctcacatgccaaactcatgtctctaaactgctctaagaggtctaactctctaaccatcaaagcagacatctgaagggatttcctactcaaggcatcagctactacattggctttacctgggtgatagctaagctcaaaattgtaatccttaaggaactctaaccatctcctctgcctcatgttaagctc

SEQ ID NO: 53926 - DNA, 313 bp, Glycine max
  unsure (1)..(313): unsure at all n locations
cgatccttaagtcacctgcggcatgcaagctntgacaatgcaatctttcccanaactttatcatggtcatgttctgagcctcccatttctgtgtgcaaagatctaagctgtttctcanagtcctttctaagatactctgctttgattctctggcgttgcgcttcatcttgcttttcccataactcatgtagttttagagcaaattcatgcatggcctctgccaccccagtttctgatattctactcattgcatgattccaatcattgcaaattataaaaactggtggggcatcaagctgacttggagagaaag

SEQ ID NO: 53927 - DNA, 474 bp, Glycine max
  unsure (1)..(474): unsure at all n locations
aacgtaattaattagtgctctnttattatatattttaaaattntgtgtcaacaaaaaataaaagtgagcgttaattaaaatctttnttcattatattccatttttattagtgtaaatgactattgttttaaaattaagtgttaaataagtttttagtcttaaattttttttgaaatttgatttttgttgtttaaaattttgtttcactgatcaaattttttaattttttttcattaaagtttttagtttataaacttttgtccgaatagttaatgttccttaacattttttcattaagatttttagtttatgaatttttaaaaatttaattattagtcttaaaatctcattaaataaataaaaataataagtttaaactttntttaaggattaaaaactgaaaattttaaaggtttaggaattntaatcggtcaaataaaagtttaaagattaaaaactctaatgaaaaaaagt

SEQ ID NO: 53928 - DNA, 393 bp, Glycine max
  unsure (1)..(393): unsure at all n locations
agctngaaggcaaactggatgcgttggtcttcttggttacccagctggccttgaatcagaaatatgtacctgtcgcaagggtttgtggtttgtgctcctctgctgaccaccatacagacctttgcccttccatgcagcaacctggagcaattgagcagcctgaagcttatgctgcanatatttaccatagacctcctcaacctcagcagcaaaatcaaccacagcagaacaattatgacctctccagcaacagatacaaccctgaatggaggaatcaccccaacctcagatggtccagccctcagcaacaacaatagcagcctgctccttccttccaaatgatgctggcccaagcagaccatacaattctncaccaatccaacaacatcaaca

SEQ ID NO: 53929 - DNA, 479 bp, Glycine max
  unsure (1)..(479): unsure at all n locations
ntctccgcgaggtacgtaggtcaaattcgngtatgctaagtttccttgtgagtggtttgacccaaattgagagtggcatcggataataaagaaaaggtttttgtttgcgattgtacaggctccgctcacgtgcgtgttgctgggttctcttgatcaaggtaacactaacttctatacttcatttgacctattttattttttctggtagtaataagtaatggtgcatgatttttagtaaggtgttattctgtttgcactataacagagaatcaaccatgatttctgtagatggatccacaggggtcttgaaattgcctacaattgctttaacattttaccgtccaacatagggggcttgaccattgtttttttaacatattttttgtttcttgagcaagtaatgcttaagtatagataaagctccctccaatttgcctttaaagtgcacatgggtgtatcttgtatacttacccttcaat

SEQ ID NO: 53930 - DNA, 422 bp, Glycine max
  unsure (1)..(422): unsure at all n locations
agctntngagtgaaaggatgtgactcttcacatttatatntgaatttcaacgttcaagggcactggtaatcgattaccaatacattgtaatcgattacagccttttgaaaataattggaacgttgtaaactcagtttgaaaactntttcaaactcattttgctactggtaatcgattacaacaatatggtaatcgattaccagagagtaaaaactctttggtaagggttttgtcacaaaaccatgtgttattcaaagttntgaaaaaactttntaatacttatcttgattgagtcttttcttcattcttgaatcttgagtcttgaatcttgatcttgattcttgagatcttgaatcttgaatcttgattcttgattctagggattcttcttgagtcttgaattcttctttattcttgaactc

SEQ ID NO: 53931 - DNA, 428 bp, Glycine max
  unsure (1)..(428): unsure at all n locations
tcttatcctaagctcatcttggtggtgaagctccttcttccatggcttattccctagtttatagtgccttctctcacctcttctcctttgtcttctgctccatctccatggtggaaaatcaccattaaaggacctcactgaagcttgaagatccagcctccatagaagccccacaagcaagcttccatcaagtggtaatcaaagcacaagagcttcaagtaggtgctccttaaacctccattaattgttttcgctctaccttctcttccattgttgtttcttcatttttctccatgtatctcctcacatgtcttgtgataaatattgttaacatgattctttagagtttccaccgattaaacttggtatagaagctagatttgattntctatggttcaaatttcttgttcttgttcttgaaccatgaa

SEQ ID NO: 53932 - DNA, 383 bp, Glycine max
  unsure (1)..(383): unsure at all n locations
agcttatanaataacctctattaacttatttagttgcttcacagtaaagcttacaaantaaccttgatatgatactatgatagccaattaagggcataatatgttgcttctttntaattatgttgtttacctaaatgcactccaagtagaaatccttagggtatgnttggaatgggcgtacagcggagtggtaaggaatggagaggatgaaagaattataccattgtttggtttataaaaaataaggatgggagaggatggtaactgatggatcctactccactgttcagtaccattttcatccccctcaatctggggtgcagaggatggagcacannattcctaanttataaaatatctaatttgatttcttttnttataaa

SEQ ID NO: 53933 - DNA, 468 bp, Glycine max
  unsure (1)..(468): unsure at all n locations
tgtacaccaccaccacacagaactntatctataaatgattctggactttgctcgaaaaaacatacagtcaatgtttcttccatccagaggaatttgatgtcatgttatgacaataaaaaaatataacaactccttgtacatccacatgccaagccactgatcgttattccaatatcacacagtctcacattcatataggtatttttttttgttatgctattattaaatatctacatacgcacattttgtttattattacatccttttcaaattttattctacagtcaacttatatataggatgtcatattgtctgtttattatgcagatgaacatcacacaccaactaacactacacacgatgatcaatttgtcacccatgacatctcagattccaccaatgatgatgtaaatatcacacaggagaacatcaatataggtatttatccattatttatatttaatttta

SEQ ID NO: 53934 - DNA, 394 bp, Glycine max
  unsure (1)..(394): unsure at all n locations
ttaagtcacctgcggcatgccaagcttgaaggtgcgntagcccaccatttttcatagtataatactggtaatgtgtctactatcattatcattntttctccgtcattgaggtgccacttgagttgccaggtctctccacctttgggcgtattctttgaaatatctgtgcccctttttgcacatgttctgttgttgcatcctatccggaaccatatcaaaattgtactgatactgcctaatgaaggcaaccattatgtccttccaagagtggactcgagaaggttccaggttagtgtaccaggtaacagctaccccagtcagaatttcttggaaggaatgtatcagcagntcctcatcttttgcgcatgcccncatcttccgataatacatcttt

SEQ ID NO: 53935 - DNA, 487 bp, Glycine max
  unsure (1)..(487): unsure at all n locations
ttcttgaganaacttctntgagaagcttctntgagaaaacttccttgagaagctagagcttagctacacacacccctctcataactaagctcacctccttgagaagtttccttaagaagattcctaaagaagctagagcttagctgcacatacctctctaatagcaaagctcacctccttgagatgagaagctagaacttagctacacacccnctataatagctaagctcacccccatgacaaaaaaaacatgaaaatacaaaaaaaagtccttactacaaagactactcaaaatgccccgaaatacaagcctaaaaccctatactactagaatgaccaaaatacaaggcccaaacgaaggaaaaacctattctaatatttacaaagataagcgggctcatacttagtccatgggctcgaaatctacccttaaggttcatgagaaacctagggccttcccttggatctctatcctaatctacttgga

SEQ ID NO: 53936 - DNA, 257 bp, Glycine max
ctagtacatcctaactagcctaaaactaaactaaataaagtagatgatgaatgttcaagcatccttaggttcaataattttgtcgtcgagctataaaaacgactaatgccaatgaatggaacatgtcgcaagttataagatatttgtagcaacttagttatctagataagataattaagataagatgaagccaaatatattgaaggaccggagcaaaggtgtaattatggtgactatggctatgactcttgagggat

SEQ ID NO: 53937 - DNA, 448 bp, Glycine max
ctttgtatatatcgcgacgctcataattgagaatgaaagctcataggcaatgcatactgcaatatcttatgactcggatgtacgaatgaatcccgtcatacatcgagacgcatcgaatagacaaccgaagctctgagctgattctatcgaccataacctcttactcggatgtccgagtaagtactctaatataaccagacgctacatatcgaatatcagagctttgcgcgaatggtggcgataacacctgcttacttggatgtgtgattaactactataatatatcgctactccttatatcgaatagaagtcgctcaggcaaacatacgtatctacctctttctacaatatcgacaccctcgagactaccatagatgtgtgcctcacaccttactatactactagtaggagagaattgctcacgtcttatgagacgaacatagctccg

SEQ ID NO: 53938 - DNA, 362 bp, Glycine max
  unsure (1)..(362): unsure at all n locations
agctttcgattattctatgctctctgttggtcccattgngtttcggcatatttattctcgtttagttactttntataccccctctcgacgtgcttaagccattttacttaagtcattcctcgcttaacttaaaaataaaataaattttcatcgaacgtatgaattgtattatccgttaacttcggttaaaatgaattccgaccgttcggtcgtgccgtaaccacgttggaaatcaaaatagaggtataaataatatcataataatactaaacacaaacatcttttagtaaaataaagcgaaaaatcaatcggacgttttctctttgggacttctcatctctaatcgaattgattaataacta

SEQ ID NO: 53939 - DNA, 468 bp, Glycine max
  unsure (1)..(468): unsure at all n locations
ggtctcagcatctatgcgagacaganaccaacatgttagctatcatcgccaagtaccaagaagagttgggtctagccacggcccacgagcatagaatcgcggatgagtatgcccaagtatatgcggaaaaagaggctagaggaagggtgatcgactctttacaccaagaggcaaccatgtggatggatcggtttgctcttaccttgaacgggagtcaagaacttccccgattgttagccaaggccaaggcgatggcagacacctactccgcccccgaagagattcatgggcttctcggctattgtcagcatatgatagacttaatggcccacataattagaaatcgttaggaaacttgtatggtctctcagaccttgactagatatgatttctttntttgaaataaaatgagttggtcccatgtttctactccaaaagctggtgcanatcanatcactcctacatctc

SEQ ID NO: 53940 - DNA, 218 bp, Glycine max
agcttgtgtcagcatctatgcgagacagcttccaacatgtcagctatcatcgccaaggaccaagaagagatgggtctagccacggcccacgatcatagaatcgcggatgagtatgctcaagtatacacagaaaaagatgctagaggaagggcgatcgactctttacaccaagaggcaaccatgtggatggatcggtgtgcccttaccttgaacgggag

SEQ ID NO: 53941 - DNA, 93 bp, Glycine max
tttaatcatgctgcctagacgaaagaaaaaactggggcccatacacaaggtgaggatgatggataaactcctgttgggactagccttcctata

SEQ ID NO: 53942 - DNA, 334 bp, Glycine max
agcttgcaaaaatatataatagttatactttgtcaatgtaactatggcctcaccaagccttgttaccaaaatattgtggcaaaatcatgttcagtgtgtaaaaataatttatattggcagcaaatcaattataaactcttcagtaaaagaagagactaagaacactactacgactgtagaacaataataactccatcataaagatcaattgcccaacaaagctctttgtaagaagaatttacctggatactaatatttgcaccatggaaagactcctaagagaatctttctaaattttcatcccgttgtctaagattcactaagaatggtatct

SEQ ID NO: 53943 - DNA, 328 bp, Glycine max
gtacttttactttcacgtaatcatacattgtcgtctgtggtaagattgatgatggtgaattctgattagtttgacggtataaaaattgtttggtttggcggtataaaaattgtttgtattggtagtgcatgaaaaaatagtggcttgaagttcttggcggaatttgaacaacaaatgttgttatgattggtttttgaatctggtttgtttagctttttgatatgttgatgtgttttgatgagatagtgctggcgattttgtagaaatcggaatcggtgcttttgtttctgatgcgtataattaggtctgacttttattgagtattaat

SEQ ID NO: 53944 - DNA, 127 bp, Glycine max
  unsure (1)..(127): unsure at all n locations
agctggggtcgaggttcttacttctngaatactgacgaacgatgaataacgaatgaagaacgtctaagaacggtccaccaccttgacgatggcactcgctgaatccatacggagacgttacggcaga

SEQ ID NO: 53945 - DNA, 394 bp, Glycine max
  unsure (1)..(394): unsure at all n locations
ntataagtgcgggtctgggagacaaaggtcaagtggtcgctatatgtgaagatgatgttccaagaactctggatttggtccgaccatgccctcctgatttccagctgggaaattggcgagtggaggaacgccccggcatttacgcaacgagcataatgtaaacctttacggttttaaaagctctatagttgggcctaggctttagagttttcattttgttaaggctttgtgtcttttgtttttgaatttataatacaaggatctttcttcatctgttcctagtctctacccattctcattcatttgcatgtttttcttanacggcagattcgatgacgagtcccccgaaggtactaatacctgggacccgtctatcaacttcgagcaagaaatg

SEQ ID NO: 53946 - DNA, 374 bp, Glycine max
  unsure (1)..(374): unsure at all n locations
agctattcaattcattctatgtacccgtggtggtccacattatgttgcatgtanttttattcttgttttcgtctactttctatacccccttttaacgtgcttaagccatttatttaagtcatttcttgcttaatttaaaaataaaataaatttccaccgatcgtttgaattgtatcatccgttaattntggttaaaatgaattccgaccgttcggtcgtgccgtaaccacgttggaaatcaaaaaagaggtaaaataataatataataataaaacaataccttgtagtaaagtaaagcgaacaatcaaatcggacgttttctctctgggttttctcattcttaattgaattgactaataactaaagtgaaacta

SEQ ID NO: 53947 - DNA, 442 bp, Glycine max
  unsure (1)..(442): unsure at all n locations
tgtgaagtgtgtggaattcctatagcaattcccttatgttatcaaacataaaaagggaaaaggtaatattgtagccgatgctctttctcggcgtcatgcattactttctatgcttgaaaaaaaattgattggtcttgaatgtttgaaaagcatgtatgaaaatgatgaaacttttggagaaatttttaaaaattgtgaaaaattttcagaaaatggtttctttagacatgaaggctttcttttcaaagaaaacaaattgtgtgtgcctaaatgttctactagaaatttgcttgtttgtgaagcacatgaaggaggtttaatggnngcatttggggtccaaaagactctagaagcattacaagaacaattntatatgcctcatatgagaaaggatgtgcagaaattttgtgaacattgcattgtatgtaaaaaggcaaagtct

SEQ ID NO: 53948 - DNA, 227 bp, Glycine max
atagcaacaacttctcttccaatatatgcagaacaagatcccaaacaccggaatgaaatcggaccttctcattgccgttagataagtgccgcccattcaaagtcgaccaaactatacattgagagtcgatgcatcgagaacacgtgcttgtaactatcaatcacgatatgtgtttgagacaagacacttggacacatattatttattcatatgactatcgatgtata

SEQ ID NO: 53949 - DNA, 397 bp, Glycine max
  unsure (1)..(397): unsure at all n locations
gtgtgtcttgtgatgngagctgaaaaagactcttctttataggtgtgtaagctcgatcacaaaggatggcatggccactagctgccatgttttcaatcaactccgtaacttcatcaagtgtcttcaatttgatctttccaccagtggaagcatcaagtaattgcttcgaatggggtcgcaagtcatcaatgaatatatttaactgaatcgactcgctaaacccgtgggtaggagtcttccggagtaaaccatggaagtagtcaagagctttactaagtgattcatcggggaattgatggaataaagagatttccaccttcccctcagcggtcttggactctggaaaatatttctttaagaacttctccaccatctcttcttatatctgcaagttatt

SEQ ID NO: 53950 - DNA, 268 bp, Glycine max
  unsure (1)..(268): unsure at all n locations
gtttgtcatttcaatttctcactaagtaaaatggatcattntcaaggaccaacgccttaaaatgatcacctcttacagtaaaaaagaatcacttgataagaaagaactacgtaggtctgatttcctcatcgcaattgaggaatacgtacgagcaaagggaaacacccttgtcgaccacaaagagagaaaaatataaacagggtataaaggatataaggacttataagggaacatacaagatcaaggtcatgtttgcacattcgattaa

SEQ ID NO: 53951 - DNA, 407 bp, Glycine max
  unsure (1)..(407): unsure at all n locations
atgctacnctcaaaacaaaaatggcatacaacctcctccaataaatacaaacatcaatgtaaatgtagagcaagcttatgcgcatacttctttacgagcgttcacttgcacaagacattcttataactaagaaaaatgcacccatatacaatcaaggcaccttcgttacctagattatttatatgtaattccaaggtgtatttgttacctacatcacacgcatttcctttgctaaatttacatacatgcatactcaaagcactttggctatcaaaaattgcatacgtgcacattttggtatttctaatacctataaacacaaacttcatgatgaatcttgactatctacacaataaggtgctacatttcatgcttttttttcaagtttttnnttttttttactacct

SEQ ID NO: 53952 - DNA, 333 bp, Glycine max
  unsure (1)..(333): unsure at all n locations
cccatcacatgtggtactangtggcgatcgggcgatggtgcacagcatgttttccacatccacatatcacgtataaacccatcatcccttgttgcccacctgcaactgagctcacgtactcccacgtagcccatatcctctttcctctcaacgccggagccccatcaatcctcccaagcttccccaacatgcaggtaattcaacatcccatcatcacatactaacaaaccaagcagaacaggcaaaggcagaatactctgcccagaacacanaccagaaatcacagctttttcacatacaaatactccagtaacattttcttcgttccaattc

SEQ ID NO: 53953 - DNA, 460 bp, Glycine max
  unsure (1)..(460): unsure at all n locations
tgatagagggaaaacttcanaaccttgccattngagcttgtatattctctttcctttaacactnntactatcattatctttttaccttctcttttccatgaatatattctttcttcgaggtaaaagccctactagtgcttctcctccttttttgaaaccttgcgtggctagtccttcttcatagactcttgccattgctccttcttttaagtttttcaccattgctccatcttcgaagatcgctctaatgtgaagaaggcttttaaaaaggctatcaggccataggccaggccgagctaaaataaaagccttagataggctataggccaaactcaggcctaaaaaattcatcttatgctaggctcaggccttctaaagcctggcctgggctattcccacccctagttcanatgaacatatgaatgaccaatccgtatacagattacatcttagtggatac

SEQ ID NO: 53954 - DNA, 199 bp, Glycine max
  unsure (1)..(199): unsure at all n locations
gttgtcataccctaattgcatgcggtgacctatgcttgatgacatgcaactctngtgtggtcctcgtgaggagcttggcacccatcattacgcaagttgagaaattccaggacatgccgtaaaacaaaagagaatattgatgcacaatgcgtaaggctccgtgacacaccggagatcaaatggaagcatcgttgcgcaa

SEQ ID NO: 53955 - DNA, 372 bp, Glycine max
  unsure (1)..(372): unsure at all n locations
agctttccgcaagacttacggaaagatcttatagtttatcatagcagaagtgtccatagaagccattgcatcactcacccaatactacgaccagcctttgaggtgcttcacattcggagatttccaattagtaccaaccattgaagaatttgaggaaattctaggatgtcttctcggnggaagaaaaccatatctttcctccgggtgtctcccctctttgagcagaattgcaactgtggtcaaggattcagcaagaggtttggaccgcataaaatagactcgaaacggcatagcgggcctaccacggnggtacctataagacaaggcgaggggtatggccaatcaaggagatnggcgtcccgttatggatgt

SEQ ID NO: 53956 - DNA, 444 bp, Glycine max
  unsure (1)..(444): unsure at all n locations
tagggatggaatacttacttgttggtgatgaacaaaagcgctaaacagaatcaaaaaatgcgaaaaatgatgaccctagggctgcaaactcgtaaatcccgtgggtatggcttttgaaaggggggaaaagaagtttttgaatgcaaaaacgtcccccctttcgtcacttttatattttggtgcagaggtggctcgcccaggcgagctaaccttgcattttttttttttgagaggaacattaaccatgtcccctccttcctttatggttagcgctttgcctaacttgaacttacttaagttagaattaggcgttgattacttattnttaaaacaaacaaatagtaagacaactgcgaatacaaaggatacggggcttgcttgcagtgacgttctctgcttgtctagcgcagagaanaggcaatgatcagtcggtcgtgaccccat

SEQ ID NO: 53957 - DNA, 382 bp, Glycine max
  unsure (1)..(382): unsure at all n locations
ggcagcaagcttgagggttaaagtctcactatngtctcgtgttgatgcaacaattgttacccgtggctatacgagacatcttgccaaacaaagtcaggttagccataactcgtctgtgctttntcttacatgccatatgtagcaaagtcattgatcctgtcacagttgatgagctgcanaatgaggccgcacttatactgagcctagtggagatgtattttctacctgctctctttgacatcatgattcacttgattgtgcatctggtcagagaaatcaaatgttgtggtcctgattatttgcggcggatgtaccaagttgagcgatacatgatgatcttataagggtatacacagaatctatatcatctagaagcatctat

SEQ ID NO: 53958 - DNA, 469 bp, Glycine max
tagagagtattaagttaatatttagtgtataacatataattttaaagtaattgggcaattgcaaacttattttaaaattggtttacaaaacttcactttgtattgtaatttagaattaagaaatttgagagtcttatttttcatactctctcgactatctttgattttcatccgtatacattataattcttatctgtccgtccctctcaacctatctctatattatttcaaagtttaaaattgattacctctccaaaaaacgtttagtttaaatacgtacaaaatactatattgtcaaagcacaatgaatgcatctactctcataggaagtgagtggatatatcatttatagaatttacaataagttaagagtataaaaaattaacaagtgggtctatgtttctttgaaatatgactaaaaagactctcatttatttcttatacaaaagaccagaatcagtataactta

SEQ ID NO: 53959 - DNA, 468 bp, Glycine max
  unsure (1)..(468): unsure at all n locations
tatgtcctcagccggactaagcacgcgctgcactggagcaaataatgaaatttgaatcctggagaaagtaagggttcggaaccctctatctcangcttcatactttcatattctggagctccctatatttgttcggcgggcacttttgctactttcataattgtgggtggtcaactgactgctggtggtgtactttctgctcttgctactntcangatccttgcagaacctttgangaatttttccgactnggtgtcaacaatggctcagacaaggtttctcttgaccgatatctgtttcctgctggagangaatgcangaagatcaactattgtcttgcacanggcatactaacatgtatagaaataaggatgtatctntctgtggaccctcttcatcttangctacctatcaagataatatgaagtgaagaagatcgcgtgctgttgttgatggttgtcaagaact

SEQ ID NO: 53960 - DNA, 469 bp, Glycine max
  unsure (1)..(469): unsure at all n locations
cggacacttagatactcagctgaatttaggagcatcctgcttctcagccacttncaatgtgctttcctcaactgtggtactgccattagccagatcagctcctgacttgcagtggtccaccttgatggtttctgattcagttttggctggagaatctttgatggcatcaaaagacactccagattgactctcgatgacagatgatgatgccttaaatgtttcaatgccaggtttgcactgcttctcaaacatcatctgaaggtaccttccttgttcttctattcgcaactgtagatttctttgaatctaacatagaaaataggagagaactgtatcagatcataccatgaaaaaaggaacaacaaccataagagacaagtgggcgtgccttggaaatttcatgcatgggatataacaaaagtcccataccccacaattctattatgcataaatgccaaataatataaca

SEQ ID NO: 53961 - DNA, 346 bp, Glycine max
  unsure (1)..(346): unsure at all n locations
cattaatngaacgttatttntccagtttgtgacgagattgaattcacgttcagccgtaactgagaaacacacacactatgttgtattatatttgattgaatagcataaattttttatattattctacaaaaattatcactcctctagctcactatctctttgccccgaacatatatatgattgaatagcatacatgttttcagttttatcgctgttggtataaataaagttataaagacaatcttcgtaaacacatatatatatatatatatatatatatatatattagggcattcataccacgagttngaactttgaagaacaatatatatngtcagtctcatct

SEQ ID NO: 53962 - DNA, 453 bp, Glycine max
  unsure (1)..(453): unsure at all n locations
nggtgccatataattatatgcatacctttgttgcattgtttccataagtcaattagggtagactgttattatagagctatccttgtactctatttttaatgagatagtaatacaatttcagtttgttcaagaatcttatgtcattgttgacatctgcacttttcttgcagccatgggcatcttacaatatcagacattgcaaggaaagcttttctttatagtgtatgtttcttgttttatttattggtattgtatatgagtttattgttgcatatggaactgatcttctgctgttatcagattaagtctaaggatagataataaggcatcttctcaagaaataacaaaataaatttctacaaactaagattgagtcatttaacaaggcttgtcaatctccacgtgtaacatagaanacactccaaacagtccttgagcagaacaccacatact

SEQ ID NO: 53963 - DNA, 351 bp, Glycine max
agcttcatccttagatccctcttgttagtctatgcttaatttagacaaccctcgtaggtttagactaacttaaacaaaactttgtcctcagatccctcttgttggactaggctctgctaaatcagcttacgaaagtttagactgatttaacctaagcttcatccgcagatccctcatttaagactaggcttagatcaaacagcattattgtaacagcatatttaaaaccaaaacttaatccgcagatccctcatttaagactaagtttcaatcttgcttcaatcaagttctaaggcaatagtacatttcccaatgctaaagtcacctaactatgcacacaaatgggtgatc

SEQ ID NO: 53964 - DNA, 439 bp, Glycine max
  unsure (1)..(439): unsure at all n locations
ggtatagttccncaatntatggggtatttttattaaaatgttgtaataaatcttggtttatgggtaacgttgtctctagaacatttccattatatttaaagatgaaatctgtgcattttcaggtgaaaacaaaggctaagttttgaattgcaaaaagtagtagttgggctaagctcaatagtttggctaagcacatatccatcactaagcgcagcttcaacacacttagcgcanaggagaatctggcaaagcatcagcatcaaagccgcgcgctaagcacagcaggtgccttcagccaggctaagctcgggacatgcgttaagcccgaatccacttactcgcgctaagcgcagcatcgcgatttcagagcctatntaaaacctgtcttgtgcagaattagggtacacttttgacacctttcatgacagcttatacagaa

SEQ ID NO: 53965 - DNA, 427 bp, Glycine max
  unsure (1)..(427): unsure at all n locations
agctngaactaacacgtgtatattagtctactcanaggaaataaagtcaggcagaaagttaaccctagttcttaaggaggaagccttgtcctcgaaattaaggcccatactctcttttctctctccctccctcactcgtcttcttctctatctccttccccaccaccagcgtctctaacattggtccgacctgccgccgccattgccatggctgaccacaccaccagtaaaaccaccactgatagattagaagatgcagttactcgcctcacccacaaccaagcttctcttaatgagaaatacacaaagctatcaggtaaggtcgactccattcttgaccacttgcgtctccacgaggcaaccccgagccattccagtcctcgagtctccttctcacagcgaaacaatgtcaagctagatatcccga

SEQ ID NO: 53966 - DNA, 472 bp, Glycine max
  unsure (1)..(472): unsure at all n locations
tttacccatatattgttgtcgccctctcctctcatctgcttctcatactataggagagcgtatctgccttcatactccattcacaatttcatgatgattctaggtacatatacataccagaaacaagattccatataagaattatgttttcattatttaacacatacataacataatcatgattctattacgtatatgggtaactgggttttaattaattctttaatctttttttagatatttatttaaattaacttttaatattatggtattcattgttttaacaaatttcatgtattggatttagagttttgtaaccaaacaaatatgtggacctaatctgttgttgatttattgtagaaattgaattaaaggacgaagctggaatacatttatctttttattaagctactatgccaagtgtttggggaacatgaatgaagcanatgataatggattgagaaattcaata

SEQ ID NO: 53967 - DNA, 319 bp, Glycine max
agcattgacgcaacttttggttatgtaatgagacaacgagatgatgcgctccatgacaggttggatcaaatgtagaatatagatcataatgtagaagacaggaggagaagagggaatgatggtgtccctacacaacaccgaattgatgctattatactcaacattcctccatttaaaggaaagaatgatccggacgcctacgtggagtgggagatgaaaatagagcatgttgtctcatgcaacatctatgaggaggaccacaatgtgaagctcgccgccactgagttgtcccactatgctctcgtgtggtggaacaagc

SEQ ID NO: 53968 - DNA, 368 bp, Glycine max
  unsure (1)..(368): unsure at all n locations
gcttctttcggacctcgaacaaccaattatctcctctatcagaaccatgctatgngctcgcgactggtctctttctgtccttctcaacttgagttcactattgctaccccatagagctccgcgaaatttgttccggccatactcttccttgcgagccctcttggtctcttgatcaagggctcttgcggaaattgcattctcttcccgtaacccggcacactccttacgaacgtgtgtagcggacaactcgaacttctccttggcaagttcttcctttcctaactcgcttgtgagagctaggacttcttcgtcctcttgcggcgcttcaaaactctcttcgctgacgactattaacttcgtatatgaac

SEQ ID NO: 53969 - DNA, 471 bp, Glycine max
  unsure (1)..(471): unsure at all n locations
atactcagcttataagtgcgggtctgngagacgaaagtcaagtgttcgctatatgtgaagatgatgttccaagtacttcggatttggtccgaccatgccctcctgatttccagctgggaaattggcgagtggaggaacgccccggcatttacgcaacaagcataatgtaaacctttacgggtttaaaagctctatagttgggcctaggctttagagttttcattttgttaaggctttgtgtcttttgtttttgaatttataatacaaggatctttcttcatctgttcctagtctctacccattctcattcatttgcatgtttacttctttntctaaaacggcagattcgatgacgagtcccccgaaggtactaatacctgggacccgtctatcaacttcgagcaagaaatgaatcanacggaagatgaaggagatgaggatgtgggacttccttcggaactagaaagaatg

SEQ ID NO: 53970 - DNA, 434 bp, Glycine max
  unsure (1)..(434): unsure at all n locations
agctntnggtcaaagaagaagaagaagtttatagatactcaaggctngtaaaggattgattggaaaagtaaagtgtgaaagaatgaattgatttaaaatgcaaaacaaagccttgcttttatagactcttcgtgtctggtcaagaagaccatttagaagagttataacttttagaanaacttaaaaccaatctgaaaaagtcaaaaaccttttgaagagttacatcttttgatttatcaganatagtcactggtaatcgattaccaaataactttaatcgattacacaaagcttttatgtgaaaacatgtgactcttcacatttngaattgaattcaacgttcaaaggcactggtaatcgattaccaaaatactgtaatcgattactgctttttgaannataatggaactttgtaattcaatttgaaacttttc

SEQ ID NO: 53971 - DNA, 460 bp, Glycine max
  unsure (1)..(460): unsure at all n locations
agatgctngagtgtccgcatgggtgcaagcatgatcagttttgcataattttctaaatcatcattggtatatgcgtgtcatggaaataatatggngcattcccttatccctgaaccgcttgccaagcaaatacccaaacatacgccatgtcttgccttccgcaagcctttaagccataaaccttgacccaggattggagtttttacccttacccttggaagaaagaacaggaggcgctcccaaaaaggagtttcatttaatgttaagttgagaatgtgctttagaaagaaaaggaaaaagagaaaattctcaatcaaagattggaggaaaagacaaagaagagagaaatttcccaatcaaagattggtgaaaaaagaaaagaaaagagaatattcccaatcaaagaatggaggaacgcacaagaagaggaaagtgagactactntagtctccatgtcatc

SEQ ID NO: 53972 - DNA, 373 bp, Glycine max
  unsure (1)..(373): unsure at all n locations
ctgaattgcaacgttccaattatnttttatatggcgtaatcgattataatatattggtaatcgattaccagtgtatttgaatgttgaaattcaaattcaattgtgaaaagtcacatcttttcataaaatgctttgtgtaatcgattacatggttttggtaattgattaccaatgacaagttttgaataaaaatcaagagatgtaactcttccaatggttttctcaagattntctcaaggttataactattccaatagttttcttgaccagacatgaagagtatataaaaacaagaccttgacttgcattntatgtgcttgatataactntttcataacttttgaacatctctttgaaattcttcttattcttc

SEQ ID NO: 53973 - DNA, 422 bp, Glycine max
  unsure (1)..(422): unsure at all n locations
ntcttgagaaanattccttgagaagcttctttgagaaaacttccttgagatgctagagcttagctacacacacncttctcataactaagctcacctccttgagaagcttccttaagaagattcctaaagaagctagagcttagctacacacacctctctaatagctaagctcacctccttgagatgagaaactagagcttagctacacacccnctataatagctaagctcacccccatgaaaaaatacatgaaaatacaaaaattccctaatacaaagactactcaaaatgcctcanaatacaaggctaaaaccctatactactagaatggcaaaaaatacaagacccaaacgaaggagaaacctattctaatatttacaaagataagtgggctcatacttagcccatgggctcgaaatcta

SEQ ID NO: 53974 - DNA, 436 bp, Glycine max
  unsure (1)..(436): unsure at all n locations
gtcacctgcggcatgcaagctntannaattgaattaaaatgttctgtttctattgttaatcaattaccatccatgtgtaatcgattacacattgtaagatttgaattcaaatttctaatgactgttgtaattattttcagctgcttgtaattgactacaatcctcatgtaatagattacatgccttcaaaaatattcaaaatcatttttaaaagcgttttaagaagtgttttggccactggtaatcgattacatcctctggtaatcgattactagagagtaaatctcttgtaaaaatattntagcttanattcattggccaaacctcttgtcgtttcaacttggaattcccttcctaaatcactagagattntcttgatgatgtatcttgaatttcttggattcttgtctttgaataaacttaagaagtgcatgat

SEQ ID NO: 53975 - DNA, 440 bp, Glycine max
  unsure (1)..(440): unsure at all n locations
ntagaaaatgatttctatacaaaagttagtcgtataaagcgtattaacaaactctctcactattatagttntgcttgtccttaagcaaagaanaaacggttcacttgtccacaagttacaaagagagtggccaatcaaaagataatggtgtttcattcatcaaggacatcaaccatataaattgattaccatgaaatgcttaaatcaattagttctcacaagctgcagttttttcgaagataagaacacaagtattagagtcacaactgaaataagctagtaagcatgactgaaatcaaggaaagatcatcaaccaaaacctcacagtcattgtttcactcaaactcaagtgtttaggcttattccatcataaacaaccagcacaagttccaacctttgcatttcatctcctatcatacagtaatgaacacacaaaaatg

SEQ ID NO: 53976 - DNA, 279 bp, Glycine max
gttcagcccgttaagcacttgtctctctctctcgaaatagctgaggaatattagttccgtgaagaaaatacaagcgaggcgcttacgtaccgtgtcgtgagtaattacgcgaagattctcgaccgttcttgcagattcatcgttcgttcgtcgtctgttcagtcttcaacggacaaggatctcagaccgagcttctcaattcattctatgtacccgtggtggtacacattttggacacgtatactattctcgctccatcgatctttaaccccctttgac

SEQ ID NO: 53977 - DNA, 214 bp, Glycine max
tgcgcccgagtcccatgcaatgatataggtgacatcttacattatacatttgcatttactctgattataccactaaataggcgaatcctctggattataggcactacaactggctaaaactttactctcacctctcattagaattctgtttagtcataaatttgtcggaacgactctaatcgagtgacgtctgtcaccgtgaaaacatacgccg

SEQ ID NO: 53978 - DNA, 315 bp, Glycine max
  unsure (1)..(315): unsure at all n locations
cgccatgaanagtggcacatcatatgttaacattactggtataacttgtggacccggccacggtataaggtacaaatccattttcatcatggaaattngattcaatcaatggaaatctgtctcatctctcttccttttggccatgtgttcagtgttggaagccttgngaaaaaaggaacttgtcaaacagtggagcatgttcatgtaaacaactgcaacttcaagggagcagataatggaatgaggataaagacatggccggtacgtagaaatatatattgattaaagataagatattattttctgtaaatacac

SEQ ID NO: 53979 - DNA, 425 bp, Glycine max
  unsure (1)..(425): unsure at all n locations
gcgagacgcaagcgtgaagaagagtttgatgatgccaatagtcattcatatcctttatcaactaanaaagaaattgatttcaagaaagaattgtcttcatggataagttaagtaaacatcaagcaatccaagatattcaagtaagattggctagatagattcctaagttacatttataagctagatttgaaagcacacagatttggtcaagctatctttctttcanaacataattctaaaatttattctctggtaatcgattaccaaaaatacaaaagcttgctgaaattcatttcgaacatttttcaaaggttttcaaaatgtgttatcgattaccaacatattgtaattgattaccagaagcttaaacatttgaaaatgccttcanaagagtgtaaataaaattaaaacatgtaatcgattac

SEQ ID NO: 53980 - DNA, 358 bp, Glycine max
  unsure (1)..(358): unsure at all n locations
agctntgaggatattcanacgactttaactttttcactgatgncngannnagncccgtaatttatcgagactcacganatcgaatggtgaagctcagagcaaattcaaacgacaataactntttactcggatgtctgattgagtcccacaatatataaagacgctcgaaattgaatgttaaagttctgagcaaagtcaaacgacaataactnnttactcggatgtcggattgagtcatgtaatatatcgagatgctcgtaattgaataccgaagatctgagcatattcaaacgtcaataactntntacacggatgtgctgatgagtcccgtaatatatcgagccgctcgaaattgaat

SEQ ID NO: 53981 - DNA, 412 bp, Glycine max
  unsure (1)..(412): unsure at all n locations
agcttccatcaagtgttatcatagcacattatcttcaagtaggtgttccgtaaacctccattaatttttttgctttaccttctcttccattgntgtttcttcattnttctccatgtatctcctcacatgtcttgtgctaaatgtttttaacatgattctttagagtttccaccaattaaacttgctatagaagctagatttgattttctatggctcanatttcttgttcttgttcttgaaccatgaattgtgttgagtttaggttcctttgagttttgtcttgttattttntgtggctgaaacctaaaccatanaattcttacaaaaacattaaagtagaataaaacctcanaaatctagagtgactttgttacctattgtagttntgtcatagaagtcatgtctagtcatg

SEQ ID NO: 53982 - DNA, 388 bp, Glycine max
tagtgaggggcgtgtcaaggagattgtgtgtgacgcggtgtatattgagagggagtttgtgtgcacgggtcaagggatgatgggttagagaacgctatggcattgttaggtttctttctttcggcacttttgaatgccaagggaaaccacaacctttatgaaagagtgtggaagaccactgagataacgatggtgttttaataaaacccgtcataatttttatgaccaacacacattctaaggtgattttcaataaccgtcttagaatgtgtatcgtacaaggcttttttcaataaataattacaaaaataccaccagttccttttctaaagcggttctaaaagaaccatcgtagaatggctatcgtaaaacacccattttagtagtg

SEQ ID NO: 53983 - DNA, 427 bp, Glycine max
  unsure (1)..(427): unsure at all n locations
tcttcngnaagagnnnaaangaccgncctcaaaatctcgcttaatctgaaaaacttattttatatctagactnttctattctttactagccctatagaagagtgatcacctacctcgtggcctaacanactcacgagaatatggtgttcttgatcagtaatctggtcgatggcagattagtaataatcatcttatataaaaataacgtgcacgtcgagtataatattaataatttatattatatctttacaatattatctattagctcctttatatttgttgtataaacatgaatacattgaatagttaatctacatcatgtagtgtgttatctatatcactatatgagagtttcccttaagtggatcattattactacaattcatcatatagaatgtatttttactagtactggaaattaacacag

SEQ ID NO: 53984 - DNA, 440 bp, Glycine max
  unsure (1)..(440): unsure at all n locations
ctacacataataattaatacagttagtatgtctctcatattttttggaacatcaccagnggaatggttacatgctatggtcttctcacttactcaattaacagggatgtctcagataacagtttaaatggttttgtgcccgagtcattatctcaacttgagtacctgaggattttgtaagttgtattttgagcagaactatatattatattttaaatgattntgatattnttatttctgagaatagagaggatcatatgattgtctttcgattgaagaaatataggagggaataagctatcggggtcaattcctgcaaaactaattgagagatcaaagaatgggtcactaatattaagggaagccgggtaagctntatctggtaatttgttggcttatgtcatnatttctatttcattaaatcacgtttatgtcatatta

SEQ ID NO: 53985 - DNA, 392 bp, Glycine max
  unsure (1)..(392): unsure at all n locations
agcttgaaatgctacaagaaatggccaagttcccaagaagttctgcaacattcaaacttttatttaaatgtaaactgataggcttgtaagtaggtgtaaattattcctagacgattacattntcaattggcttctatatataatgcaattcatggtttcggtagttntgcagcattggtagtattgttatgaacttatgatattctattttagttgttaaatctaattttggtttctcatatttgtatgtctatctataggttaattaattcgtttattgtctatttttctattcatcaacttccttttgtatttgacctgtttgtgtagataggtctcgacttaaagctcttagctgggtatgcttcagtgtgtctacaatgtagatcagt

SEQ ID NO: 53986 - DNA, 413 bp, Glycine max
  unsure (1)..(413): unsure at all n locations
cttggatttcttcactatagagctttgagactcagngtatcttttccctttggttcctactcgntntataagcctaaggtagcttacttgtcatgctgacttcgcactgagcgcgtactcctaggcttagtgagaatgacggtttaatcacgtgcttagtgcgaccttgggctttctcgtgggccttcttcgtgctaagcgtgagctagtctctaagcgagtacgcgtgctgagctggtatcacgcgctaagcgagctgtccaattcttccaacttttcttcaagattntttcttccagtttttgcatcaattttcctctatagcacttaaaatcttcttcttttgaattctgctaatcaaaaactacaaagatattaatttctttatttattcattaaaataacaataaagt

SEQ ID NO: 53987 - DNA, 501 bp, Glycine max
  unsure (1)..(501): unsure at all n locations
ntgttctgcgtcaggaccttaagctcacgcagctgcagctagcacccactctgagataggccttatatttgcaattggaatacgctccagatctaccctcttccacactacggggacttcagaatttctcacgtattccatcaacttactacatgacctctcaccctcacttgcttangtgacctccgggtcatagatgttggcctataactccttcaccatggcgatgtctatatttgttgtagaanaatcagtcagcttctcataccgatggcgtctctcgagcttcttcttgaacatcgctcactctgcttaatagagcaccacattcctctctggtaagaaccttcgaggccacactatgtcagtgtatctctcccaacctctngagatgtgaatcaggtctatcaaatggcttcggtacgtgatagggcgtttcctctgttatatgcctctgatgtacctccttcgacttgaggctagatctcttattatgactcn

SEQ ID NO: 53988 - DNA, 468 bp, Glycine max
  unsure (1)..(468): unsure at all n locations
acattaaacanacgcttttcgagaggcaattngngactaatatccatttaattattctntgtcacatgttttctttttcattaataatacaatctgcatgtcaatacaacggccatggtcaactggccatggtcaatgcattcatcgtcaaacccgagtatgctagtggtcaattgaccataacctagacattttttgtgagtgctgaaaacagtcgtagtcaccccattacagccatggtcatttaaaagaaatcagttatagtttttttagttgtatttttatttcaacctttattttcaattgtatttcagtacttagatagtttattggaactaagtctttcattatgactttattttgctcttatttttatgcattgaggatactacatgctttaagtgtgagcaagtgatgcaatcctactctccaagggcattggatagaagactacaagaagaatgggtc

SEQ ID NO: 53989 - DNA, 437 bp, Glycine max
  unsure (1)..(437): unsure at all n locations
tgcgcatatatccttacaaacgttctcttgttttagacattctattaaccgaaaaaaaatgcacccatatacaatcaaggcagcttcgttacctagattatttacacgtacttccaaggagtatttgttacttacatcacacaccttcttgggtaaattcacatacatgcatactcaaagcattttggggtaccaaagattgcacacgtgcacatcttggtattactaatacctatacatacacagacttgatgatgaatcttgactatctacacaataaggcgctacattttatgctcttttcaagttgttgctacctaaagccagatgcaaattcaaatatatcttgctttgctgactaaaatggtattcaaaataaaaggtatacattntgtggaatgtatcttctgtacataacatgcaacatatttatgtat

SEQ ID NO: 53990 - DNA, 447 bp, Glycine max
  unsure (1)..(447): unsure at all n locations
ggatgactcanaggctcaagaacacaaactacctactgtgattaagaagaatatgaacaattgaactcccttccttcaagctntagtttcatgcaaaaatgaagggataagactccaaaagatttttttcttcacaaaggccaataagctatggtgtaggctctcattgacaaggctttgtgactctttgaatgaaccccttgccagccaatttgatcatgccaagccataccacaaatgggtagttttgcttttttgcaaaactaccaaaaatagaagggataggatttgtcaaaatgagtatttttgctttttacaaaattaataaatcttatcttaatcgcctaggttattatgctaatctccctaagaatattgtacccaaagtgttcctcactcagagaacactctcacacaaagttaaattacattgtcgctctgtgcatg

SEQ ID NO: 53991 - DNA, 441 bp, Glycine max
  unsure (1)..(441): unsure at all n locations
cctgcngcatgcaagcttcanaccacagcaacacagaatctatgtatactttacccctcaatataatggattttcaaggtttgagaagtgaaattgagaatggggtaagattggagtaaaacctcacctcacacaagtttataacatcaatttaaacttgctcaactggatttacacctaaaatttcaccgaatcaaaatttgactcctcaacacccaattttaccctaggaatggctctttgttcactctggccatttgtttttctctcttgcacagcccaaactgtctcataagtcctacacgacatttcaaactaggattaactccctttaacctccaaataccactaaatccagatgtggccttccaactctcataaactcactctttntcaactcataacaccatattctcactttctaaccccaggntaactcta

SEQ ID NO: 53992 - DNA, 448 bp, Glycine max
ctacgctagctaacacacccctctaataactaagttcacctccttgagaagcttccttgagaagattcctagagaagctagagcttagctacacacacctctctaatagctagctcacctccttgagatgagaagctagagcttagctacacaccccatataatagctaagctcacccccatgccaaaatacatgaaaatataataaaaagtccctactacaaagattactcaaaatgccctgaaatacaaggctaaaaccctatactactagaatggacaaaatacaaggccccaaagaagaaaaaaaacctattctaatatttacaaagaagagtggacctaaccttggcccatgggctcaaaaatctaccttgaggttcatgaaaaccccagggccttctttagcagctctagcccaatccttttggagtcttctatccaatacc

SEQ ID NO: 53993 - DNA, 375 bp, Glycine max
  unsure (1)..(375): unsure at all n locations
agcttcattcatagtaagagggaatatgcctcttcttaagatactctactggaggatccncatgaatccttcgttccctaacaagggaagtccaccaatagagagcatacccttgaaagctaagggtacccaatggaacttttctctctttgctaatatgatggcaaccaaagagttgttcaaccttcatttctcaatctaagtaggcctcaacattatctttttcatggaaatatgagaggctaatgttaacctcttgaggccttctatccttttctcttctttgggagtgatgtgtagtatgtgaactatggcgccctctataatagtcgctaagttcttcacttacactcttgcaagagtcatgactactat

SEQ ID NO: 53994 - DNA, 484 bp, Glycine max
  unsure (1)..(484): unsure at all n locations
ctttaagtgagagggatgtgactcttcaccttggaattgaatttcaacgttttagggcattggtaatcgattaccaaaacattgtaatcgattacaaccttttgaaaataattggaacgttgtaaattcaatttgaaaactttttcaaactcattttgctactagtaatcgattacaccaatatggtaatcgattaccagagagtaaaatctctttggtaaaggttntgttaaaaactcatgtgctattcaaagttttgaaaaaactttttaatacttatcttgattgagtcttttcttcattcttgaatcttgagtcttgaatcttgaatcttgaatcttgattcttgattctaggctttcttcttgagtcatgaattcttcttgattcttgaactctggatttgttcttgattcacttgagttgttctttgatctttgagctntttggtcatcacctttgtcatcatctnttattgtcatca

SEQ ID NO: 53995 - DNA, 118 bp, Glycine max
  unsure (1)..(118): unsure at all n locations
gaactacttcacatggacttgatggtgcctatgcaagttgaaagccttggagganaaaggtatgcctatgttgttgtggatgatttctctagatatacctgggtcaactttattagag

SEQ ID NO: 53996 - DNA, 388 bp, Glycine max
  unsure (1)..(388): unsure at all n locations
actcagcttgcggattcggcatgctggtttttgagtttcgtgtgttctaaaagaggacaatgcgatcgtgctgctatgctaagtgcgcaaacactccggctggttatgatggtgggaatgacggagactcccatgatgtgactgcctttcctatacaaccaactttcccacctatcctgccatgtcattgctcatccaatgactcaccttctccttagtcaccaccctttattcacaaacgccatccctatttcttgccctatgccattctaccgcacttccaatgacgaacaccacctttagctcaaaccgacacaccatcctagacttgaattntgccgcgactaagcctgttgaattcaccccacttccggcgtactatgctgac

SEQ ID NO: 53997 - DNA, 340 bp, Glycine max
  unsure (1)..(340): unsure at all n locations
agcttcttagtctcagatgatgcatctgattttgtagctacctcatgcactcctctaatgactatggcatcatttctggcgctaaactgctgagagttggaagccatcttctcaattaaatatctgacttcagcaggagtcatgtcttcaagggctccaccacaggcagcatctatcatacttttctccatattactgagtccttcataaaaatattggagaagaagctgctccgacatctgatggtgagggcaactggcacataattntataaatcactcccaatactcatacaggctctctccactgagttgtctaatacctgagatatctttcctga

SEQ ID NO: 53998 - DNA, 426 bp, Glycine max
  unsure (1)..(426): unsure at all n locations
tctanactntatagcagaatgaagctctaataccacttgttggacaagtggcctcagatatcttaagaagggggggttgaattaagatattacaacttatttccccaattaaaaattctatttaactttctattcaagttataaattcccttaataatgaatttcgtaaatattgattcaaatagaacaatttgaatatgaatataaaacaataataaataaaggagtttaagggaagagaaaatgcaaactcagatttatactggttcggccacacccttgtgcctacgtctagtccccaagcaacccgcttgagagttccactatcttgtaaattccttttacaagttctaaacacacaaggacaacccttcctttgtgtttataattctttcacaacaagagaccctcggtctcttaatccct

SEQ ID NO: 53999 - DNA, 362 bp, Glycine max
  unsure (1)..(362): unsure at all n locations
agcttaacattaacttntgttgttagcttatgaaaaatcttnnatacgaaagaacaaggaagcggcatagcctatagccagtgagttccgtgacatacaatgtaaataaaagtctacattattagtaatttttaaacatattctttaagtaaaaaatccttttcctggaagaaaattgaactaacaagtctttggttttactcatatcataaaagtagaatcaatgatctctgttcgttacactaaattgtagaatatctaacaaatagacaaagaagtgctagaaaattcaatccctatttttttgttaattcataaatattattgacaaatctcttatccttgcattttgttcttttata

SEQ ID NO: 54000 - DNA, 479 bp, Glycine max
  unsure (1)..(479): unsure at all n locations
cggacacaagaaactcagcttaagtactccataatgatgataccattacctcgatctttttccttgcttctggntntaatatgtggntttccctcctacaaaaaaactgttaggatggacctagaaagattcaaatatactatataaaactgtttgtttatgtaaattaaaataactctagttttagttttgtataaaaaactatgagctatatatactatctcataccattcaaccaacacaaatatgaggagtgagggtatggtgaaaagtggggtggagagccccatttgtttcttagttaatttccagctctagcatttattcagaataaaaaaagcacgcagaataatgaaaaaaataattgaatttctttctttcttgaagacctttcgagtctaatggcacctttccatgtaagtaaagaataaagaatattaaagagggtgtgcgtatctgcagaaaaaaagcacggggaa

SEQ ID NO: 54001 - DNA, 318 bp, Glycine max
  unsure (1)..(318): unsure at all n locations
agctntcaacaagagtcttcacatataactcatatgaagcaganaactaacaaaactacccatcatatctcccaaaaccccatacccacganaatcaaaggagaaagaagtccacccaaacctgaattttcgaagtcccactcgtagccacgcacttcacgaccccgaaaatgccctccttttgggatttggggtagaaatgatggccaaaggttgaagctttgcttggagcttcaatggagaatgaagaagaagagaatggcaacgtgagggagagagagagctgtctgatataatgtggggctgagtgaagagaga

SEQ ID NO: 54002 - DNA, 447 bp, Glycine max
  unsure (1)..(447): unsure at all n locations
cgacattgcgagttgatgttagccttagtttcactctagttattagncaattcaattaagaaagagaaatcccaaagagaaacgtccgattgatttttctggtttattttactaaaagatattttttgattattatattattattttacctctttttggtttccaacgcgcttacgacatgaccgaacggtcggatttcattctaacagaaattaacgaatattacaaatcaaatgatcggtggaattttttattttttttattaagtgagaaaatgacttaagtaaatgactaaagcacgtcaaaagggggtacggaaagtaaatgacatgaaaataaaagcacgtgataacaaacgaggaccactaagggtacatagaatgaattganagttcgatttatgaacttaccagttgagaactgagaacgacgagacatacgaatacg

SEQ ID NO: 54003 - DNA, 312 bp, Glycine max
  unsure (1)..(312): unsure at all n locations
agcttgtagaatggctagacatgatacatgtcanggtttggtttggttcaaggataaaagggatgccccacattatttccataacacaaatgcaaaaatgatgatttggaaattntatgcaaaactggtcatgcatgcacctatgtggacgctcaagtgtcaaatattcatggtcatgtgatgctagggctcaagattcatttcctctattntaaatcaacccaatgtttccaaaatatgttcttttatcaatttgtgcattcatccaagtccatttcgggcgtccggggaaattntcacagcattcaccct

SEQ ID NO: 54004 - DNA, 437 bp, Glycine max
  unsure (1)..(437): unsure at all n locations
ntaccanaacttgcctttctctaatactcaagaggtagtctataaagccattgaaaattatgatgttggttctatggaacaacaatctaattaggaaatagagaacaaggtattgaccattaattgaaaaacaatttagatcatgggactggagttttagtataaaaaaacaaaaaaaaaagcatttgaatggaaatggtacatctagagttagtgaagtatattgaagccacttgattaacttaaagaacagtctattataatagttatctctaaaccaaccattcatcatggatgttttaattttttggaacaaaaggattttgaaagtacttatatttctactatatgactctaacatacaaattatgttctaaagctattggagccattaaacatactacaaataaatntgtcatagctaggataagagaatg

SEQ ID NO: 54005 - DNA, 361 bp, Glycine max
  unsure (1)..(361): unsure at all n locations
agctngaaattgaacatcggatgctctcgataaaatcgagtggtcataaattttcacacagatgtccgattcggtgaaataatatatcgagacgcacgaaattgaacaacggaagctctcgagaaattcgaatggtcataacatttcactcggatgttcgatccggggacatatattatcgagacgctcgaaattgaacaaccgaagctctcgacaaattagaatggtcgtaactcttcacgcgaatgttcgattcggggacataactcatctagacgctcgaaattgaacaacggaagctctcgagaaatttgaatggtcataagttntcacacggatgtccgattcggaacataatata

SEQ ID NO: 54006 - DNA, 467 bp, Glycine max
ctcagcttaacaatggggagatggaccatttcaagtgcttgaaagaatcaatgacaatgcttacaaagttgagctgcccggtgagtataatgttagttccaccttcaatgtctttgatttacctctttttgatgcagatgtagaatccgatttgaggacaaatccttctcaagagggagagaatgatgaggacatgaccaagagcaagggcaaggatccacttgaaggacttggaggacctatgacaagggctagagcaaggaaagccaaggaagctcttcaacaagtgctgtccatactatttgaatacaagcccaagtttcaaggagaaaagtccaaggttgtgagttgtatcatggcccaaatggaggaggactaaatgacaccactttgtctcaatttttagagtgtgtagtttgtctaaataatggcccaatcctttgtaaagtggctgaccaaaaatatgt

SEQ ID NO: 54007 - DNA, 368 bp, Glycine max
  unsure (1)..(368): unsure at all n locations
ataattntacaatggctaacaagttttgatagatgaggcattcgtattgatggattttagtctaggcatgtgagtgctntaatttatttttttatctttttcatgccttgagcttgattagttatgaagtagatgaagattctttttctctaagtttcttaaagaactcacttctacttgaaacatgtcttgcaacattgaattaatcgattgcctcanttggtaatcgactgcccaagtcaatttcagaagaaggaagggtctatagcttanagtaatcgactacctcatntgataatcgattacccaactccagaaaacaaagagaagctctttgtctgaaatctaaatcgnataccagacatgat

SEQ ID NO: 54008 - DNA, 450 bp, Glycine max
  unsure (1)..(450): unsure at all n locations
tatccctcntatagctgggtggtaatggtntcctttctttttccttnntaatttgaagaatttaaactttaatgataattatacataaaataaaagtgtaagtcatgttattttttgtcctgcaggatgataccttacggaatgctgttgagagattcaaaggaaaaaattggaaaaaaattggtaatatattgatttcaatttgtacttttcgattgtacatataattattcttgactcactgccactagcatccagtgtgtgcttaaatcaatttggatgtctccaatacttactttatatacctgaaatgagctttcttcaattagacatttgttgagttgatttaaatgaaataaaaacctatgtattctatggggagggattcactttattttccctggtcagtttctaatatcaactctcttctaatcccatagtagttaatag

SEQ ID NO: 54009 - DNA, 340 bp, Glycine max
  unsure (1)..(340): unsure at all n locations
agcttgtaaaatagatntagttattcactctacttgcaaaagagagagttctagctgtctaggaacttatacgttgatgaactttgtttaagataaattgaaaagtattcctagaagctatcttatgaaagatagacactccaaggtactttccaagatccttagtccaagcaatacccatttctccacttagttgatccttgacttgagtctccacatttttggaaaagaacattcaagatttctccaagcttaatttctgcttagaactcttgcaaaatagattcaaaatattcttgatagaatggacctgctccactaaagccttcataaataaaat

SEQ ID NO: 54010 - DNA, 422 bp, Glycine max
ttaccattattgtggacttggatatcaaaaactctatgatgtaattatctttactatcaatttaatgttatctcaatattattgctgcttttctatatgcttattgtcttgtttatgggttgatcacccaaatgcatgtttgttatagtgtaataatcattgggaaatgtttttacactaagaactgaaagggggcttctagttaactcatatctagggatgaaatgatcttgattagtcttttataaacctttgctcttaatcaaatcacctggtttaacttgctaagggattagaagtagaatcaagtgattcaggctctttcacatgaatgatcattgttagagtagattagttgtttaaggtaataattgaaatgacattgatgggtgaaaaatcattaccgttacatcaagagctca

SEQ ID NO: 54011 - DNA, 196 bp, Glycine max
  unsure (1)..(196): unsure at all n locations
cacccggaatcatgcctagtatgacttttaagatagttttcataaaagatcctaaacttcgcatacatgtctattttgtattagattagattagatgaccatataaaaaccttttaggtttgagtgcatagactattttatttccgtagaattcttcattntttggggtacaagaaaagttcaagttgagttgagt

SEQ ID NO: 54012 - DNA, 457 bp, Glycine max
  unsure (1)..(457): unsure at all n locations
tatatctaatttatacgtgcatcttgattctaagggtggatgttaatagttacatgagaaataaagtatatgggttgatatttgtgtaggcagagaaagcaacggcaagaacagaagaggagagggtgatagcccatgagcacgcaaaggcaaaggaagctggagcaaagatggagctgcatgaagctaaagcaaggcatgcagcagagaagctaagcgccaaccaatcacattatggtctccaccatggccacaacaaccctcccttagtaggaacaactcagactcactaccagcaagggcaccagcaccagccacttggggcagttcctatgcctggaaccacttatccatcttatccactaggaggaaaccctaaccctccaaggaacaaacatatataatagatctatctgtgttntgctgtagtacgtctacttcttgtgttattactcct

SEQ ID NO: 54013 - DNA, 103 bp, Glycine max
cgtgctctaaaataagtttgcttgaagcgactccaattttatgtttaacgctgtatttgtgtgagtgctccgtttctcttaaaactttttggttaagaaatct

SEQ ID NO: 54014 - DNA, 381 bp, Glycine max
  unsure (1)..(381): unsure at all n locations
ctgacttatctttaaaagcacacggtccacacatcaagtgatggatatttggctgctcgactgacaaangtatataattacttatttaatatttttttatcacatgagaatgtattgatgaacttaataatgaaatttattaaaaacgttgtaaagactatattgtctatgcaaaggttacgagtaagcttcacaaaatccaaatgatctctttttgattataagccgtgggcctgtggcaacgtcgtcgtcagtgaggtggttgccttatgttcccaaataataagtatttatattttcttgttttatataatatgtaatcttagctttttttatctaaaatataaacattttaatctaattttagaagaatcatattgc

SEQ ID NO: 54015 - DNA, 468 bp, Glycine max
  unsure (1)..(468): unsure at all n locations
agcttatgctngatttgcctcccgcaacacatgaacacactggacatgnaccctgaacttatggattgcatggatgcttctaaccagattataacaagggtacaagggtgaagagagcaacagccattattcactagatttgtaccaacttgggaatcaaaataaattttgatccgtctatgtcttctatcccaaaccatttgaagaacaagcanatatggcccattactctgctgccagattcgtacatataccaagctttgccgcaaatccacaaataaagcacttattagtgtgttngttgacgtntaaactggtttcctttaaaaaaaagtaattttctggtttaatttgagaaaaaaaaatatctgcttattaaataaaacactttttaagaaagtattttttaaaattacttattttaagttaaacaaattaatccaaaacttagaatcatcacgcaaacac

SEQ ID NO: 54016 - DNA, 460 bp, Glycine max
cctgtgattgtgtcaatctcctgtgattgtgtgtatgaacaaggaagtaggaaccattagcctaggtgacatctggtaaataaccagattgagatagtttggtgtggccatgactatagttctaatagcagccatgatattaaaagtccctttttgtcaacctaaattcagcttagttaaaacagattcagttcccttctccctaatattgatctcatgtttcccacttttttctccaatctctcttcattatctgattttatttcaatgattcaactctctccataacctgtcctgacatgttggaattttctttaacctagttagattgaagacgaggaatatcaataatgaggcataatatttggcctaaatatagctcattatatacttcagattaaaattcgcacacctttgatgttgctacttatagcacgggagaatatgatcgatagcactg

SEQ ID NO: 54017 - DNA, 100 bp, Glycine max
aggagagggcgatgttgcagctcaatcagatgctgtgactatcactgaatactttgattgtataacacgtgcaatatataccacaggttatgacgactgt

SEQ ID NO: 54018 - DNA, 259 bp, Glycine max
atgcttaaaaactgaaatattatgcattggaaaccacatcatgaggaggtagtggattgaaaccataaacaacctctaaatgagaacaactagtgttgctatgcaccgctctattatagcacattaatgtgggagagcaacttccaattttaaatttttttaaacggtccttacagggaccaaagtctatccgactccgttttcatcgttgagggtgacagagaaaatatacttatcccacttcccataggcctcaaat

SEQ ID NO: 54019 - DNA, 132 bp, Glycine max
cctagacgacatatgaatgacctatggttaacttctgtttacatgcgaagccatgccttttaagataaaagttgttcttgagatttttaccaataatggcttgaagtgagtttaaaccaaagatggaaactc

SEQ ID NO: 54020 - DNA, 402 bp, Glycine max
  unsure (1)..(402): unsure at all n locations
ctaagaatcctctcacgaggtggatgtagagccctgttctcagtattaaaattattactccaatgctcaaaatcacaatattcagaatcactcgcaacagaatactcaaaatgctcaaaatgcacagaatgaccaggatgcacactatgcctaactaatctatgaaagggtctatctatttcaagatcaaagggttgtaaatcacccggattacccctagtcatgcattatatgcagcaaataatgtgttctcaacatgcacctaacaaggtggtaaaactacagctatactcaaacaatattanaatgagctaaaattttgtgaggaacacccttaaatcatgaaaagatagcacccaatatttcacacacatattcagagtctaactatgataactacct

SEQ ID NO: 54021 - DNA, 484 bp, Glycine max
  unsure (1)..(484): unsure at all n locations
ctcggcttctcctatntgtatctaagggtagcatatcatntttatgatgaattgcatctcttctcaagtccaggtgtgaatgagtatcagtgcacacatgacaaatgtattaagctggacatatatattgatgattgagtagtagctgaatttatgcagtgtataggagcctcaacaatggatgaatatacgaagcacattgaaaaggatccagctctggagaggcgattccagccagatgaaaccatacaaatactgaaaggacttagagaacgctatgaaattcaccacaagctccgttatacagatgtgcagttgtcacatttaaacgttctgctcccttttctgttcattttacctattctattcatttatgctggagatcagacaagtttctttatttcttataatatttatgtagctggaaatttttcaaatgtatattaatttatctctttgaattgtatacaatagttagattatt

SEQ ID NO: 54022 - DNA, 313 bp, Glycine max
gacacctgcatgttttcatctactcggcgaggaaaacattagcccgcctctgaaaaaaacatgattcaccgatactgatctaaaaaaatgttagccgatgtcggccaggaaagatgaccgatcgatgtttaaaaaagaagcatcaccggatgacgccgatcgaacatttccaaatagacgtcatccaaatattattcacgggttgaatagaaaatactatagccgacatcggtctgtgtgaagccgcgactgatattttccagccgacattgcgcaagctcttttacaaatgctgacttgtaatattctttca

SEQ ID NO: 54023 - DNA, 445 bp, Glycine max
  unsure (1)..(445): unsure at all n locations
atgagaaataactttgactcagatgtttgattgagtcccgtaatatatcgagacgctcgtaattgaaaacaaaagctctgagcaaattcaaacgacaataactttttactcggatgtccgattgagtcccgtaatatatcgagacgctcgtaattgaaaacagaagctctgagcaaattcaaacgacaataacttttaactcgggtgttcgattgtgtcccgtagtatatcgagacgctcgtaattgaaaagggaagctctgagaaaaatcaaacgacagtaacttttaactcggatgtccgatagagccccgcanaatatcgagacgctcganattgaaaacagaatctctgagcaaattcaaacgacaataactntngactcggatgtctcgatgtgtcccgtagtatatcgagacgctcagaattgaaaccgaagctctgag

SEQ ID NO: 54024 - DNA, 303 bp, Glycine max
  unsure (1)..(303): unsure at all n locations
tgatcatccactggcatcatcataacattcagcttgatccttngtctacattatgttgacaccagagccatcgccaactaattactaatcaagaccatgatagggattgttacagtgtagatttttgcacaatagtccatgatccatttattntgcaccggaataaggtgtggccttggcatgatgagtactatgtccacttggacattttggatagccatgaagtttatagcaaaccatggcagcgttccctacgttctcatagtattgacaaataacatcttttgttatgcctgaaaatat

SEQ ID NO: 54025 - DNA, 387 bp, Glycine max
  unsure (1)..(387): unsure at all n locations
tatgttaatgggtcttaagaggaaagctcactaacacacaccaaacttacttattaaacatgctcatgaaaactattttttctcaattaaaataaatcccttttattttcctacaacaataacccaaactaatatttatttatttatttatttatttgcaatatataatatattgtgagaaaattacattagcactccctcaaatattgacttattacacagacaccccattcataaaattgcatttcttttgcacccccttcgtgtctttgttaacttatgctacttaaaagtgaaaggtcaaaattaaccttctcacttaaccagcactcaacacaccttttgtttattgntttatgaaattgaaaacaacaaatgtgctctact

SEQ ID NO: 54026 - DNA, 490 bp, Glycine max
ccttctattctcaatttcgagtgtctcgatatattactttactcaatcggacatccgagtaaaaacttattgtcgtttgaatttgcttagagcatatattctcaatttcgagtgtctcgatgtattacgtgactcaatcgaacatccgagtaaaatgttattgcagtttgcatttgcaacaagcttctgatttcaatttggatcgtctcgatctatgatgggactcaatcggacatccgagttaaaagttattgcggcttgcatttgctacgagcttccgctttcaactacgagcgtcttgatatattactggactcaatcgaacatcagaataaaaagttattgttgttagaatttttttcagagcctctgttttccattacgagcgtctcgatatattacgggactccatcagacattctaaaaaaaagttattgtcgtctgaatttgctcagagcttctgtctgcatattcgagcgtctcgatatat

SEQ ID NO: 54027 - DNA, 456 bp, Glycine max
agcttctcatgaactggagcaccttctggtctggccatacatacaccttcaggagtgaggataccatgtggcctaacccaaaaaaagttgcagagatggcttcttaattaataagttgcagagatggcttatttattgtgcattggcatctttttgataaagtgaaagggtatgaatctgaaggtatatataattacaaaggacacaactagacctcaatcatatctgatagatggtttttgattgttatctgcttcacatcaccacctgcagataaactaagatctccgttactgagtaagaagtcgttgagaacagagaatacttatatttgatgaaacacggactatagaccagtacgatagcattgaaagaagattgatgatgtgacaaagatgcaaacaacatattcaatgatgtacaaatacaactggataagcatgtatattaatacac

SEQ ID NO: 54028 - DNA, 418 bp, Glycine max
  unsure (1)..(418): unsure at all n locations
gcatgcatctcatcanaataaaaaataaaaactgtttagttaaagggtactgcactntttttaatgagacaaaattcttttgcgacgtatgaattgaaacttgacatgacgtacgtgaatgtgataatcaggagagaggaagaattttgctgaaatgggcagagctaatagaggaaaacgcagaagaacttgcggcactagatgccattgatgcggngaagttgtaccatatgtgtaggaatttggaagttccagcagcagcaaacactcttcgttactatgcaggtgctgccgataagattcatggcgaggtgttgaaaatgtcccgagacttccatgcctatacattgcttgaaccacttggtgttgtgggacacattactccctggaatttccccaataccatgttctacatcaa

SEQ ID NO: 54029 - DNA, 498 bp, Glycine max
  unsure (1)..(498): unsure at all n locations
ataacaccacaggggagtgaagattggctgataaccctactcctcgcaacaacgttctatgtgaagttgacacgggagatggatcaagaaatatccgcagtatttgtgagtatgcattttataaagacgccttctgctccttgaagcgtggatgaagatgtntccaaccatctttccacccccgaattgtttcttgtgcctcgattgatgagaatagatgtatccaacaatctttccggccgcaaaatggctgatagtacttctcttcctcccagccaaagagatgatccaacagagggaagatgatcatagcgacataatgagacctcctgcaccaaggggcaccagaaccatgctccaggtgacctcattgacctggaagaagtagaatctgatgaggaactcatttgcaacaggttggcacctggcgtngcagaacgattacatagcccgaaagttaaaactctcatcaagaggtttggacgaatctagactttg

SEQ ID NO: 54030 - DNA, 398 bp, Glycine max
  unsure (1)..(398): unsure at all n locations
ggaccatcaaactcagcttctcctatttgctataatagggggagtagtgtttatcaaaagggttcagcctcttaggcacttctctctctctcgaaattgctgagganaattatttccgcgaagaagatccaagccgaggcgcttctgtaacgttttcgtgagtaattacgcaaagattctcgaccgttcttcaagattcatcgttcgctcttcgttatcttcaatcttcaacgggtaagtacctcaaaccgagcttttcaattcattctatgtacccgaggtggtccacattttgatacatttatttttattcatcgtctcatttactgtatataccccttgttgacgtgcttaagccatttatctatgtcatttctcgcttaatctaaaaataaaat

SEQ ID NO: 54031 - DNA, 442 bp, Glycine max
agcttatatacaaaaccaagtaagaaacctctccctgacaagggcatgagagagagagagagagatagagcatacacttagcacaaaattcagagttccgaaacaagtacaggagaatcttacatattcatatttcataactttttacttttttaggaggcttcacgcaattcaagttgtttttttcagctaatgctgtagggcccctattaattggattcttacttccagatttaacgatgctatatctcagtgcatcactccctcaacctcaacatatccctgctaggaccactatgatctcaactagattttttatgtaacatatagttatattcttcaatttataaaaaaaattaatgaaacttgactacgtgtgaagaagaaattagtataaaccagtctcaaatttctattcaaccacatatgcttataatactca

SEQ ID NO: 54032 - DNA, 541 bp, Glycine max
  unsure (1)..(541): unsure at all n locations
cgaggattgtgttgcatcactgactctcgcgacctattaaacctacgcttgaacgagcatgagactagtagttgttgtatttatattattatccaagctgtaacgttgtatgaagtattattattgatgttttgcactatntatactactgcacctacattgtactagccatagttttttttaaaatgcaagagtactagactacatcatatgaaaatgtgtgaaagcttatgaattcaagcggtgggtccctgatagttatataactggccattgtgtgactatgatttaaccgctctggtatagacagatcacatcaagaactttgtatcgctaaggcttgtgaaatgggttcctatgattttaagaatcacgttatgttttaattcaccacagtcatactgagttgaccaccgccaaaagttgatgtttacgatattatctaaagatgaccatgcttcctataacactgtcacgcgtgagaacttactacgatattcacnacaggcgtgatcaaccggacattgagatacatacaacg

SEQ ID NO: 54033 - DNA, 326 bp, Glycine max
atctcttaataggcagtgtggcagcccaatgcttgatggttgtgtagctgccgttatatttttgttgtggggtatttggcattgtccaaatcaaattaaatttagaaatgtcaacctcaaaccttgttcaatgttttcaaaaattgcagctaatgtttgtttggcaggcaatctttccaaagggtgcataaagtctagaatggatgaattctctattctgtataatgttggaatatagaggaagtttattaaagcgcctaacattattgaagcctcgtggtatcagcctcttcccaactgggttaagtgcaatgttgatggagttg

SEQ ID NO: 54034 - DNA, 484 bp, Glycine max
  unsure (1)..(484): unsure at all n locations
tctcgcttttcttgtttaattattatattttgtttttaagccttgtatttggctatgttttcatgacatttgaatacttagtatttcttttattacttgattagtataactgaatatgatgattatatttacttgctcttgggtgtttatggttatgaagttttaaacttaattattttgatgatatatgactagaggtatgcacttttatttggttattatgaatgactttctggataatatgatattctatgaagtattatctttctaagattgatgaatggttaagatatcttgtttgattgattttctattcttgtgtatgtcatttatgtatggnttttatatatatttgatctattcatgtttcttgcttcatgattggtttatatttttccatgactggtgtgtgaatgattagttgtatttgtatgtttcatactttgtacgcactttggcttttctgtgatgccaaagggggggg

SEQ ID NO: 54035 - DNA, 329 bp, Glycine max
  unsure (1)..(329): unsure at all n locations
atgaaatctttctttgagatctctgttctagagatggacttcatgaactcaaaggatgcctaatatcctatcccatgcaagaaacttgaggtttctatcaacttaagatggttgttgtctttggttcccacaccttaagatagctatccagtatctttaagcttatctaagctctggtgaaggtatgtcccaaagctttaagcccattcagaagcactctgctatgaactctttctatggtttgtcttaaatgttctacgtgtcatctaaatgtccacctttcatcttcaagtaaccacttgttngatagtgtctgctcttgcttctct

SEQ ID NO: 54036 - DNA, 136 bp, Glycine max
  unsure (1)..(136): unsure at all n locations
ttcattcaaggaaactttcaaagaacaacgaacgatagattttctctattatcctattattcgagcacaacatattaagatgatgttattattatttccactattttttattacacccangatacagtgtgaacaa

SEQ ID NO: 54037 - DNA, 435 bp, Glycine max
  unsure (1)..(435): unsure at all n locations
agcttatgcatggngcttctcattgccctattctatggcttggagggatatgttgttgtcatttgtcatgacctcgttgcacgaagatatgaaagaaactgcgcacgttctcgaaaaagaattttcaaggacaagaaatatttaaaggatcttcaattgacagaataagtcatatgactcttgttcttcacaacttattttcttctcgagagagaatactcttaagaatgataagatgaggtcacatgaatgcttatacttcttatcttctatttagaaacacagtcaatcaaatggttattcaactttactcgtcgcttatggcacccccaccaaacgtgtagaacatgcacattctgattgtgtggacttggagatcaactcatgagtgcacgtcacttgagtatacataccaatgacatacattcacattca

SEQ ID NO: 54038 - DNA, 443 bp, Glycine max
  unsure (1)..(443): unsure at all n locations
atatcatgagtctaccctanaccaagaaaacagggtagaggcagaaaactctacccaaaacacattcaaattccacagctttccttactcatataccccagtaacattctcttcgntccgattcgttaaccgttggatcgccttgaaagttttactagaggttcctagtacataaatttacattttgaccgttgggatctgctaaaaacggtctggaacccgaaatgtactattcttcccatgactagcaatgcacaagcattttctgcacatgttgaaaaattctgctgcacaattcaacagcatttttctgcataatagggcagatttcgaaatccatcttgcccacatcaaatttttctcaaattggatcctacaagtcctaaatcatgtatacatcatatgtaaaccaaaagaatacttcagcccagggaaatcaaaat

SEQ ID NO: 54039 - DNA, 225 bp, Glycine max
gatgatttctctagaattacctgggtcaactttattagagaaaagtcagacacctttgaagtattcaaggagttgagtctaagacttcaaagagaaaaagactgtgtcatcaagagaatcacgagtgaccatggcagagaaattgaaacagcaggtttactgaattctgcacatctgaaggcatcactcatgagttctctgcagccattacaccacaacagaatg

SEQ ID NO: 54040 - DNA, 412 bp, Glycine max
  unsure (1)..(412): unsure at all n locations
gtcttactggcaaatgatgaatggttctttaagagaaaatctgatcatcatgcgttgataaatgcaaaanaaattggggcaagtgaagaaggtgagaatgagggagaaacccatgatgtgactgccattccaatacaaccaagtttcccaccaatccaacaatgtcattactcagccaataacaaaccttctccttacccaccacccagttatccacaaaggccatccctaaatcaaccccaaagccagtctaccgcacttccaatgacgaacaccacctttagctcaaaccaaaacaccaaccaagaaatgaattttgcagcgaaaaagcctgtagaattcaccccaattccggtgtcctatgctgacttgctcccatatctacttgataattcaatggtagccataaccc

SEQ ID NO: 54041 - DNA, 280 bp, Glycine max
cgatatgtgaagatgatggtctcagtactttggatttgggccgaccatgccccttctgatttccaactgggaagattggcgagtggaggaacgccccggcatttacgcaacaagcataatgtaaaccttgacgggtttaaaagctctataagtgggcctaggctttagagttttcgctttgataaggctttgtgtctttgtttttgaatatataatacaaggatctttcttcatctgttcctggtctctacccactctcattcatttgcatgcttacttc

SEQ ID NO: 54042 - DNA, 430 bp, Glycine max
  unsure (1)..(430): unsure at all n locations
taagaaaaagcttaacanacttagaaatcaagtgatcatgtattccgaattatagggggagaaaacggatgcacattttatctatatacaattgtttgttgcttgaatcttgatttcaggtattgtattgtcatcatcaaaaagggggagattgtagatgcaattggctttgatgttttgatgatgatcatgatgatgtgttgcaattgatgcaaatgggcttttaagattaaaattcaagacaatacttcaagattacaagtcacaacatcaagatgatcactacaatattatgaagggaattcctaattgaattagcaaaggtttggccaagtgatttaaaataaaaagtggttttcaaagcttttactctctggtaatcgattaccagaggatgtaatcgattaccagtggccaaatacgttttata

SEQ ID NO: 54043 - DNA, 403 bp, Glycine max
  unsure (1)..(403): unsure at all n locations
gcaagctcaacattcaactggagcgtctcgttatattataggactcaattagacatcccgagtataaagctattgtcggttgaatttgctctaaacttcaacattcaatttcgagcgcctncatatattacaggactcaatcagacatccgagtaaaacgttattgttgtttgaatgtgctcanagcttcaaaattcactttcgagcggctcgatatattacgggactcaattagacatccgaataaaatgttattggtcgtggaattggctcatagcttcaatattcaattacgagtgtctcgatatattacgggactcaatcagacgtccgagtaaaaagatattgtcgttggaatttgctcatagcttcgtcattctatattgagcgtctctatatatta

SEQ ID NO: 54044 - DNA, 351 bp, Glycine max
  unsure (1)..(351): unsure at all n locations
gcgtagaactctgtgggaatcactgatttctatatctgagaatgttaggagtgtatgggcggtcattggggactttaatacagtcttcaagcagcatgatcaagatggaggatcctttaatccttcctagagaaaagcttttgattttcaggagatgatttcagaagcaatccttattgatgcatgcttttagggaccagctttcacctggcatagaagtaaccttcatgagagacttgactgtgttnntgattaattggagtggaggattaggtttcataatgctcttgtccttcattntcctttctntaaattngatcatagagcgttcctaattaaaatgtcttacaa

SEQ ID NO: 54045 - DNA, 412 bp, Glycine max
  unsure (1)..(412): unsure at all n locations
atcctgactcaccataaaccttgacccagggtgagaatgtcaatccttaccctcggaagcgaaaagaatagaagggaaatttccaatcaaagaaaaggaaagaaggaagatttccaatcaaagagaaagccaaaaaagaaaagaaggaaaattcccaatcaaagagtgggagaaagcaaaaagaaaagaaagaaaattcccaatcaaagaatgggagaaagtaaaaaaggaagaagaagaaggaaagaaagctcctgatcagggatcgaaagaaaacagaagaaatgtgcagaaaggtctttggaccggacaatatctgaataatacagaattgtcaccaaatgaacaaaaagaaggaaaggaaaccacgacctanaatggtcttctccctttgattaccaaccaaaatccc

SEQ ID NO: 54046 - DNA, 461 bp, Glycine max
  unsure (1)..(461): unsure at all n locations
atttataagaaacaatttcttttaanaagtagntagatcgatggggagataacaaacacttgcatttaatattcacgctatgtgctaaagccagtcatatatgagaacaacttacatgttgaccaaattaatagcacttttcgtttcttatcattgttaatctgcatatttttggatcaattgtgagaatttcttcttcaacacaataaaaattgaatatctatattgtacctcatgtaatggccttcatagttgaagcgccacacacctctggagcttctaaaatccttgatggaatccatatgaagtagaccgaagatgaaatctctaacttaccatatataacaaccacacacgaagcagcaaatatatatacacaaaaatcataatcggaacgcaagtactacaagagtatgtgcagatcgacgacacanacaaacatagtcatgcatgaatataac

SEQ ID NO: 54047 - DNA, 339 bp, Glycine max
  unsure (1)..(339): unsure at all n locations
agctttgatgatatggtcttcaccgatgaattgatcacagcgcgtcttaaacagaggaanancttgatcatcatgccttatatacatgccaaaataaaataaactagggcaaatgaagatggtgagaatgatggagaagcccatgctttgactgccattcctatacagccaagtttcccaccaacctaacaatgttattactcagccaataacaaatcttctccttatccaccagccaattatccacaaaggtcattcctatatcaaccacaaagtctgtctaccgtacttgcaatgacgaacatcaccctttatcacaattcatatacaccaaccatg

SEQ ID NO: 54048 - DNA, 445 bp, Glycine max
  unsure (1)..(445): unsure at all n locations
ggatatgactcttataattgatttttaatttctttgttcagatacactaataggcgattaccaatatcttgtaattgattacaccattttgaaataaattgtaaagttgcaaattcagttgaaaacttttgaaatcaaactttgccactggtaatcgattatagtaaactggtaatcgattaccagagagtcaaaactctggtcacttagaaaattttgagaaaaactcttttgaaaaacaaaactgtgctatgtttgttttttgaaaaatcttttcaatacttcccttgtgaagacttcttgatttcttctcttgaatcttgaattcatcttctcttgaatcttgaaatcaaacatctcttgattcttgaatcttctngatttcttctcatgaaacangaaattaaacttgatcttgaacttgttgactcatatttgaaatcat

SEQ ID NO: 54049 - DNA, 384 bp, Glycine max
  unsure (1)..(384): unsure at all n locations
agcttggtgataaacttggtttgttagagttttaagtggtaatgaaaaatacttgtaacttttttgaagttagtagaactttgtgatttgacaagaactagacgtagtcttagtgagagaaatgaaccaatataaaacttcttgtgtctgatatttatcttttttctatgtntaactgaccttgggtttgaatttgattntgtttttgaaaaacttatttttacaaaatttgtttcgatcgtctgattgtgtctgtttgcaaaaatcaattatctgtctttcaaagttctntttcaaacgataacatttgtctttgcaaaaaggtttaattttttttaaaatcacaattcaactctatttcttatggtatttgtctttacattg

SEQ ID NO: 54050 - DNA, 456 bp, Glycine max
  unsure (1)..(456): unsure at all n locations
catttgtgctcactnttcgttatgggacaaccagagtgctcatccaattctgttataacataattgatattatattaatcaccaataatattgtaagaattctataaataccaaagcaatgaatgaaagagcacagacatgaatcaattttacttatctttntcatagttttttcgtttattttcctctgctcctttatcttggatagtcattgctatcaatttggtctaacctgcctctttcccttgcatcatgccggaacacaatacctaacaatcctccatagaaaggcttgaggaaggagtgacccgcctcacctatgggcaaaacaccttgacctagaaccacgcagccttcgcccaagctcaatntatcacgaacaacataatcgactccatcttagagcgactcactgcctnccctgaatcaccacctacatatgcaccaccaccccca

SEQ ID NO: 54051 - DNA, 443 bp, Glycine max
  unsure (1)..(443): unsure at all n locations
agctngtactccaatcattcataaacctatttcaaacatttaacataaatattggtaatggtatattgttatgaacattatttatcaattaataaattaaacacctactaaaccaaatttacttacattcatccaaactatagaatggatatgttcaaacatttgtcacctaaaattatctcatttacatctgtgtgtgtgatgaaaatgtcatctttgacanttaggtatcccaaattcaccccatcccacgacaactaaattggcttttggtaaacatcaaacaatctcttaaccaattcttccaatggatcaactgcagccactgcattatccatntcagcagatgtaatcggtttgggctcacgctntngtgaatcatgcatggttaatgaaaatatcaattacgctaagnttatttacccatgtcacntgaaataata

SEQ ID NO: 54052 - DNA, 404 bp, Glycine max
  unsure (1)..(404): unsure at all n locations
ntgacattcaacatgatagaacgcataaacaaacacatccttatagtaggctttnttctatagtgatacttaaatcaacactttgagaaatatgacatactcatgagatattcaaagtttctaagaaattgctagtcttgtatatgaggaaaaaccaaattacattaagaactgactgttatgtgagaatgaaggattgaaaatntgatcatgaacttcaaatatgaaaacttatgactgaatgatttttttttttaaagaaaatgaaaatttggattatgtgacctttgacagccttccggagagattcggcatcttccacaggagagtggttggaaggagcaatcnagcgagccatggttgaattgatgtgtttnttttttttatttttaactctatgcttc

SEQ ID NO: 54053 - DNA, 348 bp, Glycine max
agcttggatatcctttgctccggaaacctctcctttctcatgtgaacccaaacccaatctccaggatggaaaacaacctttctgcgcccctctgttgcttgtttagcataactctcattcctcttatcaatttgggccttgactctatcatggagccttttcacataatctgttttggcttgtccttccttatgcttaaaaactgaaatattacgcattggaaacaaatcaagaggagttagtggattgaaaccatacacaacctcaaaaggagaacaactagtggtgctatgcaccgccctattataagcaaattcaatgtgagggaagcaaactttccacatttta

SEQ ID NO: 54054 - DNA, 477 bp, Glycine max
  unsure (1)..(477): unsure at all n locations
taaggagacaagcctagatgacaatatgaatgacctattgtcaaccctgtttaacatgccaagccatgccttttaggattagagttgcttttgaaattttaaccaaaaatggttaaagtaagtttaaaccaaaaatggaaactcatcctatcctaatcccttagatagaggtgtgtaaccttccttggattttgtgtaatttgagtgaaccttgcacaaagtccactctcatagagcaaaattacactgtcactcaagacatagtgtaattctttcacagatgaaactttagctcataaattttttatatctctctcaagctatgtattttaagacaattcctagttattaattgctaacacattcatactaaaaaacaatggtgcatacgttaactgatatctaanaaaatatataaaaatacttaagtattttaatattaatggataaaatattngcaattanggtaccataata

SEQ ID NO: 54055 - DNA, 464 bp, Glycine max
  unsure (1)..(464): unsure at all n locations
gtactanngtggcnnggtcgggcgatgggtgcacacacaagttntttaccatncacgaagcgcgcattaacccaccatccctgttgccgacctcatctgagctcacgtactcccacgtagcccatattcttcgttttctcaacaccgagtcccatcaatcctctccagcttgcacaacatccaagcaaaacaacattcatacagcacaagctatcacagccaagcaaaacagagcaaaggcagaaactctgctcaacacatcaaccaacatcacagcttttctcacttaaagaccccacgaacaattccttcgatcccaattcgtaaccgttggatcgactnncaaactttactggaagtctatagtgcataagcctacattgtgaccgctgggatcgactagcanacatncagaactcattctgtactactcttttcacagccaancacacacatgcattttn

SEQ ID NO: 54056 - DNA, 392 bp, Glycine max
acatactcctcatgcttctcaccatgtctaataaggttcgatttcttcgttctgcgacaccattctgatccggagaaccaggcatagtgtattgggcaacaatcccatgttcttgaagaaattccacaaatgaacctggtgcttgtccatcctctgtgtatctaccataatactccccacctctatctgatctcacgatcttacattgtttccacattgtttctcaacttcagcctcaaaaactttaaaggcatctaaagcttcattcttagaatgaagtaagtagagatacatatatcgtgaataatcatctataaaggttatgaagtatttcggactatttgcatctatgtctggacaacatatgtctgtatgtatgatttctaataaat

SEQ ID NO: 54057 - DNA, 572 bp, Glycine max
  unsure (1)..(572): unsure at all n locations
actactacaaatgacttctcgagaatatgntaaatttattnattcaccnnnnccaaggaagagnantttgaattcatgtcgtgcagcgnccctctaagtcnactggagcctgcaagctgaagatttgggatatggagagcattgctattgtcctaaccagcatcgtagggggcgtgtgcgcatcatatgctctagcctgaaatgaaatcatgggccagccacggtggttctttggattaagaagtgtcaaatgagaaattgctagaacaattctgcctcaagtgttggagctatcatgctaaacttggaggaattcgtgccaccattttctctgcatttgcacaacttccataatagtaatgaactattcatatggactacgaccactgttaaccataaacagcttgtagcgctggaaaacaatcacagatctaccgccttatcttcttttccttgaaatacacattgctatgaactggctttgaacttgattatagaaacaatgacgaccattctaaagcataacatcgtgaaagatcatagaaatggacgacggtacacacagaaacttg

SEQ ID NO: 54058 - DNA, 452 bp, Glycine max
  unsure (1)..(452): unsure at all n locations
tctaccactcaggtntgtttctccgaacgctaatatctaatacttcttttagggtttgtgatggatgatctgcgagaatctatgttctatccgacttcatttatctcagtgaagttttctgcgcttccacgacgcaaatatagggtttcgcgtttagggttcctttcaatttatttattatcggggttttcaaaaggatcggcaacaccctaatttggggtttggggagagtctctattgacgttgctgatcagggttaaattattggtctttgatccaagtcttcaatgggttttgatcttgatgttgttgatcttcctcgatcaacatagtttgttgccgttcatcacttgctttacgatagttattttgggaatggaaaatatgtgagccaaaaggttttgggttttggatgaagaataagtctatggctgggaattaatcaatgagtt

SEQ ID NO: 54059 - DNA, 310 bp, Glycine max
aatgggagagctactgattctgcttcgcttggacctgcccattttgctttgagtttcctgaagagatcctccaataaacacattatccttaggggatctcctattaagtatagggaataatctccttataccctctattctcaaactctaatccatccttttactagtgatcctctaagatatatcagaattctggttgtatatctatcaaagagtaatactatcctaccgcgattagtcaccacacgactcaaaaaaaaacattactactaacatgggatatacttaaatgactagtaaacaatggcat

SEQ ID NO: 54060 - DNA, 474 bp, Glycine max
  unsure (1)..(474): unsure at all n locations
gtggctatcacaatcaaacatgaccttcattatcctcaatttcatggatnnagnccatacttcagagattcatgcaaaaatcagtactaaatgatagtcgtttctctcagaatttaaggatcacactctcaccgggatacggtcaatgcattccttcacaatcaatctgacaaactgactaacattntcagtcatacttccaatcacatgctcattctcttctaatggctacaagcttgatcaaaacaattatctaattattccaatccactcaaatcatacaattgctcattcaaatcattctcaaacactcatttcacgcaaaacaatccactacaaatcactntcaatcaattcactgttcaaacaagctntttggtacaagcaaactactcaaagtgctgaaatttaagtaactganattanaagaactgaaatataaaactganattaanatgactgaacataaatcat

SEQ ID NO: 54061 - DNA, 297 bp, Glycine max
  unsure (1)..(297): unsure at all n locations
cgacttgggaaagcacattcaagcaagctaagtatgtatttcacaacgataattcgatatttgaaatacttcatcgaggagtttgagagtgccctgtangagaaatttctagtatgacccattgaagcaaatggacaaatttcttcnaagtaacaatagcttcaattatattacaagtcatacaaatatctcctatatggcaagtctatttgaatgtgtactctatctcttcctgttaatgccatgaggagttattatcaagttagtatatgtttgaataagcttatataaaaacac

SEQ ID NO: 54062 - DNA, 421 bp, Glycine max
  unsure (1)..(421): unsure at all n locations
tctanactntgtacaagaatgaagctctgataccacttgttagacaagtggcctcagatatcttaagaagggggggttgaattaagatattccaaactgtttcccctaattaaaaatctatttcactttttactcaagttatgaattcccttaatgacaatcttcttaaatattaattcaaatgaagcaacttgaatatgaatataaagcaataataaataaaggagattaagggaagagaaaatgcaaactcagttttatactggttcggccacacccttgtgcctacgtccagtccccaagcaacccgcttgagagttccactatcttgtaaattccttttacaagttctaaacacacaaggacattccttcctttgtgtttagagatcctttacaacaagagactcacagtctcttaa

SEQ ID NO: 54063 - DNA, 340 bp, Glycine max
tcaaaagatgtaactcttcaaaaggtttttgactttttcacattggttttaagtctttctaacagctataactcttcttaatggtgctcttggccaaacctgtagagtctataaatgcttagctttgatttgcttatcaatacacatttaacacttatttctacaatcttttacgagccttgaatctctttgaacttcttcttcttctttgtaccaaaagctttccgaagttttctggtttctaaaccttgaaacttgtgctattatttttattctctctcccttgcccaaagattcgcaggactaccgctgattcttttggctctctctcctttccaaa

SEQ ID NO: 54064 - DNA, 157 bp, Glycine max
ggtaagctcctctttttggcttattccctagcggatggtgcctcatctcaccttatctcctttgacttctgctgcatctgcatggcggaaaaacaccattaatggacctgattgaagctcaaagatccagcctccatagaagcgcctcaagcaagct

SEQ ID NO: 54065 - DNA, 330 bp, Glycine max
cctcactacctaccttattagctcatgcgaacactgactgtgtatatatacagcttcatcgccttccttctatcctattatttgtcaccataacacatatacgcctcaatagcttgaccttcatgcaatgtcaatgtacataagatcttctacatatcaaaccagactatttcttcttcccatggtctatcgacatatgaaaactgatccttatttgagacctatatacatacgccccctattgtaattccttgacaagtaatgcattattagaaccattactttgcacaggctagcacactctataaccatgttctatcatcaatatct

SEQ ID NO: 54066 - DNA, 438 bp, Glycine max
  unsure (1)..(438): unsure at all n locations
atatgcatggtgaataggaagcatcaacaaaattaagccatggctattgtgcaagcaatcaatggggcgaaaacacaccanaagattatgatgatggatggctcaatattctcacaaaggtaaacttatcactttcaaattgagctttcaaaactatcatgacatgttaaagaaaaataaggatttcaaatcacacaatgtcaagagacttttattttcagaacaattacccatttcttgaacatatcctataattcaaagaanaacatgcanagttgtacatgcaaacaanattgaccaaaattaaactagaacccaacaaaactagagagaagtgacctattatattatactagaaacccacgaaacttacaaattaaactaatttacacaactacaaaccaaaccaaaaacacactcccatgtcgcacctaccct

SEQ ID NO: 54067 - DNA, 410 bp, Glycine max
tgtgaaattcaccctgatcccgatgccatacgccgacttgttgtcggccatgatcaccaaccaaatggcggtggtaaacctagggaagatctaccagtctcccttcccttgatggtacaaccccaacgcaacctatgcttatcatggaggtgtctcggggcattcaatagaacaatgcgtggctttcaaacacaaggtccaaagtttgattgacgcagggtggctgacattcaaagaggacaacctaaatgtgagtacaaaacctcttgccagtcatgggggatccgcagttaatgcggtggaggagtataaaccttgtgggctgaagcagatggaagatgtggtaacctctatgaggtttatattagaatcgttgtgcgaagcgggcatgatttgccttgacgggcata

SEQ ID NO: 54068 - DNA, 151 bp, Glycine max
ctcagctgttggtctctcactacacatcctatgattctcattcttttctgacttgattttgtgtgggcttttggtgttttgtgcggatggggataatgtgtgggccgatggtggtttgttgtggctcaagagcgagtgctgctaggtgtat

SEQ ID NO: 54069 - DNA, 498 bp, Glycine max
  unsure (1)..(498): unsure at all n locations
atgatagtaggcaacggtctcttactaagggaggttatttgatttttgcactaatccctttaataagagactcacccctcacaattgtcgtaccgtgcggtcggtacctgtgaagaacgctgaccttagctcactggatcagattgacagtaatacagctctagacatgagatgctctagcggagccgcccgttccatgtgatcatcttgatatcattctgggagaaagtggagatgggcatgaaactgcttcatatctggctccatagttcttgttgttgaatcgaggatggtgctctcatcattcattatgtgtttgagcaaaattacttaacactatgcgaaagacgcgaactgcactacaatcctatattattcagttaagtaatggtgcattgtttggtgaatatttattcttacaaaaatcacatacatttttgataagcatattatcataggtttcattgtaacatagtaaggctcactggttagagtgcn

SEQ ID NO: 54070 - DNA, 402 bp, Glycine max
  unsure (1)..(402): unsure at all n locations
agcttataattttgaagaggattatacacttatgttttttagttagtcttaatgtttgttattagtatcatctttgttttgttgtaattgttgaacactttattagtgtattttattttttgtgtgaaatggaattatgatagttatctaaatttaattcatcccgtccaatttgattcattattntaatattaattttatatatatagatatgtcatcaggtggtactgatcctccttgacccccgtcacatgacaatagtgagaaagggacaagtggaaagaaaaaatgatatgtgattaaactactgccaccttgagatagtcatccatcatctacctcatcctcgtctattgcatctatcaatattagaaaatatgctctctacatcggttatgtatg

SEQ ID NO: 54071 - DNA, 479 bp, Glycine max
  unsure (1)..(479): unsure at all n locations
tgttgtncacttgaaaatcattagtagcaaatgctattgtatcaaagtcaaacaaaggtagttccaattcttcttcattgctatcatttatttttacttttgtcttcatgacatctgttcccactccaaatgaacaagatttaatcaaaatatttagcatcccatgttacaagccttatcatatgctctatcttaagttaaatggttttctaatgtgttttaactaanaaatcaaatgaaaatgaaaattgtctaccgattttctttttaaaaaaacaaaaagaatggaatggtttggtctaataaatattggagagaaataaaacatgaaaaaaaacgtaattnttaaaagaaacaatgctttgcttctcaacaaggatgaaaaaaaatattatttaattgacaaatgccaattttgtctattattaatgnttgttttagactcatcaaattaatgtttattttagactaatcactta

SEQ ID NO: 54072 - DNA, 513 bp, Glycine max
  unsure (1)..(513): unsure at all n locations
cgcaccctttttttggatcatgagatcgtgcacgnacccgngatccttatagtcacctgcngcatgcaagcttatgcatggtgcctcttatttgtctcttttctaggctcggacgtatacgtagctgtcatctttcatgaccttgctgcaagaaaaaaagacaaatactgtgcccgctctccaataagaattttcaagactacatatatttaaggacttttcattgactaattcatctaatgacctctgttcttcaccacttatttttcctccagtaaagataactttttacactgatcagacgacgttacatgaatcgtcatactcctatcttttattcaaaacccagttatcaaatgatattcaaatttctcctcccttatgctccccaccacacgtgtgaactgcaattctgattggtggacttgacacaactcacgatcgcgtccttgagtaactaccatgacttcttccattccacgttccatgaatttacctcgaatgtatgttgcg

SEQ ID NO: 54073 - DNA, 384 bp, Glycine max
tccacaatatgcaagagattcaaatccaaatatcatgaatctaccctaaaccaagagaacagggtagaggcagaaaactctacccaaaacacattcaaattccacagctttccttactcatataccccagtaacattctcttcgttccgattcgttaaccgttggatcgccttgaaagtcttactagaggttgctagtacatatatctacatcttgaccgttgggatctgctaaaaacggcctggaacccgaaatgtactattcttcccatgactagcaatgcacaagcattttctgcacatgttgaaaaattctgctgcacaattcaacagcgttcttctgcataatagggcagatttcgaaatccatcttgcccacatcaaa

SEQ ID NO: 54074 - DNA, 167 bp, Glycine max
  unsure (1)..(167): unsure at all n locations
tcatatggtccttttgtattattagtacctctggtactttatgcaatatatatattatttttgctgagcaaaaaaaaaaagtacctctggtactccaattaatatatagattacctttgctgatcaaaaaaaaaaatggaagcagaaggggagataaaaagcanaat

SEQ ID NO: 54075 - DNA, 377 bp, Glycine max
gcgcattagaggatatcggcggagagcgcgtctgctcgctcacctgatggactaatgcggtgcgctgagtgagatgaaccctcactgagggaacacgcatagctcattcttcttgcagattcttcctcgcgctcaaccaaaggagttggtgcgctcagcggatggatcactaagcgggcaagttggctgaacatgacgatgataatcagcgcttcacgaacttgactaatgaacctgagattgaaaggaaacgattcttagctcactatacgggagtgctagctgctcttacctatctataactaatagtaactgcgcctctacaacttatccataaattgggagagtttgatcccattacacacggttatacacac

SEQ ID NO: 54076 - DNA, 215 bp, Glycine max
aaaataacttaatgccatttacctagggaattaaaaaaaacttaatgggtgagtgttactgaaattgtggcaaccaaaagtcacccccaacaaccaacaagtcagccaccatttggtctcccaataagctgatgcctatgtttgcaattgtgcccttattacaacttgaactaaacctaactaaagcccttttaattgattaacccaaaacatat

SEQ ID NO: 54077 - DNA, 455 bp, Glycine max
  unsure (1)..(455): unsure at all n locations
ngaccccggttgaagagacaaccactttctagcttgtgcctatggtaggtcatgttactcaattggggaatcaactacccaaggatgacagcatctgaatacaagtcatccgagaacatgtcaacttattttgctagtccataatagacatgcccggtatcacccaagcttccattgtcttaggttggccatatgtgaagatgcctagcccattgcctagaggaagagaaagatggatgaaaggaggtgtcgagcagtgcggcaagaagtggccaagttgatggttgccaggtttaataagccaaacgagaagtggaggatgtgcaacaactagactgatttgaatcgagcgtgccccaaggacgcacatccacacttgaacatcgaccaactggtcgatgaagtggccggacacagaagtgttaagtttctggatgtttattctaactatgatc

SEQ ID NO: 54078 - DNA, 328 bp, Glycine max
agtcacctgcggctgcaagcttcatcttcgactccgatggtgttgcactgacatacatccctccaaatcaacttgctctgatccggggtttcccttgcaccacgctgtatctggagctgttgttgctattgctgctgtggagatctttctcacaatctccgctgctgagttgtatgagttgcttcgcggcttcgatctccgattgggaaaacagaatcagcttctgggggttcttgatttggtgtgcaaaaagagatgtggtcatggtttactgaacagagagaagagaacgatgatgaattggaactgctatatatgagagatcttt

SEQ ID NO: 54079 - DNA, 455 bp, Glycine max
acactattaatgcattactgttaaatccaatatatataagtaaagtttatagattacgtactaagtttcagaaaataattatttattttttttaaaaaaaaattagtaagcatactttttcattctgaaaaagataattcagaattaaaaaccttcgttttggattaccttttctgaattgatcaaaaggagtggtgactgataataaacttctggactaaaatttctataaagttatttatattaataacatatttgtaaatctcattaagattttatttatatttcttaattttctcattactaaatattataaatcatgtataaataatattgaatataccaataaaataaagattgaaataaaacactttttaagagaacaaaatatttaagtaaaattctttttttttctatacgtaccatagacttattattaagaataataaatctag

SEQ ID NO: 54080 - DNA, 360 bp, Glycine max
gcttcaccggatgacgccgatcgaacattttctaactcgacgtcatgccaatttcgttccaggattgaaatgaaaacctcgtatgcgacatctgtcgtgaaatagcgaccgatatttttcaacccacattgcacaattctttttagaaaaactcgctgggcgataatggtctttttacggcagagtaaagtttcttgttttggttgtgcataaaaaagttacaatgtacttcggctaggtttttcgtgcgagttcaaccgacattttgtttcgggcaggaaaacattatcccacctctgcaaaaaaaatatttgctaaccggcttcatgcatatttcattcaacgattgaatagaaaact

SEQ ID NO: 54081 - DNA, 458 bp, Glycine max
  unsure (1)..(458): unsure at all n locations
ctcagcttctatataagctgaaccatttatcaataaacacaagttgtgttttattcagaaaattagagtttatctcttttatcttagtgagagtgattctcctaaattcttgagtgattcaagaacaccttggctgtatcaaaggactttcacaacctttgtgtgttgccctcgctggaaagagtgattcattccttcctttcatcatcacccttgttctttcaaaccacaattccagaaaatccacctctgcccagaattatctcgtggccataactcccattntacgtactcaaattaagattcttgagcctaaattgaatttcaaaacgagacctttcacgtcgttttggaatcacctcatttggagccctgtagctctagttatagccatatctatatntctgtgcagccaccactttacctacggtttaccatcccattcatccattttttgc

SEQ ID NO: 54082 - DNA, 121 bp, Glycine max
tcataacttatcacacggacgtctgattcagccgcataatatatcgagaagctgagaattgaacaaccgaagctctcgaaaaactaaaatggtcataacttttcacacggaagtccgattt

SEQ ID NO: 54083 - DNA, 423 bp, Glycine max
  unsure (1)..(423): unsure at all n locations
ctaagctgaattgacaacggagcttcagagattcaatggtcatacttatacacggaagtccgattcaggcgcataatatatctagacagtcgaaattgaacaacggaagctctcgagatattcaaatggtcataacttatcacacggatgtccgattcatgcgcataatatatcgagacgctcgaaattgaacaacggatgctctcaagaaattcaaatggtcataacttatcacacggaagttcgattcagacgcataatatatcgagaagcttgaaatngaacaacggaagctgtcgataaattcaaatggtcataacttatcacacggaagtccgattcaggcgcataatatatcgagaagctcgaaattgaacaacggaagccgtcgagaaaatcaaatggtcataacttatgacacag

SEQ ID NO: 54084 - DNA, 435 bp, Glycine max
  unsure (1)..(435): unsure at all n locations
acttctacaatggtaagtcacttgcaattaatttcttttattatttatgtttattgtgtgggtgactgaacaaataaatgtgttctgtatacgattcattggaagagcaagcgtcacagggttcctttgtcccccatggacgtcaggatatctggactgctgccattgggcgaccagaacaccctggtcgtgtgcgtactgttggacccaatgtgacaatcaagtaatactttggaatagctccacgaacctactaaacttcttcctttatggctcccanagaactagagcagttgactcaacagatcagggactagttggaggagttgatcacagaaaaagtgactcaacagctgatgttatccttcagtcagatgcagtcccagcttcagtcatatatgcactcacaacgacttgctctgactctggagcctg

SEQ ID NO: 54085 - DNA, 241 bp, Glycine max
tatgaaacatttaccgagtatgcccaaagatggatagcagtggcagcttaactggaaccccctttatcggagaaagaaaccatgacgttgtttatcaataccttgcgtgagccattttatgataagatgattgggtgtacctcatcaaaattttttgatatagtcgtcataggggagagagtggagaacgacatgtggaaagggaggattgattaccctagatcagccaattcaaaaactc

SEQ ID NO: 54086 - DNA, 391 bp, Glycine max
tgccgcccagcttgcccaggcgagcaaggttgcttcctccagaagcaacagccttctggaggaagggtggaaggcccaagtgggccagattgctatttgcaccccccctttttactaaatgcacccccttctattttttggtaattctttttccgtaacgttacgaaactttacgaatttcgtaacgatacttatttcccttccgcaaggttacgaatccttacggattatgtatttactcttttttagctttcgaagaagttacggaaagtcacggattgcgcaaaaacatctcttttcgacttccgccacattacagaatttcacggatcgcgcaagcctgcttccttttgatttccgagacgtctcgggacttcatttattgtgcaac

SEQ ID NO: 54087 - DNA, 247 bp, Glycine max
aagcactagctcactgaaaggtaactgttcttttggttggttggtcaagataaaggatgtcccatttttcatgacacaaaagcaaaatgatgagtggaactttatgcaaactggtctgcatgccctatgggaccctaagtgtcaaattttatggcatgtgtgctacggctacgatcatttcctctatttaatcaacccaatgtttcaaaatatgtcttttattaattggtgcatcatccgagtccat

SEQ ID NO: 54088 - DNA, 437 bp, Glycine max
tgccacccagctcgcccaggcgagcagggttgcttcctctataagcaacagccttctggaggaatcttgtggagggcccatgtgggcctggttgctatctgcaccaccatttttactaagtacacccccctgcctttttttggtgattcttttttcgtaaagttatggaaacttacgaatttcgtaacgatacttgatttcttatcgtaatgttacacaaccttgcggattacataatcatcccctttttgacttacggaatgttacggaacctcactaattgtgcaacgatgcctccatttgatttccggtgtgtcacagaaccttacggattgtgcatcaatattttcttttgtttttcggcatgtcccggaatttcacaaattgcctaatgatgggtgccaagcacctcacaaggaccaaaccaaagttgcatg

SEQ ID NO: 54089 - DNA, 282 bp, Glycine max
  unsure (1)..(282): unsure at all n locations
agcttgngaggattgatggagaccctgtgtttttataaacgaggatatgggctacgtgggagtacgtgagctcacttggaggtacgcaacatgggatggtgggtttatgcgcgcattgtggatgtggaaaacttgttgtgcaccatcgaccgaccgccacctattaccacatgtgatgggtaccccataatcctacatgcttgagatgaagaagtgtagaagggcgagacttcctgcttttattgttgaccacagagtggtacctgcagatatgtcgtgggg

SEQ ID NO: 54090 - DNA, 459 bp, Glycine max
gcgcgggtctgggagacaaaggtcaagtggtcgttatattctaagatgatgttccgagtacattggatttggtacgaccatgccctcctgatttccagctgggaaattggcgagtggaggaacgccccggcatttacgcaatgagcataatgtaaacctttacggtttttaaaagctctatagttgggcctaggctttagaggttttccttttgttaaggctttgtgtcttttgtttttgaatttctaatacgaggacctttcttcatctgttcctgcgtctctacccattctcattcatttgcatgttcacttctttttttgaaacggcagatccgatgacgagtcccccgaaggtactaatacctgtgacccgcttatcgacttcgagcaagaaatgaatcatacggaagatgaatgatatgaggatgtgggactctctccagaattataaagaatg

SEQ ID NO: 54091 - DNA, 377 bp, Glycine max
  unsure (1)..(377): unsure at all n locations
agcttcggaagaaagtgatgaggtacaagctctataggcagagcttgaaagagcccgggtagtcgaagagaagttcaagtccatagccatcaaagtatgaaaagagtatgatgaactaagggacgtcgatatggccaccgctgaagccttggaacgagaaaccaagaaggcccgataggaagaacacgaccaaagcaaagttttgaggggctttatagggcagcaatagtgagctcaagctccaaagaggtgaaaggaatcatcacgggtcanaggcatgatcttgaaggacgagctaaaggcttgccttatgtcgaaaagaaatttgtcccaacagttaagcaagactgaagggaatatgtgggccatcatcgatg

SEQ ID NO: 54092 - DNA, 471 bp, Glycine max
  unsure (1)..(471): unsure at all n locations
tgcgcacacttcagatgttctatcaaagatcccaacggtcagatcgtggaanattgtcttgtgaagctgcagaccaaattgcgagacgatccaacggttaacgaagactgggcacgcgttttactgaggcagcttcatgtagcttcctcacgaagcttcattaagaggcttcctcaagaagcttcctcgtggtttcctttgaaaagtttctcaagaagcttctttgagaagctagatccttatctacccgcacccctctattaactaaattaacctccttgaaaataattacggataaaaaataacgcaacaaatataatcaaacatcaaacataattactaataatatatatatatatatatatatatatatatatataacagggtgttacataagactaggcttaaactacacaacattattgtaacagcataattaaaaccaaaacttaactcgtagatccctcatgt

SEQ ID NO: 54093 - DNA, 68 bp, Glycine max
acaccatgtcagcatgcactgacttttttaattccctttgcgacaggcagtccataacattttgacta

SEQ ID NO: 54094 - DNA, 446 bp, Glycine max
  unsure (1)..(446): unsure at all n locations
ngttacaacaganatgttagtgatgatgtcatggatggatgcatctttaaaaactgtccaaaaatttgattaattgtggaccatgccactgagcaatttttcgtatcatctatggcatattgctaaataaagctttgattgtgaatgagttgttcacaatgctagcttttttcttttgtacatcctaataatgaatcaacaataaaatggttgctgaatgaacaatagatggttaattaattaactagcactgcacanaaaaaatgaatttttgtaaagatctcattgatcagaaccaagcaacccactttcctcatcatacattttattttcccgctctgttgttttctgagctagctccactgccctcttacattgctgctcccaatctgtntgaatcaatgtgtaaaccatcatacaaagacatgaagcctgtgcagccacca

SEQ ID NO: 54095 - DNA, 463 bp, Glycine max
  unsure (1)..(463): unsure at all n locations
agcttgctaagagagttcttcatcctctctattgtgttgnngntgngttcttntgctgagctgtaaatgtagagaatggatacatgacctatgaccccgatttggtcactatcggatagccataaagggtcctttggagttggttgatttggagtgatgttgtaagaagccacaatggttttcatcttttgtgcttgaatattgtgctcgaggctgtatttgtatttgtactgtatggaacaagtagtaacttaaaccaaggaccaatattgtacatatatntactattatcaaataaatattaatatattataaatataaattaataaaataatactttaccaatattattaataaatataaattaatcagtatacattaatatacgtcatgctactgagaaattgatattaatttaatactatatatttctaatatccatcaatatatatatatactaatc

SEQ ID NO: 54096 - DNA, 487 bp, Glycine max
  unsure (1)..(487): unsure at all n locations
ntaatntatcgtggctganattgagtntacaatccaaagttctaagtattaacaaaggaaattgtggccaataaatttaagggataaatgatcatttgattctagatgtataaattggtgacatttgaattcttataaaaaatgaaaattgtgattttcatccttatgtaaaaaaatgtgacaattatattttatcatacaacttaattaataacaaattatattaatattttaattntataatttaatgtcaaattaatcataaaaaatataacttaatctcaaacttgtcccataaaatttagctacaggacatttgttaaaaattttatacatttaaggattaaatcaatttttgttttctttcaacacctaatggttaccaatttacactctcaagaatcanatcgtttatcctaattataagtataagtataacaataaaaataattaatacgtatattaggcacccatgatanattaatac

SEQ ID NO: 54097 - DNA, 353 bp, Glycine max
  unsure (1)..(353): unsure at all n locations
agtaccttagntaatcacaaatgaaacactcaatttagggtcaaataagttaatcataaatttttaatggttttttaaaaaacacctaaataatntaaaaaanaatgcaattaattccttattaatataaaaaaaattacataacaatccgtacaaaataattgttaagtgacctcaataaaatatgaaaatttgaacatcggtccctagtaaattgcaaataaaacatttgtgcatttaccaagaggtccctaatatagttgtgaaaattgcaagtaatccttttgtgatngctaataggtcattgacataattataagaattgcaattcattgctaaatgacttctacagt

SEQ ID NO: 54098 - DNA, 479 bp, Glycine max
  unsure (1)..(479): unsure at all n locations
tgtggttggctccctcgctcctacatccacaatcttaatctcagttnnttaaacgtagttcgaaccctcattcctacatccacgatcttctcacaacaatcttttaggacaagctagacaaacttataagtcttcccttaacatgaccccccctctctcactagggtggtgacccccttttcaagctcagtaattttnttcatctaaagaacctttacatatagacctagcattataattttaaaataggaaacaaatatctgatttataaaatatatctttaattttaaagagcatcctaaaaataagacaatatcctagagatttgaaattacaaatttgaattgnttcccaacaatacttccctatattaaaatttaatttcatctactatcttcttggatgttcatcacacttccactatgcacaaaatctagtatgttntcctatatgctccacgagtactaaatggtgacact

SEQ ID NO: 54099 - DNA, 465 bp, Glycine max
  unsure (1)..(465): unsure at all n locations
tctcctcagatccctctngttggactagacttagaccaatcaactttattgtaacaacatatttaaaaccaaaacttaatccgcagatccctcatttaagactaagtttcaattctacttcattcaagttctaaggcaacaatacatttcccaatgttcaagtcacctaaccagacacacaaatggtttatcagaccaagagcatacaaaatttaagcactgaaagaagcattgaatacaagaaacacaatcaattagatattaaagtaattaaatcagctattctttagaaatccccaacaaggttgtttagccagccattacagaagaaaccctaacaataatgagattacaaaacctatgtatctctacaaaagctgctcctcttgctgcctccagagctctntttcccaaacaggcattgnggtgtgctctggaaatctgtgttcaaagtgtcaaatatgt

SEQ ID NO: 54100 - DNA, 440 bp, Glycine max
  unsure (1)..(440): unsure at all n locations
tcgatatattacggggactcaatcngacattcgagtaaaaagttatttgtgtttgaatatgctccaggctttcgatattcaatttcgagcgtctcgatatattaccgggactcaatcggacattcgagtaaaaagtattgttgtttgaatatgctcagagcttcggattccatttcgagcatctcgatatattacgggactcaatcagacatccgaataaaaagttatggtagtttcaatatgctcagggcttcggcattccatttcgagcgtctcgatgtattacgggacttcatcagacatccgagtaaaaagttattggcgttggaattgctcagagctctacattcaattccagcttttcgattataccggatcaatcacacatccggtnaaagttattgcattcgaatatgtcgagcttagcaatcatttgagcg

SEQ ID NO: 54101 - DNA, 412 bp, Glycine max
  unsure (1)..(412): unsure at all n locations
cgacaataactntntactcggatgtctgattgagtcccgaaatatatcgagacgctcgaaattgaataccgaagcgctaagcaaattcaaacgacaaaaactttttactcggatgtctgattgagtcccgtaatatatcgaaaagctcgaatgtgaatgtagaagctctgagcaaattcaaacaacaataactttntactcggatgtctgattgagtcccgtaatatatcgagatgctcgaaatggaataccgaagctcggagcaaattcaaacaataataactnnttactcggatgtccgattgagtcccgtaatatatcggaacgctcgaaattgaatgtagaagctctgagcaaattcaaacgacaataactttttactcggatgtctgattgagtcccgcaatatatc

SEQ ID NO: 54102 - DNA, 332 bp, Glycine max
cgtctacagaatgcaaaagtgatacggattatcctctcgggtatttccgcccgtcagcgtgactcataagtcagtatgacagatcttttgagcacggaagatgacgtaaatcaccgcgtgtaaacgggcttgtctgccgcgattgacgaatggcgcacaagacgacgttagtctcttcgtgctatcaggctttcggtcttacgacaacaaaaagtttatacggataaccactcgggtatattcgcccatcagcgtgactcaaaagtcagtatgacagatcttgtgagcgcggaagataacgtaaatcttcacgtgtcaacgggcttgtcggt

SEQ ID NO: 54103 - DNA, 438 bp, Glycine max
  unsure (1)..(438): unsure at all n locations
atctctctcagacgagtggattgattattgctgaagttttctctttagcccatgcgatccaaatgctagcctgggcgaatttatagtcaaaaaccttcatagatgaccatttttctccttcttaagcattgttttggattcatcaaacaaccatacaaaacctatagaatcatgaatgaatctttcatatctaagcaacaatattactaaatatactatatgtatacatacatatatatatatatatatatacatacatatatatatatatatatatatatatatatatatacacaactacatttaatggagatgtggaagaaaactatcactatcagatgaggagtgctaacatttaatcccaaaaacaactaaaatgggcacttatcatattctacaccaaatcatgagaatctatccacttcactgtggatgttn

SEQ ID NO: 54104 - DNA, 361 bp, Glycine max
  unsure (1)..(361): unsure at all n locations
cctctctccctcgcgggagactctctctctctcctctctctcttctatatttcgattttagttttagtctctcttctctttctctttcattttcgattattttcaattccagcgcagacttttaggtttatcaatgagatttcattctctattcgaataatggaaggctaaggccgcagcgttgttctcccttgaggatcaagcacagttctctgtgaggttctattattactgctaaatcctggttagtttttcctcttcactaattactctgaatttgttgcgtttaattcatgcatgcttagtgcttgattaattggctctgcgcgtaatctacgtncatgctcaatgatccgttatg

SEQ ID NO: 54105 - DNA, 471 bp, Glycine max
  unsure (1)..(471): unsure at all n locations
cgcaggtacttgngtctttagtaaaataatagttataatatgaaaggacaaaacttagatgcagttctccaagtttgaattggagtttcactttggtaattctgtgtaataaaaggtttgctttatatgttaacacatattatcgaggtgaaactctaattttgattggagaacaataacatctaatgaacacggaactgtgtctttagtttgtccaataagaaattgggtgctcgactgtattttacttactgccactctgttgacatacaggaatntgtgagaatatgacagggtaaaaaaaatcaattttaactttgccatagtggaaaattgttatatgcttctgaaccattgtcgtaagatattttcatttggcttggtagtattctccagtctagtgggaagagacttggcagaggtgcctacatttagtacccaattgaggattgagtctcgaatatgattgtc

SEQ ID NO: 54106 - DNA, 367 bp, Glycine max
atccttaagtcacctgcggcatgcagctatcactcggagatctgattcatgctcattatatatcgagacgcttgaaaatgaacaacggtagctctctagacattccaatgctcattacccttaactcggagggtcgatttatgcgcctaatatattcagacgctcgcaattgaacaacggaagctttctatatattcaaatggacataactttctactccgaggttcgattcaagtgcatgatttattcagacgctcgaaattgaacaatagaaactcttcagaaattcaaatgggcataatcctaaactcggaggtcccgattaagcgcatactaatcgagacgctcgaatttacaatggagctct

SEQ ID NO: 54107 - DNA, 448 bp, Glycine max
  unsure (1)..(448): unsure at all n locations
ngagatgaggaagtgttgaagggtgaaacttcctgctnttattgttgaccacagagtggtacctgtagatatgtcgcggtggtcaggagaccttgtggacgtcaggtggggtgctattgcccaaaaccaagcttgaccaatcccgacccaacccgggcatagtcggtcagtgagaacctgtgatgtacctaagcaggcgagcttctggcagtcaacagataaaaggaaaacaagaccacaaagcaaggaggcttgtggtggctggccagctgtgaattttgtgtaatatgtggatggtggcctctggtaatcgattactaagggtgggtaatcgattacaaggcttataaatgaagacaggaggctaagatggtctctggtaatcgattaccacggggtgtaatcgattaccacgcttgataacgatgtcaggaagcctctggtaatc

SEQ ID NO: 54108 - DNA, 249 bp, Glycine max
gagctctactcatagagagtcttatcttaattctgtggatacatgaccccgccattgaacctagaaaacattgttgtgattgcgaaaccatcagactctgctatgagtggatgtctttcgaaacatacagttataggaaacgttcatcatgagagttgattttgctactagagctcccactaacaatgaagagtgttcgtgggttttcattaaaccttcttgatgagtatggatattccatctcgaccc

SEQ ID NO: 54109 - DNA, 371 bp, Glycine max
  unsure (1)..(371): unsure at all n locations
tcttttctctttttttcttgagatcgcatatactgcatccagaaatcttgttttaaccaatgcatgtacgaatctggtattggataactccatcctctctgtactaatttattgccttgccaacttgaccatcatgttagctaacactgcaccaatcttgaagcattctctacacttctgggagaccctcttgtcttcaagattctgcaacaattgttccactgtttgcttacaggactatcgcgtatccttgagntcatagatggacctctgagcgcgtaggagttctagtcaatgattgacacaccaagaacagtcacctaccatgtggatttcttcaacatgctctattccctgaagcatataaactt

SEQ ID NO: 54110 - DNA, 254 bp, Glycine max
agcttgcattaggaatagcgaaagctcctcttcatcattaggaatagtacctgacatctcaaacaaacaaatcacacgtaacaagacaattatagttgctggttgaatacctcacccactcaagtgtatcacacaactatggcttttcttaatgaaacactcttgcctttaccactctaattccccttgagttcttaggtaattcaagagattatggccacaacaaaaaacaattcaccaatatgtgttatgta

SEQ ID NO: 54111 - DNA, 400 bp, Glycine max
  unsure (1)..(400): unsure at all n locations
gtganatcgaaaactaaccggttgaagattgactaacgttatataacgaacgaagaacggtgaagaacgttcatggaattgatcacagaaacgtcacgaaaccaccatggctgggattttctccttctttcttctctcactaatcttaagtgaattcttgaatacccaaggtgttgaacccttcatactcaacctccctcccctatgtataacaaaaatagaggaggtgcttgccggcgagctcgcccatgcgagctggttgcttattggtgaagctttctaatgggccctgataggcccaatgctgaaagacaccctacagttngatcagttcacccgcatctttcatatgttgctcatatccttttgaaatgtcacaaaactttacaaattatgtggc

SEQ ID NO: 54112 - DNA, 286 bp, Glycine max
actcgagaccacacttctcaacaacaagttcaaattcagcaagtgtgacctctcattggttgcttactaccaaactactactgtaatctacatgctggtctatgcagatgatattatagtgacagggaataatacaacctttatcaagtcttctggtttccaaactcaattctgagctctctctaaaagatgtgggtgacattgactactttctatgcattgaggtcagttctcaccctgtagcttccactattctcactcaatcaaactatatttgagacttatt

SEQ ID NO: 54113 - DNA, 435 bp, Glycine max
  unsure (1)..(435): unsure at all n locations
tggagctccaaagaagattcacccncaatgagtgttgtattttgtaaaaactcctcanattcattctcctagtttgtaatctatacgtatcccaaattaaccatgtgggttaaatntggttgtgagagaagtgataagaagaacccatggaatgtggatagcttagagagagtctctaagagtgtcaccttaagaagtaaaggaaaatacttgtattgtctttcctaaggccaattgtagtgttatggttgagatggatttcttctcaagagtgaagaaagttttaaggagagggacatctattgagagggaaaggtttcctaccaagaatcgaggtggttctatggtgagatgtcttcccttccaggaattgaattactttgtgggttaagcccactcganaaggtaaataatacttggtgtgtctctgtcatg

SEQ ID NO: 54114 - DNA, 480 bp, Glycine max
  unsure (1)..(480): unsure at all n locations
ttatgatgatggtgtgtctgtgtanctatacacctctaactnttcgtctagggaaagtatttctctacaagacagccttccttcnagggatagatnttcctcaatgataaagccttctccgagagaagactactctagtcctatataatatgaagccttgtgttacacgttgtgggaaccttgatgaataagagtcttgtgagacacaactcaaaagtcaacctctttcccttttcttccttcaatatcgcgctcccccctctctttatctctccctctatctttacctccattgaagcatactctccaagcttcttatccaaagcttatcttgggggagaagctccttcttccatgcctattcctaatggatggcgccgcctttacctcatctcccttgcctgccgtgcttctcatggtggagaatcacatcaaagacctcattgagctcaagatccacctcatatagctccacagcac

SEQ ID NO: 54115 - DNA, 360 bp, Glycine max
attgcataaactaatttataaaataattaatactattatgcataaataattaaataataaaataattaatattattatgcataaataattaaataattagtgaacgtaattatgactaatatttataatttgttttttacgcgcatgtcaaatatttaatttacaccatagaaattaattaattcctaaacgtgattattggtttataacaaaatgaagaaaaaagaattttcattttataataataagtaaaaataaaataatatttaatgcgtatgtaatgacgattttgcccttgtgtaaatatctttaattaacgtgttaggctgtgtttactgcgctttctttgttcttcttccg

SEQ ID NO: 54116 - DNA, 498 bp, Glycine max
  unsure (1)..(498): unsure at all n locations
aggaggtgttgatcttgatacgtgacatcacaccaccccgcanacaataattaaagagagagggacgttcttttcttgttacaaagngccctcacggttcagtgttatgtatttcattcctgcaccgatataaaccgcggttaatatatccaatcggggactactgtcatcaagaaaactatgatcgcgacatagtctgaacagattcttactaaaatggtctgttatagtcacgacctctaaccgctaacgtagggacatcgttatcatataatatactttgatatcgtgtcgcctatacaagtgttaaaagtataatagatatatcaagacgtttacttgggactggcgccgttcctaaaatagcgagagtcattgagcgagcttgacatatctgacttatatcttttcgattggaccattttttggcagaaacaaagtttcttctgtcacatacggttgtctctgggactgtcccatcattacaaagggatttag

SEQ ID NO: 54117 - DNA, 389 bp, Glycine max
  unsure (1)..(389): unsure at all n locations
ctgcagctggcatcatccttgtaggattcccaatgttctaaaactggactgattcatttgcttccaaagattcatggccttgcaagtgaagacccgcacaaacatttgaaagaatttcacattgtctgctccaccatgaaagccccagatgtccaagaggatcacatatttctgaaggctcttcctcattcattagagggagtggcaaaggactggctgtattaccttgctccaaggtccatcacgagctgggatgaccttaagagagtattcttagaaaaaattttccctgcttgcaggaccacaaccatcaagaaggatatctcangtattatacaactcagtggagagagcctgtatgagtactgtgagaagatttaaaaactatg

SEQ ID NO: 54118 - DNA, 374 bp, Glycine max
ctctatctctaacacaagatcctcaattgtcttacaagaacttgggagccatagatcacagcgatcaaagaatccaaggacttatcatcaaagtcgatggaagctttcttcgaaaatttcctgcatatgaacatgagttgattcaacaatctcatgcagaagaaacaaaaaagaatagaaagggaattgcacttaaagttaactcttcaatggaagattacaaagaaatttccagtgatgacgaagatgcagagaattttaacttgatggtgaaaaagttcggaaaatctctcataagatccaatgacaagaaattctctatgccttcgaagaaaattgagagcaacaacaacatcttcacatgcttcaaattt

SEQ ID NO: 54119 - DNA, 131 bp, Glycine max
gttgtgctttctttgtgctctcaagtagtttgaagaaggcacatgtgtgtgtgtctatatatatatatattaatacttcgccgggaatgtataacaggtcataatcatagatgttgcaattcaaactatga

SEQ ID NO: 54120 - DNA, 450 bp, Glycine max
  unsure (1)..(450): unsure at all n locations
gtcagtttagtcaaaggtaaagctaactatgagaaaccttctatgaatctcaggtagtatcctgctaagcccaaaaatctcctaatctcaaaaatagatttaggactctcccattcaagaacgacttctatcttagagggatctacaactatacccccttgagatatcacataccctaggaaactaactttctctaaccaaaactcacactttgacaagttagcataaagttgtcggtccctaagggtatgtagcacaatcctgaagtgttcttcatgttcctctctagtcttggagtataccaaaatatcatctatgaatactaccacaaaactatctatgtaagggtgaaagactttattcatgaagtatataaacacacctggagcattagccacaccanaaggcatgactagatactcatagtgaccattaacgggtcctaaagca

SEQ ID NO: 54121 - DNA, 591 bp, Glycine max
  unsure (1)..(591): unsure at all n locations
cactccgtcagtcgtnganagtatngtaacaatnantgtaaatatctcctnactanntctnnnncnncaggggagaggganattgagttcgttgcacactaccngcacaccgnganacnntaaacacgagccgcgagcacgccagcatgagaacagcctcggaatgtattgcttntctatcatcctcaaaatgagcacacgcggatgttaatataggaaccgtccacaaccatgaatctcgatcgaaaaataagaaaaaagtgccaatctcaattgatctgagttatctcctcgacacaagaaaatccaatagaaaggtgtggaaaattgaaccgccaccgactcttttctaatggtactccttctaaacccggtgcttgccattttcataactatcaagaaaaagaatcgcctggtttcttcaataatctacattagtcgttacgcgattggtcgctcaaggacatcatttcttaaacctaattcctattgaacacacagccggtttccatttattgactaatatctctcgcaagttaaattatcgcttccgcccatccacgagtgccacaattttgtgtcggacagacg

SEQ ID NO: 54122 - DNA, 486 bp, Glycine max
tatgcacagacagaatgataggtagaaggaggtattggttttctaacacacgggttccatgctcaactagcagaaaatgtggtgcaaacagcaagcttgctttaaggttggtgcacgtatgaagaatagtggcgtgaaagggagcaaacctggattgtgaaaatggaatacaaattgcagaattgttaatgatttctataatattccctctacacaaaatgacaaattccgttattaaggaactggtataaataaaagcatttgtcaaccattgacgggcatgaatgaatgaaatagcagatttcttcccttagctctcttattctattcttcttcttggaggcgtagaccctcgaagctcagatagcttttccctgcacgtaacacataattacagtaaaaatgaagagtaatgcatcattaaggattgatccattcaatttctgggccttagcaattagaattatttatgtatagagtatggat

SEQ ID NO: 54123 - DNA, 474 bp, Glycine max
  unsure (1)..(474): unsure at all n locations
tctntgggaccttgaacaggcaactaactcctctntcatttccatgctatgtgctcgcgattggtccctctcttcccttcgcagcttgagttcattgttgctaccccacagagctccgcgaaatttgttccggccatactcttccttgcgagccctcttggtctcttgttcaagggctcgtgtggtagttgcattctcttcccgtaatccggcacactccttccggatgtgtgtagcggccaacctgaacttctctttggcaagtttcgcctttcctaactcgcttttgagagcttggacttcttcgtcctcttccggtgcttcaaaactctcttcgctgacgacttttaacttggtgagccaatctaaacctcgtatatgaactttcagccattcatggtacccaccaatgatgccattacgaatgcccctaagttcttgatctttccttaacggggtttcccatgccttatg

SEQ ID NO: 54124 - DNA, 430 bp, Glycine max
  unsure (1)..(430): unsure at all n locations
atattaccataatctcanaaaaaggggagtagtgagtagttattgcaagaagaaaaaaatgttgatttcaattgtattctttaaataacaagtaataaatgccatgtaatcaacgtttcagatcaaatcaatcaaatgttgtttttcctctangtttattatctctatctatcaatcacctcttgcaaatttatatttttgtgatgatgttattattatgacgtgacacatctaattgtgtcattatttgtatatgtagtgcttgatgatttcatcaaattgtgacatcattattctaaaatatgctcatcattaatgaaatattttttcaaaaaatatatatattatagggacgataaacatacaagactaaagcttaacttaatatataacgattacaaaattatttaaatctttttttatatatata

SEQ ID NO: 54125 - DNA, 618 bp, Glycine max
  unsure (1)..(618): unsure at all n locations
tctttcattgcgaaatatatcantgaatatngngcaaaaatttataacanatntatatcctactattacctcacagcaatggagcnganatgagattgagtgcgtacgcagnaccggcgancctntagagacaaactgcagggatgcaagcttgataagaggaatggaggatggtgatactttctgcgtaagtcctgaccacagagggggacctggagatatgacgcggggggcaagacaccctggcgacagtaggtggagcgctattgcccaaaaccaagctagaccaatcccgagccaacccgagcatagacagtcagagagaacctgtgatgcacttcaacaggcgagctcctggcagtcacagatcaaggaaccaagaccacatagccacgaaacctgccgggaggctatccacctgagaactttgatcgatgtatggggaatggaccctggggaacgaataccacgggcgggtaactgattacaacgctaaaaatgaagacaaaagactaagatggtctctggtaatcgacaaccaaggggtggtatcgaatacctagcctgacaacgaggcttggaagcaagaatgcctcttgaatgcatcaccaagaagcg

SEQ ID NO: 54126 - DNA, 433 bp, Glycine max
  unsure (1)..(433): unsure at all n locations
tgatgggactaaatatgcgattgcttatgtatctacatccatcttcctaacatattttaaatgttggtgaaataatatcaagtgacaaatgtttgaacatatatgtattacaattatggatgatgtaagtaaattccttatttcttcactattaattaatattcattatgatatacatgattatctttttaaatttcanatctcattaataggtttatggatgagtggagttcaagcttgggtcatggttccgtgtatgcattccttgagccacagtccttacaatgcaaaggatagacatggtgaatgccaacaatacatttaaacatggcttaaggaatccatacgagaggtgtacctcggagcttacttgcatcagtaagtcatatctatcaaatgactgtaaacaatgtttttgtatacctatctaatt

SEQ ID NO: 54127 - DNA, 412 bp, Glycine max
  unsure (1)..(412): unsure at all n locations
atatgcatgtgaattaggacgcatcaacaagaatcaagccaatgctattgtgcaagcaatcaatggggcaaaacacaccanatgattataatgatggatggctcaaattctcacaaaggtaaaatcatcactttcaaattgagcttttaaaactatcatgacatgtagagaagaatcaaggatttcaagtcacaaaatgtcacaaaatgtcaagaacttttattttcaaaacaattacccatttcttgaacatatcctataattcaaagaaaaacatgcaaagtcgtacgtgcacatngaaatgacccanaatattaaactgaanatccgacgaaactaacaacattaacaaattaacacaactaacatattaacanaaccaacagaactagccaaaccaaagaacactccc

SEQ ID NO: 54128 - DNA, 351 bp, Glycine max
  unsure (1)..(351): unsure at all n locations
atggtccatttcaagtacatgttatgattatttacattgcacacaagattgaattgcctggtgagtataatgtgagtactacatttaatgtgtctgacttaactctttntgatgtagatggagaagccgatttgaggacaaatccttntgaagagggagagagtgatgaggacatatcaaggactaatggcaatgaacctttataatgacttggaggacctgtgccaagggctagaacaaagaaggccaaggaagctcttcaacaagtgttaaccatgctatttgaatttaggcccaagttacaagtggagaatgttcggattgtcaattgtaccatgttccaagaagtgt

SEQ ID NO: 54129 - DNA, 153 bp, Glycine max
tcgaccggatccttaagcacctgcggctgcagcttagacggttagtgtaatgcatgattcagagcgtaaattatggctgttactgatgatcatctgagaatctactttatacctgaatgaattccatatagtcacataatattatgcatgatg

SEQ ID NO: 54130 - DNA, 370 bp, Glycine max
  unsure (1)..(370): unsure at all n locations
ctaagagcacccttatggctcgatatagtctcctatacaacgaatacatagttcggcggatccacagagggagtccttatgacagctctgattacttcgcactttcatctgagagtactaatggaagcctatcgctatatgcagatcatgagtctataccaagcaactatgttgaggaaattaccaaagtcaaagctaacttaagaaaagtgttcagaaatgaatgacttgctgcatcaagaagaatattggtacatgtcaatagggatagaaagaaaaagctnttgtgactctctcactaaacatacctcaagacacatcttgaaacgattagaatgtcatatgagaagctagtcgcgatatctacatc

SEQ ID NO: 54131 - DNA, 357 bp, Glycine max
  unsure (1)..(357): unsure at all n locations
tactttcggcacctactatatgttgacttgaccaacgctgttattggaatgttgcgacaatctttcaacaccttattcacacattctaatagggtggttgtcatgtgaccatatcgtcgtccagatgtatcgtaagccatgctccatttttcctttgaaatgcgatcaatccatcttgctatggctggactcaattgacgaaatttttctaagttntgatcaaagacatgcttgcaaggagtgtacgctacatcaaatntgttatcatcaaaagttgtatgtagacatgacactcanattaaataatgtataaaataaaccttacccaatttcttgaacatctcttttttgttcgcg

SEQ ID NO: 54132 - DNA, 487 bp, Glycine max
  unsure (1)..(487): unsure at all n locations
ctttgtggagagggacgtgactgttaatcaattggacagtatagtatgaaacattactgcctgcaataatttaagttttagtgatgaagagcttcctgaggaggggaggaaccacaatctggcgttacatatatcggtgaactgcaagtcagatgctctgtcgaatgtacttgtggacactggttcctcattgaatgtaatggccaaatccacattagatcaactttcctaccaggggccccccatgagaagaagcggngtggttgtcaaagcgtttgatggatcaagaaagtccgttatcggggaggtcgatttgcccattacaattgggccgtttgttttccaaattacattccaggtgatggatatccaagccgcatacagttgccttttgggtaggccgtggatccatgaagcggnggccgtgacatccaccttgcatcanaaagctgaagttgtcagaaatgggagattgatcactgtgagt

SEQ ID NO: 54133 - DNA, 297 bp, Glycine max
tgaaagaatgtattgattttaaatgcaaaacaaagccttgcttttatagactcttcgagtctggtccataagaccatttagaaaaagttatacttttagaaaaacttaaaaccaatcttgaaaagtcaataaccttttgagagttacatcttttgatctatcacaaatagtcactggtgatcgattaccaaataactttaatcgattcacaaagcttttatgtgaaaacatgtgactcctcacattgtgatttgaattcaacgttcaaaggcactggtaatcgattaccaaaatact

SEQ ID NO: 54134 - DNA, 499 bp, Glycine max
  unsure (1)..(499): unsure at all n locations
gcttgagtgtccgcatgggtgcaagcatgatncagtttgcttaattntctaaatcatcattgttatatgcgtgtcatggaaataatatggggcattcccttatccctgaaccgcttgccaagcaaatacccaaacatacgccatgtcttgccttccgcaagcctttaagccataaaccttgacccaggattggagttttacccttacccttggaagaaagaacaggaggcgctcccaaaaaggagtttcatttaatgttaagttgagaatgtgctttagaaagaaaaggaaaaagagaaaattctcaatcaaagattggaggaaaagataaagaatagagaaatttcccaatcaaagattggtgaaaaaagaaaagaatagagaatattcccaatcaaagatcggaggaacgcataagaagaggaaagtgagactactntagtctccatgtcatcaaccagaggcaagcgagcctattgacacgcanagaccgacatgg

SEQ ID NO: 54135 - DNA, 325 bp, Glycine max
  unsure (1)..(325): unsure at all n locations
ctgcagctggncaattcaacgaagaactttactggggtggacgagccagcctatatgggacgctttattgaaatggaactcggccaaatgcatatggcaattacttttagctcgtatatccgatcagtcccgtaatatatagagacgctcgaagtgattacgaagttgtagcaaatccaacaacagtactttttactcgaatgtccgagtgagtcccgtaatatatttagacgctcgtaattgaaaatggaagctcgtatcatacgctaaccacagtatcttttagctcggatatccgactgtgtccccgtatacatcacgacgc

SEQ ID NO: 54136 - DNA, 332 bp, Glycine max
  unsure (1)..(332): unsure at all n locations
gcctatatgttggacctcccagaagagtatggagtcagcaccactttgaacatttctgatataactcctcttgcaggtggaactgatattgacgacgacgaactatcacatttgaggtcaaatcctcttcaacgggaacgtgatgatgcattcctccctaagaagggaccaatcactagagccatgagccatacgctcctataagattgagctatagctgctgaagaaagccttacggctctcatgatccttanggtaaatttctgagcccatgggcctaggtttggttccaattatctatgtacatattagactaggatgttattatattt

SEQ ID NO: 54137 - DNA, 235 bp, Glycine max
aattaatccaatttggcatggcgaagtatggagatccgggatgttgagacgtccaagcaccaaaaacctttgtgcatactgctatatccaaaaaagaaacatggaatactccgtggtgataatttatgaggagcataatctcgcaaaccagggataacccgacacccaatgggtgaaagtgagcataatttggagaaacatcatgtaagagctcaaaaggagatataccttttaa

SEQ ID NO: 54138 - DNA, 491 bp, Glycine max
cttcatcagacaaagcaaccacatggacagctccacaagacacttcacgaataatctgcaagtgtaatcatataaaagatgggaacataggaagtaagacaaaacagacagcaaattgtaaaagaatcctattccatcatttaaaaattgtatccccataaaaaaggaagagaaactataaattttactttgcatttaagaaaatgaaattaaactctagaagaatggattcactcatatatcacaattcgcagcaaggctacaaagaaattatgcaaaaggaaatgttacgaaataattacattcacagaagcaattgcattgaccaaaggaatagattttgttcatagtgaaaagacattgagcatatacactaagtttagaagaaagatataaactatataacagatgttcaaaaagaaaaacctaaaatcatagttaggcatggcaataaatcgtgagtaacaaatatgcaagagaaaaagtatcta

SEQ ID NO: 54139 - DNA, 334 bp, Glycine max
  unsure (1)..(334): unsure at all n locations
atctgatcatcatgctttgataaatgcccaataaatggggcaaatgaagagggtgaaaatgatggagaaacccatgctgngactggcatttctatacaaccaagtttcccacccacccaacaatggtattactcaacccatgacaaagcttctacttaccaccacccagtttccacatggcatccctgatcaaaccttacttgtctacgctcttccttgatgaacacccctttagcacaataatacacctccaaaaatgaattttgcacgaaaagctgtagattcaccccattctggtgtctatgctgattgctccatattacttgatattaat

SEQ ID NO: 54140 - DNA, 454 bp, Glycine max
  unsure (1)..(454): unsure at all n locations
gacaattgaagagtctatacatgtttcctttgatgagtctaatgccattcttccaaggaaggattttttagatgatatttcaaattccttagaagatacacatattcatggaaatgactctaaagaaaaagatgaaggaagcaatgaggattctcaagataatggagttagagcacataatgaaccttcaagagaatggagagcctcaagagatcttcccctcgacaacattattggtgatatatcaaaaggggtaacaactagacattctcttaaatatttttgcaacaatatggcttttgtatttatgattgaacctaanaatataaaacaagccatagtagatgataactagatcattgccatgcaagaagaactgaatcaatttgaaagaaacaatgtgtggaaactagtagaanaacctaaaaattatcctgtcatatgaacaaaatgg

SEQ ID NO: 54141 - DNA, 318 bp, Glycine max
cggaacacctcccttttttctttaatagggaagaggcaagccaatcgtcagcccttctggtatttacgattcacttgaaattagtgacaacaaattgttttcgtgaagaataatcaagccgaggtgcttccgtaacgcttctgagacgttcccgtgagcgaattcgtgaagattctccaccgttcttcatcgttcttcgctcattcttcgttctacttctgtcttcaaccggtaagttcccgaaataaacctttcattcattctatgtgcccttagtggtccccacctgcttcgcgtgctattattattatttcgttt

SEQ ID NO: 54142 - DNA, 141 bp, Glycine max
  unsure (1)..(141): unsure at all n locations
cgaggagtgtgcaagtgaggatcgctccaacgattccctcctttngagaaggctgncccaatgtgaatgagaatcacctaacacatatctcacgagcgcttcctgcctaatcgcccgaatttcatcgccaagccttgcatc

SEQ ID NO: 54143 - DNA, 293 bp, Glycine max
  unsure (1)..(293): unsure at all n locations
atatgaaccctgctatataattcaagtggtctaaaaatccttggacttgcttttcagtgcgcgactcggcatttaaggatggctttcaccttgtcggggaccacctctatccctttctggcttacgatgaaaccgagtaattctcccgacttgaccccaanagtgcactaggcgggacttattcttaactaatactatcgtagtctctcgaacaactagttttagacttgccaatcatgtcagcacatagacttaatttctttgcgcatcatatcatggaataatgctaccat

SEQ ID NO: 54144 - DNA, 426 bp, Glycine max
  unsure (1)..(426): unsure at all n locations
tatgcacggaanatgtaattatgaaattgagatgcccgattaaacaccctttcctagttaaccatgcattaggtaccatgttcaattattttgttttgttgttgtgtgtttttttttttttttttagaaatgggtttatgatcccaacatggttggctcatggtgcctaacacatgcaactaagaatgtagtgtgaagtttcacgcttccncttttttgtttttgtagaggaaaacacaaggatgagcaaacatgaaaacaaatggtatgcaattttgcagatcaaaaagtttgttgaacgcatatgcatgatgatgccatgactcatgcaaaatgtgaggctggaatatgataacggacaaatgcaggatatgtccattatgatgttatgaagagatgcttatgtggtgcatgatatgaatgcat

SEQ ID NO: 54145 - DNA, 407 bp, Glycine max
ttctctcgccaacaaaatgaatgtgtgcacttgcatggacaaaactacatgcattgtatccttatgataaactatctagtacgatgcatgcatagccgagacacagccaggatgatcaaactacgtgaagagatacagaaaatgaattcagttcacattttaaatgtggtccaaaaaccaaatattgctctaccaaatcctcttatgaatcaattcactattgcaaaagaggtcgtctatgacagttgtaaagcactttctataagtagttcaaaccatctttgaagccgatgtctttgagaatgttgactcttgacaacaattccctacagaaccatcttaataaagggtacccttctaagacgagccatatctaagaactatcttactagaatatttttctaaga

SEQ ID NO: 54146 - DNA, 249 bp, Glycine max
atcgatcatgtgtctaccatcacgatcatcgtctacctgtccatcaatgggggtaccacctgagccgccagatccctccaccttttgagcgtgtactatgaaagatctgtccccctttttgcaaatgatctgtagttgcatcctatcctgaaccatatcataattgttctgattctgcctatacaatgcaaccataacgttcttccaagaatggactcaggatgattccaagttattgtaccatgttac

SEQ ID NO: 54147 - DNA, 465 bp, Glycine max
agctatcctatggctgcctcggacttacccccttgccttccctgatgagttaagccaagcccctactttcgaggggcaactcccaccttatgaagactatcccgggccagacaatgaggaaggagatacccatcttggccccctgcaccacctcaaagatccgtccctgcacgaactactccaaccaaacattgtccggcttatcccggcttcacccacacctataaaagaatctgttcccttctcggaatattaaggtaagatggaggcgcttgaagagaggttaagagcattcaagggccttggcaattacccattctcggatttggcaaatttatgtctcgtgcccaacatctgtatccatcccaagttcacagtaccatactttgataagtacaaacggacgacatgtccaaatgggcatcttctgatgtattgccggaagatgggggcgtattctgcgga

SEQ ID NO: 54148 - DNA, 411 bp, Glycine max
  unsure (1)..(411): unsure at all n locations
agctnttcaattcattctatgtacccgtggtggtccacattntgttgcatgtatntttattcttgtnttcgtctactttttatacccncttttaacgtgcttaagccatttatttaagtcatttcttgcttaatttaaaaataaaataaatttccaccgatcgtttgaattgtatcatccgctaactttggttaaaatgaattccgaccgttcggtcgtgccgtaaccacgttggatatcaaagaagaggtaaaataataatataataataaaaaaataccttttagtaaagtataagcgaaaatcaaatcggacgttttctctttgggtgttctcattcttaattgaattgactaataactaaagtgaaactaaggctaaaatcaacttcgctagtcaaactcgtccaca

SEQ ID NO: 54149 - DNA, 397 bp, Glycine max
taacaaaaggcatgtgaagtgggtggaattcctagagcatttcccttatgttatcaaacataaaaagggaaaaggtaatattgtagccgatgctctttctcggcgtcatgcattactttctatgcttgaaaaaaaattgattggtcttgaatgtttgaaaagcatgtatgaaaatgatgaaacttttggagaaatttttaaaaattgtgaaaaattttcagaaaatggtttctttagacatgaaggctttcttttcaaagaaaacaaattgtgtgtgcctaaatgttctactagaaatttgcttgtttgtgaagcacatgaaggaggtttaatggggcattttggggtccaaaagactctagaagcattacaagaacaattttatatgcctcatatg

SEQ ID NO: 54150 - DNA, 374 bp, Glycine max
  unsure (1)..(374): unsure at all n locations
actgggcacatcttattcgttaccgtatgcataaggcattacgagcaaatgcccccctaccatatccccatctagtcactctgtttctgaagcacttcaaaatccctcttacaattaaccatttgtgaagattaagcattcatttgcaataggggcagctgcagttgcttcttttggtaataagaaagatcttgatggacaatgggttcgcaaacaagattaccaggctaatgctcccgacgaatgcactccatctccaccacttanggaaccctnctttgctntactgactgatgttctcaatgagattcacgatctttgcacttttgttggcgaaagggttgattccatggattctcgcatcactcatcttg

SEQ ID NO: 54151 - DNA, 439 bp, Glycine max
tacggacctataaaactcagcttctagagaaagtacatgaagctgtatcggtaaatatgctttccaacctttgttaaccggtggatcttctcgaaatttggtctgcaacttcacaagacaattttccatgatcttaccgttgggatctttgagaagatgctagagtgtgctagaagcctcttaatgaagcttctagaggaagcctcttaatgaagcttctagagaaaactacatgcagctgcctcggtaaaaatgctgcccagccttcgttaaccgttggatcttctcgaaatttggttttaaacttcacaagacacttttccatggtctgaccgttgggatcttttagaagatttctggagtgtgctagaagcttccgagcatctcttatttaagtatttcagcctttgctttcgtgtagcttaggaaaaacgtcatt

SEQ ID NO: 54152 - DNA, 227 bp, Glycine max
ctcacgtgttaatcctcccttgtacctctccctagaacctctccctattatgcttttaaaaaataaaacatctcttataatctaagaaatagtgttgcacataaaaatataatctacgtgttagccttataattcaatcataatttaaaataaatataacttttaatataattattttaaatatcaacaatcttaccatacataatttctaatactgcacaatcgta

SEQ ID NO: 54153 - DNA, 377 bp, Glycine max
tctggctgcttattgcaggttgacaaagttagtgatccccagaaactcaggctagaagctgaaaaaagagatgatgttgtatgcatatctgctttaagaggtaatggctcgcaagaattttgaaatgcagttcaagacaagctaaaggtgcaaagttgaaaccaatctggatgtcaatttaaatataccattgtactatttgatatcgaataacccgtttgtttgaactacgaactatttacatttgttaaatcaaaattctattattcattaacaggactccatggtttgggtggaagctctggtcccatttgaatatggtgaccttctcagcaccatacatcaagttggaatgggtgatgaaactgtgagtatac

SEQ ID NO: 54154 - DNA, 402 bp, Glycine max
  unsure (1)..(402): unsure at all n locations
attaatattttggtatgcaactagatagtgtttttaaactatagaaatggtaaaaaaatgagatgttaccataggatacctangcatggttaaactcttaagtttttaagttaaagtctacaaaggataaggataattcatagaaaattctctggtcaaaaaatggtcaacttattaatgacctagatgttaataattggattgtggtctagaaatagaaactagaagcttcaaataaaattagcaattaatgtaagttagaaattaattggggataattaaggttgattaatggtgattanaatccactagaatagaaaggggtaattgagtcataagagtttaaagtgaggacatttttcgtaggggactgataactagttaaaaaaaagtttagttaat

SEQ ID NO: 54155 - DNA, 459 bp, Glycine max
  unsure (1)..(459): unsure at all n locations
tctagccaaatagacttacctngaattaattcctgtgattgcccctttgttcctattatcccctatctgtgatgtgaagctcattacaagccttaagtgaaaaaccatgatatcaacttacccttaaggaattttggagctttggaattgttttgggaataagctgggaataagtgtgggggggtatgtttcattggaagatatgatttatggccatgcttaatgttttattttcgccatgcttcatgtatatatatattgcctagttctttctttaatcttgaatttcgtactgttcaataaaaaaaaatgaataatgaataaaaataaagaaaataatataaattcagttgctgcatattctgcaatttcgtactcttcaaaaatacaaagaagaanagaagtgaagttgaactaataaggtcttgatttgggagccttggttgattgtgctgatat

SEQ ID NO: 54156 - DNA, 191 bp, Glycine max
gacatgtgtcctataagactattattaccgcatacaagcctcaaccagttgcctttgcactatgcaaaactgcttaaccaagtgccattcggcggaatagaccttgacatccggcctttactttggaagttattgttagagccccaacaccttgagacaaggtgttttgaggggcaaggaatgtttgatgt

SEQ ID NO: 54157 - DNA, 451 bp, Glycine max
  unsure (1)..(451): unsure at all n locations
cttgataacaacatgaaactaanacaagatataataaaacatttaattattattcaaacagtcaaataatagtcataattaatacactgaatcagatcccacatacaaactaatactatgctatccaaagttgaaaacccagcataagataatgcctacattaagtcttcatcatagccagattgttccagttactttttaaagtgatggtatgcatattggccatccgtattgctacttcgtataattaaattaaagagacaaatgataacaattgctatcactgatagtttctataactttctagaaccctcatgagaagttctatttaaaatcatgttatgcctcaagtataattatgaccaaaacctactgactatatttgtatacgtctgtctatgtaggtattataggatgatataatagaatttctttttcagaaacatttatg

SEQ ID NO: 54158 - DNA, 421 bp, Glycine max
gctgctctttgctaatggctcctgtctatttttctctatctcgcctcctttgatgtcttctttcactccatcgtctaccttcatgtactttcttactggctctttagatgctaacccactctttggtatttctgcattacaataaaccttgctggtgaatttctttatttgcatcgctaactcctttaacttgatttttaaaagatttattacgggtgttcacgggccggttttggtcaaattcacgacccaacccaatcatatttgatcggtttggttaagtccggttctcataacctttttttgaaacccaaccacacctattcatgaatggtttaagttatttcagaccaacggatcacccatcttagattatctttttattagaactattatgttatatcatgaatcatccaaatat

SEQ ID NO: 54159 - DNA, 431 bp, Glycine max
  unsure (1)..(431): unsure at all n locations
aaaangcacccatatacaatcaaggcagctntgttacctagattatntacacgtacttccaaggtgtatttgttacttacatcacacacatctccttggctaaattcacatacatgcatactcaaagcatcttgtggtacccaaaaattgcacatgtgcacatcttggtatttctaatacctatacatacacaaacttcatgatgaatcttgactatctacacaataaggtgctacatttcatgctcttttcaagtttttgctacctaaagccgcatgcaaattcaagtatattttcctttgctgactaaaattgtattcaaattaagaaggatacattntttggtaatgtatcttctttacataacatgcaacatatttatgtattattttttgtgagacatattgactaccaaaanatatatgtacata

SEQ ID NO: 54160 - DNA, 288 bp, Glycine max
  unsure (1)..(288): unsure at all n locations
gagcttagctacacacacctttctaatagctaagctcacctccttaagatgagaagctagagcttagctacacacccccaataatagctaagctcacccccatgacaaaatacatgaaaaaacaaaaaaggtccctactacaaagactactcaaaatgcctcgaaatacaagggctaaaccctatactactagaatgggcaaaatacaagggccanacgaagggaaacctatctaatattacaaagataagtgggctatacttagcccatgggctcgaaatctaccct

SEQ ID NO: 54161 - DNA, 461 bp, Glycine max
  unsure (1)..(461): unsure at all n locations
ctaagcttatagtgangaataattcaccccttcttaagttattgttgtctttggtccaacatttgcaatatctaattctacttttaagttaagtaaaatgtagttttcaatacgtgagattatttgttttgtttgatgcacgctgatgataatggagatggaaagttgacactcttcccttatctcatttattntgttngcatcaattatgtctggtatgtttaaagaacattattaaattgattgctgcttcttctgcattcagagtctatcatttataagggggttaaaagcttattagtggaaaaataattcaccccttcttaagttattgaggtcgctggtccaacattcgcaatatctaattctacttttaagttaagtaaaatgtagttttcaatacgtgagatttatctgtttgtttgatgcaggctgatgataatggagatggaaagttgaca

SEQ ID NO: 54162 - DNA, 408 bp, Glycine max
  unsure (1)..(408): unsure at all n locations
agcttacacaaacattcattattcctancttactcaacatatagtcatcatccatccacaatttcaatcaatcatgctcagtatgatgcatgcacctgacctcanatctcanatgcaatgtggtaccattatcaatgaaatagcctaagagtctccacatgacactctcacttatgaaaactaagcagtaagtgtcgaggtcaccctgtcatgcacaggaaactcctcccccttggtgatcaacctgagtctcaagggaattccaaattgagtgacatgtgtgacatccttgaaatttctacccggatattttgtaacggcgcattttgaatggctatatatatatattaatattattcagcggatgtatatatgtatatatattcctggtacgagtatgtattttgg

SEQ ID NO: 54163 - DNA, 378 bp, Glycine max
gtctcacgattgtcacgtgctcatcctttaattgttagcccgggctatacgagacatcttgccaaacaaagtcaggttcacgataactcgcctgtgctttttcttccatgctatatgtagcaaagtgattgatccagtaatgtttgatgagttggaaaatgaggccgcaattatactgtgccagctggagatgtatcttccccctgctttctttgacatcatgattcacttgattgtgcatctggtcagagaaatcaaatgttgtggtcctgtttatctatggaggatgtacccggttgagcgatacatgaagatcttaagagggtatacaaagaatctatatcgtgcggaagcatctattgttgagaggtacattgc

SEQ ID NO: 54164 - DNA, 401 bp, Glycine max
gagagaaggggggagcacgaaattgaaggaataaaagagggagaaaagtggaactttgaagtgtgtctcataagactttcattcatcaaagttacaacaagtgttatacatgcttctatttatagactaggtagcttccttgagaagctgtgttgagaaaacttccttgagaagcttctttgagaaaacttccttgagaagctagagcttaggctacacacacccctctaataactaagctcacatccttgagaagcttccttgagaagattcctaaagaagctagagcttatctacacacacatctctaatagctaagctcacctccctgagatgagaagctagagcttatgtacacaccccctattataactaagctcacccccatgccaaaatacatg

SEQ ID NO: 54165 - DNA, 455 bp, Glycine max
tccatcaatgaataacaactaataatgcacctgactctcaattatcaaatgcaatatggtatcattcattagaaaatagcctaagcgtatccgcgcgacattctcacctaagaatacttggtaacaagtgtcgaggtcaccttgtggtgcatagacaactcccctccccccccccactcccccgcatggtgaacggcctgaattctcaagggagttccaaactgagtaacatgcccccaagtataagtatttcccctcatgagaaactacaagtacttattggcaagctatttccatgaaatatgaagtatgaaacataggcaccatcaatgcattgaccgcggataactaaagaatttaattcatccccctctagagatgctataaccttctttaccattctatttctccgaccatagatatctatcatgtgcactgcatccctcatgtacata

SEQ ID NO: 54166 - DNA, 426 bp, Glycine max
  unsure (1)..(426): unsure at all n locations
gcttgtctcagcgggtatgcgagaccgattccaacatgttagccatcatcagcaagtaccaagaagaattaaatctagccatggcccacgaacacaaagtggcgagtgaatatgctcgagtgtccgcggaaaaggaggctagaagaagggtgattaactcgttacatcgagaggcaatgatgtggatggatcgatttgcccttactttgaacgtgagtcaagaacttccccgattgctggccaacgccaaagcaatggcagacgcctactctgcccccaaagagatccacggactcctcaactattgtaagcatatgatagactaaatggcctatataattagcaaccgctanggagtttgtattgtcactcaaatcttgactagatataactgtctgaataaatgagttaatccgcatgtttact

SEQ ID NO: 54167 - DNA, 386 bp, Glycine max
  unsure (1)..(386): unsure at all n locations
tcgcanagcttacggtaaaatctgggacctagccatgtgtataagtctccacagatgccattgcctccctcgcccagtattatgatcagcccgtgaggtgcttcacctttggggacttccagctatcacccatggtggaagaatttgaagagatcctaggatgtcctctggggggaaggagaccatacctcttctcangggtctatccctcattagctagaatttctaagatagttcaaatctcgacgtaggaattagaccacagaaagcaagtcgaaaatggagtggttggaataccgagaaaatgtttggaggaaaaagcaataatcttggcaggtaaaggcgaatggaccctgttcatagacattctcacactgttgatcttc

SEQ ID NO: 54168 - DNA, 361 bp, Glycine max
  unsure (1)..(361): unsure at all n locations
caccatccacaatggaataagccaaggaagaaggagcttcgccaccaagatgagcattggataagaagcttggagatgatgcttcattggttgacaagaatgacggagagaaagagagagtgaggagcacgaaattgaatgaagaaatatggagagaagttgaactttgagttgcgtttcacaagactctcatccatcaaagttacaacaagcgttacacatgtatctcattatagactatgtagctctcttgagaagctttctctagaaaacttccttgagaagcttctttgagaaaactttcttgagaagctntagctacctacacacacacctgtactactaagctcacctccttgag

SEQ ID NO: 54169 - DNA, 367 bp, Glycine max
  unsure (1)..(367): unsure at all n locations
agctgagtctagtcttacatgagggatctcggacaaactattttaatactgatgatcggtgtgttttcggtaacccccattgaaatttcctttgagacataatgtgcacaaaaaagtatctgccatggtgagcgagcaaagtatttatggcgctgttgccggggaactaaactgttagtagagtatagttcagtttacaacattgctttaatttaactttttcaatttttttattcttttgactaacatagtagtttagtacatttattgttcttttgaactggataactgctatanctgtcctgtatgcaaagaagatcttctacaggtgatgtgattcccattgatgtggagattaacgccactt

SEQ ID NO: 54170 - DNA, 418 bp, Glycine max
  unsure (1)..(418): unsure at all n locations
tgaggacacatgaacganaacgcaattcatggggctctgtanatgataagtatggagaattgcactaaccaatcactacgcatggctccaaactcaaaggtggaggactcatgaacgaaaactcaattcatgggctccgaaaaagggttgagaatggagaattgcactaagcaatcactacccatagctccaaactcgaaggtggaggacacatgaacgaaaacgcaattcatgggtctccgaaaaaggttgagaatggagaattgcacttagcgatcactacgcatagctccaaactcgaaggtggaggacacatgaatgaaaacgaaattcatggtgctccgaaaggattgagaatggagaattcaactaagcaatcactacgcatggctccaaactcgaaggtggaggacacatg

SEQ ID NO: 54171 - DNA, 382 bp, Glycine max
  unsure (1)..(382): unsure at all n locations
agctntcaataacaccaacatcaaattttttttcaagcaccacanactctaactcaaactcaaaagactcaaacagaagagaagaagagaatgcatatntggtagatattctaggtgcaaacagccttatttaaagggaaagggaagaggatggtttcccctattacgtttcaactgttctgaaccttgaaaatatcagtcatgttcaattttttcttcattatttctgcaaatcctatacctgaaccctagcaaagagtacaaagccatgcatgaaccccctatactgaacctaccctcatgcatgttgcactgcacgggttgtatcttgctagtttcactggcggaaccaatggaccaaggctatcccacaacctcgact

SEQ ID NO: 54172 - DNA, 445 bp, Glycine max
  unsure (1)..(445): unsure at all n locations
tccacacacattggttgtatggacaggtttgttagagtattgacaaaacacctttttgaggagttgggagaggtggatcggttgaaggatgatccatgatttgcattataggacttttgtggtaaggttgcttacccttgtgtattgcatgagcaatggcaacaaatgaggtatcattgttgttgtcatccctcttgagataactctcanagtcaagagaagatcatgaagctcttcaaagtcaatcggtttttcatgagtgtgaagagctgtagaaacctccttgtactcagcacttagcccatttaaggtgtgaatgacaaggtctgcatcgtccagtggatcattggtgatggctaattcatcagtcaaagaatttattccatggagataatcagtcatggatcgagagcctttcgtgaaacaagtgaagcattctttcata

SEQ ID NO: 54173 - DNA, 252 bp, Glycine max
agcttctacattcaagtactagcttttttattattaccggactcactcggacatccgagtgaaaagttattgtggcttgaattagctcacggctttggtattccattgcgagcgcctcgatatattacgggacgtcatcggacatccgagtaaacagttattgctgtttgaatttgctcaaagcttccagatttcatttccagcatctctatatattacgggactcaatctgacatccgagtacaagttatt

SEQ ID NO: 54174 - DNA, 428 bp, Glycine max
  unsure (1)..(428): unsure at all n locations
ntgagataattcanacgacaataactntgtactcggatgtctgattgagtcccgaaatatatcgagacgctcgaaattgaataccgaagcgctgagcaaattcaaacgacaaaaactttttactcggatgtctgattgagtcccgtaatatatcgaaaagctcgaatgtgaatgtggaagctctgagcaaattcaaacaacaataacnttttactcggatgtctgattgagtcccgtaatatatcgagatgctcgaaatggaatagcgaagctcggagcaaattcaaacaataataactntttactcggatgtccgattgagtcccgtaatatatcggaacgctcgacattgaatgtagaagctctgagcatattcaaactacaataactttttactcggatgtctgattgagtcccgtaatatatcg

SEQ ID NO: 54175 - DNA, 468 bp, Glycine max
  unsure (1)..(468): unsure at all n locations
agctnttaccgaagaaagttgaanagactcttcgttntntgtgtttcaacttttgataagggttccaattctgatttttgctgtttttctgttgtctattatgttcattctatgttgntggaactacccaaaatttccttttgtgttaagaaactgtacatgcacaagggtagacaagtaactttccttcattcttatgtcttcttgaatagcttcttccttcgcaatatagtacttgacaattcagaggctgatgtatctacaaaagacactccaacatccaaataagatctcggttgagagcaatatatgagggtaataaatgagaatcaacaatagtcttacctcaatatttgcataactatttgtatataccttaatggaccctgtacctatgagccctttctctattttaccttttaggtatnngattctaattatatagaaagttgaatttaccctatgata

SEQ ID NO: 54176 - DNA, 444 bp, Glycine max
  unsure (1)..(444): unsure at all n locations
tacggacctatgaaactcagcttacaatttattcggaggtgtttttatagcgttattgttttcttatgaaaaanaatagagcattattggcttcttttacaagtaccttggtacttttaacctttgtctgacctaaaaaaaaaccagttcccttagtcttagtctcaaattttgattaaattaaggtataattaaacatgacatttctaaaatatatttataaagcanattgtttttattacttagaaagtataaatacaatatttatttgtttagaacctagaattatttttactcaccaccataaggcatttcaagacaatgtacagaatccaattactcttgacagtgtaatattaacttaatcactcttaattctatcaaaccatgaagtagcacacaatttataagtcttattccanatcaatccattaaacattaaaa

SEQ ID NO: 54177 - DNA, 419 bp, Glycine max
  unsure (1)..(419): unsure at all n locations
atgatgtttgtgatgtttatatgcttgaaatgcttatggaaactgttagagatgaagggtagagttaacctacggttagaaagtgagaatgtggtgttgtgagtggaaaaagagtgaggctctgagagttggaaggtaaatctggattctgtggtaaatggaggttaaagtgagttaatcttagcttgaaatgccatttanaacatgtgagaaaggttaggctgtgctagagagaaaaacaaatgaccaaagtgaaccaagagccatttctagggcaaaattgggtgttgaggagtcaaatattgattcnngtggaatttaggtgtaaattcagtttgagcaagtttagattgatgttatggacttgtgtgaagtgagagtntgcttcanatttacctcattctaaatttcacttctca

SEQ ID NO: 54178 - DNA, 526 bp, Glycine max
  unsure (1)..(526): unsure at all n locations
tgttaacctgaatctaactgaattgctccactcgactgganggcctgatacngcnnccttaggctatatagtatannncgaatggctcccgatcgcactcagctaccaaatatgtccaagagggaaggtgagaccctttaaagaatacgcgcagcggtggagagaccctgcagcacaagtggaacctcccatggttgaaagggagatgatcaccatgatggtagacacattgccagtgttntactatgagaagttggtaggttacatgccatccagcttcgcggacctagtgttcgccggggaaagaattgaagagagggaagttcgattatgtttcctctacaagtgccaatgctaaaagggtcagaacaactggggcaaaaaggaaggagggagatgcccacgtcgtcacttcgatgcccgcatgggttaaacccccacagacatctcatggtacgcatcagtaccctcaacatcatccgagcttctcagctcacgctggggactcnctctattcagcacccat

SEQ ID NO: 54179 - DNA, 378 bp, Glycine max
  unsure (1)..(378): unsure at all n locations
cttagtcggtttataaatcgtcatctattgtaggaagaacttggagaaataacacgggactttgattgccttagtcacttatatattacgcggaaactattacaggttagtattctacctctttaagccaccttaactataattttgaagtatgtgaaacatttacctttaggctattatataaatccaagagaaacattcttactatntttgaactatctctactctccactangaagttntggatctcttcttcaaggtttggaattagtttgcagtcttctcgcatctaacaacttngttggtgataaagaactcatctggtagtcgagcctcacatacatgtatgtactcctattgtggttgctatttgaattc

SEQ ID NO: 54180 - DNA, 539 bp, Glycine max
  unsure (1)..(539): unsure at all n locations
ncgatgaattatggacnttgaacacgtnacttgagcataccgcngagcactgtgcttcttctttagcggacatcacttattatngttcacacatttcctgccaatcatagtaggtagcacccatngaatgggtctaaccatacaccccttatgtcaaggctgagtgctacatccctnncagtgtaaatgtacatttctctaacanggaagatgaaaaagtgtgtgtctttggtctccatcgcttaacaagtacagtcactatatgatgatcaagtttgaagtggcataattttgccacatcagcaaacccagtatgagcaagcaatgactcaattaaaggatgatgagcaggcatcgaatgacaataagaaatgattattggtggttgtcccagtaaaacaaaagttacatttaaaattgccatgacaataaaaggctataatatcatctagttggtacttaccatgtttgtatctttgagatcagagacatcttgtttcatagcaatgtgttgcctcattctcctttcacaataaacg

SEQ ID NO: 54181 - DNA, 445 bp, Glycine max
  unsure (1)..(445): unsure at all n locations
agtttctcatntttctttctttgatatattgatcaaattcttcctctgcctctgtgatctttatctctatagtttctttggctttcttctgtgtcaggcatttgggaagaactagtgcatcttctatgaaggctgagccaccctgtgcaatgaatgggcatgtggcatgcattgcgtcaccaacaatnttcactgtacctttcttgaatntgttaaagaccaagtccaatggtgccctatacttcaactcagtaaaatgtaagaagctcaacatgcaatttcgtattatctccactatcccatttgggaaacctttcattgattctattaatgactgtctaataagaatngggtctttccaaattgtttcttttaattattaaacaatatatatatatatatatatatatatatataattctcacattattattataagatagta

SEQ ID NO: 54182 - DNA, 409 bp, Glycine max
  unsure (1)..(409): unsure at all n locations
atatgtcatcccccacgaattcagagtgtgttctcaagtgagttataattattgaaatcaataattttgtctttaaccataaaaaaaagggtcaaatagaataataataataataataataataataatagtagtaatgaacaagtcagattttgagtttggtacaataagagcacctttctttgcttgtttttcaattcaaaaatcaaccccagaagatccgccagattcttgatgaaatctgtcggatcttgctttccaaactgtcagatttccttnggtggcatttgtatccttctcgactatgatgtgtgctcccccttataaaatgtgcatgccaccctccttcatcttcatctcacatcactntcttcatcctngtattctattcttntcctattcatatctc

SEQ ID NO: 54183 - DNA, 351 bp, Glycine max
  unsure (1)..(351): unsure at all n locations
tcacctatatattttatatactgccgagagggttgatctagggtccttgggcataacgtgatgccggntggccaagagcctgaaaaccaacatgtgagtagggcctgactaaatgaacccaagaaaactctcttgctcatacagcccaagccccaattgaatcttgatgagaatttacactgatggatgctgggatttgaaagcagaaatattagatttgttgtgcctataaagattagaatcttaccaaatgcaatgcgggattaggatccattgtttgatgtattacgcttctcattgaaagagagtacattctagatgaaaatactgtttctgaggacagacgcacac

SEQ ID NO: 54184 - DNA, 350 bp, Glycine max
  unsure (1)..(350): unsure at all n locations
tgacatgtcatgtggctcaaccatcggtgctattcctgctaggggcgtaagtattcgcactgttgatgtaggtgcaccgcacttgtcaatgcatatcatacgagaaaaatgcgctcctgataatcnnaantattcatatgagcacttcaaggcattttaccaacaattctctcatgttgatggtaagatggtcgaggatatataagaatatctctaatgacgacatcctcattaatccgttgctctacaagctagtgctgaaatggtcgtgtttcgtaatttaataccattataatgccgacgttattatgatgaaattttcaataaaattagactccctgaatgaaata

SEQ ID NO: 54185 - DNA, 466 bp, Glycine max
  unsure (1)..(466): unsure at all n locations
gcaagcttcatgatgatgaatcaagtgattcaatttattntgatgatgacaaattatgatgacaaanagctcatagaatgatttcaagattgagtcaacaagttcaagatcaagattaatttcaagtttcatgagaagaaatcaagaagattcaagaatcaagagaagtttgatttcaagattcaagagaagatttattcaagattcaagagaagaaatcaagaagacttcacaaaagaagtattgaaaagatttttcaaaaacaaatatagcacagttttgtttttcaaaagttttttctcaaacatttccaagttaccagagtttttactctctggtaatcgattaccattntcctgtaatcgattaccagtggcaaagtttgattttgaaaagcttttaactggaattgcaacattccaattattttttaaatggtggtatcgattacaatatattggtaatc

SEQ ID NO: 54186 - DNA, 450 bp, Glycine max
  unsure (1)..(450): unsure at all n locations
atatctaattatgacatttagagacttagatttattttgaattctcaatcgctaaggatatagtgtacaatatcttctaatgaaacacaatggattaatgcgacttacaatgccattttttaaactttagttgagaagaaaccatcaggatatgaaacgaaagatcctttacatttttctcctccaatctaagtttctaaatctttacttctacagaatactgtgtctacattgaactntcaactcccaacttggactcatctggatggtgccaaggggatattaaatgctgaaactntatctctgccaactccaggtgtgaatctatctttacttcccttttattataaaaaatcggagattcccccatatatctgattctacaccatacacatcaggtgctagaatgcttaatcaccaacaaataagttctttagcagagaatacaca

SEQ ID NO: 54187 - DNA, 332 bp, Glycine max
tcttctggcttcaattcatcagtgggcctttcctctgtgtccacatcttgggatgttcccagcctttgatgacagctttccaagttctgctatccagtgaattgaggaaggccaccattcttgctttccagtattcatagttggctccatcaagaattggtggtctggtcactggtccgccttctttctccatgttcatcagaatttatctccctagatctcactcagtgatttcgagtgcctgctctgataccaattgaaattctgataccaggggacagatgtcgtaccggatgtcacgacatcacgcttcagaacatgcagattatatg

SEQ ID NO: 54188 - DNA, 255 bp, Glycine max
ttcagtgcaagaaatgatgtcattgttcttagaggagtccatgaggtggccatgggttaatcttcatctactgaaaataaaaaagcttgaaggagaacttgatgccttggtcaaccttgtaacccagcttgccatgaataaaaaatctacagctgttgcaagagtctgtggtctatgttcttctgcggatcaccattcagatctttgtccttctttgcagcaatctggtgtcaatgagcaacatgaagcttatgc

SEQ ID NO: 54189 - DNA, 376 bp, Glycine max
  unsure (1)..(376): unsure at all n locations
caacagaatcaagccaaggctattgtgcaagcagtcaatggggcaaaacacaccaaatgattatgatgatggatggctcanattctcacaaaggtaaactcatcactttcaaattgagctttgaaaactatcatgacatgtagagaagaatcaaggatttcaagtcacaaaaaacaattacccatttcttgaacatatcctataattcaaagaanaacatgcaaagtcgtacatgcacacaaaattgacccaaaatattaaactaaaaatttgacgaaactaacaacattaacaaattaacacaactaaccaaataacaaaaccaacaaaactagcanaaccaaagaacactcccaccccatacttaaacaacaca

SEQ ID NO: 54190 - DNA, 264 bp, Glycine max
  unsure (1)..(264): unsure at all n locations
attagagcaaactcatgcacatacttncttacgaacattcactcgcacaagatattcttctaactaagaaaaatgcacccatgcacaatcaaggcaccttcgttacctagattatntatatgtacttccaaggtgtatttgttacctacatcacatgcacttccttggctaaatntacatacatgcatactcaaagcatcttggctaccaaaaattgcacacgtgcacattctggtatttctaatacctatgcatatacaaact

SEQ ID NO: 54191 - DNA, 401 bp, Glycine max
  unsure (1)..(401): unsure at all n locations
caacactttattaaaaaaattaaatataactatatcaccgattttgtgaaacgtgatgagcatatttgttcggaaacggatgggaggtgaactttaattattattttttaagtatgatgacctttaatctttaataatgcaccgattggaaatgaaacanacttttttntcttcttaaaaatgagaaacgtactaagaaaccaatttttaaattgaaaggaaaattccattatggtggcatagttcattctacaattttcaataggttgacaatcacatgtatcatttatttttaggaaacgaatttcgcatcaccaaattggaaagaataattnnttatatntctgttttaattnttaatcacannaaacattntattntcattntatagtattntttat

SEQ ID NO: 54192 - DNA, 371 bp, Glycine max
  unsure (1)..(371): unsure at all n locations
gtcaatatcaccaacgtgatttcgaattatggctcaattcaacaagaactcanattccatgtatgctatntatcatgcttgcaacanattgtaaacaatntcttttgaaatgaatccatatcagttcatgaaactgctctgaacacaatggtggcaaggaattttgattcagaagttggaatgccacaacaacccanaaaatgggcctaattttcattaaaggaagaagattattttgaatataaataatcttattggccacaaagatgtataataaattactgtggtaatgtaacatccagccagcaggttcagacaagaaagagggggcaatcagaanacanaaatagaacataaatactactaanaat

SEQ ID NO: 54193 - DNA, 393 bp, Glycine max
  unsure (1)..(393): unsure at all n locations
atgtcaagaagtgaaggccaccaatataaatgaaactcaacgctcaggttaagccccttcgccaccttatttccagaaacatcttcaatcaatctcccctcctataacgatctctaaataaaggtttgcgattaattacccttttccattctcaactctcgatttctattatgaaaccatatnttgtgttcttttatagtttcttcgtttgttttctaatcagaaaataaataaaaaggattaaggatganaactngnngaatattgntctgaaaccatactttttggtcttctatggtttcttcgnttggttctaataagaaaataaatataaaggattaaggaagaaaaactgggaatattcgatactccctananggttaattttatttc

SEQ ID NO: 54194 - DNA, 381 bp, Glycine max
  unsure (1)..(381): unsure at all n locations
gcttacggtaagatctgggacctagccatgttatatgtctccacagaggccattgcctccctcgcccaatattatgaccagcctttgagggtgcttcaccttggggacttctagttatcacccacggtggaagagtttgaagaaatcctgngatgccctctgggaggaaggaaaccatacctcttctcgggattctatccctctttagctagaatttctaagatagtcaaaatctcgacgcaggaattagaccgcggaaagcaagtcaaaaatggggtggttggagtaccaaggaaatgtttggaagcaaaagcaagagtctntgcaggtaaaggcgaaagggccccgatcatctagcactttngatcttcgagggggggg

SEQ ID NO: 54195 - DNA, 461 bp, Glycine max
  unsure (1)..(461): unsure at all n locations
agctnngattatatcacttaaggatctactttatggaatacaagtatgcataacaatgctctctatcactatgaatctgcttgtgtgcttctgatatttgtgagatgaagggatctggatcttctcaatcataagcatagtagcgagagactagataagatttaggcttattggtttttgtgattgaaaaagaaatttatttaaggaagaaatggagagaacaaaagtagagaataaggcatcctaacaagaaacttacagaagaaaaaatttagaaactaatagattgagtcatgtagcaaggcatgccaatctccctgcatataaaatccatgagaataactatgttccaagtgttggatggagaaagtcctttaaaaattcagcattccttttcatccaaagacaccaccaagcagcaaagtcagaccactgccacagaatcttagtttctttatgga

SEQ ID NO: 54196 - DNA, 455 bp, Glycine max
  unsure (1)..(455): unsure at all n locations
aacaacttaatagtaagtaatgcacagaatccggacaccgattagaaccagtgactgctttttctttttttttttttatttcaaaacttggtgaatctttctatacagaacagagatcctttccaacaattntatccaatcattctctggtggttcttatattattttcccctcatacatgaatctgttttaaaaatgcatcaacgaaattaaacatttctaaagtttatcacaagcaaacccaactacttagcaaggacaagtgtcttgcgttgcatcttctgtgctataaattcagtcaacagtttacaactttaccatcatggtttatacaattatcaaggtgaagaacacctcanattttagaaagaanacagagaanataattaanaaaaatatttttcatcatnttttatantanattttaaaacccaaaaataaaataaaatggaatt

SEQ ID NO: 54197 - DNA, 264 bp, Glycine max
  unsure (1)..(264): unsure at all n locations
tcatcaaacttctttgtttccganggaaattctataaatagacctcccatctttaatggagtgggttaccactactggaaaacccgcatgcaaatctttatagaggcaatagaattaaatatttgggaagccatagaacaaggaccttatgttccctctataatangccgaagtgcaacaatagaaaaacctaaagcagaatggattgaggaagaaagaagattattacaatataatttanaggccaaaaatattattacatct

SEQ ID NO: 54198 - DNA, 403 bp, Glycine max
  unsure (1)..(403): unsure at all n locations
atatctttgattatatttntagaataacttagagtatcttatattntggtaagattattctctatatttcctaatatttcatgatttggttccatattgactattagtataaataaggattagtgctttatgttntagtcatactataacacatcatatcaaataaagtcaacatcaataatctcactgtattcagtttcttaattcctattcctctctctctatacctaaatccatatagttttaacacacgtaatgtatcagttcacactagcataaatntaaaaacaaaatccaaatgatgatcataagtggcgcacatggactgacatgtaacacattatatacatgcttncattcttccctatatngnttcatgcagtattttccccccataaaacat

SEQ ID NO: 54199 - DNA, 276 bp, Glycine max
atggtctcaaccgtttatataaaattttcagttgcagaaaggtatcacagcgccaaccatggccggcacttgatgcccctattcgtcctttaaaggaaaattaatggtggtttatgcttgaaaaggaagctcccttcaaaacattcgtgtagcagtctatgcatgcttgaaaaagatctcgttaaactcagatttgcaagatgagcgcaatttggttttttcatgaaattcttcaaaatcctttaacaagttgtgatggttgaattttttagattc

SEQ ID NO: 54200 - DNA, 417 bp, Glycine max
  unsure (1)..(417): unsure at all n locations
ggctccaaacccgatgccataatctatgtgtttntgggagtctatgttatccatggctacgcccttactcaaatagaagcatgccatgtgtgtttctaggtccctctccccaacaccatgcatacgaatgctatcatattctaactcanaaaatatacctctctagacatgttgtctttcatgaatcaatcttcccctcactacgcctcatttggtccctaccttcccaacctcaaaccatgatatgaccttacttatctcttgccatcctctcatactacaacaactccatacaaacatgccccctaaatactccaccaatcactcctcanaactccaatgcatccttccccaccccttctatatctacaaatctaccacaaacacctacatcatccacacctttggctgatctaa

SEQ ID NO: 54201 - DNA, 314 bp, Glycine max
ttcctttggccctttttctgaaaacggttttcttttccttttgacccgtggtgatccgccaaccccacaaccttaaccttaactgaatttacagaatgtaaacatgccttatcttaagtcgattggcctcctctggcttcatatgatttattaattcctggagtgacaagtccctcttcttggtgttcagttggttgcggtagtcactccacgaaggtggaaatttttctagaagcacattagccttgcatatctcacacatcttcattccttcatttagtatatcaccaactagattctcatactcatgaatc

SEQ ID NO: 54202 - DNA, 495 bp, Glycine max
  unsure (1)..(495): unsure at all n locations
naagactatctcatgattatggacacattganatcaggcnngttcattatttattatatatatacatataccttaacgtcatggttcttttgtttaccatatcaaaatccattttgaaccaccttcttattatgagaaccaaataagtaaaataaaccttccttggaacattaagtattagaatcttaccttagaattattattttttaagggccagttcttaaatatattttagtatcctaaagggataagttcttgatttccacttgagtggagatatccgagtaaacccctcccctcaaaaataggatatcttaaaaataatnttatctctttccatctagttaaaacattagggacatttgtagagaanaatntcagttccatgatctgagttagaatgtttttttcatggngtcctctctgtgtgggactcnagaatttattaatgtcatatgtgtgactaatttaatttataaaaagctgaactttgtt

SEQ ID NO: 54203 - DNA, 422 bp, Glycine max
  unsure (1)..(422): unsure at all n locations
atgccccacattatctgcatgacacaaatgcaaaaatgatgatttggaaacttcatgcaaaactggtcatgcatgcacctatgcggacactcaagcgtcaaatttttatggtcatgtgatgctanggctcangattcatttcctctattttagtcaacccaatgtttccaaaatatgctctnttatcaatntgtgcattcatcctagtccatttcgggtgtccggngaaatttcacagcattcacccttcaggtgtagacacattnttcaaaaattggttatgatncaatgaattttttcatagaaaagtttggaaatcatctcttttcanaagcatgtcggttnttagctagacaacttattttctctttttccacctttntcttacatgctntctttttcttttctcttttggtctcttc

SEQ ID NO: 54204 - DNA, 517 bp, Glycine max
  unsure (1)..(517): unsure at all n locations
ncccgtgacctaagcatgcagcacgtgactgagctgacgagaggagataatgaaggaaggaaaaattcctttatttgtgcctaatgagcctaaaatctgaagttaaaatccaagatccaagtgaaaaaatgcacacaccttgacccttatttaatagcctaagtggcacaaaaaatgggaggaaaatttgaattcaaattcaaaattcactttgattttgaaattgaatttgtggagccanactntggatccaaaatttcactaattatgattagtggaatttatttatggttcaacccactaatccaagatcaattacaagattctccactaagtgtgcttaggtgttatgaggcatgtaaagcatgaaggacatgctgcacaaagtgtgactatatgatgtggcaacggggtgtagtaagcaaatgctcacctnccnctctaaaattaattggatgggcttctccaattcaattaaattattccaccaccacatanatattactaagtcatgtaa

SEQ ID NO: 54205 - DNA, 409 bp, Glycine max
  unsure (1)..(409): unsure at all n locations
actggttttttgcaagaaaatttcaattcattcttagtcattctatccaacaactcatggacaattttttaagaatacatatcatacttctatcgagtctaactaattaatttaattaaatagggaccaatttagatgtgaatcattaaaggtagatgatggcattcaaagaatgatagtgccggttcaaattttaagaagaaaaaaaaacaattatactatatttcaattatagacaataacagtgctcatcttaataccaccacatcgatagcaacagaatgagntaaaatgcaacctgcctgtccacccattaacctaattacccagtcactgtaaagttngaaatgcttccttgccaggttttttttccagcttgctatatagctcatgcttcccattataatat

SEQ ID NO: 54206 - DNA, 217 bp, Glycine max
  unsure (1)..(217): unsure at all n locations
aaatagacaaatattttaatatcaaatntanatctaaatatggaaactagtagagataaatagttatatatgtaaaaatattatacctttaaaattgtttcaaaacattcattaaaatatatnttatgtacacctgaaggcccagacatcctatcatgattaatccaaaacaacttgcaatcagttgccaagtgtcgcaacctatccttcggcggga

SEQ ID NO: 54207 - DNA, 366 bp, Glycine max
  unsure (1)..(366): unsure at all n locations
tttatcggntaacatggaccattcaaaagcataaaatcaacatgtaactttaccgcatatgcgagaactacgtaggtctgatttcctcttcgatggaggatacgtangagcaaaagcctcgcttttgtcgacctcgtgagatggttagaggtccaatgccttatctntctcaccatgtaaaatggatcattttaaggtccaacgccttatatgacccccttccaagtaaaaagaatcacttgattcgcccctcttgaaaaactacgtaggtctaatttccttatcacaatngaggaatacgtaggagcaagggaatcacccttgtcgaccacaaaaagataaaanatacaaaaagcgtaaagagac

SEQ ID NO: 54208 - DNA, 408 bp, Glycine max
  unsure (1)..(408): unsure at all n locations
gatatcatcccctttgatatcaaacattgtggcggtagggactaccagcgacaatgtatcatcaaagagaaaaactctagatgaggtttcactgtcatcaagcaagtcgacgacttatcatgatcacagattcacctccacttcctatgttcccatggacccaagtgtagggcccttaataactcacagtgtgtgcaaaaagtgcaggtgtcgtgtatgcataaaatgaacaaatatttatcaatgcatgtattaaataaacaactacacaaaatataaaagcatcaaaagagttacatgaatacaagaacataaaagaaagagagggaaacaaacaaaagagaaagtaatgataaaaatgcacacagattaaatggcttaactctctanaaagtccccagtggagtc

SEQ ID NO: 54209 - DNA, 455 bp, Glycine max
  unsure (1)..(455): unsure at all n locations
atttcagtagatggagatgaattcgtggccacctcatggacttctctaangacaatagcatcatttcttgcactgaattgttgggagttggaagccatcttctcaatcaaattcctagcctcagcaaaggtcatatcaccaagagctccaccactggcaacatcaatcatactcctctccatgttgctaagtccctcatagaaatattgaagaaggagttgctcacaaatctggtggtgaggacagcttgcacacaatttcttgaatctttcccagtactcatacaagctctctccactaagtttcttgatgcctgaaatgtcttttctgatggcagtgatcctagatgcagggaagagtttctccaagaacaccctcttaatgtcatcccagctganaatggacctgngagcaaggtagtagagccaatcttttgccactccctctagagaatg

SEQ ID NO: 54210 - DNA, 387 bp, Glycine max
  unsure (1)..(387): unsure at all n locations
gccgatgctctttctcggcgtcatgcattactttctatgctngaaacannaatgattggtcttgaatgtttgaaaagcatgtatganaatgatgaaacttttggagaaatttttaaaaattgtgaaaatttttcagaaaatggtttctttagacatgaaggctntcttttcaaagaaaacaagttgtgtgtgcctaaatgttctactagaaattttcttgtttgtgaagcacatgaaggaggtttaatggggcattttggggtccaaaagactctagaaacattacaagaacatttntattggcctcatatganaaaggaagtgcagaaattttgtgaacattgcattgtatgtaaaaaggcaaagtctaaggtaaagcctcatgga

SEQ ID NO: 54211 - DNA, 390 bp, Glycine max
  unsure (1)..(390): unsure at all n locations
atttcttgcagttgagccaccaacactaaggcttttgaattaaagctgtgaaaaaaggatgtacactngaacataccatcttaccataccactaaaaaacatttaagtggccggtatattggcattatgtattttagtggattgcttagttcagataaacactgaatatagggctagaaaactaaattgataaattggcttgagctatttgagaagtgtgttattatcgttatttttgttgagttcaaataactntntcaattnttttttttggatgaaaagttgtttattgtaaagtcatatttttgttaatagtataacgaanatgtttctgacaatttttttaaatataaaacattntgttaaggatatattttttaaaacaagttt

SEQ ID NO: 54212 - DNA, 273 bp, Glycine max
  unsure (1)..(273): unsure at all n locations
tatttacaccccctatttactaaatgcacccnccctttctatttttttgtaattctttttccgtaacgttacgaaactttacgaatttcgcaacgatacttattttccttcgcaaggtacgaatcttacggatatgtantactctttttagctttcgaagaattacggaaacttacggattgcgcaaaaacacatcttttcgatttccgccacattacagaatttcacggattgcgcaagcctgcttccttttgaattttgacgcgtctcggg

SEQ ID NO: 54213 - DNA, 268 bp, Glycine max
  unsure (1)..(268): unsure at all n locations
tgcttaaccgtatcccggtgagagtgtgatccttaaattttgagagaaacgactatcatttagtactgatttttgcgtgaatctctgaagtatggactgaatgcatgaaattgaggatgatgaaggccatgtttgattgtgatagccacttatccaaaaagctgaccatgtgcttgaatgatttaccccttgcacccagtttgagctgaataaattattgattgatngaatctggactctatacagtgttatcttctgctaccttgac

SEQ ID NO: 54214 - DNA, 409 bp, Glycine max
  unsure (1)..(409): unsure at all n locations
attctagagtaatatatctatcaggtgtgattaccttaacactttatgacattgcaaactctttcattaaaaacaaagattttggtntagtggttgaactatcttctcattccacaaagtgttggataaaaagagatgatgtgaaacgtttaactattaaattattatcacacacactngaaaaagtcaagtaaatattatatatgcaattaaactaaggtttcaaacaaaagatnattttcaaccaactaaaaaaaaaatctttntcaattatctcaaatcactatatttcaatctattttttctaaattannaattcaataatttttaagaaaatatctaatgggtaaganagactttgtatcacattataaatgattatcgtacatctagaatatatattatattt

SEQ ID NO: 54215 - DNA, 372 bp, Glycine max
  unsure (1)..(372): unsure at all n locations
tactagccgattgaactggttgatgtggtcatggagatctcctcccatctctattttgagtttatacaactccatattcaaacaaaaacaattggttagcgactttgacgtatagatattctcgagcttctcccacaaggccttcaatgttgtctccttcaacacgttattgaatcgtgctcacgaccctcctttggatcgtagtccacttagtttcatttatagaaacagacctttcatcttctaatgcctaatcaagactctgttgcaccanaaggtcttgaataatactgtgtcaaatcatannaattatttttccatcaaacaacagtatctcgaatctttgtgtgctcccgaccatagctcttatat

SEQ ID NO: 54216 - DNA, 386 bp, Glycine max
  unsure (1)..(386): unsure at all n locations
caccctangaggacaaccaagggaatcatgaatatcaacaaaatttcgcatatgatgatcaaggaccacaatgtgcttccccttgctgtgcgtaaatctgacagggacctgaagtnggtgacttccatcaacaaaaagtttggaacaatacaaattggactccagaggaccatctaaggtcccagtaaaatatattagacctgtagcctcattcacaccggcaatntgctcaaccatccattcaccttcagtgatgggtcctaaacaagtcccatttgcatcatgaagataaagatgtctaaatcctgttttctcactagcccagataaatccacccgaaaaattggtaactcctttatcaagaggtgtgaaacagtcatgtatat

SEQ ID NO: 54217 - DNA, 328 bp, Glycine max
actctagtagctatcttaagattatattttgaaataggaaactaatttgactgcacagctcatgttatttcgtgtgacttcagtcggagtagaatgttaatgagttcttttggcctgttatcttttattaatattgtcggttgtttcttggtacaacaatggtcggccttacggtttcggtgatttaaaagaggatagccgtccatgatccatgatccatgatgaagcagttatttttaaagaagggtgcagtgtggtaaggggaaagaaagatggaaattttaaacactaatatattaacacaccatcgcatatatttagaacatgt

SEQ ID NO: 54218 - DNA, 186 bp, Glycine max
  unsure (1)..(186): unsure at all n locations
tagatcgaacttttcaattcattctatgcacccttagtggtcctcatttgttnttacgtgctttcatttacatttcatttactttccatatccccttttgacgtgctttagtcatttgcttaagctattttctcgcctaataaaaaaataaaataaatttccaccgatcgtttgaattgtatcaac

SEQ ID NO: 54219 - DNA, 442 bp, Glycine max
  unsure (1)..(442): unsure at all n locations
ctcacattcactttcttctacttcatattcaaacttngccaaataaataataaagtcatctcgactaanagaaaatcatataagtctcatacaattaatataaaacctatatcctaatgtcacatcctatcagagcgtggtgttcccgtgtcctctagcatgaggtttttcatagtcatccacctattcatctgctcccccgaacacaagttcaagatcatcacaggatccaaacacaacaacacacagggagtgagttatcacattcctagctaatagagaaacaagacaattaaatatacatattatataaatgagataccacttgcttaaacatagctcacgtaacttcaccacttcatcattcanaattcacttttcaattatcaatcacattacacaagaatcccacacttcgatcaagatataataacacatcaat

SEQ ID NO: 54220 - DNA, 542 bp, Glycine max
  unsure (1)..(542): unsure at all n locations
ncggatgaaccatgantcctgatacctcgatacgcgaccttagatactangccttggattgatatggggncaagtaaaatatagacgncattgttatctcattttaacaatctgggaaagttggctttttttagagaggagtgaagtattcagaataggagtcatttgacttaacccatccacttgaaaaatccctcaactatttctttgtccttgaaaattctttttgcgagaatcaaccgcttctttcattcttccttgctacaagggtgtgaaaacaaaacaacgatggatacctcanagccctacactggggcaatgaaaggcaccatgcataaacctcaagcgaacctacngggcagatagaagttctcacccaataggttccctgctaccagatcatgacgaaagacaacgatgggtacctcanagccttacacttgggcaatgaggggcatcgtgcatgagcctcaagtgaacatangggcagatctaaagttctcacccgtcgatgtttttaaacaaaaaaggggggacaaccn

SEQ ID NO: 54221 - DNA, 429 bp, Glycine max
  unsure (1)..(429): unsure at all n locations
agcttaaagtatgtccgagtcattcatctctgttagnatgtggnngaagattggcgatcagaattgccattccttggattataaggttgaaccaagctcatgcttttacaaaaaaggttcatcaagtcaagttgaaatatggaagtaaccgtcttgcaaaaatggggcaaaagatgaatcgagtcacatcactgcttcgtctactgccaaacatatttaggattattgatgtccttgttacttccagtttcaccttgacaaagatgtcatggaccatgttgaaaatctaaattgattcaaccccatatcctgcgtaaaaattcgcaatacttcgactgtacatcattcgcatgcatccatgcttttcattggttgcatgctcatngcattctttccttgaanaataaaataaaataaaatgaacttatc

SEQ ID NO: 54222 - DNA, 537 bp, Glycine max
  unsure (1)..(537): unsure at all n locations
ncggtttgtntcttgannaactgagngctagcttacgngacactatgantactcaagcctgatattgaacacngaagctctctagattttcananggttataactttncaaacggaggttcgattaaggggcatcacatattgagacgctcgaaaatgaacatccgaagctctcgagaaattccaatggtcataacttttcacacagatgttcgattcgggcgcgtaatatgtcgagacgctcgaaattgaacaacggaagctcttgagaaattcaaatggtcataacttttcacacggatgtccgattaaggcgcatcacatgtagaggcgcccaaaaatgaacaacggaagctctccagaaattcaaatggtcataacttttcacactgatgtccgagtaacgcgcatcatatgtcgagacgctcggaatngaaccaccgaagctctcgagaaatcaaatggtcatacttttacacngatgtccgattccgcgcatacatgtcagacgctcaattgaacacngagctctcagaan

SEQ ID NO: 54223 - DNA, 276 bp, Glycine max
  unsure (1)..(276): unsure at all n locations
agcttcttgaactctctcttcagccaatcagcatcaaagaagaagaagtccaagtcaggctcacaatccatgaaagatgaagatgagagcccctgtggaaggagaaggagaagaagcagcattagccatttcagaagctcaagcaccgcagattcaaagtccttgtactcctccttgagttcagagtttcgaactcctccttatgtacaaacaccaacaaagagctgcanggaattcagaaccttctcatcagaaaaaaagcatgcactgtccttt

SEQ ID NO: 54224 - DNA, 543 bp, Glycine max
  unsure (1)..(543): unsure at all n locations
nccgtttgactcatgattactgacactttgactcaagctcatcattgnaanacagtatgagcttctgcanggantggactgtatcatatttgtgttttcaccaagattctcacacttcaccaataagatgaagtgtngtggagaacagattaaggaacaactggtggttgagaaggtgctcanaacacttgacatcaagtttgatcacattgtggtggcccattgaagaatcaaaggatcttacatctttcaagcttgaagaactacaaagttcacttgaagcgcatgagcagagattaagagaaaggaatcctgagaagcacaatgatcaagccttacaagctcaaacaggcataaagtttgacaagcaatgagacaaatccaaaaagaacaaaggaaagtggtgtgatgagaagtggagaaagactgaagattcaaatgtggtgattctggatcatcttcacagaaaagtgtgtcaaatccaagaagccaattctcanggaaaaagaaatgggtctgacagaagaaagtgcagtgttacan

SEQ ID NO: 54225 - DNA, 474 bp, Glycine max
  unsure (1)..(474): unsure at all n locations
atctcttatgaaaantatcttctatttacatctaanaaagacatatacatttaaagatttaaagtattataaccaatttagtataataattataagggcttaatgggaatttattctttcttataatttaaatctgcgatnttggttcttttatttctaaatcaataaatntaatccttgacatgacacaaatgtagcaaaagattaaataaagtgaaaaaaatcttaataagaatngaattcatgattttttattcaaaaataaaataataaacaaccaagacgtttattntatttggttaaacttatcaacaccattttatatatatcatttgtcaagaactggaactnttttctatcatattataaaaattaaaaatataaaaatatttaacatanntaatatttaaaatttaatttatatccatttatatatntttatttntaaataataacatnattttatttaattta

SEQ ID NO: 54226 - DNA, 534 bp, Glycine max
  unsure (1)..(534): unsure at all n locations
nnccgcactgtgcttgatnatctgcactttgatctcagctcatgtgaatanagttgttcaaggtgttngatgtttctttgatgattactttagatgaggaccaagggatgacaaaaggtcaaggatcatcaagaaccacttcagtgaatcaggaccattccagagttcaggaaagaantcagaagatttcagactcaagaaganagcctagaatcaagaatcaagatttcaggttcaagatctcaagaatcaagatcaagattcaagactcaagattcaagaatgaagaanagactcaatcaagataagtattaaaaagttnttcanaactttgaacagcacatgattnttctcanaacatgtttaccaaagagtttttactctctggtaatcgattaccagattggtgtaatcgattaccagtagcanaatgggtttgaaaaagttttcaaactgaatntacaacgttccaattattttcaaaaggctggtaatcgatacaatggtttggtaatcgattaccagtgccctcgn

SEQ ID NO: 54227 - DNA, 375 bp, Glycine max
  unsure (1)..(375): unsure at all n locations
tgaaaaatatcagtcgggctacttcacgaccgatgtcggctattgaagtttctaattcatcccttaatgaaatatttatgatgtcggtaaggaaatgttcgatccgcgtcatgcggtgatgcttcttttatagacctcgatcggtcatctttcctagcggacgtccactgacattttgttcaatcaatatccgcgaaaaatatttttttgccgagatgggctaatgttttcgtggccgaataaatggaaacatgccagtttcggccgaaagaaaacgtcggttgagctcgctcaaaaaaacctagccgacctacattgtacatnttttatgcaacagccaaacaagaaaacttcctcttgccgtaaaaaaaacat

SEQ ID NO: 54228 - DNA, 421 bp, Glycine max
  unsure (1)..(421): unsure at all n locations
taagctagggaattaaaaaacaaacttaatggctgagtgtaactgaaattgtggcaaccaaaagtcacccccaacagccaacaagtcagccaccatttggtctcccaaaaggctgatgcctangttgccaattgggcccttattacaacttgaactaaacctaactaaagcccttttagttgattaacccaaaacatatttttggtcagccaactggtacgaaaattgaccaagaggagttgaaaatcaacacaagtgacattcaaagggaagttaatggcgtgggggctgtttggaatcctcatcaagggctgagtttaattacttggctattttaagcattttcatcagttaagacaaataaaattcagccattcaaaacctttccaagatggttacaaaagaagcatanatgggacat

SEQ ID NO: 54229 - DNA, 383 bp, Glycine max
  unsure (1)..(383): unsure at all n locations
gcaatcttgagctcttagatagatgcgatatcttttatttctaagtnnngagatatgcattanagttttagttagacacaaaagagaaatgctttggaggtaaaaatagaagatgtcatacccacaagtttaagtttaagtatatgggatcaatagtataaaacaataggaaatntaataaagatgtcacgtacaagatacaaattggatttttttttatataacaaattggattgttaaaaggaagaaatacataaaggaatattagcaaccacaaagtactaattaagctcaaagggaaactttatcataatactacacaccgggttatattttatagtaatgaatgttgaatnttaagatggaatttaagatgaaaatgt

SEQ ID NO: 54230 - DNA, 395 bp, Glycine max
  unsure (1)..(395): unsure at all n locations
agtcatcaagtttctcagcaattaagttatgagaagattgaggcacagaagatgaaggatttgaggtagccatacatgaaaagaagagatgggcttaaaaacaaaattagggtttatcgctggaccaaatggctctggataccatcttaaagagaaagctgaatacaaaagttaaaacataatggtgtatttcatatttccaccgcttaatcaaagctgagtacaaaagggagcatttatagtagctgccttgcccttatcaatacagttggcaaaggatgaaatacagaataacaaanaanaatattctgctgttgtaacacaatgaatagataaaaacaaatataaaaaacaaatatatcctaatataaaacatacccatttaggtaaataat

SEQ ID NO: 54231 - DNA, 323 bp, Glycine max
  unsure (1)..(323): unsure at all n locations
tacactacgcattagagagacaaaatgtgcagacatgtatgcgcacatgcacgaagacaacctccttctcgtgcgttcacgcactacactgttagctagggtggcaaattaacaagaaatacactcttgcatttaccccatttcatacgggacgtgtccttctttntatttccctctctctctntaacatctccttgccactttgtaccaaccataactaccccaccaagctcttcaatcttaatttctataaaaaaaacatatatattaatgtaacttatatatatcgcaccaccattcgagagcggannnctcatgtacac

SEQ ID NO: 54232 - DNA, 442 bp, Glycine max
  unsure (1)..(442): unsure at all n locations
cacatngaaatataagctcatntaatggaccattgtccttctgagtgttatagcttactttgaatntcccanagtgtataggaagtgagatcaaaactaaatgcacgagcaggtcttcaccaagctctagcttaagtgctttcagtctcgatgtaaagttagacattttcattatgtactcccttatataacttttgcccctttttttaaccaaataaataaataaaaaacaaaaaactacatgcacaaaaaacttatatatattatgaatagatgccaaaaaccaaaatacactcaaatttaaatgaaatatccaatatgacaatatctgaatntaccaacaattaatatgtgttgttccaaaaaaaaattgggttcatataaccaaagaaatccaagtataattagaatcaaataaccttaaattccaataatctaatag

SEQ ID NO: 54233 - DNA, 295 bp, Glycine max
  unsure (1)..(295): unsure at all n locations
ataacccaatgtcctatcacttaattagaattgaattttaagataaaaaaaaaatggtcccactaatacaagctgttagcaacacaagtgagaatcacatcgaccagaatacgcgaattangagaaaggtaatngacatgacctttaatgtgattntaataaagtcccacgaaaattctttgtgggttgatgtgatgtatgaattatataaagcgtacaatagtagacaaagtgaggagggataatcataatagcgggtagtagaaaaactcctttaatttgcactatatcttac

SEQ ID NO: 54234 - DNA, 478 bp, Glycine max
  unsure (1)..(478): unsure at all n locations
tagcggtttctaatatatgggcccttaagtctatcttatgctgactttagctgagaagtccgtggatctcctcgggggtggagtagatgtccgccattgctntggccttggctaggaatcggggaagttcttgactcccgttcaaggtaagagcaaatcggtccatccacattgatgcctcttgatgtatgtcataccctaatttcgtccggggacctttgcttgatgacatgcgacctttctttggtccttgtgaggtgcttggcacccatcattaggcaatttgtgaaattccaggacatgccgganaaccaaaaaatattgatgcacaatccgtaagtttccgtgacacaccggaaatcaaatggaagcatcgttgcataattaagtgagattccgtaacattccgtaagtcaaaaaggggatgattatgtaatccgcaagggtccgtaacattacggaaagaaaacaagtatcg

SEQ ID NO: 54235 - DNA, 397 bp, Glycine max
  unsure (1)..(397): unsure at all n locations
aatttgggtttagaattagaanagaatgaaaatagggacttggttgtaagaatttgggcttgcccatgattggtactttgcacctaaataacatgggaaatgattttcaatgctgtgtagatatatgtgtaaatatgaagggcatgaaattctttgcaaggatgaaggaatattgaggtcacttcctaaatgaatgtatgatagcatgggattcccttttgaatgcaagtatgtgcataatgttaaatatcttgccaataggcataagtgtgagtgaaacaatgaaagtttgtatggtatatatatcttgagtgtgtgtagttagtttgtgatagcaaatggttaggatatagttaagtgtaaatttgacgcaatgccttaagcgtgagagtgtgtg

SEQ ID NO: 54236 - DNA, 254 bp, Glycine max
  unsure (1)..(254): unsure at all n locations
ggcatagtcggtcagtgagaacctgtgatgtacctaagcaggcgagctcctggcagtcaacagataanaggaacaaagaccaaaaagcaaggaggcttgtggtggctggccaactgtgaaacttgattgatatgtgagatatggtctctggtaatcgattaccaagggtgggtaatcgattacaaggcttaaaaatgaagacaagaggcaaagatggtctctggtaatcgattaccacggngtgtaatcgatta

SEQ ID NO: 54237 - DNA, 522 bp, Glycine max
  unsure (1)..(522): unsure at all n locations
cgctgaactgccttgatacgtgacctgaacactcagcttgagatttanacgacaatacnnnnactctgatgttttgttgagtcccgcnananancgagacgctctaaatngaatgttgaagctctgaccaaattcaaacgacgataactttttactcggatgtctgattgagtcccgtaatacatcgagacacttcaaattgaatgttgaaactctcaacctattcaaacgacaataacattctactcggatgtctgattgagtgccgtaatacatcgagacgctcgaaattgaatgttgaagctctcagcacattcaaacgacaataacctttttactcagatgtctgattgagtcccgtaatatatcgagacgctcaaaactgaatattgaagctctgaccaaactcaaccgacgatacatttttactcggatgcctattgagccccgacatcatcaagacgctcgaattgaatgttgaaggtctaactaatcaaacgaccattacttttactcgatgtn

SEQ ID NO: 54238 - DNA, 347 bp, Glycine max
  unsure (1)..(347): unsure at all n locations
gcacagaatgattgnctagttatgttggggaacgggtatgaaccccgaatgggtttaggcaaagacaacggcggcataactagcctgataaatgccaaaggaaatcgtgggaagtatgggttatgctataagcccactcaggcagatataaagagaagcatcacgggaaggaagagcggtagtcaaagcttgcggttgagacaagaaagaagcccaccctgccacataagtaggagctttataagcgcgggtctgggggatgaaagtcaagtggtcgcgatatacgaagatgatgttccgagtacattggatttggtacgaccatgccctcctgatttccagctggg

SEQ ID NO: 54239 - DNA, 373 bp, Glycine max
  unsure (1)..(373): unsure at all n locations
tccttcaanggngattttccaccatggagatgcaacaaaaaataaaggagaagaggtgagaggaggcgccatcaactagggaataagccatggaagaaggagcttcgccaccaagaatgtgtcttggataagaagcttggagaggatgctttgagatgagaagctagagcttagctacacaccccctataatagctaagctcacccctatgccgaanaacatgaaaatacaaaaaaaagtccttactacaaagactactcaaaatgccttgcaatacaaggctaaaaccctatactactagaatgtccaaaatacaaggcccaaacgaagcanaaacctattctaatatttacaaagataagtgggctcatac

SEQ ID NO: 54240 - DNA, 373 bp, Glycine max
  unsure (1)..(373): unsure at all n locations
agctctcgtgatactcanatgatcataacttatcacacagaggttcgattcacgcgcataatatttcgagacgctcgaaattgaacaacgaatgctctcgaggaattcaaatgttcataacttgtcacacggaggtccgattcangcgcataatatatcgagacgctcgaaattgaacaacgaatgctctcgagaaattcaaatggtcataacttgtcacacggatgtccgattcaggcgcatcacatatcgagacgctctaaattgaacaccggaagctctcaagaaattcaaatggtcataacttgtcacaccgaagtccggtcatgcgcataatatatccagacgcttgaaattgaacaacgaatgctct

SEQ ID NO: 54241 - DNA, 429 bp, Glycine max
  unsure (1)..(429): unsure at all n locations
ctaagctctcgatatatatgcacatgaatagacttcgtngttattatgacattgaattctcagagcttcgttgttcattntgagcgtctcgatatattatgcaccagaatcggactttcgtgtgacaagttatgaccatttgaatttctcgagagcattcggtgttaatttcgagcgtctggatatattatgcgcctgaatcagacctccgtgtgacaagttatgaccatttgaatttctcgagagcttccggtgttcaatttagagcgtctcgatatgtgatgcgccagaatcggactttcgtgtgacaagttattaccatttgaatttctcgtgagcattcgttgttcaatttcgagcgtctcgatatattatgcgcctgaatcggacattcgtgtgacaagttatgaccatttgatttctcgagag

SEQ ID NO: 54242 - DNA, 400 bp, Glycine max
  unsure (1)..(400): unsure at all n locations
atgctatgtgctcgcgactggtccctttcttcccttcgcaacttgagttcactattggtaccccatagagctccgcgaaatttgttccggccatactcttccttgcgagccctcttggtctcttgttcaagggctcttgcggtaattgcattctcttcccgtaacccggcacactccttccgaacgtgtatagcggccaacttgaacttctccttggcaagttntgcctttcctaactcacttttgagagctnggacttcttcgtcctcttccggtgcttcaaaattctcttcgctgacgactnttaactnggcgagccaatctaaacctcgtatatgaactntcagccattcgtggtacccaccaatgatgccattacgaatgcctctaagctcttgat

SEQ ID NO: 54243 - DNA, 567 bp, Glycine max
  unsure (1)..(567): unsure at all n locations
ncggttganccttganaaatgattccgctgcattacgtgacacttagantactcaagctntgcggatttggnnctttgccagtgaaaatgattctgatgtgtgttctannnaaaannggcanatttaagtcattccttgcttgtgacccgaatgagaaaacctgggggccaagtgaaagaggatgagaaaggaggagaaacctattgtgtgacttgccgtcttatacgaccaaagttcccacccacccaacaatgtcattactcagccaataacaacccttctcattacccaacacccagtcatccacaaaggccatccctaanatcaaccacaaagcctacctaccgcacttccaatgacaaacaccacctttagcataaaccaaaacaccaaccaagaaaatgaatttgcagtgaaaaagcctgtagaattcaccccaattccagtgtcctatgctaacttgctcccatatctacttgataattcaatggtagccataaccccagccaagggtcattcacctncatttcttcgagaatacgattcgaaacgcacgtgcgcttgtn

SEQ ID NO: 54244 - DNA, 405 bp, Glycine max
  unsure (1)..(405): unsure at all n locations
gcttatcatgtattcatattagcacaagacaagtgatttgatctacacctacacaatagacatttacttgggattatgatttgtgttactctcttctctcccaaactaccctggtctcttttttttttaggaaggcagtacaactgttcaagataagaagaataaaaagagtaaaagatttaactggtaatntggtttacacttgacactatntttcgttttagtctctacatgaaaaaactggtacatgtttgtgttaccttcaacggcctctaacctacgtttccaaaagacctccctggtaacttatgcattggaatgatcgctactgcactttcaacggaaaaacaaacatgtacagtcactctccattcttcttntccttcaggaaatggagtgtcatca

SEQ ID NO: 54245 - DNA, 317 bp, Glycine max
attactgtcaatgcggaaggtattctgcgcttcactatccatgttcacacattattgcagcttgtggttacgtgagcatgaactactaccaatatatagatgttgtttccaccaatgagcacatcttataagcatactccgcacaatggtggcctctcgggaatgaagcggcaattcctccttctgatgaggcatggacactaatccctgacccaactacaattcgtgcgaaaggtcggccaaaatcaacaaggataatgaatgagatggattgggtcgaaccatctgaccaccgacaaaaatgtagtatatgtgga

SEQ ID NO: 54246 - DNA, 463 bp, Glycine max
  unsure (1)..(463): unsure at all n locations
tatatctacaggctgttaggatacaagagttgtgcccgcaaatatttttaaagaaatcctgcacctctggttcgaactcctcttaagactctagtaatcaattccctttacgtagcaaagatagacccttagatacaaaatgatggagtgctattttaggaaaaaaagaagtattctggtctccttgagcatgcccttagattctcgattnttctcgccataagcattcctgaaagtgcaaaactatttgcatctccttttgtgctagaacttcttgattaaataatgcatccgagtatcctatattcacaatctattggtggatactgtccacctcattggtagcttaaagcacaagctggtggacattcccaaacaccattttaatccaggttcttaatntacactntaacattntcagctnnttgtgcanatcagctataggataacctangacatgaca

SEQ ID NO: 54247 - DNA, 427 bp, Glycine max
  unsure (1)..(427): unsure at all n locations
tctcacatncacagatcacacataaacccaacattcccagtttgccaccttcactgagctcatgtactcccacgtagcccttatcctcgttcctctcaacaccgggtccccatcaatctctccaagcttccacaacatccaagcaattcaacatcccaaacatcatgaactatcaaaaccaaggaaaacagggcagaggcagaaaactntgcccaacacaaaccaatatcacaacttttctcacttaanaacctcagtaacattctcctcgttccaattcgttaaccattggatcgactcgaanattntactggtagtctctagcacataagtctacattgtgaaccgtggtatctgctagaaaacgtccagaacccaatctgtactactctnntcagaaccagcanatacacaacattntctacac

SEQ ID NO: 54248 - DNA, 406 bp, Glycine max
  unsure (1)..(406): unsure at all n locations
gaattcaaaaacaaaattattaggggaaaaaaagaggaaagcacaactttgggaaaggaaagtagttaaactgaatcaacaaaataagatgataaaatcattcaaggatttcagaagtaacacttttcggatgtcanatcaacagtacataactaaaaacaaataagatcctatatttaacttcaacttctattacaataatcacattcatgcatccactcataagaatctatagaagcaacactgttcttacctcttccagaatcttggaccatagacaaaactaaaaacaaataaaatcctatatttaacttcaacttctattacaataatcacattcatgcattcactcataaaaatctatagaagcaacactgttcttacctctatccaaatcttggaccat

SEQ ID NO: 54249 - DNA, 539 bp, Glycine max
  unsure (1)..(539): unsure at all n locations
nnccttgtatgaactgattgcagccntttgattaaccntgactgaagnccancaccgatggcgtgtcngtaaagtcttgaggtttattgctatgacggagatgaaggangaagtgtatttccactggtccttacctctaccaagggtggtttggtaatcaaggccacacccaacaccacttgaatatgccctttgcagccagataatagtgatcaggttcttggttggcatgcaacaacacatccatttgtttgtcccgtgatatgcaaatgtattcccttgtcaatggcttggttaacataccatcagcaccaacaacagtgagggtgtgttttgaaacagagaagaatagaatgagattcattgccgcattgacaacacggagaagataagtactgccttgctctacatgaaactcgaacgtttctgaatattaaaagaaagcgttgtgtttaattacatgatcatcttcctttccaaacaattaataaaaaaccctcagagatcaaatgtttaatgaaaaatagtactctaacatg

SEQ ID NO: 54250 - DNA, 436 bp, Glycine max
  unsure (1)..(436): unsure at all n locations
cttatttttgagttatggggatgacatgataaacagttacatgaaaatggaggtgagttgagcaaggtcactactagcacaacaatcaatggatggatctttgactatatttgttatggcggactccacaatggcataatggaaaatgtgaagaatgttgtggcccccaataagctcgtagagcttgctctttattatcctaaggcattatttaattntgatttccttcaaatatctaaatgtattaattctttgttcttaataatggaaaaacattatttaaggttggtcatacataaattacatcatcagaaagaaaaaaaagtttttttttttttttttttttgtgaattcttggcaaaagtttggtatttacgcttgcattacctangttttttactacaaaatgaacaatatgaagaacatntatgaaata

SEQ ID NO: 54251 - DNA, 408 bp, Glycine max
  unsure (1)..(408): unsure at all n locations
catcttcagtgccagatggtcgcacaaagcatcgacctttggggtncttagctgtaaatgcagaagaggaaagagtatcaagctgcaatattagtaaactgaaattctgcactttaatctttcacactaaaaggctttcatggatggatgaaactgacaaatatctcgcagtcagtgaaattttgccaagccacttggacttgataacagtaatagtataatcccataaacaagacaccaacttttcagaaatataacattcaattntggtattatttaggcctccttgccttcctcactctgcccattcttggtggtttcacaaataanagcaagcaagcaatgataaaaccaaaaaacaatgttgtctntgaacaaaacaatgcaatatatacacattacaaaaac

SEQ ID NO: 54252 - DNA, 147 bp, Glycine max
tctggatgttttgagcagatcccaacggtcacaatgtagacttatgtgctagagacttccagtaaaattttcgagtcgatccaacggttaacgaattggaatgaggagaatgttactggggtttttaagtgagaaaagctgcgatat

SEQ ID NO: 54253 - DNA, 442 bp, Glycine max
  unsure (1)..(442): unsure at all n locations
caataaagnaagagcacgcctagtaacaagcacatctccatttaaaggttcagcaacatcaacatcactacaatcctccaatggcagcatttcatcatcacttgagctctcgttctctatgtctccattatccagcaatatcatgaatcttttatttcgacattgagaagcaatatgtccaactccttgacacctaaaacattctatatcacaagatctagaagatgaattaatttctattttacctttatgtgcaacaaatgaatttttggacatagcttcatctgttgactntgtcattgatttgttgtttcaccaatttgacttccatgaagaagtggaagcaacattggaagtactcttagctgtcaatngcctctctacttgaataaatntgtgcagcaagtccctcatctcaacataatgttgcaagtctatcaca

SEQ ID NO: 54254 - DNA, 290 bp, Glycine max
  unsure (1)..(290): unsure at all n locations
ttggcttttaaaatgggttttcttttctttttcattttctttttaaaagccattccacatgtcattttttaattggagcaaaaagggcccacctttacctttgacttgaccacatactcagccataaaagaagaaaaaaactggaccgttttggatgctgaaatccagcctcagtttgcgtgccacctctccggttccagttcttcgcgtttctctgcacccgtcggggcccgttttcnagggtggcaatatatatcanaacgctcagaatgagaccctgagcgtggttc

SEQ ID NO: 54255 - DNA, 384 bp, Glycine max
  unsure (1)..(384): unsure at all n locations
tgtgattattattctcatcttcatcagagagaagcatgctcaacagcttctttttgtcatcgtctcttgcaacgacatattccaccgatcgatctgtatcttttctgtaagagactctgccagcaacaattttcataccgagactatctatccgtttaagaaaattttcaagccttctagatattgcttcaagcttggaattcatgctcttatagaattgattaaagggagaagaaagtgatgaccacacctggctagtaaaggttntacattgtccctccacctcgcacctcagagaatctgtgttgatttcgtccaacanatcctcagcgtctagaacagcatctntcaactcatcaagccatgccttcactgcttcattag

SEQ ID NO: 54256 - DNA, 326 bp, Glycine max
  unsure (1)..(326): unsure at all n locations
gccatggaagaaggagcttcaccaccaagatgagccttggataagaagcttggaaggatgcttcaatggaggaaaagaaagggggagagaaagagagagggggggagcacgaaattgaaggaataaaagagggagagaagtggaactntgaagtatgtctcacaagactctcattcatcanagttacaacaagtgttacacatgcttctatttatagactangtagcttccttgagaagctntcttgagaaaacttcctttagaagcttctttgagnaaaacttcttgagaagctagagcttagctacacacacccctctcataac

SEQ ID NO: 54257 - DNA, 351 bp, Glycine max
  unsure (1)..(351): unsure at all n locations
tctgnacctgtcgcaagggtttgtggtttgtgttcctctgctgaccaccatacagacctttgcccttccatgcagcaaactggagcaattgagcagcctgaagcttatgctgcaaatatttacaatagacctcctcaacctcagcagcaaaatcaaccacagcagaacaattatgacctttccagcaacagatacaaccctggatggaggaatcaccctaacctcagatggtctagccctcagcaacaacagcagcctgctccttccttccaaaatgctgctggcccaagcagaccatacattcatccaccaatccaacaacagcaaaaacccagaaacagccaacagttg

SEQ ID NO: 54258 - DNA, 327 bp, Glycine max
gtgggcctggttgctatttgcacccccatttttactaagtacaccccattgcctttttttttgtgattcttttttcgtaaagttacggaaacttatgaatttcgtaacgatacttgttttctttccgtaatgttacggaaccttgcggattacataatcatcccctttttgacttacggaatgttacggaacctcactaatcatccccttttttgatttccggtgtgtcacggaaccttacggattgtgcatcaatattttcttttgttttccggcatgtcccggaatttcacaaattgcctaatgatgggtgccaagcacctcaca

SEQ ID NO: 54259 - DNA, 451 bp, Glycine max
  unsure (1)..(451): unsure at all n locations
gctttcattattcttgtacccgggggccacatgtgtttggtattntattctcgttcattactttnatacccccctttgacgtgcttaagccattttatttaagtcatttctcgcttaacctaaaaataaaataaatttccaccgatcgtttgaattgtattatccgttaacttcggttaaaatgaattccgaccgttcggtcgtgccgtaaccacgttggaaatcaaaaaagaggtaaaataataatataataataaaaaaaaacgtcttttagtaaaataaagcggaaaatcaatcggacgttttctctttgggatttctcattcttaattgaattgactaataactaaagtgaaactaaggctaaaatcaactcgcctagtcaagctcgtccataaaaataggtttttgaagtttatcatttcaatntcttactaagtaaaatggatca

SEQ ID NO: 54260 - DNA, 345 bp, Glycine max
  unsure (1)..(345): unsure at all n locations
ctctgtcaaacaccccaaatcacagttttcttactaaagactcagtacaatccttcgttcaattcgtaacccgtggatcgactcgaaattttactggaagtctctagtacttaagcctacattggtgaccgtgggatctactagcaaacatccagaacacattctgtactactctntccacagccaaccacacacaagcatttttctgcaccaagccaaaatcctgctgcacctatnttgacagcaaaattctgcataagtgcagatttcgaanatcacccttcctctcatccaatcttgcccaaatcaaatcctacaagtcccaaatcatgtatcaatcatgtc

SEQ ID NO: 54261 - DNA, 378 bp, Glycine max
  unsure (1)..(378): unsure at all n locations
tctagtcaaggtctgaaagaccatacaagtttcctaacgatttctaattatgtgggccattaagtctatcatatgctgacaatagccgagaagcccatgaatctcttcgggggcggagtaagtgtctgccatcgccttggccttggctaacaagcggngaagttcttgactcccgttcaaggtaagagcaaaccgatccatccacatggttgcctcttggtgtaaagagtcgatcacccttcccctagcctctttttccgcatatacttgagcatactcgtccgcgattctatgctcgtgggccgtggctagacctaactcttcttggtacttggcgatgatagctagcatgttggtctccgtctcgcataaacgctg

SEQ ID NO: 54262 - DNA, 422 bp, Glycine max
  unsure (1)..(422): unsure at all n locations
gctgcaacttacacttatttagtatgatcctcttcctagaaataaaataacttaatgccattaacctatggaattaaaacaaacttaatggctgagtgtaactgaaattgttggcaaccaaaagtcacccccaacagccaacaagtcagccaccatttggtctcccaaaaggctgatgcctangttgccaattgggcccttattccaacttgaactaaagcccttttagttgattaacccaaaacatatttttggtcagccaactntacaaggattgggccattatttagacaaactaaacactctaaaatngaaataaagtggtgtcatttagtcctccatttgggccatgatacaactcacaaccttggacttttctccttgaaacttgngcttgtattcaaatagtatggacagcactt

SEQ ID NO: 54263 - DNA, 381 bp, Glycine max
  unsure (1)..(381): unsure at all n locations
taacagaagctctcgagaaattcgaatggtcataacttttcacacggatgtccgattccggcgcataatatgtcgagacgctcgaaattgaacaacggaagctctcgagaaattctaatggtcataacttttcactcggaggaccgattcaggcgcataatatatcgagacgctcgaaattgaacaacggaagctcccgagaaattcaaatggtcataactnttaactcagaggtccgattcaggcgcataatatatcgagacgctcgaaattgaacatcgaaagctctctagaaattcaaatggtcataacttttcacttggaggtccgattcacgcgcataatatatcgagacgctcgatattgaacaacagaagctct

SEQ ID NO: 54264 - DNA, 236 bp, Glycine max
acaccctcagatctccaaagtttagatcttgcctccaagctacaaatctcacattccctctctttgtgaggcttcacttgtgccgcccattgtgaacctttatctccatttatgacaaaagtatgaacctctcaccctaagcttatgtgaccccaatttcatttcctaaacttctccctctcacccttatccttgctctccagatcaagatctgagtggagaaaggaacccttcca

SEQ ID NO: 54265 - DNA, 403 bp, Glycine max
  unsure (1)..(403): unsure at all n locations
gctatctacctccatcagtagagccttcattgagaaatactgcatgttcatgcatgtgtannggcaggtgccacaatagccaaaggaggaccagtagcagccagctacagatgcgccaccatcgcctctacaagagacaccttccctggggtctatctctgcccacttgcggaggatagaactccagatgcacacatacatgcagcatgtgactagccagcaggcgactaatcacaggggccaggtgcaactaaatgagacattctactggtacaatatgcaccggcagagttaggaccccaatcttttcccttggcctaccctcgagcagttcggggccacagttgcctggcctagagatgagaccgattntcagacacaggcaagacccgtagggacccct

SEQ ID NO: 54266 - DNA, 334 bp, Glycine max
  unsure (1)..(334): unsure at all n locations
tatagtgatgagctcttcgtatatgaccgtcatacctggttcatatctattggttgccatccctctccacgtgtgaaaattatggcatgattctgnatttctggcttaccctcaccccaaatggctggtccaggaaagcttattttatatatgatctgattgaaacaatcaaatatagtatattattaagaaaataaatgatagtttaggtaagactgtaacagttaaggttaagagttccatttagttatatagaaagaanaatagtttgataattttttcttatcttgaattaaataaataaaaaatgtctatntatgtaagagtgacttca

SEQ ID NO: 54267 - DNA, 342 bp, Glycine max
  unsure (1)..(342): unsure at all n locations
cacatcgaattcacaatagaaacctctcacaagatatactctaaaatcacctttcagcntaaaactctaatctacgtataaagagcacatatgcatcattgagtataacctacaaacaaatagctaaaaccaaatgtaaatacacacaatggggacctggatatagacaaagaatgagagagagagagagaattacttggaattggtgttacgtgcaatgataatattggcaacaaatagaagaaggggagagaaagtgagatatgcgacgagagaaattttttaagcacatatgactcaaacttagtgacggtttgacaaacctcataatgtgacacaaaa

SEQ ID NO: 54268 - DNA, 219 bp, Glycine max
  unsure (1)..(219): unsure at all n locations
agttgggtttctaagcttgatantacattgggcacctattttgactttcccatgctgtgtctacatacataaaacagccccactgatcgaggccgtacccgaatcaaataaacatgaaaatgcagtaactatgaagtgatcctatgtcgtttcccaatgagcagtgacaagccaaatgttcataatatacttgcagtaacaataacgatgggggggggg

SEQ ID NO: 54269 - DNA, 372 bp, Glycine max
  unsure (1)..(372): unsure at all n locations
acacaccaaatgattataatgatggatggctcanattctcacaaaggtaaaatcatcactttcaaattgagctttcaaaactatcatgacatgtagagaagaatcaaggatttcaagtcacaaaatgtcaagaacttttattttcaaaacaattacccatttcttgaacatatcctataattcaaagaanaacatgcaaagtcgtacgtgcacatganattgacccanaatattaaactgaaaatccgacgaaactaacaacattaacaaattaacacaactaacaaattaacaaaaccaacaaaactagcaaaactaaagaacactccctccccatacttaaacaacacattgtcctcaatgtagcacaat

SEQ ID NO: 54270 - DNA, 351 bp, Glycine max
  unsure (1)..(351): unsure at all n locations
gctgcagcttcacttgatactgcatagaataatattagctctatgnnnnccctctcgtggatgtagccttgatcaaaggtgaaccacgtaaatctgtgtgttctttctcatctctctccccctttcaatttgctgcaaaatctgtgtgtatggcatttctgttctgttgcatctactgttgttgttcttgattgttcttcatcacttccataacaagaatgatattataacacaccangtaagaggaaagaagaagaaacaaaataggattataaaatagacgcanatgattataatgaaaaaaaaaagtgttttacctatgatgaggatgaaggcaacttatattgagtt

SEQ ID NO: 54271 - DNA, 421 bp, Glycine max
  unsure (1)..(421): unsure at all n locations
acatcaacacatngattatgaactcactaacaaaaccttcttgctatcgaaactcgaatagatctaaaagaagatcgtctaagatttacattagcacaaatcgcaccgacacattgatctgatgcacacgatgcatagcgccgatcagaatctctaccgacatgacgcgccgtatacataaaatcctaagagcccgaagccttattacgattatgcgtccacatgactcatcgagatctctcaatgtcttgcaattcctattgacgacaaaaccttgtgattcacccaatagtatgtatactgcaaattcctatggttgaaccaaggcaaaatctaatgaatcaaacactcttcagttcccttaacgtccaccttctatttgcgcanatgttacaatacacatcgatcctgtccaccacac

SEQ ID NO: 54272 - DNA, 293 bp, Glycine max
  unsure (1)..(293): unsure at all n locations
aaggatgccccaaatatntgcatgacacacatgcaaaaagatgatttgcaaacttatgacaaacttgtcatgcatgcgcctatgcagacgctcaagtgtcaaattttatggtcangtgatgctaagggtcaggaatcatttcctttattataaatcaacccaatggttccaaaatatgttcttttattcaattgtgcattcctccaagtccatttcgggcgtccggagaaattttcacagcattcaccctttaggtgtagacacgttttttcttcaaaaatctgttatgatca

SEQ ID NO: 54273 - DNA, 320 bp, Glycine max
  unsure (1)..(320): unsure at all n locations
aaaaacacaccaacatcacagcggnncacatncagagaccccagcgacatactcttcggtccagttccttaaccgctggatcgactcgaaaatattactggaagtctctagtacataagtttacattttgaccgttgggatctgctagcaaatgtccagaacctcatatgtactacccttttcacaaccagccatacacaagcatttttctgcacttatacaaaattctgctgcacattccaacagcaaaaatctgcatagagtgcagatttcgaaaaccactctnttcctcatctaattgtgccgaaattgaatgctac

SEQ ID NO: 54274 - DNA, 354 bp, Glycine max
  unsure (1)..(354): unsure at all n locations
tctgagtngctattngtaacnagttctgaaaccaatttttgtaatatatttaatgttgagcattgaatgtatttaatgttaagtattaaatacattttgaaattaattttcagaaagcattaaaaataatttttaaaacccaattttnttttaaatacgcctagatattaattttttaaagcaatgcattccaaaaaattaattttaactaccaattaacctgttactagcttgacggngcaggcaatgacagagacaacatgaggaaagcctatcacgatagagagagagagagagagaaagggtgtgcgggagattgngtgcaacttccagggaatgatgactatatcattt

SEQ ID NO: 54275 - DNA, 425 bp, Glycine max
  unsure (1)..(425): unsure at all n locations
ctagncctatacagcagctctttgcaagccactagcccaatggattgacgtattgcctacccactttntttaaaatataaaaaattatcaaaataaattcacctttatataacaagttaacaaaatatttttaacccctgtaaaataaaatataaatatatgttgccatttgtactataaaataacaaaatataatgtaataataaaaataaaataaggtgcatcaattgtaacaataaacaagtgttagaaattaaaaacaaaacgcaatgtacgtaaaatattaacttcaaaatggacaatggcaacatatgtagtattaaataaaatacattgtaattntaccaattataaaatgtaggccaacatataagtaaataaaaaaaatcanggctaatgaattgcataatccatcatgagttagt

SEQ ID NO: 54276 - DNA, 385 bp, Glycine max
  unsure (1)..(385): unsure at all n locations
ggggactaccaacttctcttgatcaaaaattgaaaaaaacaagttgatacgaagcttttcattaagatatccctccatgacatatngcttgtgcaggtttatatagatgacatcatatttggctctactaataaatctatttgtgaagattntgtgcataaaatgtcgggggagtttgaaatgtcaatgatgggagagttgaactatttccttagtctacaagtgaaacaaatgaaccatggaacttttctccatcaaaccaactattgcaaggaacttctaaagaagtttgatattggataaaataaggaggctgcaactcctatggctaccaatggctaccttagtgtggatgaaaaaatgaaactcattgaccaaacaaagt

SEQ ID NO: 54277 - DNA, 460 bp, Glycine max
  unsure (1)..(460): unsure at all n locations
ctcagctgcttggtggtttatggagactggatctttgcttaatttgtcctttaagggatttccacctggagatgcagcggaagacaaggagaagaggtgagaggaggtgcatccactanggaataagccatggaagaaggagcttcaccaccaagatgagccttggataagaagcttggagaggatgcttcaatggaggaaaagaaagagggagagaaagagagaggggggagcacgaaattgaaggaagaaaaagggagagaagttgaactttgagttgtgtctcacaaggctctcattcatcanagttaccacaagtgttacacattattctatttatagactangtagcttccttgagaagctntcttgagaaaacttccttgagaagcttctttgagaaaacttccttgagaagctagagcttagctacatatacctctttaataactaagttcac

SEQ ID NO: 54278 - DNA, 379 bp, Glycine max
ccatgcattaggtaccatgttcaattattttgttttgttggtgtgtgtttttgtttttttttttttagaaatgggtttatgatcccaacatggttggctcatggtgcctaacacatgcaactaagaatgtagtgtgaagtttcacgcttccccttttttgtttttgttttgtagaggaaaatgcaaggatgagcaaacatgagaacaaatggtatgcaattttgcagatcaaaaagtttgttgaacgcatatccatgatgatgccatgactcatgcaaaatgtgaggctgtaatatgataacagacaaatgcaggaacgatatgttcattatgatgccatgaagagatgtttatgcgatgcatgatatgaatgcattta

SEQ ID NO: 54279 - DNA, 340 bp, Glycine max
cccggagatatgtcgcgggggtcaggagaccttggggacgtcaggaggggtgctattgcccaaaaccaagcttgaccaatcccgacccaacccgggcatagtcagttagtgagaacctgtgatgtacctaaacatgcaagctcctggcagtcaacagataaaaggaacatggaccacaaagcaaggaggctggtggtggctggccagctatgaacttgattgatatatgagatatggcctctggtaatcgattaccaagggtgggtaatcgattacaaggcttaaaaatgaagacaggaggctaagatagtctctggtaatcgattaccacgcttgaaaa

SEQ ID NO: 54280 - DNA, 438 bp, Glycine max
  unsure (1)..(438): unsure at all n locations
agcttgtattgttcaccccanattccgttgtcatatgctaaacttgattccatatctacttgataattcaatggtagccataaccctagccaaggttcatcaacctccatttctccgagaatacgactcgaacgcaacgtgtgcttgtcacggagaagccccggggcgttccattgagcattgtanggctctgaagtgtanggtgcgaggtctaattgatgctggctgaaatttgaggagaatcgtgtgtaaatcctaacattgacaagagatgccacacatggggcaattttgaaagctgttgttagatgtctctaatgactcaccaggattntcaactttcaccggaatgtgggtgtaagccattggtctgtttgctcaagcaacctgcgcctcctgagtgtgacttcccagaccgtcaatcagagattactcatc

SEQ ID NO: 54281 - DNA, 456 bp, Glycine max
  unsure (1)..(456): unsure at all n locations
tgatctgttaagttatcttatttagccattgtctaatagcttgagcactttacacgaggcacgttactgtgcagagaaagagtgtgacgaccacaaacattttctatagcaaatcttcaaagaagtacaacttgtcagagtcgctaatgcaatccttcctcccaagggcattggatagaagactccaagaagattgggctagagatgcaacagaaggccctagggttctcataagccttagggtagattttggacccatgggctaagtatgagctcacttatctttgtacatattagattaatgtttcattattttttggccttgtatttagggccccataatgtaggtagggtaccttaaaattctaggatttttcagcccttgtattntagggcacctagactaggtttttgtattaagggtagttttgtaatttcacatgcattaagtgaata

SEQ ID NO: 54282 - DNA, 395 bp, Glycine max
  unsure (1)..(395): unsure at all n locations
cgagtacaattaaatagntaaacatgttgggcttcctctaactcctcatgactggacacgaagaggtaagggtacacgaagatacaatgttgtaactgtgagggcatctatatatattgaataacacacatgaagttcttccatacatagatactcanacaatattgacagttactcacccaaaaatgaacatgatgaaggtgttgcaagagcataatagaactttcataagctggtttaaagaaacaatcttcgatgatgacagtgcttccaaaacattaagaatgttagctntttggccaaatctcaatgtccccacatggaagggatatgatatcaacaattattccttccacacaaattcgcanaatgataaaagtagcatgcagagtagt

SEQ ID NO: 54283 - DNA, 278 bp, Glycine max
agatgcaatttatttatgttgtcagtgtttatttctttgggtagataatgtatagggcccatgactttaatgacccttataatagtaccttggattcggtaaggggctattatattgaagcataagtttaggtttatgttttgacttttgtaccgctcacgtaatcatttttttcattttttgcttaattgaatttgtttgttccttttatgctttacttattatgttctgttttagctcatttacgtttgcttttagtcatttacgtttctgctttg

SEQ ID NO: 54284 - DNA, 394 bp, Glycine max
  unsure (1)..(394): unsure at all n locations
ctcacgagggggagggagagccatgttctcaatatgtaaattagtagtcgaatgctcaaaatcagaatattcagaatcaccagcaacagaatgctcaaaatgcacagaatgatcgggatgcacaatatgcctaaataatctatgaaaggttctatctatttcagtatcaaagggttgtaaatcacctggatggcccctagtcatgcactatatgcaacanatcatctgtttctcaaacaagccctaggggagggttaaaactacaactatagtcaaatgatatccaaataagctaaaatnttgtgagcaaaaccctanaatcattaaaagatagcacanaaaatttcaaacaaaaatacaaagtctaactatataaactacctaagcaaagtat

SEQ ID NO: 54285 - DNA, 480 bp, Glycine max
  unsure (1)..(480): unsure at all n locations
attggtcttcgctggctaaatgatcgatgtgtttctaanaagaggcaaatctgatcatcatgctttgatacatgcaaaanaactgnngcaaatgaagagggtgagaatgagggagaaacccatgctgtgactgtcattcctatatggccaagtttcccaccaacccaacaatgtcattactcagccaataataacccatctccttacccaccacccagttatccacaaaggccaaccttaaatcaaaccacaaaacccacctaccacacaaccaatgctaaacaccacttttagcacgaaccanagcaccaaccaaaagggaattntgcagcanaaagcctgcatggattcaccccanattccgatgtcatatgctaaacttgctctcatatctactcgataattcaatggtagccataacccctgctaggtttcctcaacccccatttttctgagaatacaacttgaacgcaacatgtg

SEQ ID NO: 54286 - DNA, 404 bp, Glycine max
  unsure (1)..(404): unsure at all n locations
aagaaaatttttaataacaacttttaaaaagagttttgaatttgaattttgaatcatgtnatcgattaccaaatgtttggtatcggttaccaacaacgacacttcagaaaacacttttgaaaagtcatgaccctttcaaatataactgtgcaattgattactagaaacctataatcgattaccagtgaagaatttaagaaaaagatttttgaaaagacacatctctttaaaccattttgaaaaggcacgaagggcctatatatatgtgtgtctgacttcaaaaagtaagagagatattctaagagaacttaatggccaaatgttctctcaacaactcttgggaaaacacttgaaaatctattgagaattcatccaggaacttcanattgtatatcatctctaaa

SEQ ID NO: 54287 - DNA, 228 bp, Glycine max
  unsure (1)..(228): unsure at all n locations
cagtgataatgttgatgaatcctccaaagccttccacaaagatgtcttgggctacatgggcttcattcaagaatttgaccaaaagcgcccgatgaggctcagaattcatgggtagttccaacagggagaccctagttggggttttattgagctgttcaattaccttgaactcgctttgctggatgatccgaaagaacatcattgcttcttcaacggatattntctttt

SEQ ID NO: 54288 - DNA, 476 bp, Glycine max
tgcaagcttcagcacaatatattatgactgaaaattgttacctaaatcacattaatcatgattcaagagtagatctatagaaattgaaccatataaatgcaagaataagtgtagatctaagatttaatcggtttatttttttgaatctactctaaacagaaccaaaccacaagacaatggaggatatacatggagaataagatgaataacaaggaattaaagtgaatggactgaacaaaaagattgaggaagcaaaagaacatagcctagatgaagatgctcttgataccacatgatgtagctccaagtggagcttgtaggccttggatcttcttcattaatggagtccttttcttcttgaagatgaatggaaacggaatggagaaggaagaaagatggttggagagggagacgccacttcaggagaagatgagtcaagaagaaactcgtcatcataagaagtcatggataagagc

SEQ ID NO: 54289 - DNA, 538 bp, Glycine max
  unsure (1)..(538): unsure at all n locations
ctagcttttatgatcccttgcgttacagacacatagaactcaagccttgacatnntggagaaaatggtggtgaaancngatnngcttcttttntaaggctgtgnccgcactggctngcctatgcgagttaaaattaaattttttatttatgaaaaacctatgcgaattacgtatcaatcctaatttttctttggggtgaaaaacacctttattttatatattgtgttttataagccttataattacgtataaatcataggcgaatcaatgagataattctaaatgaaaaatgaacaaataccatcccgcctcacaaagcattaagccttatattaaagagcaccagtttgagatactatgttaccttctatgagtgcttctttaacgtctttagtctaacgcatcattgtagccgaggcttcgccatctcatacttcctaattcatttcttctatcgtgagcaaattacatcatggacttagcacctgttgcgccgactctaatccttgaaaagaaatgctacacccaatgttatttt

SEQ ID NO: 54290 - DNA, 355 bp, Glycine max
  unsure (1)..(355): unsure at all n locations
aaaaaaacttaatggctgagtgtaactganattgtggcaaccaaaagtcaccctcaacagccaacaagtcagccaccatttggtctcccaaaaggctgatgcctaggttgccaattgggcccttattacaacttgaactaaacctaactaaagcccttttagttgattaacccacaacatatntttggtcagccaactttacaaggattgtgccattatttagacaaactaaacactctaaaattgagacaaggtggtgtcatttagtcctcctccatttgggccatgatacaactcacaaccttggacttttctcctttgaaactgngctngtattcaaatagtatggacagca

SEQ ID NO: 54291 - DNA, 143 bp, Glycine max
  unsure (1)..(143): unsure at all n locations
atgcttcaatggatgaaaagaaagagagagggggangcatgaaattgaggagtaaaagagggagaaaaagtgaactttgagttgtgtctcacaagactcttcattcatcaaagtaccacatgtgttacacatacttctattta

SEQ ID NO: 54292 - DNA, 420 bp, Glycine max
  unsure (1)..(420): unsure at all n locations
tgtatgtgaaacatttgattgatatgaatgtgtcattttatggttgtatgtggatgacatnattgatattgataataatatgtaattcataaatgatgcgaagtctttcttatctagaaattntgatatgaaggaccctggtcctgtagatgtgattttgggtattaagcttataaagaanaatgatggcatgattntaacccatcacactatgttgaaaatctattgaagaagtttaattattttgatgtgaaacatgtttctactccttatgactcgtccatcaagctaaaggaaaattngagtaaagaaatttcttcacataaatattctcaaatttatcagttctttgtgcatttgacaaacttttctangtctgtctgatattgcacatgtagttggtagatgggaaagtaattg

SEQ ID NO: 54293 - DNA, 358 bp, Glycine max
  unsure (1)..(358): unsure at all n locations
tagtaaagtccctacatgtaatgacttccagtatcttgttgagagagtttcccaaaagctctcggggtggacatcacaacaattctttctagcaagccagatcactcttgcaaaatcaggaattcaggccttgtcgatttatcttatggcgacgactatgatcccaaagactgtcttagagaaaattcagaaaactcaaagatactntatttggggagatcatggtaatacaagagactcatgttgtggggtggccaactatgatgctntattgaactcaatgttgccaaataagttgattcggtgtattttgcctattatgtctccttataatgacgctggattgattangagaatg

SEQ ID NO: 54294 - DNA, 386 bp, Glycine max
  unsure (1)..(386): unsure at all n locations
acaaacatccncagttccatattacatcattatcgtaatgataattacaaaatttaacgtaatctgacggacgctgaggtcccacctctccaagttggaggacctgttgagctcacactcagttctcatagccatcctaaaggtagtgcttctgccctcatcatgtcaccgtttacgttatttctttgttaccttccatatcaaaataagaatatttttttttataaaacttctagaaagagccgctatgtgattagtctcaattgggctttttaaagtaaggttttcaattccggtattataagtagaaaagattattaggacaagagatcaaattctatgtgtttatagagtaacaacaatttacaatatattacatgtaactc

SEQ ID NO: 54295 - DNA, 349 bp, Glycine max
  unsure (1)..(349): unsure at all n locations
atttacatgtacttccaaagtgtattttgtatttacatcatacacgccatcttgtcaaaatttacacacatgcatactcanagcatttcngngtaccaaaaatngcacatgcgctcatcttggtatttctaatatctatacatatacaaacttcatgatgaatcttgactacctacgcaataaggtgctacatttcatgctctttnttttcaagtttttgctacctaaagccatatgcaaattcaagcatatcttccttngctgactaanatngtattcaaaatagaaggtatatattnttttgtaatatgnttccttcacataacatgcaacacatctatatatatat

SEQ ID NO: 54296 - DNA, 362 bp, Glycine max
  unsure (1)..(362): unsure at all n locations
cttctctctctttcgaatttgcttggaaaaattgtttctgtgaagaaaatccaagccgaggcgcttccgaaacgttttcgtgaggaatttcgtgaaggttttgaccgttcttcgacgttcttcattcgttcttcgatcttcaatgggtaagtacctcgaaccaagcttttcgattcattctatgtacccgtggtggtccacattgtgttttgtgtatntttattcttgtttcatttactttntatacccnnctttgacgtgcttaagccattttatttaagtcatttctcgcttaacctaaaaataaaataaatttccaccgatcgcttgaattgtattatccgttaactttggttaaaatg

SEQ ID NO: 54297 - DNA, 356 bp, Glycine max
  unsure (1)..(356): unsure at all n locations
ttcttttataataaacttacccttgcaattttgtactgtgtgggtggtacctgtgatgattacgaaactntgttcgtgggagcatatgagcaacagtaaatgatgtgaagggagattcttttgtgggaaccatcaagccgatgtgatgacattgagattattttgggagggagttatgttttgttatcaactcctctatagttaattctttgattctattttgaattggacatgtaaatcacaagcttagatacatatataaattaaattactttctatcatgtggatgatgtatgaatggtattatatatatatatatatatgtacctatatatatatgtagagctatgtatata

SEQ ID NO: 54298 - DNA, 415 bp, Glycine max
  unsure (1)..(415): unsure at all n locations
acaacgatcctttanaaaaaatctcattttcatagatacaaaagatgaagttagcgggaaaaaaatcaatttatattagcttacaaagataaatggtatgtttagtagatattatatacctgcacaaagtgatttccattgacaagtccaatagaaatgagacggtgctntgccagcatgggatccctaagtggaaagaaggtccaactctgtagcctagttaagtggatcaatacaacattataccaactagcaatgttataacccatgtcaggaatggtcatccacttctcatatggcactgtaccacattcaatgtacaaagaggttattaattccaatagtctctcttctaagccaaataattgaacatagaaagagtgtcatgtntgaagttccctaatcaaatcttgcg

SEQ ID NO: 54299 - DNA, 391 bp, Glycine max
tttttgcaagaaaatgggagaacagaagtgaaaagaggaagaagaatgaagaaccaattgagagaaaaaaaaaaagagtttaatcctaaagcttgcacaacaagtaactaagtctattttttacaaaataaactaactaactaactaacactaatatatagagtgactacttggaaggaaggatgagtcttgattaggcccatcttatatacctaattaaactaattatacaaaacaaagcccaaactcccagcccaattattcaattgcaacggttctgacttccaagcttaatttgaccctcgaaatggcaaaatagacaaaagcttattttttgacaaaatgaagttattttttgtagctttccatggattactcacactatttggag

SEQ ID NO: 54300 - DNA, 362 bp, Glycine max
  unsure (1)..(362): unsure at all n locations
acttctctctcttttcgaattgctgaggaanattagttccgtgaagaanatccaagccgaggcgcttccgtaatgtttccgtgagtaattacgcgaagattctcgatcgttcttcanagattcatcagtcgttcttcgttttcttcagtcttcaacgggtaagtacctcaaaccaagcttttcaattcactctatgtacccgtggtggtccacattntgtttcatgtatttttattctcgttttcatttactttntatacccccttttgacgtgcttaagccatttatttaagtcatttctcgcttaatctaaaaataaaataaatttccaccgatcgtttggattgatcatccgttaattt

SEQ ID NO: 54301 - DNA, 349 bp, Glycine max
  unsure (1)..(349): unsure at all n locations
agctttgttctctaatcctgactcaccatttaccttgacccagggtttgaatgtcaattcttacccttcgaagcaaanaaaaggggagagggaaaatttccaatcaaagaggaagcaaaaaaggagagaaggaaaatttccaatcaaaggaaaaaaagagaggaaagggaattcccaatcaaagagtgggagaaagcaaaaagaaaagaaagaaaattcccaatcaaagaatgggagaaagaaaaaagagaagaagaaagggaagaaagttcccgatcaaaaaanaataatatgcagaaaggtctttggaccggacaatatctgaacaatacagaattgtcaccaaatg

SEQ ID NO: 54302 - DNA, 325 bp, Glycine max
  unsure (1)..(325): unsure at all n locations
acctggagatatgtctgcggggtcaggagaccttgnggacgtcaggtggggtgctattgcccaaaaccaagcttgaccaatcccgacccaacccgggcatagtcggtcagtgagaacctgtgatgtacctaagcaggcgagctcctggcagtcaacagataaaaggaaaacaagaccacaaagcaaggaggcttgtggtggctggccagctgtgaattttgtgtaatatgtggattgtggcctctggtaatcgattaccaaaggtgagtaatcgattacaaggcttaaaattgaggacaggaggctaagatggtctctggtaatc

SEQ ID NO: 54303 - DNA, 391 bp, Glycine max
  unsure (1)..(391): unsure at all n locations
ttttaccttgttgatcattntatccagcatatacttttcactttttatcaattagtaggccattntgattcctgtatacaatttgtattttattctttagtgttgactcttgactcattttttttattctaattgttgtttctccattatacttctgctcttttagaaattctcatagatacattaattaaaaaaaaaagccaatgcaataccgaaaaaaattaaaaaaaaggcaaaaaaaaaagtcaatacaataccaaaaaaaaaataaaaaaagattaaaaaaaaggcaatactacgacggttattgtataaccgtcttagtatgttgcacgtactacgccggttattttacaaccgccgtaaaaatccattttcgcatgtcatatac

SEQ ID NO: 54304 - DNA, 446 bp, Glycine max
  unsure (1)..(446): unsure at all n locations
gctaagctccttcatctacacaaggctcttaatattngaagagtatccttgtggaaccttcacccgacgaagacactgacaaaaacttatcttctccttcttggaaaaagtatggcaggctaggggcaagtaaatnttcttcccatcagaccttggatgcaactgtgatcgtatatccatatcagctagatcttgacgggtattcaagccatccttcgtcttgccttgaatgttaaggagcgtcccaatcacactgtcacaaacatttttctctacatgcataacatcaatacaatgtctaacgtcaagatcacaccagtacggaagatcaaagaanatggacctcttcttccatatgcaactctaacttttatccttcttttgggtcttcccaaatacagtattcaggtgtngaacccgctgatatacatgctcaccagtcaacg

SEQ ID NO: 54305 - DNA, 543 bp, Glycine max
  unsure (1)..(543): unsure at all n locations
acggtttgtcccctganncctgatccttcgatacgcgacacatagantactcacgctngagatgaggaagtgtngaagggtgaaacttcctgcttttattgttgaccacagagtggtacctggagatatgtcgcggggtcaggagaccttgnngacgtcangtggggtgctatttcccaaaccaagcttgacaatcccgacccaacccgggcatagtcggtcagtgagaacctgtgatgtacctaaacaggcgagctcctggcagtcaacagataaaaggaaaacaagaccacaaagcaaggaggcttgtggtggctggcccagctgtgaatttgtgtaatatgtggatggtggcctctggntaatcgataccaagggtgggtaatcgattacaaggcttaaanatgaggacaggaggctaagatggtctcttgtannatcgataccaaggggtgtatcgattaccaggctttgaaacgaagtcaggaaacttanggagcctctggtaatncgataccancctgtgtaatcgattacacagan

SEQ ID NO: 54306 - DNA, 363 bp, Glycine max
  unsure (1)..(363): unsure at all n locations
tatntctcgtntggttactttttataccccctcttgacgtgcttaagccattttacttaagtcatccctcgcttaacttaaaaataaaataaatttccaccgaaccgtttgaatttattatccgttaatttcggttaaaataaattccgaccgttcggtcatgccgtaatcacattggaaatcaaaaagaggtaaaaaataatataataatcaaaaaaatatcttttagtaaaataaagcggaaaatcaatcgggcgttttctctttgggatttctcattcttaatcgaatggattaataactaaagtgaaactaaggctaanatcaactcgcctagtcaagctcgtccacaaaaatatgctt

SEQ ID NO: 54307 - DNA, 424 bp, Glycine max
  unsure (1)..(424): unsure at all n locations
tactcctatgtattcttcccaaactctccttattctcctttctcattctctccttcctttcttcatctttgtaactcattcttctcatttgctcaccaagtttaatcatctncgcatgagcctgtggttttggagatggtggagtagcatctccacttgtagaagccacacctacaagaaaagttagtgcacaagtaaaaaacagaataggacctcaccacttaacttagtgtttcactcaagttcactcgtgtatcactctttcaaggctttntctttntataatatgcactnttcccttntaccactcttgcttcttttcagttcttatgcacaaccttcaagctcanaatcaagaagtattcaatgtgaaatatgtcacaaatcanaactcaactcaagaagccaagaaaagaaatactct

SEQ ID NO: 54308 - DNA, 432 bp, Glycine max
  unsure (1)..(432): unsure at all n locations
ttatacttaatcttcttctcgagttgcatatctgtgtttaagattttcgagttcggtgtacttcattccacctcaaccatgaataaacaaagagtaatcactttagcatgatttcaaaatgtattgcgtacagcaaccataattaagcaataaccaatgccacataatgattntcctgtattaattaaatagaaaccgaggaaaaaaaatccagcccatcacgataagcaaatcatgcaaacatcatcatatatataaaccaaaaagaaaagaaaaaagggaaggggctttgtattggtttaggatgaaccataactaaaggaatagtccaaaggtcaaagaagaggggaagaaagaaagtgatacaacatacaaactgcaatgacaccagaagaaatctctattatgagtntccctctctctagtttcggg

SEQ ID NO: 54309 - DNA, 328 bp, Glycine max
  unsure (1)..(328): unsure at all n locations
tcttatggcttccacgagtttcatgatggtatcagagctcttcaactgaagagcttttgtgtacaactcgatctatcttccttcttcttcgttntcatgattttcaactagtgttgtgtcgcatatcctattgtgttcatcatgagtgcaacacaggttcaagatcaagcatcttatgtgcatagcccgtattaccttcattcaacttggaaaaggtgcaacaatatggttgtgtcatggcttgtacactcagtttcaccttcaatactacagagtatattgtggatggacaatgctcatgatatatggaaagaattgaagtcatgat

SEQ ID NO: 54310 - DNA, 349 bp, Glycine max
  unsure (1)..(349): unsure at all n locations
gtgggcctggttgctatttgcacccccatttttactaagtacaccccattgcctttttttttgtgattcttttttcgtaaagntacggaaacttatgaatttcgtaacgatacttgttttctttccgtaatgttacggaaccttgcggattacataatcatcccctttttgacttacggaatgttacggaacctcactaatcatccccttttttgatttccggtgtgtcacggaaccttacggattgtgcatcaatattttctttttgtttccggcatgtcccggaatttcacaaatggcctaatgatgggtgccaagcacctcacaaggaccaaacaaaagttgcatg

SEQ ID NO: 54311 - DNA, 386 bp, Glycine max
  unsure (1)..(386): unsure at all n locations
ttttatacccccctttgacgtgcctaagcccattttatttaagtcatttctcgcttaacctaaaaataaaataaaattccaccgatcgttgaatgtatatccgttacttcggtaaaatgaattccgaccgttcggtcgtgccgtaaccacgttggaaatcaaaaaagaggtnaaataataatataataataaaaaaaaacgtctnttagtaaaataaagcggaaaatcaatcggacgttttctctttgggatttctcattcttaattgaattgactaataactaaagtgaaactaaggctaaaatcaactcgcctagtcaagctcgtccataaaaataggtgtgttgaagttatcatttcaatttcttactaagtaaaatggatca

SEQ ID NO: 54312 - DNA, 366 bp, Glycine max
  unsure (1)..(366): unsure at all n locations
tatgatcccaacatggttggctcgtggtgcctaacacatgaaactaagaatgtagtgtgaagtttcacgcttccccctttttgtttttgttttgtagaggaaaacgtaaggatgagcaaacatganaacaaatggtatgcaattntgcagatcaaaaagtttgttgaacgcatatgcatgatgatgccatgactcatgcaaaatgtgaggctggaatatgataacggacaaatgcangatatgtccattatgatgttatgaagagatgcttatgtggtgcatgaatatgaatgcatttacggacacgagagcccgganaaatatctcttcttactttgcgcattgggggcgcagtgccccatgtgc

SEQ ID NO: 54313 - DNA, 414 bp, Glycine max
  unsure (1)..(414): unsure at all n locations
aagagccttacaatccatnttcttggattctctgaacaaactnntttgtgcttcccctgcatctttctccaattcttgaagtccaatcataacaaactcaagaacatcctgcattccaaagatgactttcatttgaatacaccatgcatcgtagttcttcccatcaaggattggcagatgcgctggaaatccgttcccattcatctttgcaacaatgaagcttcgaggatcccacactgaaaccaaacaagactctcccaggatcgatggaaccagaagctcttgataccactgtcagacccgatacttacaacatcctcaaaccagaaacaaagaagttgagtcttgaatgatgaagacaagatagaaagagagtgaggagaagaatgagacaagagatctaatcatgaaact

SEQ ID NO: 54314 - DNA, 412 bp, Glycine max
  unsure (1)..(412): unsure at all n locations
ctacaccttatctactngataatgcaatggtagtcataacccctgctaggtttcctcaaccttcattttctgaggatatgactcgaacgcaacgtatgcttgtcatggagaagccccagggcattccattgagcactgtatgacctcaaagcgcaaggtgcaaagtctaattgatgcgggctggctgaaatttgaggagaatcgcgtgtaaatcctgacattgacaagagatgccacacatggngcaattttgaaagctgttgttagatgtctctaatgactcatcaagattttcaagtttataccattattgtaaaccacagntacaatgctaaataaaatggataaatntgatatctttgtccctcatcctctcacaaacgcatcttttgttattaactntcaccggaat

SEQ ID NO: 54315 - DNA, 306 bp, Glycine max
  unsure (1)..(306): unsure at all n locations
gatgaacaacgtttggtggaggtttaggtgcangattatgaaattntgacttcaactcaacaaccattatggttaggatgtaaaaatacatcaaagttgtttgttgttgttcagatgttgagcaaaaaatttacacataacatgtcacangcctgcgtcaatgatgtgatgattttttttaaagagtcaaaccaaattgagaatgtcattccttctagtttcaagaaagcaaatatacttgtagtagggctaggtttatcgagtataaaaatagattgttgcattgatgggtgtatgttgtattac

SEQ ID NO: 54316 - DNA, 365 bp, Glycine max
  unsure (1)..(365): unsure at all n locations
gcaagacttacggaaagatcttagagttgaccttagcagaggtatccatagaagccattgcatcactcacccaatactacgaccagcctctgagatgcttcacattcggagacttccaataagtaccaaccatcgaagaatttgaggaaattctatgatgtcctctcgggggaagagaaccatatctttcatccgggtgtctcccctctntgagcagaattgcaacagtggtcaaggattcagcaagaggtttggaccgcataaaacagactcggaacggcatagcgggcctaccacggnggtacctataagacaaggcgaggggtatggccaatcaaggagaatgngtcccgtttatggatgtg

SEQ ID NO: 54317 - DNA, 369 bp, Glycine max
  unsure (1)..(369): unsure at all n locations
aaaacaactagaggtggttcataaagcttccaatgaaaaatcaataaatcgcttcttcctcattagcgagaccatcaacaatcttattgcccgagaagaagtatactagaaacaaagagcaaaactatactagctaaaggaaggtgacataaactcttgctntttcgctcttttgccatgaccaagaagagaataaatctcatttctaatctcatagtgatgatggcactcttacttaaattcataatggtatttgtaacgttgccaactattattttacaaatctgttttctattggaaatgtttatgttaatacaataataaatcaaattccatcttacctctcatctaatgataatgtatcccttc

SEQ ID NO: 54318 - DNA, 411 bp, Glycine max
  unsure (1)..(411): unsure at all n locations
ctgaagttggtctttatcgcccgccttctttatttctctttgacgaggttgaaaaggctcatgaagatgttttcanagtgtttctttagattttggatcatggtagactgacaaattgcctatganaagttgtggacttcaagaaaactattattataataactntaaatattggatttggtaactagtccaatgatatacagagtaagataccacaagtggaaatgacaagcagacccaagaggaaaaatatcaacaccaaagtatttagcatattataattgatttatgtctgttattaagagtatgaataattagggtctagggagacatattgtctgccacttccctattagtacttgtattatgttatgggttctattattagaatattccaacacctttttcggt

SEQ ID NO: 54319 - DNA, 324 bp, Glycine max
  unsure (1)..(324): unsure at all n locations
tgctgtcactccccttgaccaatttaatttgaacctctgggataactttggcccacgttgtatgtggtaagtagtataatttttctgtccacagatttttcaattctggtacttataattgatcaggactgcctattgtcaaacaaattttcaggaagtttggattttcggggacattaaagtttacagtgtctaagaatattgaggttagctagtggtgtgttgctagtgaggaggtggtacacgctgcctgccgataatgacagtagctgattcagaagcctcatcttctggnttatatctctttgatatttggtntatgga

SEQ ID NO: 54320 - DNA, 171 bp, Glycine max
  unsure (1)..(171): unsure at all n locations
actaagctagacagagaagagatcatatgccgagcatatatgtccgcgttctttattttaaaataagtccacatcggttntcaacacacaatcgatgttaataaaatcatgttaacgttaacatcggttntctggaagaaactgatgttaaattatcatatgttaacatcg

SEQ ID NO: 54321 - DNA, 248 bp, Glycine max
  unsure (1)..(248): unsure at all n locations
catagtcggtcagtgagaacctgtgatgtacctaagcangcgagcctcctgcngtcaacagataaaaggaaaacaagaccacaaagcaaggaggcttgtggtggctggcccagctgtgaatttgtgtgatatgtggagtatggcctctggtaatcgattaccaagggtgggtaatcgattacaaggcttaaaaatgaagacaggaggctaagatggtctctggtaatcgattaccagggaatgtaatc

SEQ ID NO: 54322 - DNA, 440 bp, Glycine max
  unsure (1)..(440): unsure at all n locations
gttcttttatcaagtccatgcaaaaacattttgagtccattggtattcgggaatgtccttcattattttcatcctcaagatacacattttcccttttcaaaaacccttttgttgtgttttgatctacaaaatttttgaagagtaccggtggttgttcctttcaaaagcacgttcgttttaagaaaagggtttgaatcctggacaaagtgataacccaagatcacaccatcaaaaattaaagtgcgtgcaaaaataaaaacaaaccacgcgtaagtttttcttttttcaaacaatcatcacaacaaataacataacaaagaaataaataagataaagacaagttcacgaatttagaagatcatggtcggngaacttagtctcctccaattaagaaatcaagcaaatctcccacgtctccatcatccttagcttcaccttca

SEQ ID NO: 54323 - DNA, 399 bp, Glycine max
  unsure (1)..(399): unsure at all n locations
catcgcttctgagaacttctggaaagcccanatggtctggttgctatttgcacccttctttttacaaaatacacccctngcctttttttgctgatttttttccgtaacgttacgaaaacttacgaattacgtaacgatactttgtttccttccgtaatgttacagaaccttacgaattacgtaatcatcccttttttgccttctggaatgttacggaactttactgattgcgcactaacacttccttttaatttccggcatgtcacggaacttcacgaattgcctaacaatgggtgccaagtacctcgaagtgttcaaacgagggttgcatcccaacaatggatggtccccggacgaaattanggtatgacnagtgcccctctttacttgtcttttatt

SEQ ID NO: 54324 - DNA, 424 bp, Glycine max
  unsure (1)..(424): unsure at all n locations
tactcagcttacgcaatgcactctactcagttttataggatttgctaacaattaaacataagtatattcaccaggaaaacattgttgtggaaggaaattgtagtgttgcgattcanaagatcctgccacccaagcataaagaccttgggagtgtaacaattccttgttcaattggagaagtcactgtgggaaagacttttattgatctgggaaccagtattaacttaatgccactctccatgtgcagaaggttgggagagttggagatcatgcccactangatgaccttacaacttgttgaccactccattacgagaccatatggagtaattgaagatgtgttggtcagagtaaaacattntatctttntggcagactntatggtaatggatatctgtgaagataatgacattcctgtaatatt

SEQ ID NO: 54325 - DNA, 349 bp, Glycine max
  unsure (1)..(349): unsure at all n locations
catcattgnntnnttgttacaatntcttgttttgtttcacagttcaaagagtcaggctgtgagaactgctcattctttaagatggaagaagatcacgagcgtgttgttgattgcactactcccaattttaatgggtgtgtgatatcaattctttttcatcaaaattcccttcacctttgaatctctcgatactcattctgtttttcttcttccatttgatttgccacaggatcatttcagttatggatccaaatcggagttgggctgcccgttggttgcgcattggtaggttcaattatctcctgttacacccatttatattttcctctccttgacttctagtttcttt

SEQ ID NO: 54326 - DNA, 383 bp, Glycine max
aatcattaaagaaccagcatagggaaggctacagacaagaatttacacacaagcataaccttaagaaaataaaatattgttaatgaagttaacaaaattacaaaatatatctctgtagtatttctaaatatggggtgtcagattaaataatatttactaaatttttcataaaaaaatggacaataaatagcaaatgataagcgcagacacgagacttttgccaccaatccataaacatcacggtattaaaaaaagagactcatatcaaggcgggacgagaacacaccacgcttgtcgaacacgggcgcagagaaacttaccaggcacagaaacacacagcgacgccgggcctggtacgcgggtcttttgcagatgtggtatct

SEQ ID NO: 54327 - DNA, 412 bp, Glycine max
  unsure (1)..(412): unsure at all n locations
tgcatgcaagctggttctatgcctanaatgcattcgtcactcantttaaatccttcatgctgttcctatacatataaaatggtcccacaacccanagctcacaaaaccatgctcatatctcgttgaggcatttcaccgagcacttggtgggcgcatgcttangcacgaatatcaagagaatggngacaatgtggcatgcgccatcacttcagaatacaccctangccaaggccatcccttacaacccctcaatccaacaaaaacaagcaacaatctgaggataaacccctcacgtttcttagcaaacacatgcnaattagagcaccaaaatacatcaacgganagctagaaagcccaagaatgaggtacttactttgtggagacgaataatagagcanaacggaatcaaaaa

SEQ ID NO: 54328 - DNA, 483 bp, Glycine max
  unsure (1)..(483): unsure at all n locations
agctggtatctccttcttcactacatcaagaatcaccgggttgatgtcttctctgtggctgtcttactggtttagctccatcctctaaatntattcgatgcatacatgtggatgggctaatactangaatgtccgccagggtccagcctatagccttcttatgcttcttgagaactgacaacaacttctcctcttgctcatcagcaagggaggcagatataatcactggaaaactcttgctatcatccaagtaagcgtattttaaatttgatggcagaggcttcaattctggtgtggtcggctggacagtggtagaaggagatggtttctcagcctttacctcataaagaaagtcagaggtatgtgtacttcctgaaacatggttagtcctatctgattctattaaatcaatctcaagaggtaaaacaccaccaccangcatgcaatcaatatcactctcagattcactctcagcatcaaatt

SEQ ID NO: 54329 - DNA, 409 bp, Glycine max
  unsure (1)..(409): unsure at all n locations
gataccagctgtgtgatccattgcgatagtaccgcggatattgcaaaaattgagaaccgttattacaatggtaagaaatgacagatacgtcgtaagcacgacactgttagagaattactctcaacaggagcttgtagagtggatcacgtacgcactgatgataatttagcagatcctttgatgaaaggattagctagagagaaagtccataacacttccaaaagaatgggactagtgcccttactgcgatgatcattcatgatggtaacccgacctanatgactggagatcccaagaactaggttcaatgggtaataacaagttatgaagtgatatgagatgaacatgcagttataagtgaaagcagcatgattcctgaagtaacaagaggatgagttattgaaaaaat

SEQ ID NO: 54330 - DNA, 360 bp, Glycine max
  unsure (1)..(360): unsure at all n locations
gattganactntatgaatgctcttttattaatgtaaaataatcatctgtgtgcaataaaaactaataaacttattactttggggtgcttggtatantaatgtttcttttttgttgagttctgatagctcatggttctgtctgctgatgctattggtttgttattttccatgaatgttggttgttgaattccttgtggcaaaaaaaatgttatgctgctatataggtttagtgacaccaaacagacgggaaatgggtcgtggggtcagtgctggtggtggacagagttccttggattatctctttggcagtggggtacctgccagcagtgcaaatggtgctcgcactcaaaatgcaagtgc

SEQ ID NO: 54331 - DNA, 353 bp, Glycine max
  unsure (1)..(353): unsure at all n locations
ggagggacctatggcaatattattatacgactggctcatgcaacttcgtaccattcggagtccaagcttattatattatatagagttgaactgagcccaaaaataagtgcaattaaagaataatgtttatcacatgtcaactnnttttttttttttattcacattgcttcacccctagcgcagcaaaagttataggacaaagactatgctatgtacacttgtccacaggcaagaagaagaaaanaacaagggtgaagagagctcattaagatattctttaacattttggtgtgaatatattctctgatatgcgagagaaatcatagtaactacccgactagatatataaactc

SEQ ID NO: 54332 - DNA, 399 bp, Glycine max
  unsure (1)..(399): unsure at all n locations
aatttattctgtgccattcattcttaattcacttggcatntgtatccaagtattgcgcaagattaacacagataagtgggagtgttttaatgaagctctccagcgaggaaagagacatcttctgaagaacattcgaaggtgcgggccacctcagtcccatcaaggtggtagctatattgtgccttattctgatgcaggtaaggctgggcttgaatctgagatagaaagtctaacgaaggacatgagtgtgtcgatgcaacacgtgcttgattttgcgcgacggcagagaacaacacttcaatgtgctaaaaaggtgaattataagcttcaatctgctaactaatgcaaaacaatggttctttctggcaatgtatttataagcaagttttataccacttc

SEQ ID NO: 54333 - DNA, 444 bp, Glycine max
  unsure (1)..(444): unsure at all n locations
ttaaattattntaatcatatattaattaatcaagccttaattataatntaaatagcacaatacaaacatgaaaaaatattatactagaaaatacgataataaaagtaaataacaaaacataaatgaattaatcaaagcaattaatcatataatcttcatttaaataatagttggtattgaggagatgattaaattatatatttttatatttataagtgggtattgcttaaagattgcacattaataaatttaattttcaaatatttggtaacacaattgttagtgcttagctctacggagttntaaaagattggctaagatnttgttaaaacataagcacttatacaatgaaggaaagctggagttgctgcacatgatgtccaacgttatgtcaaggaataagatcgggctgcacaatgcacaaggcaagataaaatgacaaat

SEQ ID NO: 54334 - DNA, 425 bp, Glycine max
  unsure (1)..(425): unsure at all n locations
tcgatacacacggcagaatttgatattcaaatttaatagttgttgcaaatcagttttggccactggtaatcgattacatcctctggtnatcgattaccagagagtaaatttcttgtaaaagactctttaacttaattttcttggccaaaccttttgctacttcaattggaattcacttcctatttaatataccctntctaagactctatagactatcttgatcatccatcttgaatatctttaattgctttgtcttgaataaagctgtgagacgcatgtgatcttttggcatcatgaaaacatcggcttgatcctttgtctacattctcccnctctgttgatatgacaatccctgaaatcaagacaaactatatacaagatgatagcacgttctcacaacccttactccgctatctttggcatgt

SEQ ID NO: 54335 - DNA, 385 bp, Glycine max
  unsure (1)..(385): unsure at all n locations
tcacatncacanatcgcgcataaaccaccatccctattgccacctttaactgagctcacgtactcncacgtagcccatatnctcgtttctctcaacaccgggtccncatcaatcctcccaagctcccccaacatccaggtaaaacaatattcaaacagcacanactatcacagccaagaaaatagggcaaaggcagaaaactctgcccaaaacaccaaccaaaatcacagcttttctcacttaaagaccccagtaacaattccttcattccagttcgttaaccggtggatcgactcgaaaaatttactggaagtctctagtacatnaagcctacatttgaccggtgggatctactagcanacatncagaactcattctacactac

SEQ ID NO: 54336 - DNA, 354 bp, Glycine max
  unsure (1)..(354): unsure at all n locations
atcatatcttttgtgcatcatgcatcattatgagtaagtgagaagaaaatntctaaagttagaaaagtttcttcagaaggcaacactctntgttttaatcgattacaaccttatcataattgattacacaagttttcttaagcttgcagagttatgtcttgtattagtttaatcaattagagccttattgtaattgattacacaattgtttttgagaaaatgattgatttattcaggagtctttgctttaatcgattatgttgtgatataatcgattagttctctttctataagtgtttcagaactgaacaagaacactctaattgattactntgagtatctagtcgattaaat

SEQ ID NO: 54337 - DNA, 466 bp, Glycine max
  unsure (1)..(466): unsure at all n locations
catctcggagcgcgtgcagagatgtgcttgcggggagacgactactcctatagaaagaagcgcgaagtagaggatcagaacttggaggatgtttggggagagaacaagcgcgatgtcacctttggtgagtttgaggactatggtgaggttcgaggctaatgttttggcacggtggatgagctcgctgtangagaagcggtggccggtggcggagtctataatggcagtggaggagtccgaanacagcaagttgcagcggaggcagaggatgaaggaggcgacagatatggaagcgttgggaagagggaggcggagccggggattaaggctgtggaaggttctggaatcgcggagaagattagattagagagagagagagagagagagaaaatggagggtttgtgtatacaaaactgaggatacaaagacacatggtatacaaaaccgtagtggtctgattacaaac

SEQ ID NO: 54338 - DNA, 385 bp, Glycine max
  unsure (1)..(385): unsure at all n locations
aagataggagaaagaatntaggagaaagaattctctttctccttctcccncaaggattntttctttcacaactcatttatctnttctatattgaccaactactatccttatttatctttcacaaatttaattcagttatttaaataacgtagttaattgtgaaatggaagtggcctttgcttgaaaaagaatangcattgtgggctaaaatactaatacctaaatatggtccagtaagggatatgggaacaatcttangcttaacatttttttccaaatgatggtggcgtgatgtgaagataatgtgaacatatagtttctgtcctaataaaatttatatattcaaaaatcattgtgtctcaattacatcctttggagacaactc

SEQ ID NO: 54339 - DNA, 418 bp, Glycine max
  unsure (1)..(418): unsure at all n locations
agacatcaaggatcaaagctccttgttcatctaagccattntcttgtagcttcatcaaggtaaggggggtctctctaattcttgaaccctaatcttattgtctttggaagctaagtttcactgaaagttgttttgatgttcaaaaattcgtagctacttccttggctagaaatgtatgatgtgttgcttctcttgaaattttaaggttaaaaatgggttctttggttgtcaaaacttaaggttagccttatatttcacctaaatcgaagttttctaataaaagttatgaaaaaaacaaatttaaggaattttattttatgactaaactgccacaaaactgaacttggtgttatggttgtatggactatttttcctaaagatttgatttcaaaaatgagttttgtgggtgtgaaaacat

SEQ ID NO: 54340 - DNA, 292 bp, Glycine max
  unsure (1)..(292): unsure at all n locations
atggcactcacatttttcagattttgcacaatttgtgaaggtaatttgtcaaaattttgggactgagcttggttcaactgagtagtcatctgccccatctganttgtcagactctgaatggaggctcttgtctcttgctgaaatngcatattctggatggtcatttgcctcactgactcttctaaggaagggtgaggaggagcctcagttgcttgttgtctttgttgtgactgttgctactgctgtattggaggaggaacatatggcttgcttggaccccaacattctggaa

SEQ ID NO: 54341 - DNA, 432 bp, Glycine max
  unsure (1)..(432): unsure at all n locations
gatgatgacaaanagcccaagagaatgatntcaagattgagtcaacaagttttaagaatcaagagaagtttgatttcaagattcaagagaagatgaattcaagattcaagagaagaagtcaagaagacttcataagggaagtattgaaaagatttttcaaaaaacaaacatagcacagttttgcttttcaaaagagtttttctcanaactttctaagttactagagtttttactctctagtaatcgattaccagtggcaaagtttgatttcaaaagttttcaactgaatttgcaacgttccaattgatttcaaaatggtgtaatcgattacaagatgttggtaattgattactagtgtatctgaacgttgaaattcanaatcaattgtgaagagtcatatcctttcataanaatctttgtgtaatcgattac

SEQ ID NO: 54342 - DNA, 543 bp, Glycine max
ctggtcacttgtttcgtgcctgcattacgtgacctagaatactcagcttgacgttgactgctaatacatgcatgccctatgttgctctatgaacatgttcgatacccgagcgataagatgtgtaaactatgtcaacgtatccaaacttgtctgtgctgcatgatgtactctgtagaaccgaatatgctattgtctcacataggcaggctcattgatcagagcatccctacagaataccatgcgactaagcatgctattcggacatgaaagcgaggagatatataatctgcctcataagcgaaaactgaccgcgctctgacttataacacgacagagctgaggacttgatctacacacatcaagtttccattgcataaatgatgcttggacactgctgtacaaccattcagatgatacatcgaccagaggatgagcttcctggcttgccttctcttctcgagaagagaatcataatggtcgtaaagactctcaccaaagagacatgctcatcatgttgaactggtgttgggcccttgtctttca

SEQ ID NO: 54343 - DNA, 373 bp, Glycine max
  unsure (1)..(373): unsure at all n locations
tctctggtagaatcctgctaacccataaactccaatctcaaaacagatntangactcttccactcaagaacggctcctatcttagagggatctatagctatacccctttgagatatcacatgccctaggaaactaactttctctaaccaaaactcacactttgacaacttagcataaagttatcggtccctaagggtatgcagcacaatcctcaaatgttcttcatgttcctttctagtcttggagtataccaaaatatcatctatgaatactaccacaaaactatcaacgtaagggtgaaaaactctattcatgtagtccataaacacacctggagcattagtcacaccanagggcatgactagatactcat

SEQ ID NO: 54344 - DNA, 448 bp, Glycine max
  unsure (1)..(448): unsure at all n locations
ggccgcccagctcgcccaggcgagcaaggttgcttcctttctatagcaacagccttctggagggcccaagtgggcctggttgctatttgcacccccctttntactaaatgtaccgccccttctattnttttgtaattctttttccgtaacgttacgaaactttgcgaatttcataacgatagttattttccttccgcaaggttacgaatccttacggattatgtatttactcttttttagctttcgaataagttacgaaaactcacggattgcgcaaaaacacctcttttcgacttccgccacattacggaatttcacggatcgcgcaagcctgcttccttttgatttctgagacgtctcgggacttcatttattgtgcaacaaaggacgccaagtatctcanagcggctaaccaaagggtgcatgtcatcaagtaataatccccgga

SEQ ID NO: 54345 - DNA, 369 bp, Glycine max
  unsure (1)..(369): unsure at all n locations
ctcaaacattcggtcataggactngctatagtgcttaaattctggataaagcgtcgataaaatgatgcaagaccaaggaaagatctcacctccgaaactggtgtagggctcggccaagtcttgatagcatccacttttgtttgatcaacggatactccatctttagacaccacatatccaagaaacaccacactttcaaccaagaaatcacacttttccctcttcccatagagtttttgtgctcttagggtctcanatattngtttcanatgagtgaaatgctcctctatagatttgctatacaccaatatgtcatcaagataaacaacaacaaacttacccacaaaaggcttgagtacttcgttcatg

SEQ ID NO: 54346 - DNA, 372 bp, Glycine max
  unsure (1)..(372): unsure at all n locations
actcggatgtttgattgagtcccgccatatatcgagacgctcgaaattgaatgttgaagctctgagccaattcangcgacaatatctttttactcggatgtctgattgagttctgtaatatatcgagacgctcgaaattgaatgttgaacctctgagcaaattcaaacgacaataacttttttctcggatgtctgattgagtcctgtcatatatcgagacgctcgaaattgaatgttgaagctctgagccaattcaaacgacaataactntntactcggatgtctgattgagtcctgtcatatatcgagacgctcganattgaatgttgaagctctgagccaattcaaacgacaataactctntactcggat

SEQ ID NO: 54347 - DNA, 457 bp, Glycine max
  unsure (1)..(457): unsure at all n locations
atttcaatttctcattaagtaaaatggatcattttcaaggtccaacgccttanaatgatcaccttttaagtaaaaaagaatcacttgataagaaagaactacgtaggtctgatttcctcatcgcanattgaggaatacgtaggagcaaagggaaacacccttgtcgaccacaaaaagaaaaaaatataaaaagggtataaaggatataaggacataaaaagggaacataaaaaaatcaaagtcatgtttgcacattcgattaaaggctgtcgttccttgggacggacgtgtggggtgctaatactttccccgtgcgtaaatacaactcccgaacctttcacttaaagttcgtagaccgcgtctnttccggtttttctgacgttttcctcanataaacgttggtggcgactccgcgtgtatttctttcgtggaacacgcatcccgcgagtctcgcgtc

SEQ ID NO: 54348 - DNA, 451 bp, Glycine max
  unsure (1)..(451): unsure at all n locations
agcttgtaggattatggtgtacccatcatatgtggtactangtggcggtcgggcgatggtgcacaacaagttttccacgtccacaatgcgcgcataaacccaccattctctgttgcccaccttcaactgagctcacgtactcccacgtagcccatatcctcgtttctctcaacaccgggtccccatcaatccttccaagcttccacaacatccaagaaaaacaacattcaaacagcacaagctatcacagccaagcaaaacagagcaaaggcagaaaactctgccaaaacaccaaccaaatcacagcttttctcacttaaagaccccagtaacaattccttcgatccaattcgttaaccggtggatcgactccaaaattntactggaagtctatagtacataagcctacattttgaccggtgggatctactagcanacatccagaactcat

SEQ ID NO: 54349 - DNA, 465 bp, Glycine max
  unsure (1)..(465): unsure at all n locations
taagctccttcaactgcacaatgttcttaatattngaagagtatccttgtggaaccttcacccgacgaagacactgacaaaaacttatcttctccttcttggacaaagtatggcaggctgggggcaagtaaattttcttcccatcagaccttggatgcaactgtgatcttatacccatatcagctagatcttgacgggtattcaagccatccttcgtcttgccttgaatgttaaggagcgtcccaatcacactgtcacaaacatttttctccacatgcataacatcaatacaatgtctaacgtcaagatcacaccagtacggaagatcaaagaanatggacctcttcttccatatgcaactctgacttttatccttcttttgggtcttcccaaatacagtgttcaggtgttgaacccgctgatatacctgctcactagtgaacggtatcngcgcaatatcatgct

SEQ ID NO: 54350 - DNA, 378 bp, Glycine max
  unsure (1)..(378): unsure at all n locations
tcatgacaatacctatttaaggttaaatgcatttatgtanattcangaagtnatcacagtttttgcatggatgatagaactgcaacaatatttgatggtaactagcgcaggggatattagatggtccttgttaacctgctgaatcttcatttcacactttctcaaaaatcattgcttttaaacgagtatatccatctcataaccttacagaanatgcacagaanagtatgttaaaattaagcatataatttctgttntatcctttnttttccggaaattagaacttagccctgaaaccttcacgatgaatntaccanatacacaaccaataagattttctctgtttgagaaccatgtctgatatcatgcattgctagt

SEQ ID NO: 54351 - DNA, 412 bp, Glycine max
  unsure (1)..(412): unsure at all n locations
attcaacaactggtcaacttgtatatggttcaaatgcacggagtcgatagtgtaaatcaatatgggcatcatttgatttagaagtaattaaaaaaagttaaagttgcatggttcctgtatagttgtcaaattggcaaggatttgccttatattaaaatcccgggtagatgttaaccattgattcttatcccctangttctgagtataattttagagtttggcttttgactacatttatcttgcattaattatcttctctgttttatataattttgtttaagggagtgagaagctgtttcagctagtctcagatagcagcaagacttcaagtcaaagccatgaactgtgttgggtaattatntacatatcttggattgaaaacaatcttncgagtatgcaccatatttacata

SEQ ID NO: 54352 - DNA, 391 bp, Glycine max
  unsure (1)..(391): unsure at all n locations
ctttatagaaacaagccgagccgagccttacataggccgagccaaagaccctcgacaagcaggtcgactcatttccacccctatctgtaatcatacctactaaataattagattataagtgaatattataattataatcataactaatttttaaaaaatggatacaatttgatataactagttattgtttttaaaatatgaatatataattaattatgaataaactagttatataacaactatataacaagttgcatctaanaccaattaaatagttatgaatgaatacaaataagttatttgaaatactcatttctataaaattagttatagttntataactataattatttntaaataagaatgagttatttacaatactcattaccat

SEQ ID NO: 54353 - DNA, 314 bp, Glycine max
  unsure (1)..(314): unsure at all n locations
ccctccaacttcattctactaaatcactaaagcatccattgcctgagaaatatctggcaggcagtagacataactgtaacgcgaataatcattaataatacggataaagtatcccttcttttcgtaagaactcaaatcaagaggggcacaaatantcagatgcacaatttcaagaagcnnancgctgcgagaaactgcaaaatctgcatgtcttgcttgtatccctttaatacaacccacacaaatatttatatccataaaatctagataaggaagaatacattctttactaatcattcatccttctctaaaat

SEQ ID NO: 54354 - DNA, 351 bp, Glycine max
agcatggatccacccaccagcttcttcgcccaatgcaccatgctcctggagtaactcgatggcgaccgcggtggaggatcctttcatcaatcatcgccagcacacgattattaagttgaaactgtcttgcaaaagcagccccactttttgccatgtgattgtaaacagaggcgttaaagaagtgaggctccatctttggaggattgtcccagatcatatatcgtaagtcaccatttactgttgtgttcttaaattctggcgcattgcaaacgactgagtgaaagtagccttcttgagataacttcacatttgtaaaatacatcagtagggtccgaggtaaattgtcccaac

SEQ ID NO: 54355 - DNA, 293 bp, Glycine max
tcagcgttatgcgagacagagaccacatgttagctatcatcaccaagtccaagaaaactaagtctagccacgacccacgagcatatggtggggacgaagtatgcccagagtcgcggaaaaagaggctagagaaagggtgtcgactcgttcaccaagagacaaccatgtggatggaccgattgctcttaccttgacgggagtaagaactccccgatgctagccaggcaaacaatggggaccctctccgcctcgagagatcacggactttgactatgcacatatgatagattaat

SEQ ID NO: 54356 - DNA, 352 bp, Glycine max
ctgcagctggattcctttagtagggaatctattcttctattatgtgaccaaacccagtcaccttcattaagaactagctcttttcttcctctattgcctttagttgaacacacctttgtttggttctctatttggttcttaaccctctcatgcaacttctttacaaactcttacctagaatccccttctttatgtataaaagaagtgtccagtgggaggggaatgaggtctaacggtgttaggggattgaacccatagacaacctcaaaaggggactgcttggtggttctatgaacaccccttgttgtaagcaaattctacatgaggaagatactcatcccaagacttatgg

SEQ ID NO: 54357 - DNA, 433 bp, Glycine max
  unsure (1)..(433): unsure at all n locations
tcttatccaaggctcatcttggtggtgaagctccttcttttttgtcttattcncttaaggatggcgcctcctctcacctcctttcctttgtcttccgctgcatctccatggnggaaaatcaccattaaaggaccccattgaagctcanagatccagcctccatagaagctccacaagcaagcttccatcagtatcgtcttatatggacgtatcatctaaaacacagacgcacaaatacagatcataatctgataatacatatatagatacaacttttatcatttgtatttgtttgcatctaatacaaataattaggagtcattatttctctttaagacataaatgtattttgagttaacatttaccattttttataagaaaaaaattataaattatcatcaaaaatttaagataataagtattaaataaattt

SEQ ID NO: 54358 - DNA, 255 bp, Glycine max
tgagaatctctccaataacaaaatatgaaccaagtagtaaaagggtgacccaacagctacctcttatcatcaacccaactaactattgtttttttcataagacctaaatcattttatattgtggcttataaaattggtcgccgagccgttttttacatgaggaaaacatacttgctcaccaagccattgggagataaaacaatctctactaactcaagtgcaaggaatagttcatgctctcttttattccattat

SEQ ID NO: 54359 - DNA, 367 bp, Glycine max
  unsure (1)..(367): unsure at all n locations
ctgccctcttactctcctcaggcacttctgcctcttccttattctgaccctntagctntnggggccaagntatcccttgcgttctagatttcaaccatttgtgatagccgcctatgacaccatttcttctttccctaagttctttgtcttttcttcccaccttattacatgccttttggatcccctaaagtatctttgtattagcttcattgaaccctcgtgcgatgaaaggaacaatgttttcctctgatggcgcacctctcatagggtatcctaactgtcttatggccaacacaagattataattaatacaacccctcatctctatcaatgggacattnggaaatccttcacatgagcataatac

SEQ ID NO: 54360 - DNA, 422 bp, Glycine max
  unsure (1)..(422): unsure at all n locations
gggttcgaggtacttacccgttgaagatcgaagaacgattttattattgaataacgtcgaagaacgggtgaaacctttgcgaaattcttcacggaaaacgttacggaaacgtttcggaagcgcctcggcttagattgttttcacggaaacgatttttccaagcaaattcgaaagagagagaagtgccaaaggggctgaacattatgaaacagctcccccctcccctatttatagaaaaaaagggaggtgcttgccgcccaaagacttaatgaagaagatttctaagcgcacccgaattactaagttcaccccccttttcgtattttacggaaaagttacggaagccttacggaactgttttcgaatctgattntcatcttttttctcttccctttcaccaatgttaagtggaatatgcttac

SEQ ID NO: 54361 - DNA, 425 bp, Glycine max
  unsure (1)..(425): unsure at all n locations
tgcaagcttcttatccaagctcattttggtggataatctccctcntccatggctgattccttaatggatggcgcctcctctcacctcctttcctttgtcttccgctgcatctccatggtggaaaatcaccattaaaggaccccattgaagctcaaagatccagcctccatagaagctccacaagcaagcttccatcaagtggtaatcagagcacaagagcttcaagtaggagctccttagacctccattaattgtttttctttaccttctcttccattggtgnttcttcatttttatccatgtatctcctcacatgtcttgttctaaatgttgttaacatgattctttagagtttccaccaattaaacttgctataaaaactagatttgatnttctatggntcanatttcttgttcttgttcttg

SEQ ID NO: 54362 - DNA, 295 bp, Glycine max
  unsure (1)..(295): unsure at all n locations
tgttgtagacatgaagatttgcataacgaacatgacatgaagaacaacattgttgcaacacactcagatttgaattncatcaataggatgagttcattcaagagttcgaatccgaagctccagaaatgaaattgagttgttctttgtggctatggaaatattgaagaaaactcttcatctctcataaacaagttatggtctaatacaagttggatcatggacaaaattgagcctaaagctgtaggcattggtttgcctagatagtttgatatgtgtgcaataatttgaatataca

SEQ ID NO: 54363 - DNA, 330 bp, Glycine max
  unsure (1)..(330): unsure at all n locations
acctggagatatgtcgcggnggtcaggagaccttgtggacgtcaggtggggtgctattgcccaaaaccaagcttgaccaatcccgacccaacccgggcatagtcggtcagtgagaacctgcgatgtacctaagcaggcgagctcatggcagtcaacaaataaaaggaaaacaagaccacaaagcaaggaggcttgtggtggctggccagctgtgaattttgtgtaatatgtggattgtggcctctggtaatcgattaccaaaggtgagtaatcgattacaaggcttaaaattgaggacaggaggctaagatggtctctggtaatcgatta

SEQ ID NO: 54364 - DNA, 475 bp, Glycine max
  unsure (1)..(475): unsure at all n locations
tgtatgctggttctgttgcatcagctgtgatccctatggtctcattaaagtttacaagggaattttgtaccttcttgttcctttgtcttgaacaagatagtagctcactctctttacataccgagtatctattttttgccaaacattttctatattccctttgcataactatcttgcttgtaagaatttttcatctgtgataagtttttaacgtatattctttgacactttgcaggaatacagcgaaaacattntatgctgccagcatcttttttgagattcttaatcaatttggagcagttcagcctgatgtgtgtatttcatgcattgaattgaaccttccttntttatgcatgtctcattggatttgcatgttttccacanagcctttcttaaattggaaacaattgcagcaggaatacaacttcctgtaactggatgtttaatgcctttttgagtttcttttacagctgga

SEQ ID NO: 54365 - DNA, 428 bp, Glycine max
  unsure (1)..(428): unsure at all n locations
agcttgccgcccagctcgcctatgcgcgctttgttcgtcatggcgagnaggaggcttcctcaagaagtttcctaatgcacccncactttacatagttcaccccctttttcgtaatttatggaaaagttatgaaagccttacagaagcatatcagacttgattntcttcttttttctcttccttgtcacccatcttaagtgaaatatacatatttagggttacaagaattttacggaagccccaaaagccatttttcaacaaaacgtgggaggaggttgccgcccaactcgcctaggcaagctaggtntgaaaattgctattcacacccccagcttgataagttcaacacccatttntgtgttttttgggtgttttcctttcgaaacttcacggaactttacggattccacgacaatgggtggtaaaca

SEQ ID NO: 54366 - DNA, 405 bp, Glycine max
  unsure (1)..(405): unsure at all n locations
gggtgtccctttcatttgtgacattggctntcactatgnattttttatataccctgcattcattgggtctgaaataccaaaaataccaactcaatgttcagcaatgccttctttatgtcatcaaataccaatggaagtaatggaagaggcttaaaactacatcacttttatatgattcaatgttttccaagcttatgacaattaactaacctacacttatgtataatgagaggttctattataatgtgtatttaatataagcttctggaacagtatatgaaaattggatatgtcaaaatctccgacttaagggcaacaaagaanaaggaaatatattaactggtagtaaatacaagcctagtgcaaaatgagctacttgaattacttatacctattttctaagtg

SEQ ID NO: 54367 - DNA, 419 bp, Glycine max
  unsure (1)..(419): unsure at all n locations
agctntggctagngggaagctgattggattctattcggncagggaaatgtagatgtatccttaattcaatttgtggatgacaccccttctctttataaatcctacataaaagaatttcatgtgtttgaaaagtgtccttagatggtttgaagtggcctccggtcttaaagttaacttctataagagcaatcttattggaattaatttggagtataacttagtggataggtctgcatctcttttgaattgtaggatatgaactatcccttttgcgtattttggaatactatgagagctaatctagcttagattcatacttaggaacctattattcataagatcacaaatagattaattactcagagacaaaagccactatcattggaaaggagagtttgcctttcataactttgttctaa

SEQ ID NO: 54368 - DNA, 404 bp, Glycine max
  unsure (1)..(404): unsure at all n locations
actaagctaccttgatgatatatatcctttgcaccctnttggtttgttgatattgtcaaaaatttgaaccctgaacttaaataattatctccagataccttgtttagattctaggagagcatatggttcaaggcaaatttaccccaaatttgggggagtggaactaattaggatgcaaagaaagagataaagcaccagcacacacaacacataagttgtgtgttaaaaaaaaagaaggaaaagtgtgctgattgtaacaaggtcaaaagcaaatgaaagtgaaaagctaagcgcgtgaaaaagatcactcggttaagtctaggatttatgctctcttagaatctaagccttttgaatcctagaaaaaccaatgaaattttgtagccaagcctcactacaaacct

SEQ ID NO: 54369 - DNA, 389 bp, Glycine max
  unsure (1)..(389): unsure at all n locations
agctnntaacctcatcgctctacagtctttgtattgggagccaanccaatccttgtgttcggactctcagccacttatgatagccgtcgatgatcccattactgcttcccctaagctctctgtcctttcttcacgccgcatcccatgccttgcgaactccttggagtaccctcgcgttgtggtcactgaaaccccgtgcgatgaaaggcgtgatgctttcgtctaatggcgctcctctcatgcggtagccaagctgtcttatggcgagaacgggattataattaatacaaccccttgttcctatcaagggaacatttggacatccttcgcatgaagatagaatctngattcttccttccttctagcgagggaaccaattaacagacgcc

SEQ ID NO: 54370 - DNA, 391 bp, Glycine max
  unsure (1)..(391): unsure at all n locations
ctggcaccaatttgggaaatctgtgagagtnggatgttgatctctttatgtcccttattatactgaggcatcatcgcaggtataccttgtggaccgaacccagtcacttggaacggaaggtaccttggaaattgttggtgactacagctgctactactatcataaggaagcattcgcaagcttggtgatgaacatgattgaaattgtgccataacatcatcatcatagacatttattggaagagagtagctggggggaggatcatgtatctcatccgtttttgtctgtggaataagctgggatagggtatttttagactgctaaacacaaaagttatgtaataaataaataaacaatgagcccaaaatagatggaccagaaaatgctctaa

SEQ ID NO: 54371 - DNA, 252 bp, Glycine max
tttgagtgggaggcctttgtggttgagcaggcactctttgctggacgagcaccggattgaaagggtttctaacgtgggccgaatagcttggctggtgtggggaatattggtaggtgttgcgaggggtttgttaagaattacgccaagtaggagctgaattcacaacgtgggtatctcctttcttcttcttggccccacttgctttgaatctactattgcacgtgctggcaagagtgacataatcgaactttc

SEQ ID NO: 54372 - DNA, 228 bp, Glycine max
cacttaaatatttagtcatacaaatactgataccatgtcaaagacgaatacccaaatacttaatatgacatgggtacagcagtacgatacaacacagatgcaggaatacaagaatttcctataaatcccagatatgatacagcctactagatacattaacatgaactgccacaaaatttcacataaatgccataatattaagcatatatcattaatacataattatat

SEQ ID NO: 54373 - DNA, 334 bp, Glycine max
  unsure (1)..(334): unsure at all n locations
agcttttcttcttacatacagncaaaaataatggttatacggatcaccactcgagtatttccgccagtcagcgtgactcaaatgtcagtatgacagatcttgtgagcgcggaagatgacgtanatctacgcgtgtcaaccggcttgtcggccgtgattgacgaatggagcanaagactacngtagtctctgcgtgccatcaagctnttcgtcttacagacagnccaaaataatggttatacggatcaccactcgagtatttcccgccgtcagcgtgactcacatgtgagtatgacagatcttgtgagcgcggaagatgacgtanatctccgcgt

SEQ ID NO: 54374 - DNA, 325 bp, Glycine max
  unsure (1)..(325): unsure at all n locations
tagccaccaaagcatgccaaaaatntccttggcactatctttcttgctacgaaactntgaagcagnctcctctaggtcgataaattcttcccttctctgagcctcaacaattgcttttttctcttctgctaaccggnggatttcagcaattttattcttcattctttcaacatattcggccttctttntttccatgctttcctgataaaagaatttcttttttaaagtaacatacagctaatttataaaaccaatcatattgatgcattaattgaacataagtctggtgacacaaagaagatccaattctcttgccaattgtcat

SEQ ID NO: 54375 - DNA, 354 bp, Glycine max
atgctatcaaagaacaaagggaaatcactgtacagttgataaactatactaagagtggtaaataactggtcaaattataactatacttctaactgtctctctcttttcgttggaggatgacttgtccttcctcctagaagatgtatttctctttattcatttttttattaaaagttacattatgaaagtagtgtggaaattgactgatgtaaatataaatgcttttctttttttaatcttttggtttattttattggttacatgttaaactcttctaatttataatatgtaaggaaaaagttctggaatttgtttacttgcaacctatgcgtgaccaaaaagtgaatgtgatac

SEQ ID NO: 54376 - DNA, 417 bp, Glycine max
  unsure (1)..(417): unsure at all n locations
tctatagaaggttcgttcctaatntctctacaatggcatcacctctattgatctggtgaagaagaatgtggcatttatctggggtgaaaaacaagagcaagcctttgctttgctcanagaaaagcttactaagacacctgttctagctcttcctaacttttctaaaacttttgagctagaatgtgatgcctctggagtgggagttggagctgtattgttacaaggtgggtaccctattgcttattttagtgaaaaacttcatagtgccaccctcaactaccccatctatgataaagagctntatgccttaataagagccctccaaacttgggaacattaccttgtttccatggaatttgtcattcatagtgatcatcaatcacttaagtacattagagggaaaaacaagttaaacaa

SEQ ID NO: 54377 - DNA, 384 bp, Glycine max
  unsure (1)..(384): unsure at all n locations
agatagtaatcaaatggtacccataaaacagagtttattgtaacattttttccaacatgtcacatcactttggaaaattggatataaacttagacatagtattaggaaataaatttttggagtaacttcgattcttatccaaagggtcgtgagaaccctagggtcttctcttgcatctctgacccaatctatttgagttctttatccaatgtctttgcgggtaggattgcatcaattctccctttcagacaaagagaatttcattctcttccttagacagaacatatgttatagttgttttcacccggntcttatctttatnggaattggcccatccttgttaaataccaacatgcatttatagctcacttcatatttaatact

SEQ ID NO: 54378 - DNA, 438 bp, Glycine max
  unsure (1)..(438): unsure at all n locations
agctntctattcatacctagaaatccaagtttgctctntattttatgaagtttatgggattaagatggtcattgaccaatccctattctatgatttaacccaattgccaagtgaagatgtaccatttgaaggtacattgattgatgattggaagtttgatttttctgtgcatgatgcccgccggttggtttgcaccaaccaagcggatatgaccggaaggcttcttgccggttcattggcttttgaaagctgcatccttcattatctaattgttcgcatcttgcttccaagatcttcaaaccttgcacaggtttctgaagaagatcttattgttatgtgggcttttcataaaggcctacaaattgattgggcacatcttgttagatatcgcatgcataaggcattgcgattgaatgctccattgccatatccacacct

SEQ ID NO: 54379 - DNA, 442 bp, Glycine max
  unsure (1)..(442): unsure at all n locations
aaaaactaagcttaaccgatcgttaagccgtttctacctaataaagattaatattttcaccgancattngcgntgtaatctcatttaatcactgttaaaacaaaatctaaccgatcgttcacgctgtaacctcagttaaacaaaaaaaaagcaaaataataataaaataatcaaaatatcttgaaaaaaaataataaaataatcaaaatatctttgaataaaataatcaaaaaaatcaatcggacattnttctttggaagtttccttggatcaattaactaataaccaaagtgaaactaaggctaaaatcaatttacaaatcaagttttgtccgtaaaaatcactaaaaaccattttaaggtccaacgccttaaacggtcctctntgcttttatcgngtaacatggaccgttcacaagcatgagatcaacatgtaactttac

SEQ ID NO: 54380 - DNA, 386 bp, Glycine max
agctggagttgctgcacatgatgtccaacgttatgtcaaggaataagatcgggctgcacaatgcacaaggcaagttaaaatgtcaaatgaagaattgaagctgcaggatccacgatgtcggatacaatgtccaggacatcctgcccgaaaatactggagttgctgcacaatgcacaaaagctgcaggatccacgatgtcggatacgatgtccaggacatctggcccgaaaatactggacacataaatctgttatctctttaacagattattgtgcagttagcaagagataagatgatctatctttatgaacgaattaaaagataattaaagttcgaattacaaactagaagagttcgttcagggattaaagattaaagattaaaga

SEQ ID NO: 54381 - DNA, 366 bp, Glycine max
  unsure (1)..(366): unsure at all n locations
ttacatatatgtntcaaacaatccagaccttcactatgcatcaagcacacaaaagtacgaaaatagccactgaccctttcgcagccaagtcaacaatgtagcaccgcgtggtcacaacgaacttgttcattaccagcgtcttccttgcaacgaccattaccatacatcagcactaaaccaagcttaaatggtacccgcgacatgtcttcaacactacaccaagcttaacctaagtaagtaagtaagtgaccaacgtaccgtggacaaagccctgatcttcacgaagtgccactccttgattcaaaataactgcgacccgagaagagtcgtccaagttgtcgngtcgaatggaagaacaaatgacta

SEQ ID NO: 54382 - DNA, 468 bp, Glycine max
  unsure (1)..(468): unsure at all n locations
caagatactaagcttgggtaaatgttgctcgttgaattcaactttttattggatgttgtggctgccactctcagagaaaacgagagaatgataagaactgaacatgttgatgatgaacacaatgcaatatctgtgatggagtctgagcgatggaagaatcattcaaggggacatgatgttccaagagaaagatcaaaatcacaatcgcgtccgcaatgagatatgagtaatattcaatgctactattgtggtgagaatgatcatgtgcaagtgaggtgcaaacaaataaaggaggacttgaagaaattaagagatatgaacaaagatgacaccaactccgaagctaatgtagtaaaaaatgttgaagataaagatgatgtgtttttggaaacaaatgatgaggttgctaaaacaaaatgggtgatggattatgctacctcanagcaccattgcaaagatcgagagatg

SEQ ID NO: 54383 - DNA, 136 bp, Glycine max
caagcagctgaccgacataacagcacagatgctattttgaatccacaaattaagattaccgagtattcgggggggaaaatttcctacaccacttactgggaagcaagattggactttaaataaggcatagtactca

SEQ ID NO: 54384 - DNA, 415 bp, Glycine max
  unsure (1)..(415): unsure at all n locations
actaagcttgaaatattgggccatcatttncaaggagattctcttattatatataaaactcgccaacactaaactcgttacaggataaataaataaccatacactctccctctccatcaacctctctctcttcactcccctttcccattcttcctcctcctcttttctctctctctctctctggagtgaaagtactatttaattgagcatggatatatcagaaaagcttctacaatatagatatcacataaccatagcaatagtagtttcactatcattttctttgttgttatatgctgctccacactttctgaccattctggcctattttgggcctttgtttgcttccactactggcttcttggtagcaataatagcctttggaggcgtttcaaaactctcaaatgaagatcat

SEQ ID NO: 54385 - DNA, 414 bp, Glycine max
agcttattcttcaagttcatatctttctaacgacatccatgagtttttacattagaatgtgcacatctcatacagttaagggaacaaaacaaagaaaaagatagtcaataacaattcagaatatgcacaaaaaaagaagattctattagtaccttagaaaccagaaacgcacacaaattgggagaaggtaaacaattgtgaatactgactatgggataaacagaataaagaagtaaaaagcaaattagagaggtcacaatgcactgctatcagacactcatctcagactaagaatcaagcacaaaacaatacccaatacttcaaacattttaatcaagcaaagtacagaggtcacatactcacaatgcactggctccacatatattaagttactatcactataaagagaaccga

SEQ ID NO: 54386 - DNA, 350 bp, Glycine max
  unsure (1)..(350): unsure at all n locations
ttactcatacgttccatttggagttctgtagtgtcctctaagccctacaacaaggcagataggttaactaagcacaaaatctgaaatttagttacaattttcaattaagctcaatcatctgccttagaccaaaactgagttaaggtgataaagtaagggtcaaagagatgtcaattgagctaagaagaatagaaaaatattaaactacaaatgctcaatcaattggtcgaggctatttgttggtcgatgttggctagggcttttttgattaacctcagttgagactatttttcggttgacgtcaactaatgtttgttttggtcgacatcgaccgagactatnttaaccat

SEQ ID NO: 54387 - DNA, 400 bp, Glycine max
  unsure (1)..(400): unsure at all n locations
ctataaaactcagcttgatgcctattcaatggagtgcaagttcncttagattgatcacactgcacagnggcaaagatgcatgggagatcctgaaatcactcatgaaggaacctccaaagtgaagatttccagattgcaactcttggctacaaaattcgaaaatctgaagatgaaggaggaagagtgtattcatgacttccacatgaacattcttgaaattgccaatgcttgcactgccttgggagagaggataacagatgaaaagctggtaagaaagatcctcagatccttgcctaagagatttgacatgaaagtcactgcaatagaggaggcccaagacatttgcaacatgagagtagatgaactcattggttctcttcatacctttgagctaggactc

SEQ ID NO: 54388 - DNA, 442 bp, Glycine max
  unsure (1)..(442): unsure at all n locations
agctttttatcccagcccagactccttcattaaatctaaattcaagcttaaatagggggccttgttcgtgcacgtgcgcttagcgcaattctggaccgcttagcgcatattagtgaatttcagctcatcttcttccagagtcttcctcgcgcttagcccatgagtgttgcgcttagcggacgctcgctaagccagcagattggcttagcgagatggtgaaaaacatcacttttcgaagcttgcctaattaacctgaaattgagagaaaatgattattaaacacacaaaatggaaggactaagtatttattacctatacttaacagagaatacttatagcattaaaaaataaccattaattggaagagnttgatacaatttacacaagttttatacacannaataatcgtattcaccgtctaacaattcccccaaatttacag

SEQ ID NO: 54389 - DNA, 328 bp, Glycine max
  unsure (1)..(328): unsure at all n locations
ttgagccanaatcctgattcaccatanaccttgacttagtgtgagaatgtcaatccttaccctcggaagcaaaaaagaaaagaaggaaaatttccaatcaaagagaaagcgaaaaggaaagaaagaaaattcccaatcaaagagtgggagaaagcaaaaagaaaagaaagaaaattcccaatcaaagaatgagagaaagaaaaaaaaagggaagaagaagaagaaggaaagaaagctcctgatcaaggatcgaaagaaaacagaagaaatgtgtagaaaggtctttggatcggacaatatctgaacaatacagaattgtcaccaaatg

SEQ ID NO: 54390 - DNA, 409 bp, Glycine max
  unsure (1)..(409): unsure at all n locations
aaatgataagatccanattaagaataattgagttgcatacccactttgtgacatttgaaaataaaaatattgttcatgtctattcaattagtttcatatatatacataagcacataccaaatacttgagtactaaccagaagtttagaacaacttgtattcttaatcactaagccgcctcttctctgagaagaaaaaatggcagccatagaaacaaacacaaagagctccctgcatattcgcagcaacagcttgccctccgcacctcaccccttgttggttaaatttgaaaatcgagataatcctggataaatctgaagtcgtgtataaacactttcagattgaatcanatttcggggttcaaccaaaaatgttcaatcggataaaatcagaagattataaatcaagaa

SEQ ID NO: 54391 - DNA, 327 bp, Glycine max
cttggacttgagcggcaatggatttcttggagaaggtatgtcaattccttctttccttgggacaatgacttccttgactcacctcgacctctctcatactggattctatgggatgattcctcctcagattgggaatctctcaaatttggtgtatcttgacctgagttcagatgttgccaacggaacagtaccttctcagatcgggaatctctctaagcttcgatatcttgacttgagcgacaattattttgaaggtatggcaattccttctttcctttgtgcaatgacctccttgactcacctcgacctctctgatactccattcat

SEQ ID NO: 54392 - DNA, 412 bp, Glycine max
  unsure (1)..(412): unsure at all n locations
gctcgaaaagacaagagtggngaaagagattcngtaatggcagtcactacggccacgaaaaagngngatgagctgaaagatatcaactcgaccacggttgaagcgttagagcgggaaacaaaaaggtcttgataggaagaatggagaaggaacaagttccgaggggctctatggggcagcagtaatgagctcaagcttagaaaggctgagagggacaaatcaaggatggaaagtatggtgctagaggataagataaaggcttgtcagtggtcgaagagaagtttgacggaatagttgagcaaaacagaagagaatatgttgataatcattgatcaatataaggagaaggtgaacctggctgctagtcatgggcagatgttggaagatgaacaagataaggtatcatctctac

SEQ ID NO: 54393 - DNA, 428 bp, Glycine max
  unsure (1)..(428): unsure at all n locations
gcagctggcctttacgttggacatatttgttcttatatatccaaacactcttatgtgctntgctgaaggctncttcccattccaagcttcaattggagtcttgtcttttacatacttagttggacatctgttgagtatgtaaacagcagtgtagactgcttcagcccagaatgtgttaggtagtcccttctccttgagcatcgatctagccatttccataactgtgcaattctttctctcagaaactccattttgttgaggagaatatgagactataagttgtcgctcaatgccttcatcctcacaaaatctttcaaactcgcgagaggtgtactctttgccgcgatcacttcttagtacttttattcattttccactttgatttcaagcagggccttgaacttttgaatactccaaagacttttgat

SEQ ID NO: 54394 - DNA, 364 bp, Glycine max
  unsure (1)..(364): unsure at all n locations
gagatcttcaatggctactaacaacaacgcattcaatgngtttcttctctcnccaacnacatagcacacagaggagaagatacaagctctcttttatggcgtcaactagttaagcctatgatcaaatcaaacaaacttcaatgattgattgctaatccgcaaattccactttgatttctctttacagaagatcatgaaggtggacgcgaaaatctagtttatgaagcatgggagtagcacaattaggtgttattaatttggcttcaatccattctttctacactgattgtttctcatgtaatcggttataatcactcctatgaagtctaggagcgcatgcatgattactttcacaagcagagca

SEQ ID NO: 54395 - DNA, 424 bp, Glycine max
  unsure (1)..(424): unsure at all n locations
cacaagcattaccttaatgaanaatatgagtaattttatatctcttgattaaaaacggaccaaggcactgatctcgggtgtccaatttacattgaacgacttgngaaagcacatccaagcaagctaagtatgtatttcacaacgataattcgatatttgaaatacttcatcgaggagtttgagagtgccctgtaggagaaatttctagtatgacccattgaagcaaattgacaaatttcttcaaagtaacaatagctccaattatattacaagtcatacaaatatctcctatatggcaagtctatttgaatgtgtactctatctcttcctgttaatgccatgaggagttattatcaagttagtatatgtttgaataagcttatataanaacactctatagacaantttcttttaaaaaaaatat

SEQ ID NO: 54396 - DNA, 282 bp, Glycine max
  unsure (1)..(282): unsure at all n locations
ctaagctcttgcctcagatccctcttgttggacttgtgacattctataatttctacctgtgaatttgtaagtgttacatctaaataattatatatgtatgtattatttagcgcatgtatatatatatatattcttggtagaaatatgtacattgngggaaagatacgcacggtacactaattgacaaagagtaatccataactggacagttatagattaattcacaattaattagtaaaaaaattatcattttgcgtgcaacttaaaatttaacaaaaccaa

SEQ ID NO: 54397 - DNA, 495 bp, Glycine max
  unsure (1)..(495): unsure at all n locations
ttcaaactaagctttcttgcgggtgatgggtntatcgcacagaaaggtttattattgtctgacatattctcaattagctcaattgcttctttcggngtctttagctctattttccccctacagaagcatctagtagttgcttggtttgtggtcttagtccatctatgaacatattcaattggattggcttggacaacccatgggtgggagttcttctcaataaacctctaaacctctccaatgtttcactcagacattcatcatagaactgatgaaattaagagattgtagctttcccttccacattcttggactttgggaagtatttctttagaaacttttcaacaacttcttcccaggttttcagactgttacccttaaacgagtgaagccacctcttggcctctcctgccaatgagaatgagaataggctgagtcttatagcttcatctggcacactagcaatcttaacagtgttgcatatttcgataaaag

SEQ ID NO: 54398 - DNA, 322 bp, Glycine max
  unsure (1)..(322): unsure at all n locations
aaacaagaacaaagtgtgtgtaaaattaaatgaactttgaaaaaagtaaacaaaaacatcagaagctgttaaaaaactgttttaggcccgataatcctgacccaataaaagtaaacaaactccaaaaatgaaatcacaaatccattaccagatttaaaccatgacaagtgtcacgtcctatgaaatataggtttgaaatataatttttttagtcagctgtcttattatattttctttttttacatctaacataaaaataaattgtaattntaagtattaaactagtaattgtgtggaaattattatttattaaatatttcta

SEQ ID NO: 54399 - DNA, 315 bp, Glycine max
  unsure (1)..(315): unsure at all n locations
atgtatgtctaagctctttgattgttcaaacgcctcaaaattggagggtttaccattatccatttacctttntcatgttagagttcacactatatggcgggtggtggtgattggtgtggccatggaagaggttaattgaatcgaagtcgatgatgtgccacatgttgggtgctatatgttctatccgatgacacatgtctatagtgcatctggcggcgatgtgggggaccatatatatacaactttttatgttggtaacgtttcattgaggaattgggtcatggcggttatcattaatgaggtcggtatgaacta

SEQ ID NO: 54400 - DNA, 413 bp, Glycine max
  unsure (1)..(413): unsure at all n locations
tcagagncacctgaggcatgctagcttctccaagactgggttaatcatttgatctagaggaagagatccaaggaaggttttccataaagactcttatgtgaaggagaaagagatacaacaaccattgctaaaaaattataactatgaaataaaagaacgaatttataagaagaaaccatacacacaataaactaaggaagagggtggaaatattgaataatcaagaaaaatgaggagaaaataatgaaaacaatagactaacctttgtcatccgtcatgcaacaccaccatcttaatgccgtggtccgatcaacaatccctccatgatcttccgcgcgtcatccctctccacagatctgagctttcatattctagcatcctaagagtgacaggggaagatatgtccaaaaaaa

SEQ ID NO: 54401 - DNA, 389 bp, Glycine max
  unsure (1)..(389): unsure at all n locations
tctcaaggatgtaatgtgctaaaagagagggaanaggatgaatctttgtaacatcncttaccaaggagtctagctccgttggttaaattacgtgttgagtgtactaaattttttgatatcgtgttcaatttttaccgatattaagaaagtagcatctcaagtaaaccaaatagaagaaacagaaaaagagataatattaattataggtgacttttgtgtcttaaagatgtttaatttgtgttatgttaatagcgtgtagtagctatgcaaagagtgtgtttcttgagtgcctgtgngttatttccctactatgatccttctttcgttctgagtggctttcagccagttgtgaataaaactatgcaactttagtagtatctactaaatat

SEQ ID NO: 54402 - DNA, 335 bp, Glycine max
atctctgacttattagggggcggagtaagcctaaagtagaataagactccctcttaaactctcaactcataccagggcaggcagggaaagactgagactatcgatatcgagccagggttgatgaaagattataggatagatacccctatggttggttggtctctatgcctgcttcactttgtagcattaaggggacaatacaatgagggaaatcaactaacaattaaccccattagacccaacctcaattgggtaccacctctctctaattgattttgtcttataggtgttcctaaaagcaagggactcactatggtactgatgcaatcctacct

SEQ ID NO: 54403 - DNA, 360 bp, Glycine max
  unsure (1)..(360): unsure at all n locations
nttatctagccaagatcatacataaggggacaactgaactatctttttctacaaatangggccatcaaatctatcatgtgttgaccgcaattgattagcccatgaatctcctcgggggctgaacacacttcagcgatggcctttgctttggctactacacgcgggaggtcttgacttccatttaaggtcaaggaaaacctatccatccacaaggacgcttcttgatgcaatgcatcaatcaccctccctattgcttccttctcggcgcacgcttgtgcgaagtcctctactatgttttgttcattgggcaaccaccggcttaactcttacttgtactgccctatgataactaacatgctt

SEQ ID NO: 54404 - DNA, 425 bp, Glycine max
  unsure (1)..(425): unsure at all n locations
catagaaactaagctgtaggcatgggttcagtgctaccataccctattcattctttttttgaaggtacgtggaccagntgaggttagcaacccatattatgacgcgatattctgccacaaacaaaggattggtacatatctcttangagaggtggtatcaggagacgtcttccttccacttgcctgttggagagatgaacatcactctggatgatgtgtcctatttgttgcatttgattgtgacagacaaatccattgatcatgtcgcctcactctttgacaaagaggtggtgaagatcctcctgatgagtcatttgggcattctaacagagacaaaggcttctatagcggcaaatgcaagtgtcagggtaaggttgacgtggctggaagacctttaccatcgttatgttgagtcgagttcgtat

SEQ ID NO: 54405 - DNA, 283 bp, Glycine max
  unsure (1)..(283): unsure at all n locations
acctacacaatcgtattgaacaactaatcacatcactgcatgatgaacaacttcacaaantttgcagttttaaggggttgtggctggcaaccaccataatgaccacaatatccacctctttgtgatgcacgttacccacacttaagttctctcaggcaaacctaccaaaccacatgcacagtcacacacaatcacaaacattggaaaaatatgaaagaacaaaatgaaaaaaaacctatatccatatttgccttataacatgtgacaacaatctttgctttga

SEQ ID NO: 54406 - DNA, 370 bp, Glycine max
  unsure (1)..(370): unsure at all n locations
agcttgtctctcanatcattggtacaacaatgattcctgttcttggtcatgctggtaatatatgatttacatttcctatttttgattaatattacaaagtaggaatttataaaattgttatttttgtcatgcagatggaatatgtcatgtatatgtagacaaaacagctaatattgatatggcaaagaagattattagggatgcaaagattgattaccctgcagcctgcaatgcaatggtaatttcagtttacatacccaggaatgcctcctctaatgcatgttcatttacatccatatcttcgtttgagttntcttcatttntcattcnattatgtaaatgaatctacagactcagctcattacaatat

SEQ ID NO: 54407 - DNA, 360 bp, Glycine max
  unsure (1)..(360): unsure at all n locations
actcagcttaagacaacttgtgtatcgattagaaaggttgtttcttttaaacaagagngcaccttttgaagaaattttctaacttcataaattttctttttactcactcatgatgatgcatgatgcacaaaaaatatgatatggactaagatgcaacattcaatataacaaccaatacaaatgccactcaagagagttgggcatgtaaaagacaaaacttcttcaagctcttctttaatcttcaagcttaagtcatcatgttgcttcccctatctctaacagtacctccctttgtttccttcctcccaatcctaacaacaatgaagaaaatgatttcccatctcaactaattcctttctt

SEQ ID NO: 54408 - DNA, 417 bp, Glycine max
  unsure (1)..(417): unsure at all n locations
atgaggttttttattgggattttccaccatggagatgcagcggaagacaaaggagaagaggtgagaggaggcgtcatccactagggaataagccatggaagaaggagcttcaccaccaagatgagccttggataagaagcttggaaggatgcttcaatggaggaaaagaaagagggagagaaagagagaggggggagcacgaaattgaaggaataaaagagggagagaagttgaactttgaagtatgtctcacaacactctcattcatcanagttacaacaagtgttacacatgcttctatttatagactagatagcttccttgagaagctttcttaagaaaacttccttgagaagctntcttaagaaaacttccttgagaagcttctttgagagaacttccttgagaagctagagt

SEQ ID NO: 54409 - DNA, 221 bp, Glycine max
  unsure (1)..(221): unsure at all n locations
tcacctggntcaagcatgactttctttctgcttttgttggcttgccttgcatagctcgcatttttcttttcaatttgggccttcacttgctcatgcaacttcttcacatactcagctttagcctgtgcatccttatgcttaaacatagcaatgttaggcataggcaacaaatcaagaggagtcaaaggattaaatccatacactatctcaaatggtgaaca

SEQ ID NO: 54410 - DNA, 376 bp, Glycine max
  unsure (1)..(376): unsure at all n locations
aaccacaacagaacaatgatgacctctctagcaaaagatacaaccctggatggaggagacaccctaatctcagatggtctagccctcagcaacaacaacagcagcctgctccttccttccaaaatgctactggcccaagtagaccatacattcctccaccaatccaacaacaacaacagccccagaaccagccaacagttgaggctcctccgcaaccttccctcgaagaacttgtgaggcagatgaccatgcagaacatgtagtntcaacaagagaccagagtctccattcagagcttaaccaatcagatgggacaattggctacacaattaaatcaacataagtcccataattctgacaagctgtcttctcaatc

SEQ ID NO: 54411 - DNA, 394 bp, Glycine max
tgcctacggcttggaattcagaaatgcaagactaagacattttgtgtttctgtgcaatgcaactatgcaagggaaagaatgtcaaactagattcaccataaaaagaagttaagaaacttccttcaaatagaagccaaaccagaattttaaatgagtttctatgaataaaaaccttacataattatcaagaaccaatttcatagtagaataaatcatagtacttagaaaagcactagactatgtcctaataaagatttggcattagtataaataatttaaagaggaagaatacacatattttacaaagcaatgtaatagacagcaacactcctaaactctgcatatctacacagattatattggacccaaaatcgcacatcacacttcataacta

SEQ ID NO: 54412 - DNA, 397 bp, Glycine max
cgaatataagagacatcttctttaccttgggattcttgtctcatctcattgaagcgcatgcccacttgtaattccaaagtgtcaaacctttcaccaacaaaggtttgaagaccatcgaacctgtccaaaatctttgaaagaagagatgaatcttctccatcatgtccttcttcaccaacatgtcgagcaccctttttcacccaagagccatcatgctcttttttataaccaaaggatgcaatgactgaagcgcctattagaaaggatctcttgattggaacatagggttcaaaatcaagagagatgttaaagtgttgagggaagagggtgactagatgtggatatgacaatagagcattcaatcgcaatgccttatgcatgcgatatctaacaagat

SEQ ID NO: 54413 - DNA, 404 bp, Glycine max
  unsure (1)..(404): unsure at all n locations
gcgggcgaaggagcacaacaagtnttccacatccacaaatcgcgcataaacccaccatcccctgttgcccacctccaactgagctcacgtactcccacgtagcccatatcctcgtttctctcaacaccgggtccccatcaatcctcccaagcttccccaacattcaggtaattcaacatccaaatcatcacaaactaacaaaccaagcaaaacagggcagaggcagaaaactctgcccaaaactcaaaccaaaatcacagctttttttcacttaaagaccccagtaacatttccttcattccaattcgctaaccggtggatcgactcgaatatattactggaagtctctagtacataagcctacatgttgaccgctgggatctactagcaaacatccaaaacta

SEQ ID NO: 54414 - DNA, 354 bp, Glycine max
  unsure (1)..(354): unsure at all n locations
ntntggagtagaaacatgggaccaactcattntattncattaatgtagtcatatctagncaaggtctgagagagaccatacaagtttcctaacgatttctaattatgtgggccattaagtctatcatatgctgacaatagccgagaagcccatgaatctcttcgggggtggagtaggtgtctgccatcgccctggccttggctaataagcggngaagttcttgactcccgttcaaggtaagagcaaaccggtccatccacatggttgcctcttggtgtaaagagtcgatcacccttcctctagcctctttttccgcgtacacttgagcatactcgtccgcgattctatgctcgt

SEQ ID NO: 54415 - DNA, 455 bp, Glycine max
gtcacctcagtggaaggtcgaacttattgctgattttgagtgctagcgaatagggaggcatattaacaatagttggctacactgcgcgagtcaattgtgggggaggcaaatgaactattacatctgatggaagagctgtcaaggcctcacgcggagtgtgcacacagtcatagtgtgtctaggtgggtgcttgaacatatatggtttttgttaccattggtttaaagaaaaatagctttggagattatggtgacaagtgtaggattattgtgaatgaatgccagagggaatctctagtcattagataatggctcccttggagctgcccttctaaacctacccaggtgtagagtagaaagaggtggacatggtttaatgaatggtatataattatagaggggtgagataagagtgtcatcaatggactcactatctgttgaggaagagggtggatc

SEQ ID NO: 54416 - DNA, 421 bp, Glycine max
  unsure (1)..(421): unsure at all n locations
atcccgacggggagagccttgnttcaacataatcaaagtcctagccaaagtcgtaacatgttataattgattgcaaaaactgtgtaatcaattacactatgttaaacacttatgttcataaaaaattagtgatctttgtttcgcggcaaaaactaattcgggagtaatctttttcgataataatccgcgatgctaatcagcaagtgtactaagtcacacaagtaatataaaacggtaagaaccgagtatcgaatcacagggaacttgtttcattcagaaaatatatgtccaatgagcaaacatttgtataaagcaagtaaatattaaaagagggtnttatatgatatctacttaactacaaactaaaatatctataagttgagaagtaagacagtctagtgagagcgctgggttattctac

SEQ ID NO: 54417 - DNA, 350 bp, Glycine max
  unsure (1)..(350): unsure at all n locations
gacacatagaaactaagcttgatgcacattgnagaggttatgaaacaacgtttatttctttccttgagaggtgaatcaaaggagntagagatcataatgaagaacaaggaggagaagagggaatgatggtgttcctagacaaaaccgaattgatggtattaaactcaacattcctccatttaaaggaaagaatgatccagaggcctacttggagtgggagatgaaaatagagcattatttctcatgcgacaactatgaggaggaccaaaaggtgaagcttgccgccacgaagttttctgactatgctcttgtgtggtggaacaagctacgcaacgagagagccagaaatg

SEQ ID NO: 54418 - DNA, 285 bp, Glycine max
acaatgcgcagaatcactatgaacctgcttgtgtgcttctgatatttgagagatgaagggatctggatcttctcaatcataagcatacgagcgagagactacatacgatttaagctcataggtttttgggatcgaaacagactattatttctggaagatatggagagaacacctgttgagaatatggcatcctaccaagacacttacagagtaataaatctataatctaatagattgagtcatgtagcaaggcatgccaatcttcctgcatataaaatccatgag

SEQ ID NO: 54419 - DNA, 371 bp, Glycine max
  unsure (1)..(371): unsure at all n locations
agcnttgatggtccgnaatgtatttaaaggtgagttcgaggaggnaaaggcgccattgacgcacggcggcggcaatggcgtgaagctcacgcacataagttgaggaacactgaagcttgtggcaaaaaatcttactgaaaaacgcaatgggatgagcgttttgagaaagcatagctcccatagcgagaccagaagcatccgtctcgacgtcgaaggggatagtgaaatccggcggaacgagaacggtggcggtggtcatcacctgcttgagtttgaagaaagcagattgagcatcatcatcccaatgaaagttatccttgcgaagcagggaagtcaatggngcatccaagagcgcgtaaccgcgtatgaaa

SEQ ID NO: 54420 - DNA, 434 bp, Glycine max
  unsure (1)..(434): unsure at all n locations
actaagcttaatgcagtaagtagtgcagaaagcatttgctatgtttggtatttgttagaaacccacaaatgggttgagttatcggggagatatacaagaaaaacagggaatgaaagggaacaaatatgctttggtagtatttcttgaattgcaaagaaaacaaagtagagattatccttcaaagggtttcccattcacaaaggatttcccctttcagcagtagagctaaggttcagtttcccaactattctaacaaactattctctttctgattagaatctcagcacttgtatgatttccactgtacacgttgtgtatgtagtatatatacatcatacacaccaaaatattctttggcctgctcctcctaatatctaaagctttgggatgaatnnggtggtgacatggtattagagcctacatgatcatgtcac

SEQ ID NO: 54421 - DNA, 346 bp, Glycine max
atttaaagcatatatagcccttttggtaacaaaaaggagccataatccgagacattaattacagtaacaaccaatagtgagtgaataacctccttcacaacttttccaagccataggagagaaagaggacgcgataaggcctatatttgaagaaaagggagcacacatatactctcctctcttcaccaccaatcatccattccaccgtagacacaaatctctccccaacagataagatgaccccacctatctctttatgatccacaccctcctctcacccgcacaacactatcctgctccttcaacatcgtccaccctccatttcatcaccatctagtgctattaa

SEQ ID NO: 54422 - DNA, 355 bp, Glycine max
  unsure (1)..(355): unsure at all n locations
tatggtaaaatctgggacctagccatggcagaagtctccacagatttctttgtctncctcgcccagtattatgatcagccgttgagatgcttcacttttggggacttccagctatcacccatggtggaagaatttgaagagatcctangatgtcctctagggggaaggagaccatacctcttctcagggttctatccctcattagctagaatttctaagatagtccaaatctcggcacaggaattagaccacagaaagcaagtcgaaaatgggggggttggaataccgagaaaatgtttgggggcaaaagcaagaatcttggcaggtagaggcgaatgggccccgttcatataca

SEQ ID NO: 54423 - DNA, 380 bp, Glycine max
ttcatgttgacaatgtacaaatccaaaaataattgataaacacaaatcattattgaatttcaaatcgctaaagttcgaagtataacaaaagaaaataaaaagagcataatattaaaaaatgtatggattaggtcctcagccctaaagcttacaaatctattttaagtccaagcccataaatgaaaaaatataatttggacaaaataagataaaattggatgaaatagaatctagatgaaataaaatctagatggaataaagtctggataaaataaaatctagatggaatataatctggataaaataagattcgataaaataaagttattattatcgctagttaaacaggtcggcttgtcaagctaacaagcattttttat

SEQ ID NO: 54424 - DNA, 372 bp, Glycine max
  unsure (1)..(372): unsure at all n locations
tgggttcctaggcctagaatcgcattcgggcactcattttatatttcttatgctgnccctatacatataaaacagncccacaatcccaagcttacaaaaccatgcccatatgtcattgaggcatttcaccgggcacttggtgggcgcatgttttggcatgaatagcaaaagaatgcaggcaatgtggcatgccccattactccaaaatgcaacataagcctaaggccatcccttacaaccccttaatttagcgaaaacaagcttggattcacatgtgtattgcttcacgaatttcgcaaaaaataagcaactaaagcactaaaacacatcaagggagagccaaataactaagggaaagtgcacttacctctg

SEQ ID NO: 54425 - DNA, 412 bp, Glycine max
  unsure (1)..(412): unsure at all n locations
gagttcagcttttcatcgtaaaattgatgacgntgatgataacttagacgagtttcttgaggggatgttttcgtgatcttggctaatttgattgtggtaacaaaaggattcatcaaaagagttaagaaaaactcctattgagttcttgtattagagatactctaaaattgaactaagctaaaataaacatgtagtatttaacttaaacttatcatattttttatattaaattatcacattaagtaatgccacatgatatcttttttacatttacaacaacaagttgatatgagatctatttataacaagttgcagaatttcaagaaaacatttacaaacatatatttgatatgagatcnttactgacagaataaaagncactaattaaagagagaattgcaacatgaaaata

SEQ ID NO: 54426 - DNA, 332 bp, Glycine max
  unsure (1)..(332): unsure at all n locations
acgaagcagnaacaagaatcaagtccaggctattgtgcaagcaatcactggggcataacacacctaaagattatgatgatgaatggctcatattctccaaatgtaaacttatcactctcaaattgagctttcaaaattatcatgacatgtagaggaaaaacaaggatttcaaatcacaaaatgtcaagagactgtttttttccagaacaattacccatttcttgaacatatcctataattcaaagaaaaatatgcaaagttgtacatgcaaatagaattgacctaaatattaaactataaacccacaaatctaacatattaacaatacaaaa

SEQ ID NO: 54427 - DNA, 439 bp, Glycine max
  unsure (1)..(439): unsure at all n locations
tcggtattccatttcgagcgttcggatatattacgggactcanctgatattctagtaaaaagntattggcggttgaatttgcttagagcttcggtattccatttcgagcgttcggatatattacgggactcaatcagacatccgagtaaaaagtttttgtcgtttgaatttgctcagagtttcggtattccatttcgagcgtctcgatatattacgggactcactcagacatccgagtaaaaatttaatgtcgttcgaatttgctcagagcttcaacattcaatttcgagcgtttcgatatattacgggagtcaatcgaacatacgagtagaaacatgttgtcgnttgaatttgctcagagcttcggtattcccatttgagcgttcggatatattacaagactcaatcagacatccgagtaaaaagttttggtcgttga

SEQ ID NO: 54428 - DNA, 354 bp, Glycine max
ttaagctgcagatagagaatacgtcttgtgcttatccattctgattgcttcttttctgtcagtgcatgataaaagtgagcaacttgaaaaggaagtgtcaactcttcagtccgagttggataggatatgctacttgctgaagattgctgacccaacaggagaagctgccaagaaaagggagttgaaagtacatgaacccaaaccaaaaaaatctgaagtaaccattaccatcaagaagaaaccacctgcagaagcacagaatagcagcgggccttgtgcaaaagcagataacaagaatcctcctgtggaaaccctgaaaatccgcgagacccctgtcaaggaagatggctctat

SEQ ID NO: 54429 - DNA, 297 bp, Glycine max
  unsure (1)..(297): unsure at all n locations
cgacaggtgtataaaaaccacacaatctatgaatgttanataatttctcttactagtaagtaaatgcacagaatccaggacaccgattagaaccagtgactgctttttcttttttttttgttatttcacaacttggtgaatctttctatacagaacagagatcctttccaacaattttatccaatcattctctgttggttcttatattattttcccctcatacatgaatctgttttaaaaatgcatcaacgaaattaaacatttctaaagtttatcacaagcaaacccaactactta

SEQ ID NO: 54430 - DNA, 371 bp, Glycine max
  unsure (1)..(371): unsure at all n locations
cctcttctggaagagcgcataatccactgggcgcaacatgattggctgagcgcatanaagaatctggaaaaagatgacctgtacaggtgcgttgagcgagagtcaaacttgctaagcgcaccgcttgcacctccatgctgagcggagaagaggcgcgctaagccaaatgtcacttaatttggctaagcgaaccagaatgtggctgagcgaacgaccaaaaatcagcaacactatttaaagtctgaaatcagaaatggaagagagttctcaatttttggtggtttctctgttcttggaagcattcatctgagtggctgagtggtggagagaacttctggtgtgaagatcttgagggacaatagagattaaag

SEQ ID NO: 54431 - DNA, 311 bp, Glycine max
  unsure (1)..(311): unsure at all n locations
gaaactaagctttgaacttctggttgagggacttcaccgctatttagtctgataatttgttgcaagcaancaaagcgagtccctttcttattctaatagaacaggctcatcgggccctccccctgtctacagctatgctatctgtatcactgctaaggtcagggtctttttgccggataagatatggagatttcagccctttccttccttggttgcattccagcgtggctctacagacagggttggaaaatggaatcaaacaaaagggcagacaggcctcccggcccattctatttcctaagacaagatcc

SEQ ID NO: 54432 - DNA, 412 bp, Glycine max
  unsure (1)..(412): unsure at all n locations
ccgggacctcagagtcacctgcggcagcaagctagcctccnaaacaataattggtttctcaactgagaagancttaatgtctgacttatcattatacccagagaaaaaggtaccaacctccttgtctacccatgtgaattcaggaagggtaataagtggatactccttcttctccacaaacacttgtatgcacttctgaagtaccaataactcggaagactcaagttgactggcttctacccgaacctttttctaagatattctccctgaatgctttgaaggcctagctacaacatcaacgacaatagtggcgtcattggcaaccctatctacactgtgagtggcagaccctaatttcatccgggtatgatatttatatcattcacctgcgatgtgtttatcattaccaact

SEQ ID NO: 54433 - DNA, 422 bp, Glycine max
  unsure (1)..(422): unsure at all n locations
agcttcttagtttcagaagattcagntgtgtttgtatctacctcatgcactcctctaatgactatagcatcatttctggcactaaactgctgggagttggaagccatcttctcaattaaatttctggcttcagcaggagtcatgtctccaagggctccaccactgacagcatctatcatacatctctccatattacggagtccttcataaaaatattggagaagaagctgctccgaaatctaatggtgagggcaactggcacatagtttttttaatctctcccagtattcatataggctctctccattgagttgtctaatacctgagatatccttcctgatggctgtggtcctggaagcanggaaatttttttctaagattactctctttangtcatcccagctcgtgatggaccttggagc

SEQ ID NO: 54434 - DNA, 300 bp, Glycine max
aagcttgacgggcgcgccaccatctttcgaagaagtattatttgtttctaccaccgagagcgcgccctttcattatggaggaccacctgagccgcaaatccttcaactttgggcgtgtattgaatgaacaggccctttttgacatggtccggagtgcatcctatcacaaacatacacaattgatcgagactgctaaaacggaaacacacgtctttcagaaggactacgaagattctgttttggaccagatcagcaccccgcaagactctatggagaaagataacatcctatctttggatg

SEQ ID NO: 54435 - DNA, 399 bp, Glycine max
  unsure (1)..(399): unsure at all n locations
agcttgcaaaggagggntgatgngttgtttgttgcaagaatactcttgatagacttcagctgaattctgcaaagacaactgatagcctggatgatttgaactccactaatcaagttaaagatatagacatggatgaaaatgctgattcttttgtggatgaatctgttatggaaaaggttctccacaagaggagtttgaggatgcgtaacatgcacagagcttggcagggtttgtttgatttcttgaatattccatttggatattgcatttggtatcacatgtgcttggaatggaatagtaatgatcaagagtgtgcgactgttgcgttatcttttggaatatggtaattttcttttccattccaattcatatccaaactatgagttagtctgtgtagtt

SEQ ID NO: 54436 - DNA, 393 bp, Glycine max
accatttttgacttactcattttaaacttgatttctatttattcgcacatgttttgaaaatggttttttatttgatttaactaatccttgaatttgtctgttgaagataacaatactttctacatgtagtcgtagaaagactacaacttatgaatggtaaattaattaaccctctcttaacatcaattactcattgtatatacatagattttattactcattattagcttttacttaatttaatattatataagtatatctattcactattagtaatatagataatctttattactcattgttaggttttaattaattaattattaatttattatatgtattggatattaaaaatatacataaattttagaacttattcttaggtttgatata

SEQ ID NO: 54437 - DNA, 462 bp, Glycine max
  unsure (1)..(462): unsure at all n locations
tgtcaagatgtggttaatgttgtgcagcgtgatattgcacttttttttactccgangagttgaaagatagggaatctcaagctcagattgaccttgaaaagctttatccatgcagaggaaactttttggaggaaaagggtaagtattaaatggcagcgtcaaggagatcaaaatacaacttattttcacaaattagcacatattatgcatgcagctaagaggatgtcagttcttcaaagtggggatgttatgatggaatcccaagaagctctggatgtgcttggctntttctctaatatttatgggagacaataactgtgtccaattatctgatcagtagaatcattcttgcttcagtctcaagttaagacaactgtttccttaccaatattccatctcgtaaagaggtgaagactattgtcttcatcatgaatgaagatgtggcctcacgcctggatggat

SEQ ID NO: 54438 - DNA, 346 bp, Glycine max
  unsure (1)..(346): unsure at all n locations
agctttcttgttntggtgtngcataaaaattgtacaatgtaggtcggctaggttnttttgtgcgagcccaaccgacgttttgtttcggccaaaactggcatgtttccatttattcgaccacgaaaacattagcccatctcggcaaaaaaatatttttcaccgatattgattgaaaaaaatgccagtcgacgtccgccaagaaagatgaccgatcgaggtctaaaaaagaagcatcaccgcatgacgccgatcgaacatttccttaccgacatcataaatttttcattaagggattgattagaaaactcaatagccgacattggtcgtgaagtagcccgactgatat

SEQ ID NO: 54439 - DNA, 289 bp, Glycine max
ccatcatatcaagaataatatgcctaaccctcatgaatcaataggactttctaaggtcggactttgtaagaaattggttttggttgcccttgtaacgacccacctcgtcgctacaatatcagcactctaaaccgcaagatgtcaatctttaaatgaaaactccgttaatttgcttatgaaaaatgaaagtaatcttttttctcgatatatattcaccaaacaacgcaccattactttagtgaatacatatatataggtactagaactcaatacatatcattcacataat

SEQ ID NO: 54440 - DNA, 452 bp, Glycine max
  unsure (1)..(452): unsure at all n locations
agcttcatggtttagctggattcaccaactctatcaactttatttcctcattcaacggcctttgtcaattccccattgatgtcaatcaatcaatatcaatatcaatattaatgctatgcaaacatttgttaaaaaacttttgttacttccgattcatgtggcaatgccccatttattttccaacattntgtttcctccctcataaaaaattacatgtttacaacttcaataagaaaaacgatgatcataaatgttcacataacagagaatttgcaaacctaacattttagagcagcagatcattcgtgctgcactaaaccattgagtatgaaatttaatgtgttttgaatacaaatgtttctatagtttaatgttattctgctntttctattgcaaatacatatccctttactcggtgaaacanatgcaaataactataatgttggtatcat

SEQ ID NO: 54441 - DNA, 323 bp, Glycine max
  unsure (1)..(323): unsure at all n locations
tagactgaatcctangtcctcgcaataacttattctaatatctactgactgancannagagctaatgaactcagtgacaatttctttggacaatagcttctcccgaatgaaatgacagtcaatttctatgtgcttggttctctcatgaaagactggatttgaagcaatatggagagtggcttggttatcacaatataacttcatctgcccaacttcacagaatctcaattcttcaagtagttgtttgatccacataagttcacatgtagccatggccataggtctatattcagcctctgcactggaccgggcaacaacagttt

SEQ ID NO: 54442 - DNA, 453 bp, Glycine max
  unsure (1)..(453): unsure at all n locations
catgcaagctggcttgtgcagcttctaaggaggctgtatctcngagtantatatgaggccnnnaaaggngattntccaccatggagatgcagcggaagataaaggaggagaggtaagaggtggcgccatccactagggaataagccatggaagaaggagcttcaccaccaagatgagccttggataagaagcttggagaggatgcttcaatggaggaaaagatagagggagagaaagagagaggggggagcacgaaattgaaggaagaaaaaaggagagaagttgaactttgagttgtgtctcacaagactctcattcatcaaagttacaacacgtgttacagatgcttctatttatagactaggtagcttccttgagaagctttcttgagataacttccttgagaagcttctttgagaaaacttccttgagaagctagagcttagctacaca

SEQ ID NO: 54443 - DNA, 387 bp, Glycine max
  unsure (1)..(387): unsure at all n locations
atcctgactcaccatatacctcgacccaggtttgttatgtctatnctcaccctcggaagcaaaaaaaagggggagagggacaatctccaaccaaagaggaagcaaanaggagagaaggaaaatttccaatcaaaggaaaaaaagagaggaaagggaattcccaatcaaagagtgggagaaagcaaaaagaaaagaaagataattcccaatcaaagaatgggagaaagaaaaaagagaaggagaagaatgaaagaaagctcctgatcaaggatcgaaagaaaacagaagaaatgtgcagagaggtctctggaccaaacaatatctgaacaaatacagaattgtcgccaaatgaacaaaagacagaataggaaaccataacctaaaagt

SEQ ID NO: 54444 - DNA, 450 bp, Glycine max
  unsure (1)..(450): unsure at all n locations
agctntgatagataagctcagaaatggaaattattatcatcactagatcagnctttaaaagaaagaaaaaattgatcaggcattgtacaaaataaaatcaatataaaatagaagttgaactttatttcaacaaattttcccaagtatctaccttaaatcgtgtacttggaatagtgaagtttctatatggaccataaaaatgtctcctttaaaaattccatattctttcgacggggaacttgctttatcaagttgatttaattgataattattgaacattaatataaactctggctagtcaccacggaatcggatattattattggttaggtgaaaattcattaattaaggacattttaaggagaggttcgattgtccccaaactcaaccttgtcctaattaaacattttggtatgataatgacatntggccctatntttgtgacaaaaa

SEQ ID NO: 54445 - DNA, 276 bp, Glycine max
  unsure (1)..(276): unsure at all n locations
agagtctaacgacaagatagacctaagagagctgctccttggctgattctgttccagcttatccctagactggtatagtcgctataacactaagctatcttgctcccacttcctttgctgttaaggcctactatgagtgctcatattcacctggtatttgtgcttaaaacaaattaagggccattcaaggaacattattgggccttaaaaaatgtgcctgcccgcttctttcacattaatgcgccatnacatatagctcagcaatagggggttgac

SEQ ID NO: 54446 - DNA, 453 bp, Glycine max
  unsure (1)..(453): unsure at all n locations
agcttggtaaatgtcaaccccattgctcctttatttagtgtatccctacattcacaaattgcactcaacattaacagaattgaacttgcttcctaagaaaaatctcaaccaaatcattcgattcagcaaaaaataataaatcccaaatcaatattaattaaatgtgtgaattaacaatcaaatcaacaagtggattcagccagatctcaatccaaaagaaaaacaacacgcatttcgatctacagaatcatcacacaaaaatcgaaacagatcgcgagacanaaaaaacacctaaggaaacaaacgaagcagttcccaaattgaacagcgaagaaagctcaatattcatttcacatgccattaanagcgacgaaagcaaagcatcgaagatggaaatganattatgggaaatcgaatgggttggtgtagatatatggaacacaaagaggagag

SEQ ID NO: 54447 - DNA, 302 bp, Glycine max
aagaatattcagagacaagtcacttgaagaattgtgactgtcggaaatgtatatttcgaaatcagtcattggtaatcgaataccattaaggtgcaatcgattacacatcaccaaatgtgactcttcattctgaattgtgaaaatcttaacattttaaaacactgggaatcgattacatgattatggtaatcgattacagctttgtagatcagtttgaaaaacaatgctggctactggtaatcgattaccacaagaaaaactctttggtataagaatttgtgaaaacttcatgtgctactcaa

SEQ ID NO: 54448 - DNA, 456 bp, Glycine max
  unsure (1)..(456): unsure at all n locations
agctgctggtgggacatcttgactggctnctatatctgttattcaccacagaatctgccttcntctatggtcagattgggaatgcctctaacagcacctttgtcaatgatattcttcatgcctcttaagagcagatgttcaaatctttgatgccatattttgacttcatcttctttggaggatggacatgtggaggagtaactggtttcttgaggtgtccataagaagacagtgtcctttgatctgttgccctacattataacttcattcttctcatttgtcaccaagcattctgactttgtgaagtttacattgaatccttcatcacacaactgactgatgctgatcaagtttgcagtcagtcccttcaccagcagtacttttgtcagactaagaagtccatcatggactatctttcgcattccagtgatctttcctttagagccatctccaaat

SEQ ID NO: 54449 - DNA, 417 bp, Glycine max
  unsure (1)..(417): unsure at all n locations
nntataatgctgcattctactaataatcggagttggccactgcttcttctgaggatgacaatcgctagaccataacaatgctacaggcggtataggacaacagacttttaaataaacttgatgtacatgcaaaacaatatttactctatcgtacacaactgattgcataaatataaaataaacactntatatctacaatgtacctgaacgaaatgattgatatacacatgatcgatacaaattatgcgatgcattgaagaatctggcggcggctgagttctaagaggaaagaacgtcatgctttgttgttgagacaatgatacaaaacgtacattataccttgatgcaatgacatataccatgtcggttatatccatccacttatccataatcacctgaatgaaacagatatacacg

SEQ ID NO: 54450 - DNA, 334 bp, Glycine max
atcctgcccatggatagtaaggatcgagctttgggcaaatggtccccaaattgggaaggaccgtctaatataattcacatctattctaatggcgcttatgaattagaggaattaacccctcaaaaacgtactttgagtataaatggtgaatatctgaaaaaatataaaccaacattgctcgaagctaacataagcatagaatagagaaatagtggaaacatataaatggcgataacagcataattgccacaaaagggcatgtgtcagtattacatcaaaagtacaatcgaagtacagaattcgatataaagaaattagttcttctactaatgca

SEQ ID NO: 54451 - DNA, 459 bp, Glycine max
  unsure (1)..(459): unsure at all n locations
caagcgaccgcagcatgcaagctnnaaaacaagaggtttctannaataattaccccaccaccagcactnngaagagaagataataacacggtaaatcgcattgagattgatagagcaccaattgatagaagctataaaatataaatgtttgttggttctaattataacttctgctactcttaatctgcacaagatcaaaaaccagaaaaacacataatacacaacaaagcaatacacaacagagcaggaacccacagatttacgtggttcgacaatgtgcctacatccacgggaaaacgcagctcatcatcatcacattgatcatgaaattacacgttcaatacaagcagcagctagctttgatctctcttggtttctctttcaacaaaacctctctcaatcacctaactcactacctcccttttgaactcattgatttctgcagtttttagcttcttt

SEQ ID NO: 54452 - DNA, 442 bp, Glycine max
  unsure (1)..(442): unsure at all n locations
agcttgaccaaaccactttattgtgtttttaaactgngagtgaatgactagctgtgagtaataatctttgcatgaatctttgaattttagaatgaaatgtattaatgagaacatgatgaaggccatgattgtacatacataagccttttgaccgaaaagcttaccttaaattataattctatcatttgcaccctttttgagctgaatgagtttatcaataaaattgaaccctgaacctgaatgattctctcctgataccttgcttagattctaggagagcatatggttcaaggcataattaccccaatattgggggagtggaactaagagggatgcaaacaaaaaggtaacgcatcaacacacacaacacataagttgtatgtttataaaaaagaaaagaatagaataaagtatgctgatgtaacaaggtcaaaagcaatga

SEQ ID NO: 54453 - DNA, 379 bp, Glycine max
  unsure (1)..(379): unsure at all n locations
aactcagcttcatacgtacccacgttctactatgaaagctttattctttttctgnctactngcggactcgtcttcgccggagaaggattgaatctggattacggaaaggcaagttcgaatatgcttccaacaacaacaaaagagccccagtagtgggcgcgaggaaaaaagaaggagacgcccacgcagtcaccaccgccccgacgtggatgaaagcaccccaaaatatccaaagctcataccagcccaatccctcaaattttttaatccgagccgggaattctctcccgactcaagtaaaaggaccacccggagcagaaagagcaccggcccaacgcacaacttcagccgcttcgccggcaattaataatacaacccc

SEQ ID NO: 54454 - DNA, 300 bp, Glycine max
gcacaacacaaattatatcatggataattaacatctaaaaaacaattaatgtaaacattttagtgtttttaaaccatcattattttaaatataaaagctaatggtgttaatcttaaactgaaaaatgatgaaattagttttttttttaaatttaaaaaactaaaataaaactgtcgaaaaggatgaaattgatttctttttaaaacttataagaccaaaatgaattcattgggaaacattctgtgtgatgtccattcatgaacatgaagaactaaattaaagaacccaattagaaaaata

SEQ ID NO: 54455 - DNA, 457 bp, Glycine max
  unsure (1)..(457): unsure at all n locations
tacctgaattgtgttattcaagataatngagcatatganatcctttattgtactatccaagccttaagtaacataaacactactcttgatttctaggttgaaatcgctggtgctggcagcttgaacacacaaacttgtataaattactgggaattggtaactacgtgttttgagctgaaatttttactaaatttctagacatctggaaaaaaattataaaaaaagaaccaagcgatttggattaaaggaaaaaataagaaaaatcacacaagttggcagagaaattagtgtccacgaaaaaaaagtgaaagggaagtgtgcttgctgttttggctcaaaatttgttctacaattggtgcctattttataccaatcctagttctgaaatttcaattgaaaattattgtgaaaacaagtgccaaaactagaggattcttgagtcttgtttttttttact

SEQ ID NO: 54456 - DNA, 443 bp, Glycine max
agcttgtattatttgctagatcatcttccttgacaactccgtgaaaaagattgccgtcgatatgaagagagaacaatttagagagtgatcgaagactttcaaatggatttccactgaatttattcatagagagatcgagatatcttaatgatgaaagttttccaaatgatctaggaagagcaccaccaattgagttgttggaaaaaagtaacgtgtcaatatttttaaatgccccaatatgatctgtcagattgcctgaaagtcgtgaactctgaactgcaagtcttgtgagtccatgggaaatacaaggagcaagaatttctaaaagttcattaacctgttggttgagtttgagatatgataaatctatcacccttaagttgcagagattacccaaagaagttggaatggttccttcaagttgattatgtgataaatcaagt

SEQ ID NO: 54457 - DNA, 399 bp, Glycine max
  unsure (1)..(399): unsure at all n locations
ggtgtggctattccattctcaacttgattatttctctatttacacgattccaagaaaccttggtaatacgaccaagcacaacacaaattatatcatggataattaacatctaaaaaacaattaatttaaacattntagtgtttttaaaccatcattattttaaatataaaagttaatggtgttaatcttaaactgaaaaatgatgaaattagttntttttttaaatttaaaaaactaaaataaaactgtcgaaaaggatgaaattgatttctttntaaaacttataagaccaaaatgaattcattgggaaaccattcttttgatgtccattcatgaacataaagaactaaattaaagaaccaaattagaaaaatacaaaaatgttagatgaaaatgata

SEQ ID NO: 54458 - DNA, 464 bp, Glycine max
  unsure (1)..(464): unsure at all n locations
agcttatgctgcanatatttacaatagactctttctaacctcatcagcaaaatcaaccacagcagagcaattatgacctttccagcaacagatacaaccctggatggaggaatcaccctaacctcagatggtccagccctcagcaacaacaacagcagcctgctccttccttccaaaatgctgctggcccaagcagaccatacattcctccaccaatccaacaacaacaacaaccccagaaacagccaacagttgaggcccctccacaaccttccctcgaagaacttgtgaggcaaatgactatgcagaacatgcagtttcaacaagagaccagagcctccattcagagcttaaccaatcagatgggacaattagctacccaattgaatcaacaacagtcccagaattctgacaagctgccttctcaagctgtccaaaatcccaaaaatgtcagtgccatttca

SEQ ID NO: 54459 - DNA, 379 bp, Glycine max
  unsure (1)..(379): unsure at all n locations
actaagctgaatgatacacacatactgaatcgttaccagagtatattttatanttattcttagcagncacatcttttcatttggttcttgaatggccatcaaacgccaatatatatgtgacttgagacacgaatttgctaagagttttcagaacaaaatggtcttatcctcttaaaaggcaaaatcgttttatcctcttacaaattccttggccaaaacacttgtgattcaataaggaattatttgagtgctcaaattgttcaatctatctctttcaagagagagttcttcttctcttcttctttattctgaagagggattaagagaccgaggagcncttgntgtaaagaaatctgaacacaaaggaaggggtggcctt

SEQ ID NO: 54460 - DNA, 436 bp, Glycine max
  unsure (1)..(436): unsure at all n locations
ctccagcgaccngcggcatgcaagcttcagtccctgagaaactggnncccagttgtcaacaatgattgaaganngcnganaaccctagccttgcaacaagtcctatggaagtagacacggagatggacaagaaaatccgcggtattgtgagtagcattctgaaggatgcttctgtgcctgatgctgagaaagatgttccaacatcttccaccccagatgtttctgtgcctgatgtcaataaagatgttccaacatcttccagcccaaatgctgaagtactctcttcctccagcaaagagagatcaacagaggaagatgatcaagccgcagaggagactcctacaccacgggcaccagaacctgctccaggtgacctcattgacttataagaagtcgaatccgatgaagaacccattgtcacaggttggcactggca

SEQ ID NO: 54461 - DNA, 460 bp, Glycine max
  unsure (1)..(460): unsure at all n locations
agcttggagatcaagtctgccctagtattgtttttccttgttatgtgatacatnttgaaacaatcaaaatcatcaacaagggtcttttcgacatgatagtatctaagaagaactgattccttggcttgatatttatttgtaatagctacgagtcattatagcacctaagctttcttgctccaacttctttttgccaaatttaaatcgactatgagtgtttcatatttaacttgattgtccgatgctctaaagtcaaatttgagggcctgctctaatatgtctaccccgcttcctttcatattggatgcactatctacataaagattccttcagtttggggtagcttagaaattgctagcaaactctgctagaaagtcttccatgaactangttntcatagggtcgcaaggctcatattggagatcgaattctaacagctctacgaaccacttgatcactc

SEQ ID NO: 54462 - DNA, 186 bp, Glycine max
  unsure (1)..(186): unsure at all n locations
gcgagggctcggcgacagcgtgaacanactaccctggatgttgtggcaaacaccacacggagccacgaggagaagcgcgaaaacaaagaccaccaccagagcaaggcgccgcacggagcccggagnacaagagcaagagcaagagaaggcgggaagcgagagagacgacaccgccggagagcgcgc

SEQ ID NO: 54463 - DNA, 388 bp, Glycine max
  unsure (1)..(388): unsure at all n locations
ntgaaggcatctacctcttcagaggcagaggaagggcttagtaattttgtnaggcagagacggngagatcaaaacncaacagtggaagggagatcaaacaacaacggggcagaggtagaggacgaaaatcaattgataaatctaagattcaatgttatctgtgtcacaggtttggccattatcattctcaatgttatacaaagctgctacgcaacaaagaaaaggaagtttatttcaaagtttgttgaagaaaatgaaactgaaacactattgatggctattcaaaatagtaaggaaccaaaatcacatatttggtatgtagatataggctgcagtaatcacatgagtggaagtaagtcctcattctctcatctgatgaagattttca

SEQ ID NO: 54464 - DNA, 335 bp, Glycine max
  unsure (1)..(335): unsure at all n locations
gcactaagctgcaagatgcacgctaagcacacatgcaaagttcagcctggcctccaagttggctcctcgcgtagagcggttgttgacgcgctgagcgtgctggtccagattttcaaccctctttcgggcctcttactttgtaattctacaaaaaatacactctgaaacactgttaattagctaactttagcatctattggacaaaaactcagaagaagctaaattcctagtgttttaacacaaaagaagcaataaaagagaggacaattagataattgttatgtgatttanatattctaaatacgtaagcatatcaattaccaacggtgtctttg

SEQ ID NO: 54465 - DNA, 435 bp, Glycine max
  unsure (1)..(435): unsure at all n locations
agaaactaagctgactgtctttactaagaagaaaanaggtttttaattattttgttgatcattntatccagcatatacttttcactttttatcaattagtaggccattttgattcctgtatacaatttgtattttattctttagtgttgactcttgactcattttttttattctaattgttgtttctccattatacttctgctcttttagaaattctcatagatacattaattaaaaaaaaaagccaatgcaataccgaaaaaaattaaaaaaaaggcaaaaaaaaaagtcaatactatacccataaaaaaataaaaaaagattaaaaaaaaggcaatactacgacggttattgtataaccgtcttagtatgttgcacgtactacgccggttattttacaaccgcgcgaaaaatccattttcgcatggtatatac

SEQ ID NO: 54466 - DNA, 382 bp, Glycine max
  unsure (1)..(382): unsure at all n locations
agctngaaggtgngnaacccttaattnnnctanataaagannngtggtgggggcgacattgaggcccctccaaagtgttttgcaaggttataccaccaactgcttgcccttcagtggcatatccgaggcaaggctcgaagtcagctagattgtggtagggaatttcacgtgtctcccttatgggttgagagacatgtacatgatgaggttgtcggctctcaatgagtatgggagtggagttattgacatcctccataggagtgtacgccatattgngtggtgtatagttgggaggcaagccatatggcaggaaggcgtgcttaatttgaatntgcacatcatggggccgtccgtacttcccaaatctttgctaccatatctg

SEQ ID NO: 54467 - DNA, 411 bp, Glycine max
  unsure (1)..(411): unsure at all n locations
gaaactcagcttatcaccccaacagaaataaagggccgttttatttttctctctgtcncggnggggcatagattatgatacaggaaaaccatcaagaaggatataatgaccagancaaaccaagaacatggagatcagttttataatggacagataaccaaaacttacagcacgggatgatatagctgngcaatttgatatatgcctgcaaaaagtgtataaaacagcaatgaaccaaatcaaccaattaaagaaaattcaattaaaaaaacactactaaaactgattattatgcattcaaccagcattaataccgggccagctccacaatatctcctcagcttgagctctacctgcaaaccaacaatatccgataatgaattgttgtttttattccaacgcagtaacatc

SEQ ID NO: 54468 - DNA, 288 bp, Glycine max
  unsure (1)..(288): unsure at all n locations
gagcgccggaananatcgagacgctcgaaaccgaacaccgaagcacnnagaacaaccaaacgacaanaacagccgattcggaaggcagagcgaggcccgcagaataccgaaacgccacgaaaggaaggcgggagctcagagcaaacacaaacgacaacaacgcacaactcggaagacagaaagaggcccgccatatatcgagacgctcgagatggaataccgacgctctgagcagattcaaacgacaataactttttactcggatgtttgattgagacccgttatata

SEQ ID NO: 54469 - DNA, 445 bp, Glycine max
  unsure (1)..(445): unsure at all n locations
gatcttaagcaccgcagctgcagcttgtatccaggcctttttgattctgtgaagaacatgaccacgcttactcagacttggagcgttctttccttttctaccctcatccccacttaccacacttctgatgtcactcttgacagagccaaactcatttatggcatcatcatgaagatgaacatgaatgtggggtacctcatctcccaccagatctccctcatagcaccgcatgacacatccagactaggattccctgccttgatcacaactttatgtaaggctaggggagttcagtcaaattcgaggtccttggagagcctgagtcctaccattaatttggcatatattaagaagaactattggaatcttgatgatccaacaataactntcaggggacccaggaaggccagggataagagatctgagaccccttcacttcagcacc

SEQ ID NO: 54470 - DNA, 440 bp, Glycine max
  unsure (1)..(440): unsure at all n locations
acctctaagacacctgcggcatgcagctttttttgatttcaagcgacaacttttctttggctaagcgggatctattggtgccaagcgcaattccctacggccttaattgaggtccatgaggctaagcaccagtcatggcagctaagcgagattctttgcggcaatatgagcgctaagcgagtacctcttaactaagcgcatgttccttngtactcaagatgcatcattttagctaagctggtcaagactangcttagcgagagttgcagcttttctaatctgcangtctcgctaagcggacataccctcgcgctaagccgagtttctggtcataaaaaaaatattnttattttgtaattgaatcgtcggttcagcgcgcgtgttcgctaagcgagcctgggtgagaaaccatacatctctcttgctcacttagtgcaacg

SEQ ID NO: 54471 - DNA, 429 bp, Glycine max
  unsure (1)..(429): unsure at all n locations
ggcttgtggggcttctatggaggctggatttngttcttaatgtatgccttcaatggggantntccaccatggagatgcagcagaagacaaaggagaagaggtgagaggaggcgccatccactatggaattagccatggaagaaggagcttcgccaccaagatgagccctggataagaagcttggagagaatgcttcaatggaggaaaagaaagagggagagaaagagagaggggggagcacgaaattgaaggaataaaagagggagagaagtggaactttgaagtatgtctcacaagactctcattcatcaaagttacaactagtgttacacatgcttctatntatagactaggtagcttccttgagaagctttcttgagaaaacttccttgagaagctagaacttatctacacacacncctctataac

SEQ ID NO: 54472 - DNA, 423 bp, Glycine max
  unsure (1)..(423): unsure at all n locations
agctttantatggttttgngccgagtgttatatctatgagntgngtaggcttgggagcaagactgcgaggtcactaaacatagaacttagacaccgctttttgtccaaacaatatataaactcagtattagggacattaagcctcactcattcaaacaagcggcttatatcacctccgtgtgttatatatacagcatttttggaaacgcactatattctatgctatatattngaaaattatgcatgggtccaatagaattcaattcattaaaatacacccagtataatttttttttacatcatataatcataaaatgcaagtgtttgattaacttccacatgcataactgcagaaaccanaatcaaagctaatacaataataaatgaatttcatttgaacacatctacagaaatgaaaaattg

SEQ ID NO: 54473 - DNA, 468 bp, Glycine max
  unsure (1)..(468): unsure at all n locations
ctcgacccgggatcttaagcaccgcggctgcagcttgcacaaccttttagccacttgctcaactgtttccaccttgaagcaggttttgttgtcgctaggatgcttgatagcttcaaataagttgaagatcaccttttggtcctccacactcatttccagatttccattgcccatatcaactacacacttagctgtcaacataaatgggcgacccagaatcaacgagatgttagcatcctcctcaatatccataatcacaaaatccactangaatgtgaattgatggattttgactagaacatcttcaactacaccataaggcctcgtgatagagcggntntctagttgaattgtcatcctagtgggagcaatccttaagtttcttatccgtcgacacattgagagtggcatcagattaatgctcgcttacaaatcaatgagagtcattcccactaatacaacccctat

SEQ ID NO: 54474 - DNA, 451 bp, Glycine max
  unsure (1)..(451): unsure at all n locations
aactcagcttaagaaaagatggctcagcaanccttattttagttgtttttccacaanagacccccaatcttaatggagagggttaccactactggaaaacccgaatgcaaattcttatcgaggcaatagatctaaatatctgggaagccatagaaatagggccttatatacccaccacagtagagagagtttcaatagatggtagtttatcaagtgaaagcataaccatagaaaaacctatatatagatggtctgaataggatagaaaacgagtacaatacaacctataagcccaaaacataataacatctaccctaggaatggatgaatatttcacggcctcacattgtaagagcgctaaggaaatgtgggacactctttcgataacacatgaaggaactacagatgttgatagatctacgataaatgcactaactcatgagtatgaatt

SEQ ID NO: 54475 - DNA, 463 bp, Glycine max
  unsure (1)..(463): unsure at all n locations
gcttggaagttgacacacgggagcaaactatttttctctcattcctcaaccaatttattatgaccacttggacatcgcgcacccgctttctcataaataaaaaacagaaatgctaatcggtaacatatatttttgtaaaaaaataatggaaaaaattattagaccgtctgagattatcatgggtctcactaattttcaagttgaaatacttggttatatataataaagtgttattaattaaatttgaatacacatcagataaagatacatattaatacttggcagaattattaatactatctttaataattttatattatatataatcaagtattattaattaaacttgaatacatgcatgtcacagattgtgaacacggatacatagtgatctganactacttatctaatatatttttcttctctacccgcatataacaagttgtacgtgcatatttgatat

SEQ ID NO: 54476 - DNA, 445 bp, Glycine max
gggttcgaggtacttacccgttgaagatcgaagaacgatgaagaacgaatgaagaacgttgaagaacggttgaaacctttgcgaaattcctcacggaaaacgttacggaaacgtttcggaagcgcctcggcttagattttcttcacggaaataatttttccaagcaaattcgaaagagagagaagtgccaaaggggctgaacccttttcttcttcacttcctcccctatttatagcaaaataggggaggtggttgccgcccagctcgcccaggcgagccaggttgcttcctccagaagcaacagccttctggaggaatattctggagggcccaagtgagcctgggtgctatttgcacccccatttttactaagtacacccctctgctttttttggtgattcttttttcgtaaaggtacggaaacttacgaatttcgtaacgatac

SEQ ID NO: 54477 - DNA, 382 bp, Glycine max
cttacgaatcaaccaacgattttctactttcctgacatcttacgaaaaatcaaccagatgccgggttggcgctaagacttgaaactcatggctagccatgacatatgccttaaagaacagcgcttacggaagactaatgcaaaagatttctaaatttagacttagtccttctccaagaaattgaaaccctatgtttaccattcaaagggaggctgatatgctccaatgttcagattattacagcatgttcccaatgatctaatgcatgaaaaaccaaaaataacacaaattaaaatcgcgttgcctcccacggagccgctttttaatgttattagcaagacaactttacctcactgggcgatcttactgtttgttctcacca

SEQ ID NO: 54478 - DNA, 359 bp, Glycine max
ctcttaagaacattccaatactctactggaggatccccatgaatccttcgttccctacaatgggaagtccaccaatagagggcatacccttgaaagctaagggtagccaatggaacttttttctcttcgctaatatgatggcaagcaaagagttgttcaacctttatttcccaatctaagtaggcctcaacattatcttttccacggaaatatgggaggctaatgttaacctcttgaggccttctatccttttctcttctttgggaatgatttttagtatgtgagctatgacgccttctataatagtcgctaagttcttcacttaaactcttgccagagttatgactactataggagac

SEQ ID NO: 54479 - DNA, 465 bp, Glycine max
  unsure (1)..(465): unsure at all n locations
tagcanattgtttaaggtgtctataccttaaaaaatactatattttatcgtctaaagagataaagggtaaagtacttacatagtaaaatgatttattatcattaagaaaaaaattaacatattaatagtttagattttttatcatgtcactcatttaagtttgtctttaaaaaaaattcatttaattttatttgacttttgacaatttgacactctcatattaatatataaacatatagcagagtttggacattagctgtgtagtgtgtaggcataggagtacaggatcgtgtaacccacaaggtagttaagacaagtgtcttagacctttttacaatatgaaatttttattattattatgcgtccaacaaatctaaaattttaggtgaagataaattaaaaatattgtagtaatctctaatttttttaagatatactgagcttatngaatactatatgtaacac

SEQ ID NO: 54480 - DNA, 446 bp, Glycine max
  unsure (1)..(446): unsure at all n locations
ttataagcgcgggtctgggaacaaaggtttttgttttcttataccaagatgangcgccgagtacattagatttggtacgaccatgccctcctgatttccagctgggaaattggcgagtggaggaacgccccggcatttacgcaacaagcataatgtaaacctttacgggtttaaaagctctatagttgggcctacgctttagagatttttcttttgttaaggctttgtgtcttttgtttttgaatttataatacaaggatctttcttcatctgttcctacgtctctacccattctcattcatatgcatggttacttctttntctgaaatgacagatccgatgacgagtcccccgaaggtactaatacctgggacgcgcctatcgacttcgagcaagaaatgaatcanatggaagatgaaggaaacgaggatgtgtgacttccccca

SEQ ID NO: 54481 - DNA, 443 bp, Glycine max
  unsure (1)..(443): unsure at all n locations
agcttggctaacaacaacattataggaactataccacactcaattntgcattggacaagggtgacacatttatatgtaaccggcaaccaatctagtgggaggttgccaaatgccttaacaaaattgaaacatcttatgaacttagacatttccaataacaacttttctggtatgatccctagtaaacaacaatatagtcacctccttagttattatgtgactccaagtaacaagttggaaagcaatagtaccaaagagtggctaaaggaaagtgacacacacacaatacagtaagcaacgccaggtcctttaagtgacagcacacctaataacggcaaggatccatggccagaaatcttggggggatacttttgggtgctggattgcttttgcaaccatttactctattgtaaagaagtcaacaaagttcagtgcagagagag

SEQ ID NO: 54482 - DNA, 415 bp, Glycine max
  unsure (1)..(415): unsure at all n locations
tgaagggacacccacatttcatactcccaatatctcttctaacaaaatctttcttcctcgacccatactgaccagtcatctcacaaccaattatcacaaatgaagtccttcttctcataccagtgtttgtgtctgacctcataatcaccgccactgcaaaacatcatctcaggtagcaaacatcttgatgcaatcctccctatgaagggaccagtcactagagctatgagcacgaggctccaagaggattgngctacagtagctgaagaaggccctagggttctcatgaacattatggtagatttctaagcccatgggccaaggttgggtccaattatctttgtacatattagactangatgtcattatatttggtccttgtatttagggctccataatgtaggtagggtaccct

SEQ ID NO: 54483 - DNA, 407 bp, Glycine max
  unsure (1)..(407): unsure at all n locations
agcttagccctatcacgcgctaagccnaatattataaatgctgactccccgggggcgaaacctcgagctaagctgccacacccctgaggctcctagtcagggcttatcgagcctcctcacgctaagcccaattccttctttgtcccataattgtgcttagcacccaccaacgcgcactatgcccaatttaccctgtgtctgttctaatttgtactgagcttagcgagcatctcgcattaagccccataccttcttctgctgacctgtggcactaattgggcttagcatgcaatctcgcgctaagccccaccttcttttagaagactggcgctaagcgcctagatggcggcttagtgcccaaacctttttatattttaatctccttccaatttacctttcttacccat

SEQ ID NO: 54484 - DNA, 337 bp, Glycine max
  unsure (1)..(337): unsure at all n locations
ngcagccattagaagaaaaagaacatgtgtntagaagtatgattgaaaatgttagtcagtgtgtcagattgattgtgaaggaatgcattgaccgtatcccggtgagagtgtgatccttaaattttgagagaaacgactatcatttagtactgatttttgcatgaatctttaaagtatggactgaattcatgaattgaggatgatgaaggccatgttttgattgtgatagctacttagcctaaaagctgaccttgtgcttgaatgatgtatcccttgcacccagtttgagctgaatgaattattgattgaccgaaccttgagcctatacaatggtatc

SEQ ID NO: 54485 - DNA, 446 bp, Glycine max
agctttgcagaattggtcttcttcagtgatatgatcaatgtgggtccgaatagaggcaaatttgatcatcctactatgacgactgaaaaaaaatggggcaaatgaagagggtgaggaagagggagaaacccatgctgtgactgccattcctatacggccaagtttcccaccacccagttatccacaaaggccatccctaaatcaaccacaaagcctgtctatcgcacttccaatgacgaacaccacctttagcacaaaccaaaaacaccaaccaagaaatgaattttgcagcgagaaagcctgtagaattcaccccaattccagtgtcctatgctgacttgctcccacatctacttgataaatcaatggtagccataaccctagccaaggttcatcaaccttcatttcttcgagaatacgactcgaacgcaacgtgtgcttgtcac

SEQ ID NO: 54486 - DNA, 369 bp, Glycine max
ccaaaaacccagccaagccaggggaatacgagcgacgcactattattgaccttcaccatcaaacacgaccacactactgtacgaattcgggaagctcccgcaaacgcaaaaggcgcatcacggcctcaaatagaaccaacatagcacagaggcggtggacaaacacagataccatgtgactgtataactcaggcacggatagagtcgcacaggctagaaaacgaaagcagacacagcataacgcaaaaatgtgcaacaaaacaagcgcaacgaactggagatggcgccacagcaaccatggtcatcgcatcaccacaagcgaataacgacactctggcgccgaaagacaccggaacagacacatagcac

SEQ ID NO: 54487 - DNA, 417 bp, Glycine max
  unsure (1)..(417): unsure at all n locations
agcttctcttggaccttatgcaaatcctcaattcatccttcaagatcaaactgtctactcgtgattggtccctttcctctctccggagcttaagctcgttgttactgccccacagagcccctcggaatttgttccggccatgttcttccctacgggcccttttggtctcttgttctaaggccttggtggtggctatatttacgtctctcagttcggcattctcctttcggatcttaagagctgctgatttgaacttttctttgactatttgggctttctcgatttctgtcttgagggcctgcacctcttcgtcctcctccggaacttcaacttccaccccctcagtggttctctaactcgggagccaatccagaccttgcatgtatgctntcaaccacctatggtagccaccgatgg

SEQ ID NO: 54488 - DNA, 398 bp, Glycine max
gctaaatatccgtacaagcaatcacaccaagtacatttttaccccataacggatactaggcaccctacactagggtcctttgtgaataagagcctaacagaaccgtactcttaggccaaactataaatacctattctagcatgccctatgcaattcatgcgccaacaagaagatgtgttgaaccatacatgaggaccaagagtaatagatagacacagcctgatcaatcatttttgcaaaacctctctagactgaagaggtgtgttcttgaactaaaacaggcacaactcacttattaacagagtatccaatcataattcgaaggtggagtacttctttagcactttttctcttctttttactaaaacaaactgatctactcatcaaggctatggtat

SEQ ID NO: 54489 - DNA, 403 bp, Glycine max
  unsure (1)..(403): unsure at all n locations
catgaagcttattcactatttttggaaagaatattgtatataccagacaccgaagattgttgaaaccatttcacccgtatcgatgactgaaaaaagcttttaatggaagttaggagaatgaatgcccgccggaaccattaactggaaatgatagtcatgatcgagtagaagacattgtaactctatgtgggaagtcccaaaagaagacatcatctcccaccaacatgtggaagaaacgggcaatattctttgatcttccatactggtttgatctacatgtgcgtcactgtctaaacgttatgcatgtggagaaaaatgtatgtgatagtttaaatggtacttttcttaacattaaaagcaagacagagggatggttgaaatattttcaagacttggntgacat

SEQ ID NO: 54490 - DNA, 332 bp, Glycine max
  unsure (1)..(332): unsure at all n locations
gtgaccaagtctgaaccctagacaatggctctttttattttcttgacacagaaataataatagtcccacatcgagagcngttagctacaaacatgtgtttatataattaagcataacattcatggtcacgaccttacttgaacaggatctgttctataggctcgtacctctgtgtccttgagttctaaggagacaggaacctacgtctggtggatgaatcatgaccgtgtgatcagagcgggataacggcctatcgatcttctctgtggaggggtgataacttatgctgtagaggatcgttcttacgcaaattcctgtctgggatggtcaca

SEQ ID NO: 54491 - DNA, 413 bp, Glycine max
  unsure (1)..(413): unsure at all n locations
acacaagaaactcagcgtgtagaagttataatttaatcctaatattctcattttttatacctgctcttgtgcgaagnctaaaaaaaaaaaataaagcctgcacatttgaaggtccgagacctagttaaaaggtgtaaatccagaagagaataatcaaaatttagtgaactttaactcacgaagaacattcaacctatttgttaattggagaaacaacagtttcttctaacaaaaaggtggtgaagatgcgtgaacacaatctcccttatcctctagcccttctcaagatattcgaggatgatgccttgagagtggcatcttcagcttctcagctaaagtaatttgtacacataaaagttgcccaacatcaccacttgagcatatataaactctaaccaacggttgtctacaag

SEQ ID NO: 54492 - DNA, 223 bp, Glycine max
gcagctatgacctatcattgctcgagagcttctcgtgttttttttagcgtctcgatatgtgatgttcctgaatcgacccttcatgtgataacttatgaacaattgaatttctcgagagcgttcggtgatcaatattcatagtctcgatatatgatgcgcctgaatcggacctccgtgtgaaaagtgatgaccatttgaatatctcgagatcttccgttgttct

SEQ ID NO: 54493 - DNA, 395 bp, Glycine max
  unsure (1)..(395): unsure at all n locations
tcgatcggtatctgtactggccgactctcgactgtcattatttctgagcaatatcggtgaataatattcttttgccgaggtgtgctaatgttttcctggccaaataaatgggaacatgccagattctgtcgataagaaacatccgtagagctcgcacggataaacctatccgacctacgttgtaattttttaggctacacctaaacaaaaaacttcctctaacgttaaaaaaaacattatcggccaacgtttgtaaaagaaattgcgcaatttcggctgaaagatatcaaccagggacatataacgaccgacaccggccattgtgtattctatttaatccctgaataacaattggatgatgtcgattangaaatgttcgatcggcataatccggt

SEQ ID NO: 54494 - DNA, 460 bp, Glycine max
  unsure (1)..(460): unsure at all n locations
cattcctgtagaaacaagaggtatcaatgtattttaatgttaacaaaaaacgtagctaatcaaagatattaacacaaaaagaattctgaaagcaaatttgaccttcgcaatagttcaataatcgtgacgatccatatcaaaaaggtccaaactccaaattaattgattgcatagcaatcctaataactaacaaatattaaaaagaagcattcttgattctttaatcatcatcaagtgtaaaggtcgaggagactgaatgagtaacatccaatgtggctagtgagggaacaagttctgcaacataaagaaattattttagttgtcattcatgttatataataagtacataaaacaaccttaagagaaaaaagatcttgttacattcttcaattctttcacactccaaaaattcatcattntcatttgaaagtagtggtgatggtgttcttttgatccaatc

SEQ ID NO: 54495 - DNA, 347 bp, Glycine max
tcctgtatgtgatcaaattgctcttctagatcgattttttatgccacgctcctttatttctttaacttgtgcattatttggaaaatctcttgaaggattattgcattatcaatttttcctcttcacgacaagaaactactgtgtaaaaggacctatgagatcattcaagagacgtcgaagtctatgaaccaagacatttgtgattaatttataaactgtgttgtaacattttatgacaacttgatgcaatcataccccccaagggcattggatagaagactccaagaagattgtgccaaagatgcaagagaagaccctagggttctcatgagcctcatgatagattt

SEQ ID NO: 54496 - DNA, 431 bp, Glycine max
  unsure (1)..(431): unsure at all n locations
agcttctcgcanagcttacggtaagatctggtacctagccatggcatttgtctccacagaggccattgcctccctcgcccaatattatgaccagttgttgaggtgcttcacctttggggacttccaactatcacccacggtggaagagtttgaagaaatcctgtgatgccctctgggaggaaggaaaccatacctcttctcgggattctatccctctttagctagaatttctaagatagtccaaatctcgacgcaggaattagaccacagaaagcaagtcgaaaatggggtggttggagtaccaaggaaatgtttggaagcaaaagcaagagtcttggcaggtaaaggcgaatgggccccaatcatggacatcctcacaactttgatcttcggaggagtcctctttccaaatatggatgggttgatggaca

SEQ ID NO: 54497 - DNA, 470 bp, Glycine max
  unsure (1)..(470): unsure at all n locations
attctatggaggctggatctttgagcttcaatgaggtcctttaatggtgtcttccaccatggagatgcagcggaagacaaaggagaagaggtgagaggaggcgccatccactagggaataagccatagaagaaggagcttcaccaccaagatgagccttggataagaagcttggagaggatgcttcaatggaggaaaagaaagagggagagaaagagagagggggggagcacgaaattgaaggaagaaaaagggagagaagttgaactttgagttgtgtctcacaagactctcattcatcaaagttacaacaagtgttacacatgcttctatttatagactaggtagcttcctagagaagaattcttgagaaaanttccttgagaagcttctttgagaaaacttccttgagaagctagagcttatctacacacacncctctcataactaagctcacctccttgagaagct

SEQ ID NO: 54498 - DNA, 414 bp, Glycine max
  unsure (1)..(414): unsure at all n locations
gctatatatcctctgttcttcattgtcttgatatctntgttatttgtaagacttttcanaagctttaaattgtgcttcactcacaacttttcttgtctcatttctagcattctgataccttaaccaatttcgaacattattgccccaatgtaaggctttaaaacactcttttgtttttaccatgttttgaacactttcattccaccaccaagattttattttatcgcatttcccanaacctcatgattcccccaagactaaacatggcatccataaaataaaaatctcaaataagcttgaaacttgaaaacaattattttgttgtgcggtggattagcttcatatactactngggttntcaaatngatngcaattaccattgaactgaccaatangatatacaaattgatatat

SEQ ID NO: 54499 - DNA, 439 bp, Glycine max
  unsure (1)..(439): unsure at all n locations
cttgcaattagtgttgctggcaaaggatcgaagtggatctgagaatangcaaatttgattatcctgctttgatgaataggaagcctgcggaaaattgagagaataagaaggagagaggaacccatgatgtgactgtcgttcctacttggccaaatttcccaccaactcaacaatatcaatactcggccaatatcagcccctctcattacccaccaccctatcatccaagaacacccaatcatccacaaaggccacctttatatcagccacgaaacccgcctgctacgcatccgataccaaacaccacccttaacacgaaccaaaacaccaaccagggaaggaattttccataaaagaagcctatagaattcactccaatttcgatgtcatatgctaacttactcctatatctactcaataatgcaatggtagtcataat

SEQ ID NO: 54500 - DNA, 441 bp, Glycine max
  unsure (1)..(441): unsure at all n locations
ngcttgagatgaggaagtgttgaaaggtgatacttcctgcttttattgttgaccacagagtggtacctggagatatgtcgcgggggtcaggagaccttggggacgtcaggtggggtgctattgcccaaaaccaagcttgaccaatcccgacccaacccgggcatagtcggtcagtgagaacctgtgatgtacctaagcaagcgagctcctggcagtcaacatataaaaggaaaacaagaccacaaagcacggaggcttgtggtggctggccaactgtgaattttgtgtaatatgtggattgtggcctctggtaatctattaccaagggtgggtaatctattacaaagcttataattgaggacaggaggcttagatggtctctggtaatcgattaccaaggtgtgttatctattaccacgctatgaaactatgtcacgaaac

SEQ ID NO: 54501 - DNA, 476 bp, Glycine max
  unsure (1)..(476): unsure at all n locations
tatttgctataaatagggggagaagtgaagaataaaagggttcagccccttatgcacttctctctctctcgaaattgctgaggaaaattatttccgtgaagaagaaaagggttcagccccttatgcacttctctctctctcgaaattgctgaggaaaattatttccgtgaagaaaatccaagcagaggcgctttcgtaacgtttccgtgagtaattacgcgaagattctcgaccgttcttcaagattcatcgttcgttcttcgttttcttcagtcttcaacgggtaagtacctcaaaccgagcttttcaattcattctatgtacccgtggtggtccacattttgtttcatgtatttttattctcgttttcatttgctttntataccccctttggacgtgcttaagccatttatttaagtcatttctcgcttaatctataaataaaataaatttccaccgatccgttgaatatatca

SEQ ID NO: 54502 - DNA, 403 bp, Glycine max
  unsure (1)..(403): unsure at all n locations
gatactctcagtcagctgctgcatgcagcttgtaaaacggaagcttttaaatttccttttcaaagcagaaacattgtttctacttcaatacctcttgaactacttcacaatganttatttggtccttcaagatctgagtttaggtggaaattactatggcttagtaatagtagatgaatactcaaggttcacttaaacttttgttttgaaaaccaaaaatgaagcttttgatgtttttcgcaaacttgccaaggtgatttaaaatgagaaaggtctcaacattgtttaaattagaagtgactgttgcaacctacccttcgacgggagggcgaggcgaaaggccaaaggtgcatcttctcatgaagaanacgcgtgggagtcgccaccaacgtttatttgagaa

SEQ ID NO: 54503 - DNA, 415 bp, Glycine max
  unsure (1)..(415): unsure at all n locations
ctatgtcccangattggtcattcaaaagttacgttatgaccattcgaatttctcgagagcttctgttgttcaatttcgagcgtctcgatatattatctcccagattcagacatccgtgtgaaaagatatgaccattcgaatttcatgagtacttccgttgtgcaatttcgagcgtctagatatattatgtcccaaattcacacatccgtgtgaaaagttatgaccattcgaatttctcgagagcttctgttgtttaattttgagcatctagataagttattcccgtgaatccgacatgcgagtgaaaagatatgaccattccaattgctcgagtgctttcgttgtgcaatttcgagcatctagatgagttatgtacgcgaatcagacatcgttgtgaaatgatgaacatttgaat

SEQ ID NO: 54504 - DNA, 389 bp, Glycine max
  unsure (1)..(389): unsure at all n locations
agcttattggaaaagattggtcttanatatgttctcgtaaaaaatagatgagtgtgtaaaacttatgagattaaacacttatgggctataacatacttgcgtgaaaatttctttgctcgtataaagatgacatctcaatgtgaagcaattaattcaataatcaattaattcaataatgaaggtttacataaagaatataagtgccattagtgagttnttacaaaattttgattgggcaataaatgaatatagaaataatgagagtaaagcagactntaattcttctcttgatgaacctattttaactacatccttgaagaagtttgaaggccaggcttccaaaatatacaccagagagatgttcaaagaagtcaaagaacaattaatag

SEQ ID NO: 54505 - DNA, 421 bp, Glycine max
tgtaagcctaagccaatagtaatgatcacatgcaatgcatactgatatgcaagtaaatgaaaattgttttgtaatcaaacctgacacaaatgagggatgcaaataaatgtcctcttataaacaatgcaactgcttatttttcaccaaaatagccttcaaacatacagctacacaacttaaggcacagtatccccctgtgcaatgacctctctaacctccacacaaattcaacgtgtgactcattaggatacaatacaatttcagcaaacttttgatttaagatccaaaccttaatcctaatcacaacaatcatatgcagtggatacaaatacacgcagttttgtgactcttccgtcatctccttcattcctgcttatttcactaaacttcacaggaaatcttatcaatatggcgttggttt

SEQ ID NO: 54506 - DNA, 428 bp, Glycine max
  unsure (1)..(428): unsure at all n locations
agctgtgagccaattcagactacaataactttttactcgaatgtctgatagagtcccgtaacatatcgagacgctcgaaattgaatgttgaacttttgagctaattcaaacgacaataacattnttctcggatgtctggttgagtcccgtancatatcgagacgctcgaaattgaatgttgaacctcttagcttattcaaacgacaataactttnttcacggatgtctgatagagtcccgtaacatatcgaaacgctcgagattgaatgttgaagctctgagccaattctaacaacaataacttttttctcggatgtctgattgagtccctgtatatattgagacgctcgtaaatgaatgtttgaactctgagccaattcaaaccacaatacttttttctcgatgtctgatagagccagtaatatatt

SEQ ID NO: 54507 - DNA, 343 bp, Glycine max
cttctacattcaatttcgagcgtctcgatatgttacgggactcaatgagacatcccagtaaaaagttgttgtcgtttgaattggctcaaagcttcaacattcaatttcgagcgtctcgatctattacgaggctcaatcagacatccgagtaaaaagttattgtctgttgaattggctgagagcttcatcattcaatttcgagcgtctcgatatgttacgggactcaatcagacatccgagtaaaaagttattgtcgtttgaattgtctcatagcttcaacattcaatttcgagcctctcgatatattacgggactcaatcagacatcccagtaaaaagttatt

SEQ ID NO: 54508 - DNA, 420 bp, Glycine max
  unsure (1)..(420): unsure at all n locations
agctngctgcaactctaactttattacttgtggtccattcagntggggtgcgccattttactcaggtggaataaccgatgataacggtggttctcagtcccaacctagacaaagtaatttggtggacaagtttttgcacaatgctcaggtggtcagcataggtgaaattaacaacctctaacatgtgactaactgaacagcgcagatctttatgtgtgttgtacctcatcattgtagatcacctattgtttaccttttgtaggagttgtactgtttgactattgggacagttgacataatcatcattgatgctccatagagatatgacaatcgtacnctagtgtgccatcatcatttgattcttccatagtaggttcatcttcgtgctcttagccaaacccgattaacgacgcagtctca

SEQ ID NO: 54509 - DNA, 448 bp, Glycine max
tcaatcatttggtactagtgtgtgttgaatcgttccaaattaaataaaattatgattaattctgtagtacaggaataacctatgtctactcataggtacaatccaatttgattccaacttcaatccatttataaacagcaaggggaatttcaacaaatatgtttgtaagcaattgaacaaactgtgaaacaacatacaaaagtgcataatctaaaatagaaatatagagtgttgaaagcagaatatgaaacaaatttaatatcatcaatctaattcaccaaatccaatcaattcaaattatcatagttctacagataatgatcatattgtgaaagtttaattaatgttattaaaggtagttcaattgaattaatccctaaattcattgagatcacaaatcaaattgaaatatcatctaatcaatctatgatgaaatattcaaaattat

SEQ ID NO: 54510 - DNA, 491 bp, Glycine max
ggatccttaagcacctgcggcatgcaagcttagcagaccaatattctatgatgtttggttgggtgataagcgcttgagactcgtggcttatcacatgaacaaatatgcgcttagcgcgaggcttgcacttagcgaaaggactgtttttcagaaaacgttttctaagttgtttttcagtcctttttccaagagattgaaacccttatgtctaacattcaaggctaagctgatatactccattgcacatattataaagcaagttcccaatgatctaatgcatgaaaacaaaaattgctgaaattaaaaactgggttgcctcccaggaagcgcttctttaacgtcattagcttcatgctcttacctcattgggtgatcttatgatatggttcttactttcagaacctcttgacctccttccattacctgtaagcagacattgtgttctggagcacgctttgtttctacaacatatctaaatcatatttttgatc

SEQ ID NO: 54511 - DNA, 413 bp, Glycine max
  unsure (1)..(413): unsure at all n locations
tgaccgatcgttgaagccgntntctcttctaataaatgtataatagaatttcaaccgatcatttgcattgtaatctcgtttaatcactcttaaaacaaaatctaactgatcgttcacgttgtaaccttggttaaaccaaaaaaggaaaaataataataaaataatcaaaatatctttaaataaaataatcaaaaaaatcgatcagacgtttttctttggaagtttccttgaatgaattgactaataaccaaagtgaaactaaggctaaatcaactcacaaatcaagttttgtccgcaaaaaatcactgaaaaccgttttaaggtccaacgcctttaacggtcctctttgcttttatcggttaacatggacgcgtcaaaagcataaaatcaacacatcactttactgccttttg

SEQ ID NO: 54512 - DNA, 437 bp, Glycine max
  unsure (1)..(437): unsure at all n locations
agctnttaactttccaaatcacatatggcatataaattcaccatagtgcagtgaatatttttgtttttccaaatgccttttacacccaagaatccatttccatggaacacaccttccattgcaaacatatctatattctacacgcaaataagtcccccaactgcgtttactgcctctttttccaaccatgagtagatattattgtcccagatagaattacagaatctgttggaaaaggccttcattgtagtctcttgcacacataaaatcaaaatcttctcttcttattaatttctttattccccttctctttaccttcccccttaatcctcaaatattataggtaaggatcttcataaaacactaacctcttttccatttctgtgtgcttcttttatcccttttctccatattcataaatatagtgatcatcccct

SEQ ID NO: 54513 - DNA, 359 bp, Glycine max
  unsure (1)..(359): unsure at all n locations
tctacactntatacaagaatgaagctctgttaccacttgttagacaagnggcctcagatatcttaagaagggggggtcgaattaagatattccaaactatatcccctaattaaaaatctatttcactttttaaccaagttatgaattcccttaatgacaatcttcttaaatattaattcaaatgaaacacattgaatatgaatataaagcgataataaataaaggagattaagggaagagaaaatgcaaactcggttntatactggttcggccacacccttgtgcctacgttcagtccccaagctacccgcttgagagttccactatcttgtaaattctttatacaagttctaaacaca

SEQ ID NO: 54514 - DNA, 481 bp, Glycine max
  unsure (1)..(481): unsure at all n locations
agctntacagtcatgtcttgaactattntatattttaagtcattgtgcagtacttatggagtttcaaggatggcctagtatcttttggggtcaaaattactatgtgccagttaggattgtatcatccggtcaagctaatttcttgcaaatattattgtatttgctgacaaatatatctactggaaacttattatctatgaaaatatttcttgtgaaccaaaatatgtagcattgttatttcttatgaacttttatgtaaaattcacacgcaataaggaaacttacttgggtaaaactttttattttctcctacctaaggtaattttccaaactcgattatcctaaaaaaattagtgtttgataatcagcagttcattgacatataactttaatgggatggaaattaaacagctagatacaatgctttatttcaacactttcattcgtacgtggttatgcactcatctacgcattattataa

SEQ ID NO: 54515 - DNA, 454 bp, Glycine max
ggtgatagatagataaataattgagtggaattaatatatattcattatctaatgttacacttgcatgtgtgcatataatagaagacttacttgaatattaatgcgtatatatatatatataaccccactgcccacactgtcttggacgacattcttccatgcgtggaaaatgcaactgccatgaaaacccttctacgaagcaagactctcacatataccattgttgacgcatttgaccaaatcatttccaatttcacaaatgcaaataccacagctattttcaatcaatcaggtcccctcgtccctcttctctgcaatccatataatgccgacttcacctctcgccagtgtgcgccaggggaagtcacattcaaaaacgccatcgaggtaattagctagtacttaacgttatcaatcattccaaacacattcattatatatatagaatagtact

SEQ ID NO: 54516 - DNA, 505 bp, Glycine max
  unsure (1)..(505): unsure at all n locations
gatctctgagtcacctgcggcatgcaagcttcctatacgatctanatgctntctaaatagaagtaatcttcaataaacatgttaggctgcaaantaaatttgccctatacgatctaaagcttcctaaatgacatgtttttgacttgtaaaaaaaaatgctgcctatttttttgtgaattgttgttatggccttgacgtctaacaatgttccatcactaaaccactatagaattagaaatatacaaattagagatgtacatgaaatacaaatgagtaactgtcgatagtcaactaacaattgaaaattattaaagtaaacataccatgttccattcatttttaaacccctgctgactatgcttcacaagaaatgaatgacataatatccacattcatagcctccgatttgaacatgactctaaatttaatatcaaatatgggtacttatatagaattacaaagttacaaaatgtcacaagtcaaagggaacatatgattaaatgat

SEQ ID NO: 54517 - DNA, 425 bp, Glycine max
taaagtatgcccgagtcattcatccctatgagatgttgtctaagtattggcgatcagaattgccattccttggattatagggttgaaccaagctcatgcttttacaaaaaggttcatcaagtcaagttgaaatatggaagtaaccgtcttgcaaaattggggcaaaagatgaattgagtcacatcactgcttcgtctactgccaaacatatttaggattattgatgtccttgttacttccagtttcaccttgacaaagatgtcatggaccatgttgaaaatctaaattgattcaaccccatatcttgcgtaaaaattcgcaatacttcaactgtacatcattcgcatgcatccattggttacattgctcgttgcattctttccttgaaaaataaaataaaatgaacttaatcattgttataaaaa

SEQ ID NO: 54518 - DNA, 395 bp, Glycine max
  unsure (1)..(395): unsure at all n locations
tgcaagtgctgctactggtggattacttgaatctgcacggcaatttgtcagaatcttgagactgagcttggttcaactgagtagccatctgccccatctgatttgtcatactctgaatagatgctcttgtctctttctgaaattgcatattctggatggtcatttccctcactaactcttctaacgaaggttgaggaggagcctcaattgttggctgtctttgttgcgattgtcgctgctgttgctgtattggaggaggaacatgtggcttgcttggaccaccaacattctggtaaggagggacaggctgttgttgttgtggacgacttgtccatcttagatttggatgattcctccaacctggatngtatctgttgcttgaaaggtcataatta

SEQ ID NO: 54519 - DNA, 415 bp, Glycine max
  unsure (1)..(415): unsure at all n locations
gcacaagagcttcaagtatgtgctccttaaacctccattaattntcagctgtaccttctcctccattgttgtttcttcatttttctccatgtacctcctcacatgtcttgtgctaaatgttgttaacatgattctttagaatttccaccgattaaactagctataaaagctagaattgattntctatggttcaaatttcttgttcttgttcttcaaccatgaattgtgttgagtttaggttcctttgagttttgtcttgctatttttttgtggctgaaacctaaaccataaaattcttataaaaacattaaagtagaagaaaacctcaaaaatatagagtgacttgttcacctatntgtagtttgtcgtagaagtcatgtctagtcatgaaactcgtcacataagatttcttatg

SEQ ID NO: 54520 - DNA, 481 bp, Glycine max
  unsure (1)..(481): unsure at all n locations
ctgcagctaagctccttaattgccaaggctcttaatattngatagagtatccttggggaaccttcacccaacgaagacactgacaaaaacttatcttctccttcttggacaaagtatggcaggctgggggcaagtaaattttcttcccattagtccttggatgcaactgtgattgtgtacccatatcagctagatcttgatgggtattcaagacatccttcatcttgccttgaatgttaaggagcgtcccaatcacactgtcacaaacatttttctccacatgcataacatcaatacaatgcctaacgtgaagatcacaccagtacggaagatcaaagaanatggaccttntcttccatatgcaactctgacatttatccttcttttgggtcttcccaaatacagtattcaggtgttgaacacattgatatacctgctcaccagtcaacgatatcggcgcaatatcatgctcatgacttcc

SEQ ID NO: 54521 - DNA, 450 bp, Glycine max
  unsure (1)..(450): unsure at all n locations
gaagagatggccaaaaggatcaaggatggactactcatctaaagaaaagaaggaaaaaattagaaggagctgaattggagcacgttgaagattgttgaacaacatgcctgggcttagcgcatgctgtcaggcctaatgcgagtggtctagcttagcactcaccttcagcatgaatttacgagagctagatgtanataggccttattagaggcttagttatcctcttaagcctagttctataaatactcagaaactcttaattgtagaaacctttgacataattgaaattaagcttgtgcttagagaaagcttagcctcttctatggtttttgactgaaaaccaaattgattcttatcaaggaagctattcctttgtggcaaatcctttttcggcttatcaattctccgtgggtcgnggtggtcgtctattcatctttttcatcttttcta

SEQ ID NO: 54522 - DNA, 408 bp, Glycine max
  unsure (1)..(408): unsure at all n locations
agcttccagctaagatggtaaggaaagatgtttctggagattgttccagcgcagtcccacaagtggatgtgaagtttgatggacattggttccgaagcgaggaacaccagcgccgttntgaggcaattaagggttggtctttcctcaaggagaggtgggtccagttcagggaagaggaatatgccgagttccaggaggaaatcaccaggaggcagtggactcaacttgtggcacccatggctaagtatgacccagaaatagtcatggagttctacgccaatgcatgggccacggagtanggagtcagggacaagcgctcctgggtgcggngccaatggatcccttttgatgaagatgccattngtcacaacctacccttcgacggtggtgcgaaanagccgaaacaat

SEQ ID NO: 54523 - DNA, 463 bp, Glycine max
  unsure (1)..(463): unsure at all n locations
tcgctggtgttcgcagcttgaacatacttacttgtataaattactgngaattggtcactatgaaatttgaactgaaatttttactgaattttttagacatctggccaaaataataataaaaaaagaagaaagctatttggattaaaggaaaaaataataaaaattacacaagttggcagaaaaatcaatatccaggaaaaaaatgtgaaagggaagtgtgtttgttgttttggcttgaaatttgttctataattggtgcctattttataccaatcttagttctgaaatttgaattgaaaattaatgtgaaaacaagttccaaaactagagatttcttgagtcttttttatagtttttttttactctagagccattctaagtttctctttgagtcctagctcgatttatgtgctttcattgcttaattgtgaaaatccttgaaattctcttgtcatgtgtataa

SEQ ID NO: 54524 - DNA, 484 bp, Glycine max
  unsure (1)..(484): unsure at all n locations
agctntngctanacgattattgtcattgatttcgctcatgcatacgcatataccgcgccaaatccaagacgaagatgaatcgaggtaagtggtaaggtggccacgatttgctgtgcaatgtcatttcctgctttcangtacttggggacgggcacgaatggatgctangcccatgatcaacaaatccctgtcgcgcgtccagctctggacaatcgagaagcgctactgngaggcagcctagtatcctttaaattcctacctattattgctgttgtttttttaaagataatgatcatatgcctaacttaccctaggggtttcgagtaagcgaacgccgacccatagagagcgcgtactttcaccaaaaaaaaagaaaaaaaatgcanggttagctcgcctgggcgagcacccgctgcacgaaatggttaaaggagaggggagtgcagttntacccaaagacttctcccctacttaaaatgcacac

SEQ ID NO: 54525 - DNA, 430 bp, Glycine max
  unsure (1)..(430): unsure at all n locations
atccgatcatggaaggacttggtaactgccttcattaggcagtaccagtacaatacggacatggctcccgatcagaaccagcttcagggtatactaagcgagagcatgaatccattaaggagtatgcccaaagatggagagatctcgcagcccaagtcgtaccgcccatgacggagagggagatgatcacaattatggtagatacgttacccacgttctactatgaaaagctgataggctacatgccagctaactttgcagatctcgtcttcgctggagaaaggattgaatccggactacgaaaaggcaagttcgaatatgctgccaatatggtccccaacaacaacagaagagcccantagtgggcgcgaggaaaaaggaaggagacgcccacgcgggtcaccaccgcccaacatggatgaaagcaccc

SEQ ID NO: 54526 - DNA, 439 bp, Glycine max
  unsure (1)..(439): unsure at all n locations
agcttgtataagccatcttctccaagagcttcttgaataataactntatgtgaatcctgagatttaacacagcaatagaaaggatgaaactcanagaaacaattattatctcgagtgaatttactaacactaagtaaatttttggtaagggagggaactagcaataaatttttaagggaaagagtagtgtttagaaaatagggggacctaaacagatttgagcctacggaagagattcttgtacctgtgccattagccattatgatatgttcatttcttgcagctgtactgctctgaaggagattatatggatcattggttgcatggtgtgaagcacctgaatttggaaactaagcctgngaaatgtatcagtaggtggaatttgtgctactggagggtggtgccatcattgggtgggatagtgggttgataaccaaaa

SEQ ID NO: 54527 - DNA, 385 bp, Glycine max
  unsure (1)..(385): unsure at all n locations
gccttaaacctcatcatcatgtctctntataanacaaattggagctctttcttctccattntgcacaagctcaaccaaaggagagatgagtctatttctttcttcttacaagcttcatacaagtgctcttgaggtttcttccataaaagctttggtaaggggctcttaatcttccttatcttcttttccttaccaaattcgtgcaagcttctcatttatggttccaaaatttcattttcatatttagaagcttgagatatcaagaatttgatttccttgctcatctaagaaattttgtgtagcttcatcaaggtaaggggggtttctccaattcttgaaccctaatgttgttgtctgtggaatgaatgtagtttcgatgttcaaa

SEQ ID NO: 54528 - DNA, 382 bp, Glycine max
  unsure (1)..(382): unsure at all n locations
agctntcaactaaatatacaacgttccaatttatttcaaaatgttgtaatcgattacaatgaattggtaatcgattaccagtgtgtttgaacgttgaaattcaaattcaaatgtgaagagtcacatcctttcacaaaaaagctttgtgtaatcgattacactgatttggtaatcgattacacttattaacaaagtgttgagatgtttaagcaggcaatggcaaccaaaagtaacagcaattgcagaatcaagagatctcactaatatgtctcttgccactctctttggaaaacttcaagaacatgaaatggaacttatgagactccatcaacatgaagagaatgatataaagagaaaaggaataacactcagagcctcatca

SEQ ID NO: 54529 - DNA, 321 bp, Glycine max
ctacccacgtgagcccgctaagaggtaagtggtgaatctatcacaattgaagttagaatgaacatttgtatggatctttagaggatcaaatttaggtttatttttggatgtttattgtattgtaatatttcctatatgaatatgtgaaattgctgaggggtgttactcctcatgttgttagaagcattcttgtataatttgtttgtgttttggatcagatttactagattatcatgataaattgttatattgggatcatgaaattatgattgacattcttataagtaataaattgaatatgtgatgaattgtgaagataca

SEQ ID NO: 54530 - DNA, 352 bp, Glycine max
  unsure (1)..(352): unsure at all n locations
gacctctaagcaccgctgctgcagctagggaggagatggttattacacatattttgaatggnggcaagggtttgaattatgcctctacattgatggttacataattccttgtaggaattgagccttggacttttattcagaaggtaggggatgttgaaggtaaaatgattatacatggtgaatatgtttcatctttattgtaggtatgatgcatccttgtgtgcgtagaaatgtataaaatgatcagtattttatgatattaggtgtggntctgacacactataatagtatcttagctcacttccttaaataaagcctaggtccttcattagcaaagcacgcctgttggaac

SEQ ID NO: 54531 - DNA, 371 bp, Glycine max
ctaagcttagggatttcatattccgcctgacaatcaatatattatgttatattgtgagtgaatgaataatttatactattgaagacaatcaacgaagaaaactcaaatacccgaatatcctcccatatcaaatacttctgagcagtagggacttgcttccacgtgtcatatgtcacgtcgaccttatcacgagcgacaatccccaaatatgttcttaatttcttcttgtggggaccgtcggccttgccggtagcatgatcgacgttgaccacatgtctttctgccccaagtggtatagtgaccaatgatcgtagccgtgtcgctttgcgtgtccgcttcaacgtaaatggagacgctgatgtgtctaaatg

SEQ ID NO: 54532 - DNA, 405 bp, Glycine max
  unsure (1)..(405): unsure at all n locations
taagcttgacccttacaagacacaccatgtctaacaaactgcttatccaacaactactctaactgtttcttaagctcagttaactctataggagacatcctataaggggctatgaatatgggtccatcaccgggtactaactctatagaaaactctatctctctctcggatnggagaccagatatatcctcagggaacttttcaggagactctctcacaacagggaggtcacacatggaaacctgtctctatatctaggttagacaagatcatgtacactcgagcatcttcttttaaagatgtcataacttggttggcagagataaacatcatattcttactcactccagaatcatcagacaccatagttttatcacaacagttaacaagacatggttggaagat

SEQ ID NO: 54533 - DNA, 301 bp, Glycine max
  unsure (1)..(301): unsure at all n locations
ccttattctcttggaacaacctagaggatgtatcctccactagaactaatccacgagagatgtgtcctctcttgttctcagtcacaacaacccaagntgatgtaccctctacttgtaccacataagatgtatcctctaatgtgataagaacaagatctcatgcggttagtccttctcaactttgtgaaaggggaaacaaaagaattctcacgcggttagtcctttaaaatcttttgtgtatgggaaagggaagaatcaaaagaattctcatactgtgtcattttgaattctatgacaaggg

SEQ ID NO: 54534 - DNA, 431 bp, Glycine max
  unsure (1)..(431): unsure at all n locations
agcttctagattgttgtaccatatgatcgctaccccagccaagctatcttggaagaagtgcatcaacaacttctcatccctagaatgcgaccccatcttgcgacaatacattttgagatggttcttagggcaagttgtccccttgtacctatcgaaatcangtaccttgaatttcggggggatgatgacatccggtactaagcaaagatcagccatgtctgtgaacagatagtcgccaaagccttcaacaaccctcaatctctcttcgatgagatcgagcttcctcttttcttctgttgtcgggggtgtcccttctgcggaaaagaatatcggttgtgctgggggggttcgaggttctcccatganggtgggctgaggtagtgcattaggcgctggcccctcggtggggaacggngagtgggaatcgatgt

SEQ ID NO: 54535 - DNA, 427 bp, Glycine max
gaaagctgagggagttatttatagacgggggagcacgaaattgaaggaagaaaaagggagagaagttgaactttgaattgtgtctcacaagactctcattcatcaaagttacaacaagtgttacacatgcttctatttatagactaggtagcttccttgagaagctttcttgagaaaactttcttgagaagcttctatgagaaaacttccttgagaagctagagcttagctacacacacccctctcataactaagctcacctccttgagaaacttccttaagaagattcctaaagaagctagagcttagctacacatacctctctaatagctaagctcacctgcttgagatgagaagctagagcttagctatacacaccctatattagctagctcacccccatgacaaaaaacatgaaaatacaaaa

SEQ ID NO: 54536 - DNA, 447 bp, Glycine max
agctctctactagttttgatatagcttcttcggccctgtcaaccttctcctcgatcatgtctatatatacaccttgccgcagctcaaggaaacgacatctcaggcttcggtccacacaagtctctcatctcattccctcgttctttgcatcttgctcttgttgatcattgtttgggttccaacccatatcacttcccacactgccgtcatcaattacgcatggatcatgagataaaagagccaccacctctctcatccacactctgttctcaaccctctcaattcagtcaaaacactcaagaaacttatccccgttacttccaacaagacttgaacgaaagaaagaaaatatgcacgtgcatcactgtgcggccagaaggatctactggtaccggagtgtccctttaaatcctctaataacgattcccaaaatgccacagcatatgg

SEQ ID NO: 54537 - DNA, 462 bp, Glycine max
taagcttcaggcttgtgattggttttatacctaatatgccctctcacccaacagccatggcatggctaattcacaagctactctaccttgtgctaaaatttaacttctcatatagaagaatatgcatgttgaatcaaactcttgatcacttggtcatagaggctctagcctctaataccatgttaagaatcaactcttccaaaagcctaaccaatcaagtgaaagcttataatggtttaatatctaatgaatcaaatcgcaacttaaacatgcttctagtatagaaacttaaatctatgttattgaaccataattcatatgttttggaagaccaattatatcacaaacaaacatagtactccatctctctctctaactcactcaatcacacacatgttcacacaaacacacacacacacacacatttatagaacatggacaacactacctgattaagtgagt

SEQ ID NO: 54538 - DNA, 530 bp, Glycine max
  unsure (1)..(530): unsure at all n locations
atctctagagcacctgcggcatgcaagcttaacatcagaccacttccagggtgcttgaactactttacatggtctngatggggcctatgcaagttgaaagccttggaggaaagaggtatgcctatgttgttgtggatgatttctccagatntacctgngtcaactttatcagagagaaatcagacacctttgaagtattcaaggaggtgagtctaagacttcaaagagaaaaagactgtgtcatcaagagaatcangagtgaccatggcagagagtttgaaaacagcaagtttactgaattctgcacatctgaaggcatcactcatgagttctctgcagccattacaccacaacaaaatggcatagttgaaaggaaaaacaggactttgcaagaagctgctatggtcatgcttcatgccaaagaacttccctataatctctgggctgaagccatgaacacagcatgctacattcacaacagagtcacacttagaagagggacttcaaccacactgtatgaaatctggaaa

SEQ ID NO: 54539 - DNA, 384 bp, Glycine max
  unsure (1)..(384): unsure at all n locations
tttcgagcgtctcgatatattatgtccgttaatcggatatcctatgataagttatgaccatntgaatttctcgagtgcttccgttgttcaatttcgagcgtctcgatattttatgtcctcgaatcagacatcggagtgaaatgttatgagcatttcaatttgtcgagagcttccgttgttcaatttcgagcgtctcgatatattatgtctccgagtcggtcttcattgtgaaaagttatgaccatttgaatttctggacagcttttgttgttcaactttgagcgtctcgatatattatgtccgcgaatcagacatccgtgtgaatagttatgaccattcgaatttctcgagtgcttccattgttcaatttcgagcgtctcgata

SEQ ID NO: 54540 - DNA, 427 bp, Glycine max
  unsure (1)..(427): unsure at all n locations
agcttagcgcanatccttgtggcagaccttatgcttagcgttctcttgccagctaagccaattatgcagaagctgaatttctgcaacttccgctaagcgacctgatgcaatcctaccccgcaagggcatatggtagaagactccaagtagattgggctagagatccaagggaaggcccgaaggttctcatgagccctanggtagatttcgagcccatgggctaagtatgagcccacttatctttgtaaatattagaataggtttttcctttgtctgggccttgtattttggccattctattgagtagtcttcgtagtaaggaccttttttttgtatnttcatgntttntgtcatgggtgagcttagctattatagggggtgtgtagctaagctctagcttctcaactcaaggaggtaagcttagcta

SEQ ID NO: 54541 - DNA, 483 bp, Glycine max
  unsure (1)..(483): unsure at all n locations
ttgttgatgactaatatctgttggcacactcggttgtccttcttttggtattattnttccacccaactacattntctccatctattagactcgaacttaagaccttacttaaggaaactgaggtcactatcactcagactaacgactcattggcaatgtaattaacaaaatttattgtttattaaagtctaattntaattttttggtagtgtatatattcttacaccatcaatcaaatagaaagtattttaaatacgaattttaaagtaatataaaatacaattatcctaccatatgtggttatccataattggattagaatgtattttctttttacataatgttactcaacaataataactattggtaaacttaccctcttgaataactcttaacatgtntaaatttattaatntaaatattaactatatgtttaattaactatgaatattaangttatatannatttgatgctcacaatca

SEQ ID NO: 54542 - DNA, 410 bp, Glycine max
  unsure (1)..(410): unsure at all n locations
agctnggttagtagggggcctgatgaccattctaggggcgacgggcactccgtagaactgatagaggctcgtaatcagagctggaaaccccaggaccctgttggactcctccgggtccactgggtgtcttgcgggcgtgatccctgcaaataataaatgacatcaaaaatcaattgagcgacgtgcatacttacctatgttacgatggcgtgaccttgctggggggacgggcacccggtaggactggcagaggcccataaccagagctggaaaccccagggccctgttggacttctctgggtccactgggtgtcttgtgggcgcgatccatgtaaatagtggatgacatcagaaatcaatngagccacgtgtatacttacctatgtcatgacaacacagaccagctgata

SEQ ID NO: 54543 - DNA, 400 bp, Glycine max
gtcttgccagtgaaaggatcgatgtgggtccaaaaagaggaaaagttgatcatcctactaggacgactgagaaaactggggcaaatgaagagggtgagaaagagggagaaacccatgctgtgactgccattcctatacggccaagtttcccaccaacccaacaatgtcattactcagccaataacaaacctcctccttacccaccaaccagttatccataaaggccatccctaaatcaaccacaaagtctgtctaccgcacttccaatgacgaacaccacctttagcaaaaccaaaaacaccaaccaaaaatgcattttgcggcgagaaagcctgtagaattcaccccaattccagtgtcctatgctgacttgctcccatatctacttgataattcaatg

SEQ ID NO: 54544 - DNA, 472 bp, Glycine max
  unsure (1)..(472): unsure at all n locations
agctnnggagagtttcttccattgatagagttcacttatattaacagttttcactctaccattggcatgactccctatgaagctctgtatggtagaaggtgtaggacacccctatgttggttagagcccggagaaggcctcaccttatgaccagaagtggtacagcataccactaagaaagttaagttaatttaggaaaggatgagaactgctcagagtaggcagaaaagttatcatgataagaggaagaaagatctggaattcgaggttggtgatcatgtattcttgagagtcactccatggactgtggttggtcgagcattgaaatcccgaaaactcacacctcgcttaattggtcctttccaaattcttaagagagttggccctgtggcataccaaatagcactacccccgtctctttctaatcttcacaatgcctttcatgtgtctcaactccgtaagtatatccatg

SEQ ID NO: 54545 - DNA, 425 bp, Glycine max
tcttagtctcacctgatgaattcgtggctacttcatgcactcctctaatgacaatagcatcacttctggcactaaattgctgggagtttgaagccatcttctcaattaaatttctggcttcagcaagggtcatgtctccaagggctccaccactagcagcatctatcatacttatttccatgttgctgagtccttcataaaaatattggagaagaagctgctttgaaatctggtggtgagggcaactggcacataatttcttaaatctatcccagtattcatataggctctctccactgagttgtttaatacttgaaatatcctttctgatggtcgtggtcctggaagcaggaaattttttttcctaagaatactctcttgaggtcatcccagctcgtgatggaccgtggagcaaggtaataaaa

SEQ ID NO: 54546 - DNA, 487 bp, Glycine max
catgcaagcttctcgctacattcccgtgaactactctcgctttcaatttgtcttcttcctttccacaagctttcagaatgctaggaagagtcatgaaatccaccctcatcatcccattcagacttagcatctccctgaaacaacgcattgcatccgaatacaaatcagcccttccaaaccccaagatcatcaaattccacgtcacgaatccctagtttccaacaagtctccttcctttgggcgtggcattgcaaagctgaggaatgtgttatgcaacttcgaagcaagaatgacaaccttttcctagtttccaatgaggtgcaattcatggtttaattgtataaactctacaaaaacacaaatacaaagataatgactacacggagggctgttggaatgaaatcctgcataataaagtcttgggattcaatattcactctcgcggtgggttggttatacgaggggaataaaaaataattatcataat

SEQ ID NO: 54547 - DNA, 416 bp, Glycine max
acggtcctgtgtactcacaaaatcaaccctaatgtattgagctgggtgtacattttaagaagttgaatggtgaaaccgaagggatgagacctgtgggggtagaataagtgcaaatgtgggtggtggtggtggatggctgtgtggataggctacaacgaacaaaggtggggagcagccataggcggtatgtcggataaatttgttaggaactaggctatgctaaactacactaattaaacaggtgttggataattcttctctgttttatttccattggcagtatcactgtttatagatacattttgataaatgtctatggaattaacagaattgaaataacaaaatctgcataattggttataaccgaattatgctatttgtccagaattgggtcgataggcaatggaatcttctgc

SEQ ID NO: 54548 - DNA, 490 bp, Glycine max
  unsure (1)..(490): unsure at all n locations
agcttcaagaaaaagatggtctcagcanattccttgtttccagaagggaattctataaatagacctccaatctttaatggagagggttaccactactggaaaacccgaatgcaaatttttatcgaggcaatagatctaaatatctgggaagccattgaaatagggccttatatacccaccacagtagaaagagtttcaatagatggtagttcatcaagtgaaagcataaccatagaaaaacctaaagatagatggtctgaagaggatagaaaacgtgtacaatacaacctaaaagccaaaaacataataacatctgccctaggaatggatgaatatttcagagtttcaaattgcaagagtgctaaggaaatgtgggacactcttcgattaacacatgaagggaactacaatgttaaaagatctanngataatgcactaactcatgagtatgaattatttagaatgaatacccaatgaaatattcagagta

SEQ ID NO: 54549 - DNA, 807 bp, Glycine max
  unsure (1)..(807): unsure at all n locations
atggggnaataatgatgnannataactggatgtcccattngtttagatanccccgttcgnatantangaccgtngatcancntcctatgatatanctttanacgcctntntcacncncncattangatatcaccacccaggantnngtctctctttgtatacncagnaaatttatctctntnnttatngaacatggagtngcgtntnntctcttaccacanncacatatagaaacanagnggntncgtagagtgtaagtaatatatacntttatttacanagtcnnntcatanggtnntcatatttcatananaataatacatttacctctnntcatgcnttcanananaatgtgngtggccacagggggaagtaatatacatanntcattgccaccanatggggtaangcctnnttnntaagcttananngtgngctttattctnntcannatcanaanacaantgngcncctnntcanttcantantatngagannttntcagcngccantntgcantntcncatttacnttcatgaagaatntcatttgagannaaaacnncattcacnnttaactncttatgtcngtngtctctttcacannnattaaangaatcaacacnnttctcacnncgggttgggcggtataaatgccgtnnttgttcacannatcaaccttgacannaagcaactatacattnntcggtcantgatcctaattctcatgttcatttctcttgtaatgacttgcttgctcattcaaggcatatgatctacgtatttcaattcactcacatcatataan

SEQ ID NO: 54550 - DNA, 447 bp, Glycine max
  unsure (1)..(447): unsure at all n locations
agctntattaaatagtacttattgatctattttgtaatattatatgagaatcgaacaagtattaaatatttgttcttcatgtaatgttctctttatttcaaaatatttattattttaaacaaccaaaataatactaatttttaaagaaattttatttgtgaatattttacttttagtattttcttaatcgccactcgttaacaaagtttatattatattataatgaatctttagtggttggtataactattaacaaatgcgaagtgtgacacgacagatttccgttgactgtgttgagttcactttcttcgattntctcttgacagtatgatgctattatgaaactgatatagacagaaaaaatatattatgatcaatattatagaaatacacaaatatgttatttatattattataattcaaagacgaggggtaagaattatttat

SEQ ID NO: 54551 - DNA, 292 bp, Glycine max
gaatagcagcactatctccagcatcagcataatgtccatgaattacatatggccagacaggttggcccccaccaacttgttcactcaatacttttgacatattgagaatgtgagctaatgctccatccacaaattcttgaatataaggccaaagaagttctttccggaggtatttattgcgtggaccgaagggtattcttatgatatatgcaccactgctctccccaaggttatcatcatcatcatcacccggagttagcatttctgtaggctctccatagctccagtcaat

SEQ ID NO: 54552 - DNA, 462 bp, Glycine max
  unsure (1)..(462): unsure at all n locations
ggctgcagcttatgatgtgaaccttgctattttttatgccaaaagcccaagggattgattcaagaatgattcaagacttcaagatcaagcatcaagaatccaatccaagattcaagattctgtggaagcaatgccttccaagattattttgatgatgccaaagaatcaagagtcaaacaagtttcaagaatcaagattcaagaataatgaagatcaagattcgagattcaagattcaagtaaagaatcaagactcataattcataaatcaagagaagaatcaatcaagataagtattaaaagagtttttcaaaatattgaatagcacacaattttttcaaaaagaaaaatattctaccaaagatntntactctcccgtaatcgattaccagaagacagtaattgattactagtagcccacattcttttcaaactgattacaaagtgtaatcattaccatatc

SEQ ID NO: 54553 - DNA, 268 bp, Glycine max
gagcctatgtgtccctttctttggtttgaagctcattacaagccttacgtgaaaaaccatgatatcaccttaaccttatggaattttggagctctggaattgttttgggaataaatgaggggggtatgtttcattgtaagatattgatttctggccatgcttaatgtattattttggccatgcttgatgtatatatatatagcctagatctttctttaatcttcaattttgtactgttcaataaaaaaaaattagttgctgcaaattc

SEQ ID NO: 54554 - DNA, 409 bp, Glycine max
  unsure (1)..(409): unsure at all n locations
agcttataattacatccaattatagctttgttctgaaatcataataaggtgctcgttccttatcatctttttgaaatcttgttcttataatcatactactccgaaagaatcatatagttgcattcattcagaacacttaaaaataggtttaatatcataggattttgttgagtgttttgttgaggccaacgaggacacagacattactacagttgatattgatttgtgtgcatgatccacatcttttcttgggattgtgacgttactccagttaatattgatttgttgggggaataatcttggaacttttcctcacacttagaacgtatctatnaaaaggtatcttaggcctttccttgggccttctaacagaaaagaagttaatattctacatattcattgattcatt

SEQ ID NO: 54555 - DNA, 212 bp, Glycine max
ttaccatatggagcaaatgggtgtgagaatgggggaatgaaattcacctcctattctaggcttaaaggcgacatgttgtgatgcacatagttggtcggtgtatttttgctgggaggaaagaaaagacatattacggaggatacaataccgttacacatccacgacataaagttaattataattgtcatgaacttaacaaacactcgaattga

SEQ ID NO: 54556 - DNA, 448 bp, Glycine max
  unsure (1)..(448): unsure at all n locations
agctngagagagatatagaagctgtagtattcttacgtaaaagaccaaaagcactgctcactntattactgcatttatggtgcatttatattgtcgcagaggagagagaaaagctttaggtagttttatcagttataacagaagccaattcttaacagcttttcttattttctaactatctaacaaacttacaactaaaattctaactgctaagacatatatttaaaaggacaagagttataagatttgtttagtagttaagtgaaaaagagagatgttgtggatttgaattcctctctctaacanaaattagtaaattagcaactaatatttatggggaaaaaaatatttatatggaattggttttgaagaagtatcatctcttgtgacatgtccatattaagagcatgcctcgcaatactctctgtntagttaatttggactatca

SEQ ID NO: 54557 - DNA, 477 bp, Glycine max
  unsure (1)..(477): unsure at all n locations
agcttgaataaaggaaatggcatcatgcattaaaatgtgaaacaacaccacaacataccgatatcacctttcacttacctttgtcttgattngggtgtgacattggtcactactcaaaatgaaccttcatttatcccccaatttgcaagatgacaagatgcaaaatgcatgcatgcttatgattaggtagtttaagtgcaacaaataaacaattgttattatgctcaattttacttaaacgcttatggcaccccattgatggagccaaatggctccggattcaagatcaagagtgtttactctaaagatgtaaaaagacacaacacaagaagttgaaatgcaaatcatcaatccaatgtttattaatgttgcgatcatggtttacaaaggaattaaagacttttgagattccaatgagtctttggagaacaatcatgcattgaccctcgagctgccccagtatttaacataatatcg

SEQ ID NO: 54558 - DNA, 420 bp, Glycine max
  unsure (1)..(420): unsure at all n locations
cttgcggatatggtcttctctgacgaaaggatcaatgtgggtcntgaaagaggcaaatttaatcatcctacttggatgaatgagaaacctgaggcaaatggagagggcgagaatgaaggagaaacccatgctgtgactgtcgttcctacatggaaactcccccaccagctcaacaacatcattagttagccaatatcagcccttctcattatccaccacccagtcatccacaaaggccatcccaaaatcaaccacaaagcctgtctaccgcaccttcaatcatgaacaccacattcagcacaaaccgaaacacaaaccaaaagggaattttgcagcaaaaagcctgtaggattcacaacaaattttggtgtcatatgctaacttgctcccatatctactcgataattcaatggttgctat

SEQ ID NO: 54559 - DNA, 414 bp, Glycine max
  unsure (1)..(414): unsure at all n locations
agctnttaagggcagaggaccttanantatcttaaggtgtgtatatggtgcccactgagagtgagaacgcgtagccctctaatggtgagggcgtgcagccctttgaaggcgatggcgtgtagcccactgaaggtaaggacatgtagtcctctaaaggcaaggacgtgtagtcctctaaaggtgaggacatatagtcctcggaaggtgagggcgaggacatgttgtcctctgaaggtgagggcgtgtagccctatgaaggcgagggtgtgtagccctatgaaggcgagggcgcgtagccctctgaagataaggacgtatagtcctcggaaccgagggcgtgtagccctctaaaggtgaggacatgtagtcctttgaagatgaggacatgtagtcctcggaaggtgagggcgtgta

SEQ ID NO: 54560 - DNA, 317 bp, Glycine max
  unsure (1)..(317): unsure at all n locations
ccctctccatataaatttcttcaatatcatcatccgaatagacatttccaatgacatctattgcttcctcanagttactaatgtcttcactttcataatcttcattgtcttctccattctcatccactcgctcatattcacttcgagtgaataggcaantnannccttgaaaatgtacccatttttcatattattccctaacttaatgttaaattcaaaatactctctatctttgcataagtgttgcaaaataatccttccgttaaattttaaagtaatgctgttagtgagatcaatattagtgccacatggactat

SEQ ID NO: 54561 - DNA, 459 bp, Glycine max
  unsure (1)..(459): unsure at all n locations
agcttgtagaatggctagacataatacatgtctgggtttgtttnggctcaaggataaaagggatgccccacattatttccatgacacaaatgcaaaaatgatgatttnggaaatttacgcaaaactggtcatgcatgcacctatgcggacactcaagtgtcaaatttttatggtcatgtgatgctagggctcangattcatttcctctatttttagtcaacccaatgtttccaaaatatgttcttttatccatttgtgcattcatccgagtccattttgggcgtccgggaaaattntcacagcattcacccttcaggtgtatacacattntttcaaaaactagttatgatcagtgaattnttctttaaagaanagttggaagtcatctcttttcgaaagcatgtgtggttttcagctagaacaactatttnttctttttctctcnttttcccctttttt

SEQ ID NO: 54562 - DNA, 438 bp, Glycine max
  unsure (1)..(438): unsure at all n locations
accttctcgctaagccaatntgttggcttagcgtgcatccgctaagcgcaacactcctgggctaagcacaaggaagaatccagaagaagatgagttgtacaggttcgctaagtgcaccgcttcatctctctaagcgcaccgcttcagttcatccgctaagtgagaaaggcgcgctaagccaaaaatcactaacgtgcgctaagcggtccatacgtgcgctaagcgcacgagcacgaacaaggccacctatttaagcctggaatcaaattttgtgaagggagtttagactgggattcagagctttgcaagtctagggtttctagagagagaaaggtccaagttccaaagagttttgagagatnttgtgtgtgaagatttgcagagaccagagctttgagcaagagctggtttgagagcttgagatgagtttgtgagtga

SEQ ID NO: 54563 - DNA, 473 bp, Glycine max
  unsure (1)..(473): unsure at all n locations
agcttccatcagcggaagacanaggagaagttgtgagaatattctccattcactangtcccctccaccttggaaaggatttgacctctaatccagaggttcttcatactctaggctcctttcctcgacacctgtaaaaagaataaaaacatatgtattactggtgttgggcatgttagaggaaggtaaggtctgaaaatccctatcatggacatcttcccgtgagggaacatggttcctcaccaactcaatgagtggtgctaaatgtatagaaaaatatgggacaaatcttttgataaagtttgttaagttatggaagccccagaatccccttatacttggtggagtgggccaatcaggaatgacctttattctcttaaggttcatcggaactccttgatcactattgtaaaatataaagaaagtaatgcaataacacttacctttctttatatatcttattgattattccta

SEQ ID NO: 54564 - DNA, 484 bp, Glycine max
  unsure (1)..(484): unsure at all n locations
gcttttatccaggctcatcttggtggtgaagctccttcttctatggcttattccttaatggatggcgcctcctctcacctattttcctttgtcttccgctgcatctccatggtggaaaatcaccattaaaggaccccattgaagctctaagatccagcctccatagaagctccacaagcaagcttccatcaagccttgaaaacaaaaggtaaaagatactatggttgaaactagccaaataaacactaaaagaggtgtgaaagataaggtaaaaaaactaattggtaaaatgcaagctatctaggcggttttaccttatctactagaatggccaaaatacaaggcctagacgaaggagaaacctattctaatatttacaaagataagcgagctcatacttagcccatgggctcgaaatctaccctaaggctcatgagaaccctanggcctntccttggatctctagcccaatctacttggagtc

SEQ ID NO: 54565 - DNA, 469 bp, Glycine max
  unsure (1)..(469): unsure at all n locations
agctntctccgcgaggtacgtaagtgaactttttgttctttgtgggttgttgnagctgcgcgcacgatggtataagtatgctaagttttagtgggtgttcatgttttatagttttttttatgctaagttgctacttttattgatttgtgttttctttttttctatgtgcatcccatacccagcacaaggccacataaacccaatgctgaagctagcaaaactgttgatttgagttacacttagatgctcctcattctcaataaactacctaaggtactcttctcaatggcatccatgagtaactgatgacacatcactctgcacctttatttcattntgatattggcatgtgaatcttaatggtttacttatccacagctatagatatctgttaaactcaacaaaaacagatttgtttcttttgtgttgaacattgaagtctacatcttaccttctgtactttagttct

SEQ ID NO: 54566 - DNA, 424 bp, Glycine max
  unsure (1)..(424): unsure at all n locations
gcttagctctcagcctanactcccctctctaaatctgattttatgcttaaatatgttcccttgttcatgcctgtgcgcttagcgcaactttgatccgcttagcgcacattagtgaatnttagcttagcgtgtgctcttctcactcagcggatggactgaagcggtgcgcttagcgagatgaagcggtgtgctcagtgaacctgtagcgctcatcttcttccagattgttcctcgcgcttagccaatgagtgttgcgcttagcagatgctcgctaagccagcagattggcttagcgagaaggtgaaaaacaacacttttcagagtcgcctaattaacctgaaattgagagaaaatgattattaaacacacaaaacacaaatgctaagtatttattacctatctttaactaagagaacttataaca

SEQ ID NO: 54567 - DNA, 465 bp, Glycine max
  unsure (1)..(465): unsure at all n locations
ttaagcaccgcagctgcagcttttgcgtaccgtcttgggctattataatcccaaaacaaatccctcttattactagctattttgaattctttagttcctgaatgtacaaccttcaaattgttgctcgttcccctctttgttttctgcacaaaagaaaatcaatatcaaagaaatcatggatgaagtcctaaggatgccatgtacatgtgtatttctgaagatatagtatntatattccatcaagcatacattgactggtgattacatgtaatagactttntataacatggttgccccaaatcacaattaaaaagcacaactaccaatctttcggagtcctttggttaatatgtcttgtctacttctgtggtggcgttttgttaataatattatactttngccttccaaaaaaacttatggctgatcctcttttcattaatcctattatggatgttataggataaa

SEQ ID NO: 54568 - DNA, 389 bp, Glycine max
  unsure (1)..(389): unsure at all n locations
gcactgtcatggatattctcatggcaatatcgttacttcatgactgataagacaaaccaatatccatcactacaaagacacgcatttgtaaaatggtggacacaatntgactcatccaaagcggatccagaacaagtaaaactatggttccaatcccatccagaagtcctcaaagcagctgatccagagacttctgtgtttttgaaccaaaagtctcatctggcagcatttttagcaggatcgacatcaaaggaggtcttagctaaaaatctgaaggaagttctacaaatgttacaacaggaagaagaagcttcatcctcaaagaaggaagaaacaagttctgctgaagaagacgaagaagatcccttttaccaaaacgaagatgattg

SEQ ID NO: 54569 - DNA, 426 bp, Glycine max
  unsure (1)..(426): unsure at all n locations
agctnggtggagtncaaagatattcgtagattgttctggctangatataagcctacacgcaccgacatgaagagaaacaccctataaaggagaggcagaagtgtgggccagcagcaaggattgcaagtaaaaggaactcccttatgtcacatcaacaagagttttgtcagcgcaggctggatgtgtgaggggtgggttgccatgatccatgatgaagtccctcaagagcaatcaaactgggtgcggccatgccctcctatgttcgagttgggaaattggcaaattatcaaacaacccaaaattgttgtggcacacataatgtaatttggtaatccaaaccctatagctgagcctcggcttggcttttgctattagatatatataaaatataatcgtgcttcattgtttcttgcactttcatcccta

SEQ ID NO: 54570 - DNA, 426 bp, Glycine max
ctaggcttacgcatatttagtaatgacacactttcctagaatttttataacttaatgccattaacctatggaattaaaacaaactaaatgactgagtgtaactgaaattgttggcaaccaaaagtcacccccaacagccaacaagtcagccaccatttggtctcccaaaaggctgatgcctaggttgccaattgggcccttattacaacttgaactaaagcccttttagttgattaacccaaaacatatttttagtcagccaactttacaaggattgggccattatttagacaaactaaacactctaaaattgaaataaagtggtgtcatttagtcctccatttgggccatgatacaactcacaaccttggacttttctccttgaaacttgtgcttgtattcaaatagtatggacagcacttgttg

SEQ ID NO: 54571 - DNA, 480 bp, Glycine max
  unsure (1)..(480): unsure at all n locations
ttaagcaccgcagctgcagcttacagaagatactcttacgtctatcatagtagaattcanactcacgtcttttgatatatgaaatagaaaaaagttaagtagttatttgaaatgaatgtggaaagaagtaattctttgaacatatgaaatagacaaatcattctaatatattatttaaaacaagaagaatagcctctnttaaccaacgtgctgcatgcacctgataacaagccccgcatcctctgccgtcaaggaaaagagaaggacccccagccgatgccattatagagagtggagggttcctcacactgtcaatgtatccacaagcaccctctacacaanatcacataaagaaaagcaatcgttcaatttatctttggccaaagctntttcataaaaataaaaataaaaagttaagtaaaaagggcgtgatgtcgtaatattgaanaataatattntacatgatatatactcaccatc

SEQ ID NO: 54572 - DNA, 435 bp, Glycine max
  unsure (1)..(435): unsure at all n locations
acgcttcttgatggcaacacaatgaccatctctaaggacagngcttaattcactccaaatcctccacggcctatttcactgtctttgttaagaatattatgagcaccatcaacaaattcagcatcgccggaaaacatcacaagcttgccatagtttggatcattngcgggtgaaccgctatagtcctcaccaccagagaacacaaatggagcagcagaagataacattgaagaccttgcatggatatttaggacagtaacaaccaccacaccaatgacaataaaaatagcagcaccaatggcaataatgacagagatgctgagcatcatcttatgatgattgttttgtaaggaagagccagagttggagtaagaagagatggggtttaggacaatanggcttggatgaacagaagggcaagagtgattaacaact

SEQ ID NO: 54573 - DNA, 200 bp, Glycine max
ccgcacccgtatcacaataaacattatataatgcaactatctatgaagtgatcctatgtcgtctcccaacgagtaatggtcaaccaaatgttcataacagattgtaataaaacaataacgaattgtgggggggggatgttagttctcattaatcccattctgtaaatattctatattatattttaagtataattacattt

SEQ ID NO: 54574 - DNA, 563 bp, Glycine max
  unsure (1)..(563): unsure at all n locations
cattaagatatcgagtatagaaaaggaanttcnttaannnatntannnnaagnnaaggataacgagacatgtgagcccactgataaccccnancnnnaaannnnccnnngaaaannngacggagncaaacactgtgtgagaaactcaaaacaagagccgaggaaacagacaacggaggaggtgcacgcatacacgcgccaccccacgaagcaaaaagcaaagagcaccaatcgaagactacaagcaacaaagctcaggacacgacgcacgtacaacaataagcacggagaaagaaccaagccatctacctacgagaacgacctcactacgaaacgcaacacaaatgagacaacaacacacggggaaagcaatcgagaagcccagggacaaagaagacacatgcccaaaagagtgagccaaagcacatcaacatagaaaacacactggtaatatgaggaccgtgcgaaaaaccaaagagacatcacccaaaatgatgccaaaaggtgacccaaaagagaaaacacacctgccgacacaaggtagaagccagacacgcacggacc

SEQ ID NO: 54575 - DNA, 443 bp, Glycine max
  unsure (1)..(443): unsure at all n locations
aagcacctgagctgcagcttcataaacatgaatatggttgttatganattctggcaacaacatcctgagtaatgaatgtctgagtatagcattctaaacaatagcattctgagtattgcaacaacataacataaattgagtttttaaaaataatagtatttgagaaatgctttgacttaagtaatgatgttctgaataagagcaaatagaagtgatcagaatgtcacaaaagggggggggttgaattgtgactttgccaacttttgtaaaactttaacctttctgaacttttactaaagattaccatggtgttcaaaaagtcatgacacaaaggttcaagcacttaanaagtttgactttctaagtgattagtcataacactcattattaaatgtttgatatgattatacgaacctaattgtaatgttgcatttgctcatgtt

SEQ ID NO: 54576 - DNA, 476 bp, Glycine max
  unsure (1)..(476): unsure at all n locations
ctaagcttgagaacatgtacccttggcattataaaacattcttcttgatccttngnctacaatctcctcctttttgatgatgacaatccctgaaatcaagacaagctatatacaagatgatagcacgttcacacaacccttactccccctatcttttggcatgtatgcctaactctacttaatgataaatttctaattgatttctaacccaagttctctcccaagttctctccccctttggcaacataaaaaagaactaagcaacacaattaaaatccaaacagagccaaacaatcaaccaaaataaatccatacattgtcataaccaatccaaaacaaagtcgagagatataataatacttaataatagtgcaagattacgataactagagcaacaaaaagccaaatacacggcgataaaccaaagtactaataatacttaatcactaataatacttagtcataatacttaagct

SEQ ID NO: 54577 - DNA, 474 bp, Glycine max
  unsure (1)..(474): unsure at all n locations
caagctttctcactaagatgtctgtgcctgtatgtcttttctgatggcagtggtcctagatgcaaggaagaatttctccatgaacaccctcttaaggtcattccagctganaatggacctaggagcaaggtagtatagccaatcttttgtcactccctctagagaatgaggaaaatcctttagaaagatatgatcttcctggacattagggggcttcatggtggaacaaaaaatatggaactccttaagatgcttataaggatcttcacctgcaagaccacgaaacttgggcagcaaatgtattagtccagtcttgagaacatatggaacaccctcatcaggatattgaatgcacaagctntcataagtganatcaagtgcatccatctccctaagagtcccttcacgaagtggaggttgagccatcgtctcagtatgaaaaatagtagcggaatggtcaaaatcacaatattc

SEQ ID NO: 54578 - DNA, 482 bp, Glycine max
  unsure (1)..(482): unsure at all n locations
agcttggaagctttgcttccacttattgtgtgtctcaacccacacattagcataattctatttatgtttctgcaattgttcatagtaaaatagaatcatnaatttgttatacagntgtataatggaatcttgatttcattttgtatatttgtttagggggaaaattgtatttaaattgcacaattgatttataaactaggaattcacttattgcttttgactgtttgtagagtatatgtaatagaaagatggaatacttttatttctgatgaatttacaatgtcaagtggttcaaaaaatatgattgaggaaagcagggaatgtttttactatccaatacaagccaatgataatgatttgggacattagattgaatgaaatgataatggtttggacattaacctccaacatatattttctgactaatccatacatttcatgactaatganggatatngantaaatatctatttgatatatat

SEQ ID NO: 54579 - DNA, 520 bp, Glycine max
  unsure (1)..(520): unsure at all n locations
tgaatgagaanagtgaaccntatgatacactgagaacttgannaacncaaattngaaaanaacccnagngaagagctttggtgatagccgaacttgctttgatttttacnngnaaccggaagagagaagtggacaccgggaaaaaggcaagaactgcctgaagacacgatgggtgagacgaaccaatataaatctttgcgtcctatgtgtctattcttttgaatcgaattgtgtattgaaaactttatatgtcttgaaaattctattgacattgtctagaagagtttggcgaaaatatgatatctgtcttaataaagtctctcttgagacaataatttggttctctatgagaaagttgtaaaaattgttttacaaccacattacattatacgtctttatgagatttacctatacggattggaatcaagcttcacctctaaggttgatcccctgaccatgctgtaggaacaattttgatggagataacacaatggtaattcattgttattggagcattctn

SEQ ID NO: 54580 - DNA, 378 bp, Glycine max
ggctgcagctaagctccttaactgccttggctcttaatatttgaagagtatccttgtggaaccttcacccgatgaagacactgacaaaaacttatcttctccttccttgacaaagtatggcaggctgggggcaagtaaattttcttcccatcaaaccttggatgcaactgtgatcttatacccatatcagctagatcttgacgggtattcaatccatccttcgtcttgccttgaatgttaaggagcgtcccaatcacactgtcacaaacatttttctccacatgcataacatcaatacaatgtctaacgtcaagatcacaccagtacggaagatcaaagaaaatggacctcttctttcatatgcaactctgactttta

SEQ ID NO: 54581 - DNA, 416 bp, Glycine max
  unsure (1)..(416): unsure at all n locations
tctcaaggaagntttctcatgatagcttctcaaggaagctacctagtctataaatagaagcatgtgtaacacttgttgtaactttgatgaatgagagtcttgtgagacacaactcatagttcaacttctctcccccttttccttcttcaattttgtgctcccccctctctctttctctctctcttttcctccattgaatcatcctctccaaacttcttatccaaggcacattcttgctggtgaagctccttcttccatggcttattccctagtggatggtgcctcctttctcctcttctccttttccttccgctgcatctccatggtggaaaaccaccattgaaggacctcattgaagctcaaagatccaacttccatannagctccacangcaagcttccatcatcaagtgtcaa

SEQ ID NO: 54582 - DNA, 205 bp, Glycine max
cttgctctaccccaatttcttcttcgatctactgtacgtaccaatctgactatgttggctatcttggaccgaccctattgggccttactatctccttctaaaatgcatatagcataccctctgctgcaagagattctatcctctttcctttgaccgttttagaaaacctgtgattggcaaacctgcagaggtgagcccttgataa

SEQ ID NO: 54583 - DNA, 462 bp, Glycine max
agcaagcctttgaagtataggtgtagaggatccattctatcacccaccatgtttttggatctaatgcccatctatcctcaattgaatcaaatgaaccaaagtcacccgcacaagatgagaatttagagaattcttcataaacttttgtcctaacattaacatgtggaaaatatctcttaagacatttattcctttggctagaaagttcatcatctctatgaggaggaaccctatttggaacctcattaagccaattatcactatagtacctataaaaaaaatatatgtatacattttagtcatactatggttgagaaagagttaagctaagccatacacattattgaaaaattgatataaaaatattaccttggatttagagaatgagcttagcaatgaagtggattacaactcttactccacctagaattaagtatttcatgaataacttcaaagaaacta

SEQ ID NO: 54584 - DNA, 485 bp, Glycine max
  unsure (1)..(485): unsure at all n locations
agcaccgcagctgcagcttgattgctacgttggacttagatcttgctctgtactcttgttttgnnggagngaatgttgtggagacgttggaagaagattaaggaggccgatgttggtcgaagatttctagtacattgtgatttgtttttaaattattgttttgactgatgtatttccgacatgtttaattatatttcaaattttcagaatttattttcacttccttatatgtaaatgtattatcttctcctagttgaaagtgttttcaacatctttcagcttgcaagggtattagagatgtagattactgattactaggattagttagtttaattagctacaagttaattactctcgtaactaattatgtaacatattaatattagttatataagactaaatgttttatgtaggaagagatntattcatttctttcttgcctgctgcttctagaatataacatgcaagtaatatcttatcattct

SEQ ID NO: 54585 - DNA, 544 bp, Glycine max
  unsure (1)..(544): unsure at all n locations
agggtaatatganatatgaatngcttgtattacgcactctatacaatactcaagctcgatgtagtggtgttgttgcttcataaaataaanaagaanattcaatccttataaggtaaaatacattactcattntgttaaaaatacaaaaagtaattttgtaaggttaacaatttttntaaccaaacgacctattggtgaattaatatatatatatatatatatatatatatatatatatatatatatatatatatatatatatatatatatatactctaaatgtgttatcaaatatgattatgtgagatcaataatatatgacaaatttggtagataattttgtttttcacagacgtaatcataaatttgatccttgatctgtacataaaaaaaatatttgttaaaaaagatcaatcccttaaatgaatctttaacactctgagggattattatgtgtgaaatctatatattaattattataataattattatcataatattattaataataataataataatattaatttgctaaatataaaag

SEQ ID NO: 54586 - DNA, 444 bp, Glycine max
  unsure (1)..(444): unsure at all n locations
agctntangtaaagataagaagaatataagttatatataattattggagaagatatcataccaaaagttgagatcaatactacaaaatgatggaaaataaatgagaatgtcatgtccaggaaataaatgggatagctaaattggataaagacaatgaaggtgatttatgatcgcaaagtacgagcatgttcgactatatctatactcatgaatagaaaaagatatgacaagatacaaaatgattatatgaggaaatattggtataaaactgattgaaggaaagatgtcgaanaattgattaaggtggtttggacatgtaaaagaaggatcactataagcatctatgagggtagattgcatgatttttagtcatatgagaaagggtgaatatactaagaaggacattaaaggaaattgttaaagggatttcatgatatatatcgc

SEQ ID NO: 54587 - DNA, 396 bp, Glycine max
  unsure (1)..(396): unsure at all n locations
gcttacacacactntcattccattgttcatgcaaaanagtggtatctccgtaatgatttatgccaatattttctgaacaatagttctatttctgactatttgtttcgcattcaaaccactattgattctctctggtcgattggagagcatgtgtctgaatccaatcatgttgacatagttcttgacggtttaccggatgacttggagtcactcatcacctttgtgagtggcaagtttgagtcgctgtctactgatgaagtcgcgacctgtctattggctcatgacactcgcatcgctcacaagaaatcacttgcctcatctgttgcttcgattaatctcgctgaaggagcaaaacctaattccagctccaatttggtgcaccaggattcttcatcc

SEQ ID NO: 54588 - DNA, 331 bp, Glycine max
accgcagatgcagctacttcgaattggattcaaattatgttgctcttattatatatatagagggcgttatttatactcataattgatgtaaatcatatcgcccagtgttatggcatgactccaaaaatgattatgtgttggagtgtgagaatatcatgcgttcatacgacgaacatgaggaggatgtaccccttgaatatcattaggaatgttatgacattagggacgtgatgttatgagatgataagtgtggacctgataatccatatgaaataagtgaatgtcgataacacttgatgtggcactcatatatcgggtgctattatttata

SEQ ID NO: 54589 - DNA, 204 bp, Glycine max
  unsure (1)..(204): unsure at all n locations
tgttaattcgatatatncaatttcatagtatattagagttattgagatatcctatcctttcactnttttcttattattacatcgtatctagtagtttccaaccacatcaatttatacttgtgatgtttcttttgctcatgaacaatatggtttgcagaagacaatgttgctattagatcatatgttataaaccaggtaagtgtg

SEQ ID NO: 54590 - DNA, 407 bp, Glycine max
  unsure (1)..(407): unsure at all n locations
agctttctcgctgcanaattttcttcttagtttggtgttttggnnngngctaaaggtggtgttcgtcattggaagtgcggtaaacagactttgtggtagaattatggatggcctttgtggataactgggtggtgggtaaggaggtggcttgttattgactgagtaatgacattgttgggtttggtgggaaacttggccgtataggaatggcagtcacagcatgggtttctccctcatcctcaccctctttatttgccccagttatctaagtcgtcctagtaagatgaacaaattngcctcttttcggacccacatcgatcctttcactggcgaagaccatatccgcatagcttgatggtgcgttcccatcatcttgtatataaattatcgatatgtgttaccatcac

SEQ ID NO: 54591 - DNA, 420 bp, Glycine max
  unsure (1)..(420): unsure at all n locations
cttttggagatcttcgtctctctctttggtattgtggaatttccatcctagtcaagttctggccaaaaatgttgacgtttgctcanaagcctacaaatggcggacatgatgtatgtcgggatgtttgtttatcaagtggctcaggaataagagaatgccccaaatcatttccatgacacgcatatgatgatgatgattagaaattcatgcaaaactgatcataccacacatccatgtggacactcaaacataaagctttatggccatgtaaacactaaggcttaggatttgtttccccatccaaatcgaaccagtgtttcataagttgctctttntatcaaatcatgcacacatccgagcccatttatgcatttcgggaaaatatttcattgtgttcatcctttatgcgcacacatttgt

SEQ ID NO: 54592 - DNA, 378 bp, Glycine max
  unsure (1)..(378): unsure at all n locations
agctacaatacaatgcaccttttttattgtttataatcttgcatttcaagntaaaagaccaattntagtgtctgcgaaataaataaagtcttgtatccaaatacattcattaaaagtcgttttagttgcgaaggatatgtacataattaaaatcatttaacaaaataaatagggaggaagttagtaacctttcacatgttacaatagctagatttgtgcgacttcttgctagcttcctgttaagagattcaagagaacaaattagaagttcataaactaaaaccacaaaaaaaaatacaagcaaagaaaagaagaggttttttaacaaatcttagcacaaatagtataagctaactatgtgtgatagtatcacttcag

SEQ ID NO: 54593 - DNA, 352 bp, Glycine max
aggatatgatcacggaaacgtcacagaagtgttacggaagcgcctaggacatgattatctccttctttcttcttctcctcactaattttaagtgaaatctgaatacacagggtgttgaaccccttcccctcagcccccaacgtacatttatagaaaaaatatgagaggaggttgccgcccagctcacccaggcgagctggaggctttctccagaagcaacatgctcgcccaagcgagcaggttgctttctgatgggcccagtgctgaaggacacccccctaaattgatattatcacccccattttgagttttgtgctcatttccctccgagatttccaaaatcttatggatc

SEQ ID NO: 54594 - DNA, 550 bp, Glycine max
  unsure (1)..(550): unsure at all n locations
cggggagagtgananactgattccactgtagataccattgtantanccacnnnnnncttntaatnatnacccgngntcttatgatacagagacgaacgtattctttgtacgtttggtaacgccaaaancgacgaaagagtaggganttctcttgtactaactatctttcctatagtgtgccttaacaggatatgtgcccgaggaagcatgcctctacgaagtccatgaaggacaaggcagcctaatgaactatttccgctccggtgtatgatagtcaccgctttacgagtgctgtacaccagcatcgcttctatgccatcaagggatggtcgttactccgggagcgacgcgttcagctcagggacgacgagtatactgatttacatgatgaaatatggctccggctgtgggcattactggttacttccattgccaagtttgatccaaaaatattccttgaatattatgcccactgcttgacaacataagacggcgtcgcttacatgaaaacctgagttatgtgtcagtgcatcccgatcgatgccgacct

SEQ ID NO: 54595 - DNA, 419 bp, Glycine max
  unsure (1)..(419): unsure at all n locations
gacatncaaccgaagaacatgcgcccatctacaatcaatgcagcttcttacctatattatttacacgtacctncaaggtgtatttgttacttacatcacacacatctgctgggctaaactcacatacatgcatactcaagcattttgtggcaccaaaaattgcacatgtgcacatcttggcatttctaatacctacatactcaaacttcatgatgaatcttgactatctacataatgaggtgctacattacatgctccccttttttattttaagtttttgctacctcaagccgcatacaaattcaagcatatttttctttgctgactacaattgcattcatatgtacaaggtttctattcttttgcaatatgttttctccatgcaacatatttatatatatttttgtgagacatttact

SEQ ID NO: 54596 - DNA, 317 bp, Glycine max
  unsure (1)..(317): unsure at all n locations
tttcttagataacatgtgaagcangtaggtgcatgcatcatccatcatgcttcccatggttcagtcccatcatcagaagcctgtcccgccagctacaatggcgggactgcaagctgaaggagtcccgcaaataccagtggcggcaccagcctcgtatctctcctagtcatcccatcccgccagcagcaatggcggcaccccctctccccctctctcctattcagcctgtcccgctgctacgaatggtggcaccccctatcccgccattgccactggcggatcaagcttcccgcctatgtcaatggcggcacccacgt

SEQ ID NO: 54597 - DNA, 415 bp, Glycine max
cagcttcataaaggagcaatattaaagaaatgtttatatcttaatctttcaaatgcaagacacgggaaagaaatatcgcatggtaatttcaatatgaattgccattcacaagtacaattacgcatactcaaattttccctcactattataatgcactttaactcgtaataatattataacattagaccaaatgtatccggatttatatccatatatgagcaccacgtgattctaagtgaaaagttgtaatacacgtaagtttccaattagggtccctttagaaatttaaaagaagtataccatggaagtttagacgaaggtcattttactcacctctcgaagcacttaataattcacgtgttcttcgcttatctattctcaaacttatatgatctactaatgttctatctctatg

SEQ ID NO: 54598 - DNA, 266 bp, Glycine max
  unsure (1)..(266): unsure at all n locations
gtgaagagtcacatcttttgataaaatgctttgtgtaatcgattaccaatgacaagttctgaataaaaagtctagatatgtaactcttccaatgggtttctcaagattttctcanggttataactcttctaatggttttcttgaccagacatgaagagtctataaaagcaagatcttgacttgcatttcaataacttttacaacttttgaacttctttgaacaacttttgagatatcttgaaacctccgcttttgatctatcttct

SEQ ID NO: 54599 - DNA, 460 bp, Glycine max
  unsure (1)..(460): unsure at all n locations
gtattgttggatattttgtttttccattacgctcttaatgtctttagaggttacttcctcattgacatatcttgtcttgaatggaattgccatgacaggtttattgttactgtctttgatgtttggtagttgatattgtgttgcgggaggtaattccgattggattaactcaccatccttcacttgccatattgttatgacatttgttgttggatcacctatgatgtcttgtttccaagggtaatctatatcctctctgatggcataagcatgaaaccaatcaaagaaaaggacattaagtttgactctttcgacanattcgtagaacttgtcttggatttgttttctgtttgtacccttgtaatgttggaaacaccatctcctttggtgttcattctccagagaataaaaatctatcctagtggttccttatcaatgctacagttgtcagataacatca

SEQ ID NO: 54600 - DNA, 325 bp, Glycine max
  unsure (1)..(325): unsure at all n locations
agcgcaacactcattggttatacgcaacgaacaattcggaataagatgatctatacatgttcgctaagcgcaccatattatgtgactaagtgcaccacttcagtccatccgttaagcgagaaatgcacgcgcttaaccgaaattcactaatgtgcactaagcggtccagaattgtgctatgcacacgagcacgaacaaggccacttatttaatcctgaaatcataatttaaagggggagattgaactgcgactcagaagatttcatgtcttgagattctagagagagaaaggtcccagttccagagagtttngagagatattgtt

SEQ ID NO: 54601 - DNA, 459 bp, Glycine max
  unsure (1)..(459): unsure at all n locations
agcttatccncacaagtggatggtgagtctgtntttatgctgattatctgtttatagagagaagcagaaaccttgcaaaattggatgaacaatcaagaacatgcatacaaacatatatgtataaataaatatatactattttagaacaaaaaaaaagaaaaaatgaagtgatcttatgtcttagaagtacatgattataataatgaaaatccttgaatttcatagctgtgtaggtaacatagtctccacttgtgaagcatcattaaacaagtggcacggagtggttgagtgtgaagttctcttaacaacgtgcatgctttttgtgtatatagattgtaaatgtttgatattatcattttattcaagagaaaaagggaaagaatcagctcaataaatagaatgagagtgagagatacactccatagtcttttattctgatgcggctatcgatntaatatt

SEQ ID NO: 54602 - DNA, 439 bp, Glycine max
  unsure (1)..(439): unsure at all n locations
tgatgcctctntgtataactccttttacttttgggatctttccaatatcttctagcatcaagtcaagacaatgtgcagcacatggagtccaaaatatttttggtctcgtgacttctaaaattttacctaaaaagaccaaaatcaataaacttgtatgagtagtgtaacaattaaaagttataactataaaaaaaaacttcattaagcatgattgaattctcgcccaccaacacataattacttccattgtccgtcaccacttgaataacattcttttctccaatctcctcaacaaagctatccaaaagctcaaagatcttctgaccagtcttcatgtattcagaagcatccgcactcctcacaaactgtgttcccaatgaacaatttaccaaaaagttaatcaaagttctattcttcctatccgttcaaccatctgaca

SEQ ID NO: 54603 - DNA, 495 bp, Glycine max
  unsure (1)..(495): unsure at all n locations
agcttccagatatggagagctaaatcctctattggttctttcttgttggtacttgatgtaaatacctatatatctatntaatgatgttttatgtgttctctgtgctatcaatacgtaatttcaatgtgcttttgccttgatcacgtagatgtatttgttaggatcattcaacagtggaaactggtctgattcttagaacttgataggatacgactagtttatcatattatcacgagggatcggngtacggtaacctagttgtttgtatgtttgtcttaatgtggttttgttcgagtttagtccaacaagaggaatctgatgacaatgcttgatcaggattangctanactatcatgaggaatcgaggtttagcatttcaggagacaccatagaacacatgagagattgttagtagagaatatccttntaatatcacgcacctaatangaagacgaacgtgttgtctacttgtctttacacatcattactcacctg

SEQ ID NO: 54604 - DNA, 473 bp, Glycine max
  unsure (1)..(473): unsure at all n locations
gagataaacaagaaggctgaagcagagttgactgtgaatggtaatcatgggagctgatctggtgaggtcaaaagcctggagcagggaatagatgaataagctctcagcatctctgctctcattctgaccccttaaagatctgtttgaaaatgactgtagtttttgttaatgttatttatctgattgtttattaaaataacaatatacaattatagagcatagccctatcatgtaccatccttgggtgtattggacagacgtgtagcttctagttgctattgtaacattatgttgtaagacatgtgatatagacctgtaatcatatatataaggaagtgatcctatattatcataggtggtgttaagtaatttggtcctgccgaagaacggtgcatatgcaagtaccatctttttcatnggattggattatctcactntntgaaatcaagtgatagtgattaatcatgaaatac

SEQ ID NO: 54605 - DNA, 461 bp, Glycine max
  unsure (1)..(461): unsure at all n locations
gtcacctgcggcatgcaagctnngtagatagttgcatntatagtatataaacacaaatataaaaaaaaaacatgaacaaaagtgcatttaataaaaaaaagtcaggttttacattggaacttcccattttttgtaacagaaattaaaaatgactttatttaaaaatcaatagagttttaggaaaagaatgaagtgtttttagttgaataaataaaaagaaatagttntatttattaaaataatggatttaaggtaaataaaataaatatatgttcttaagaaataaaatggagattttatttattcattcgataaggtgtaaaataaagtttctttttataaaataatagaataaaatacaataaatagttaataatagactgaaaatatcctatttataaataaagacatattagctcagtattatatttactataggtttctacgctctcttttcctct

SEQ ID NO: 54606 - DNA, 443 bp, Glycine max
  unsure (1)..(443): unsure at all n locations
acccatcacatgtggtactaggtttcggtcgggctatggtgcaaaacgattctccacatccacaaatcatgtataacccaccatcccctgttgcccacctccaactgagctcacgtactcccacatagcccttatcctcgttcctctcaacgccgggtccccatcaatcctcccaagcttccacaacatccaagtaactcaatatccaaatcatcacaaactaacaaaccaagcaaaacagggcaaaggcagaaaactctgcccaaaactcaaaccaaaatcacagctttttctcacttatagaccccagtaacatttccttcattccaattcgttaaccggtggatcgactcgaaaattttactggaagtctctagtacataagtctacantttgaccgttgggatctactagcaaacatccagaactcattctgcactact

SEQ ID NO: 54607 - DNA, 442 bp, Glycine max
  unsure (1)..(442): unsure at all n locations
gatctctaagcacctgaggcatgcaagctggtcagttataataataccgngttgagacatcaagacttacaatataccataataacaaggttttttttccaaacatcagtcacttggaggatatttctagtgcaatcaaatagggtcaaaagtcacaacaacaataatctctcaaccaaaacatcaagataaaacaataggataatgcataataattttaagataaaagcttctcataaactagatacttaagtcaagagtggatcccgtcatgcagtatgtagtaaattccaattaacactaggtggatttattaaacatcatcatacattctgtttagaagccacctaagtactttcttccagaagttgagtcttcatagttggcaatcctactgtgaacaaaaagacaaaacgatgcctcaaaaggacatatctattaa

SEQ ID NO: 54608 - DNA, 445 bp, Glycine max
  unsure (1)..(445): unsure at all n locations
cctgtccgatgcagcagtaatgatggcccgagttatgttggggaacggttacgaacccggaatgggtttaggcaaagacaacggcgacataactagcctgataaatgccaaaggaaatcgtgggaagtatggtttaggctataagcccactcatgcggatatgaagagaagcatcgcgggaaagaagagcggtggtcaaagctcgcgttggagacaagatagtggaggaagcccgccctgccacataagcagaagctttataagcacgggtctcggagacgaaggtcaagtggtcgcgatatacgaagatgatgttccgagtacattagatttggtacgactatgccctcctgatttccagctgggaaattggcgagtggaggaacgcccttgcatttacgcaacgagcataatgtaaacctttacnggtttaaaagctctatag

SEQ ID NO: 54609 - DNA, 486 bp, Glycine max
  unsure (1)..(486): unsure at all n locations
agcacctgcggctgcagcttgatgcacatatggaaggtaatttacaacgagttgatgcgctccatgagaggttggatcaaatggagaacagagatcataatgaagaagaaaggaggagaagagggaatgatggtgttcctagacaaaaccgaattgatggtattaaactcaacattcctccctttaaaggaaagaatgatccggaggcctacttggagtgggagatgaaaatagagcatgttntctcatgcaacaactatgaggaggaccaaaaggtgaagcttgccgccacagagttttccgactatgctcttgtgtggtggaacaagctacagaaggagagagcaaganatgaagagccaatggttgatacatggacggagatgaaaagatcatgatgaagcggtntgtgccggctagttactcaagggacttgaaattcaagcctcaaatactaacccaaagcaacaagaggggtgaggagta

SEQ ID NO: 54610 - DNA, 443 bp, Glycine max
  unsure (1)..(443): unsure at all n locations
tcttggaatggaagaaaaagttttgaacaaaaacttttataaagatgaagagaagatgaaacagaaaaaatttgttgaaagagatgaaagaaaatattgaaagattgattgaaagagatgagtaagatcaatgaatattgtttcatgccaaggtcacatatttataatttcttgatgactcaagtcaaaacttgtaactcttggcaattcctttaaaactaattacttaaaaagttatgacttttaaaagaatcttcagaaacaagtcacttgaagaattgtgactnttggaaaggaatttttcgaaaacagtcactggtaatcgattaccattaaggtgtaatcgattacacatcaatagatgtgactcttcattntgaagtttgaaaatcttaacgttttanaacacttggtatcgattacatgattatggtaatcgatta

SEQ ID NO: 54611 - DNA, 444 bp, Glycine max
  unsure (1)..(444): unsure at all n locations
gcttcggaagaaagtgatgaggtacaagctctatagacatatcttgaaagagcccgggtagncgaagagaagttcaagtccatagccatcaaagtctgaatagagtatgatgaactaagggacgtcaatatggccaccgctgaagccttggaacgagaaaccaagaaggcctgaaaagaagaacacgaccacagcaaagttgtgaggggctttatagggcagcaatagtgagctcaacctccgaagaggtgaaaggaatcatcacgggtcataggcatgatcttgaaggacgagctaaaggctcgccttatgtcgaaaagaaatttgtcccaacggctaagcgagactgaagggaatatgtgggtcatcatcgatgagtgcaaagagaagctaaatctagtggcgactcacgagcaaaggctataggatgagtacgccaagata

SEQ ID NO: 54612 - DNA, 343 bp, Glycine max
caaagaaatgtgtcttggataagtgtaacaagactttctcttattggtttaaagatacaatctttgctggcgaaaatgcttcagaaacattaataatgctagcagatgaggctaaaagagatgttataacgtggggaggatacgacatatacacgtattccttttacacaaacgcgcatgatgactaaagttcaatgcacaacagcgtggtcaccctaagggctatgtctcatcacttcacacgcgcgcatgatgataatccctgtgtagctaccatcgccttacttggggttcattgaggaaatgtgggagcttaactatgtcaaatttactgcatgtgctt

SEQ ID NO: 54613 - DNA, 420 bp, Glycine max
  unsure (1)..(420): unsure at all n locations
gatcctctaagcacctgcagctgcagctgtaaaggcagacatgatacatgtatggttnggtttggttcaagggtaaaagggatgccccacattatttccatgacacaaatgcaaaaatgatgatntggaaactttatgcaaaactggtcatgcatgcacctatgtggacactcaagtgtcaaatttttatggtcatgtgatgctagggctcaagattcattccatctattntagtcaacccaatatttccaaaatatgttcttttatccatttgtgcattcatccgagtccattttgggcgtccgggaaaatattcacagcattcacccctcaggtgtatacacatnttttcaaaaactagctatgatcaatgatattttttcaaagaaaagtaggaagtcatctcttttcaaaagcatg

SEQ ID NO: 54614 - DNA, 438 bp, Glycine max
  unsure (1)..(438): unsure at all n locations
ggtcaattgaacacatcaatagccttgtctccattttccatcacttctcaccattttctctccaaaaaccaaaacttggaccttcattcttctccatttgtgcgagacactcaaggagggagaggtcaccattttcatcttcttccaagctccatctgtgagacttcttctctcaaagccttggtaagaagcccttaaacctctattttcttcttatttatttntcatttttgtgcaaaattcttacttgaggttccaaaatttctttttcatcctttcgaagcttaagagttcaagatctaagttttttttccttgaccatttcgtggaagcttcacttaaggtaaggggagtctttccacttcttaaaccctaaccttgttgtctttggaagctaggtttcattacatgttgttttgatgtataaaatttcatgtc

SEQ ID NO: 54615 - DNA, 474 bp, Glycine max
  unsure (1)..(474): unsure at all n locations
gatccttaagcaccgcggctgcagctatgctgcnacatttatatagaccttctcagcagcaaaaccaacaacaacagaataattatgatctttcaagcaacagatacaatccaggttggaggaatcatccaaatctgagatgggcaagtcctccacaacaacaacagcctgtccctcctttctagaatgttgctggtccaagtaggccatatgttcctcctccaatgcagcagcaacagcaacaacaacaacaaagacaacaagcaactgaggccccatctcaaccttccttagaggagttagtgaggcaaatgaccattcagaatatgcaatttcagcaagagacaagagcctccattcagagtctgaanaattagatggggcatatggctactcagttgaaccaagcttagtcccaaaattctgacaaatggccttcacanactatgcagaatccgaaaaatgtgagtgtca

SEQ ID NO: 54616 - DNA, 435 bp, Glycine max
tgtaataaagataccaattatcgatacaaattctccatatggttgatttatttaaaaaaaaaaaagtcaaaaacaacatgtatggaatagagatatttgaaccaccaaagtaaagaactgttacaaataaggaagaaatgaataggtttaaataggaagcaacataaaataaaccaaatttgagtggtttaaccctatatgctacactcgtttgctacctactattattggttacctgtgatgacagttaattcaaaatgtaatttataatattaatatcttatttttgatttttttaatttgtggttggttgaatactttggtgcatttgtcaagtgattacgattctttgtgttaaaaggtattatcgatcaacttctttatttctaactacaaagttttacatggactgtttatagaaaatatttgttatgt

SEQ ID NO: 54617 - DNA, 369 bp, Glycine max
  unsure (1)..(369): unsure at all n locations
gatgganatacgacgtgccatataatatatatctcctcatataccagccatccctgtttccgctgtattgatatgacatttctaaggtggtgcttcatgctaatatcgtactgattggtgatgggcttacaggcctattggaccattattatacaacccacagatgttcaactgtgcaaacttatcttttgaggttgagttacgatcgaactcaaattcctagagttttttttcatgactgcagtatgtttatatgtcaagaaactttggttatataccgcgccgaatgacattgtgtgacccatgtatccaatctcacctaatgggataaggctttgacgtagttgatgttcgattatgaggatatcc

SEQ ID NO: 54618 - DNA, 419 bp, Glycine max
agcctaacatattgtagaattatgctccacttgtttcttcttgagtcttaatcatttaataccacatacttaaagcataccattagtagtttaagtctagtatagacttagaatttgtttcttaatagtttgttgtcattaaaatcataactttttaaagggttctatttcaacaatatttacgttaggaagacaaacctaagtaattaattagacccaagttatgtttggtgccaaccttaatcgttacatggacaagctgagaaaatgtggaagatatgagggggttcgaacattaagtagcatggctttgttgatagtgatgttggcttatttgtgtacataaacctgcaaggtgatctataagtggtgcatgacttcatgggtaagagcctggcatgcatgtctgtaatgtcaac

SEQ ID NO: 54619 - DNA, 369 bp, Glycine max
  unsure (1)..(369): unsure at all n locations
attcatagtgacaccatagtcgtggagggaaactgcagtgttgtgattcaacgtatccttccaccaaaacataaggatccaggaagcgtcactataccttgttatgtatgtcaagtttcagtagtcaaggctcttattgactcgggagctagcattaatttgatgccgctttccatgtgtcgaaaacttggggagttggagataatgcctactaagatgacttntacagtagcagatcgctctatcaccagaccctatggagtgattgaggatgttctggttcaagtcaaacatcttatctttcctgcagactttgtgggtatggatatagaggaggatcctcgaattcccataattttgggacgttct

SEQ ID NO: 54620 - DNA, 426 bp, Glycine max
  unsure (1)..(426): unsure at all n locations
ggaaccttagagcctacctgcatgcgtgcaagctggatcataattcatatttaatgatgttatcatattaatcacattctcattttgaatattgaataagggcatttgaacataccaaagcatacctgccctgtactttagaaagagagtaggacgtaaatgcataagatatacagaaatgagaaacagaaaatatacctgtccttcactaacaatagggcctagtctgcaaccttcttccaagggatcagaaattttgatgtttttgacccatttcacaatcctattcaaaaattctgttgctatactttcctgaaaaatgagagtatcttagtttntgaagatatatgccaacataatttctatcgaggtgctgaaaagattcaaccacaggtgaagttaaagaagacacaacttgcatgtaca

SEQ ID NO: 54621 - DNA, 545 bp, Glycine max
  unsure (1)..(545): unsure at all n locations
tgataacagtanatgttgatactttgttgattaacttgattaactngcanttcnnnatanntacctcctcaaaccaaatgatacccttacgcatgtgcaaggagatatatttattttatttcaaggggagatgcaacattcagcttgagttatgaccctctgttatttctcttttatgtagatgtgtcatcataaagaggtatatatgcttcataccataatataacactttatttgtctgtcatttttcataggtaaagaaaggtctttgggaatagatacaatccttgatgaacagaaactcgtctgatttagacacaaagccacatctgttgaaggaaaggacagacaaattaacaatgaggtccgagccggaggacaaccaggtaaaactcaatcaaaagttggtgtatactgtttctacttccctagtcgnttatgatgaacacattttcaagaacattaaccaacntgatatgagtggggccctgtgtaataattctgccttatggcaccattatttctatagcatattattgttatgn

SEQ ID NO: 54622 - DNA, 344 bp, Glycine max
acccagctccaattatatcaacatgcttctgcagtggctttatcttcaacacttctatcaaaaccaaattattagtgtgagtgtaacagacacatttggtcattctttgaaattcaattggaaggtgacttttgtctcttaatttcatgtatatgactcttcctttcaattatgtttcagacatacagagattaatcttataaaataggaagatctatttatgagaataaacttttgaccacgtatttaaaaaatataattatttgtccatcatatcacacaatcaagatattagtaaaaataaattatcacataaatgtttttactcaaacaagtagaggata

SEQ ID NO: 54623 - DNA, 467 bp, Glycine max
  unsure (1)..(467): unsure at all n locations
agcttattacataagttaattttaatttatttaagaaacttaatttattttaccttatcttttnttctcctataagtgtttattaagaagtttatacaaagaggacctaagaagaattaaaaaaatctatatgcaagtgatgactacggagaaaaacagccaaaaatgatgtgtcaaaaaagccaaaaatccctatgttgtctgctggtcaactctttgttgaacatcaaatagcactttttgttcatcattaagtatggagtacatatcatgtttactatgctatacaaaaagctctatgcaataaacataattttaacaacaataacaacaccagggatgtttccagaaatatagctatgagctaaacagagaactccattgcaatcttctaaagaaaattatnntattaaagaatatataccctctgaaacaaaaactattgagatattaaagtcttaattgta

SEQ ID NO: 54624 - DNA, 420 bp, Glycine max
  unsure (1)..(420): unsure at all n locations
cgccttggcggattggtcttctccagtgaaaggatcgatgtggtgtccgaaagaggcaaatttgatcatcctactaggacgactgagaaaactggggcaaatgaagagggtgagaaagagggagaaacccatgctgtgactgccattcctatacggccaagtttcccaccaaacccaacaatgtcattactcagtcaataacaaacctcctccttacccaccacccagttatccacaaaggccatccctaaatcaaccacaaagcctgtctaccgcacttccaatgacgaagaccacctttagcacaaaccaaaaaaacaccaacaaaaaggaattttgcagcaaaaagcctgtagggttcaccccanattccgttgtcatatgctaaacttgatcccatatccactcaataattcaatg

SEQ ID NO: 54625 - DNA, 496 bp, Glycine max
  unsure (1)..(496): unsure at all n locations
agctncatagttcatatacgatggattaatgtctcttgtttcaatcactaactctagcactaataattnttaatatattgagaagtcattaccacaagaactcagtacccctgttggccactccctatgctggaccatgtaaggtagagaaaggaaatgggaggaaagattcatttccgtaaccaagaggaatctgtcatgtaactaaatgccacatatgctggagaaagacaaagagggaagagaagagcaaagctctatcaagaccaaaaatccttttgtctgaacattttgttttacactaagttntggtgttacacaggagatataaggcttgggctcggtatgggaagtaagatagaatgctaaagtggaggcaaattaaccttagtgggatctgaacctgagatcaagtagtatccaacgaacttggtccactttgagtaatgcttttggcatgagacagactacaataactgatctcctagacatgtga

SEQ ID NO: 54626 - DNA, 417 bp, Glycine max
  unsure (1)..(417): unsure at all n locations
acattaatttttagttgtttatattttctttcatatttatttttgatatatctattgatttctttgttacttttttaaaataaatcatgatattattgcttttttattttatattttttggctacttcaataattaattttatcccatatttcttatttaataaattaacttttgcggttcaagctaccagcttaaaaatattgaagagcatgtatcaaataattaaataaaatttgtgcttaaatttaaggaacaagagctaagttggatctctataaaactttttctagctaaatttatttccaaccttattggtgagacttaacaagtgccaattttacaatactgtaacttangatcttagacttttttctttggattacatcanttaannattagttaggtagaaattatta

SEQ ID NO: 54627 - DNA, 421 bp, Glycine max
  unsure (1)..(421): unsure at all n locations
agcttagtgacatccgtgactngatcttgttctaagatgttctcaagagagattcangagaatcttccagtcatgtttccaattcagcattgaatactgaaggcaggggaaggactacccagaagggtcagaatggtcgaggcatatcaaagtcaagagggaaaggtcagagaaaatttcaaagtgacgttacttgttggaattgtgacaagagaggtcactttagcaatcagtgcaaggcaccaaagaagaacaagtcgcacaaaaacaagaagcgcgatgatgatgaatccgcanatgcagcaactgatgaacttgatgatgcatntaatttgcagttggatagtcctgttgattcatggatcatggactcangtgcgtcgttccacactactccctctnaagattattgtctactatg

SEQ ID NO: 54628 - DNA, 444 bp, Glycine max
  unsure (1)..(444): unsure at all n locations
gacattggtatccagacaagtccaatacatcttatcaacctctttttntctcaagaactgcaaatcctccattcaggaaaggagtggtattaagagaagcttccaagtcaaaatcaatgccaccaatgaagaggaaagattctgatcaactaattgcccacactgttaggcaagcaatgaaagcctctccattcccctttaagatattttaattntaatatttcataatagttgtgaatgaactgtgacaagataaattacaaaagctttgttttggttacttgcaatgtacctttntaaattgattaagtttaatttaaaacataattaagatagttttttaaaatgctcaaaactataaaagaaatacgtatcattaagtttaaaacctaacaggaaccagtcaaccgtggttctaagtaaacactanttgcaatgacattc

SEQ ID NO: 54629 - DNA, 399 bp, Glycine max
  unsure (1)..(399): unsure at all n locations
gcaccgcngctgcagctgcatacagacctacttgctggctcttaaactctttggttgtgtcatacagatgtcttcctctagatccccatgcgagaatgcangcttatcatctaactgctccaagtgaagattctgtgcagctactatgctcagaataactctgatggtagtgatctttaccactggagagaagatctctgtgaaatcaatttcttgtttgtgatgaatccctttcaccacaaggctcgccttgtatcttcttctatcgtcagattcttcctttaacctatataccttcctatatcgtaacgctctcttttcttctggaggattagttcaagaccacatcttattcttctgaatggatgtcatttcatctttcatcgctagctcccactc

SEQ ID NO: 54630 - DNA, 421 bp, Glycine max
  unsure (1)..(421): unsure at all n locations
tggggtgatatcctagatgcgaaggagacattctcaccacttgtatttatgcaatctttcatcatgaacttctctctgatggagaggacgcttcctggttatggaaagctaaaatcctctattgtatcatccttgtacagacttgaatgaaatatctttctatctatttaacgacgatctgtgagggctatgtgccatcaactatgcattctaatatgcctttacctcgatcacgtagacgcatgctgtgttatggtcattcactataggaaactggactgattgtgacgacctttataggacagggctaatctgtcgtactatcaccacgaattggggtgcgataatataaaantacgtcggtcctattgcaagcctggttcagtttagtccaacaagataaatctgacgatgatgcttg

SEQ ID NO: 54631 - DNA, 497 bp, Glycine max
  unsure (1)..(497): unsure at all n locations
acctgcggcatgcaagccttgcttcacacaaaattccttgagctaggtctntctttggataagagtgaaagccataagattttgaagaaggctttcttttaagttgctgctccactcttatacaaagttggactagctcagctaggtccctatatggaaggaattcaaccttgtccctcacttccatattaagcccactaaggaacctagctatgtttgttctttcctcctccctaagtccagctcttaaaaggagtagttccatttgttgtctatattcttcaacattcatactcccttgtctaagcctttacagcttgtcaataagctctctttcatagtaggagggaatatgcctcttcctaagggaagtccaccaatagagggcatacncttgaaactaagggagccaatggaacttttctctctcactaatatgatggcaagcaaagagttgctcaacctttatttcctaatctaggtaggcctcaacatta

SEQ ID NO: 54632 - DNA, 476 bp, Glycine max
  unsure (1)..(476): unsure at all n locations
cgaggagggcatgaatgagttaatgtatgactctatactctgggggtattcaatttggaatctccaagtggctcatgttgatcctgtgggttggagtacccttgcaaaattgggtaaccttgacgggccattggcagtctcgtctcagtgaaagcgtagtaatggaatcatgtgggtttgttactacatgntcctttgagcttcttttgtaaatgttattttggtacaacatgcacatgggaaaagagaaagcaacatcacattgcatatgtgcatttttgtgaattgtctaacttgtgtggtttattaagtggatgtcatgtgtggcttatgttgtacttatgttatatacgaatgattctatccatagttatcataatgtatatatatctagatgttaaactattgtggtgacttgtaatgtgataggacttatctctttaatggcataatgagagatgtatctaaaatgacac

SEQ ID NO: 54633 - DNA, 438 bp, Glycine max
  unsure (1)..(438): unsure at all n locations
cctgagagcatgcaagctnggcgtcgcctgtctgggtcttaactgttattattattattatgaaacaacttatgggcatatgtacctgactcttatagaattttagatttaatgatgttgatgataactaatatttatatgatgatatacatataggcttaaatatctttttagtttctcaaatttgagtcaagtgtatttttggtcctccaaattaaattgatacttttagtcctataatttggaaatagctcactatcgctccctaatttgtgatcattgtagtccctgataaggaccaaaaaatcactgttaaatttgagggaccaaaaagatatttaagcctatatacatacacacacaacaatgttgtactgaaatttgaccagtaaagatgaacacaattcggtcgcgtgaagctatatattgtgagacatg

SEQ ID NO: 54634 - DNA, 470 bp, Glycine max
gctgtattaggacaccatagctccgcacatcatgactctagtatgtatatacatctgtaccacttgtattgatgttattattatatataatatatacatatttttgctgataaaaaaaatctccgaaaactgagatgatatatgaggaaactgtattattagttgagtgacaattttgtattatttgtttgtccttgactgttttgttacaacgtcctgacattgatatttgctctaatatttttctagttgtatttttcttcacaaggaaccttggtattatgtggaatgaacaagtattccattgaagcaatgagctgccacattctcgttttcttgttatctatgacaaagcaaaacaatgctctaccgtaaacattcacttcagaatattgtcatctctctagaacttcatgcttttagtaattctttgaattgaagtataaatgttcagaggtttttgctatgtg

SEQ ID NO: 54635 - DNA, 454 bp, Glycine max
  unsure (1)..(454): unsure at all n locations
agcttctcaaggaggtgagtttatttatgttatgngtgtgtgtagctaagctctagcttctcaaggaagttntctcaaagaagcttctcaaggaagttttctcaagatagcttctcaaggaagctacctagtctataaatagaagcatgtgtaacacttgttgtaactttgatgaatgagagtcttgtgagacacaactcanagttcaacttctctccctttgtcttccttcaatttcgtgctccccctccctctttctctccctctttcttttcctccattgaagcatcctctccaagcttcttatccaaggctcatcttggtggtgaagctccttcttccatggcttattccttaatggatggcgcctccttcaccttcttttcttgtcttcgctgcactccatggaggaaatcacattataagacccattgaactcaaagatcaccttcat

SEQ ID NO: 54636 - DNA, 436 bp, Glycine max
tcttatccaaggctcatcttggtggcgtatctccttcttccatggcttattccctagtggatggcgcctcctctcacctcttctcctttgtcttccgctgcatctccatggtggaaaatcaccattaaaggacctcattgaagctcaaagatccatcctccatagaagccccacaagcaagcttccatcaagtggtaatcaaagcacaagagcttcaagtaagtgctccttaaacctccattaatttttttgctttaccttctcttccattgttgtttcttcatttttctccatgtatcttctcttatgttgtgctgaatattattttcttgtttctttgtctaactcatttgttcatgagtgtatgaaattcttttagcctattatttgatttgagtcaaatctttcatggttaatagtccttaacatgttcatg

SEQ ID NO: 54637 - DNA, 466 bp, Glycine max
  unsure (1)..(466): unsure at all n locations
agctntagtcgggaatcgatcagcagcacctgctgtcctggctggaaattccttttcatcaattttcgatcatggtaagccttcatcttctgcttataaatcttagaggactcataggcattgagcctcatttcctccaactctaggagcaacatttttaacttttcaccaactaaagattcatcaaagttgaggaatttgagggctcaataagccctatgctccatctccaccggtagacgacaagctttcccatataccaccaaaacactataaatttaccagcttgagcacctattggataaaaactcagaagattccaaaatcctaatggttaacaccaaaagaagaaatatgatanggaaaagtagataatttctatggtacttaatcacannnattacttatgcgtagtattatcaaagttatttagagaacttgagtctncaacatgcatctacaacct

SEQ ID NO: 54638 - DNA, 416 bp, Glycine max
  unsure (1)..(416): unsure at all n locations
tttgcgtagccgctctgggtgctcattatatcccanaattaatttcctcttattactagctattttgaattctttagttcctaaatgtacaacctccaaattgttgctcgtacccctctttcttttctgcaaaaaaaaaatcaatatcaaagaaaacatggatgaagtcctaaggatgccatgtacatgtgtatttctgaagatatagtatttatattccatcaagcatacattgactgttgattacatgtaatagactttttataacatggttgccccaaatcacaattataaagcacaactaccaatctttcggagtcctttggttaatatgtcttgactccttatgaggtggggattcgtttaataatattatacttttgccttcccaaaaaaacttatgactgatcctcttt

SEQ ID NO: 54639 - DNA, 83 bp, Glycine max
cactttatatacctcaacaaagattggggaaagaggagcgggttatggaccacgggagggggaccaatggtggggatgacccc

SEQ ID NO: 54640 - DNA, 360 bp, Glycine max
  unsure (1)..(360): unsure at all n locations
aaaaanncctacgggaggaggaacgggaaatgacatttaaaaagctaaaggagnttctttccactcctcctatcttgacaaaacccaagtcagggttgcccattataaaatacttgtcggtcttcgagcatgtcgtcagctcagttctagtacaggaatntggagatgaataaaagcccaattattttgcgaaccgggtgccttctggtttcgagattaggtatcaaagttagagaaattggcattggcagtacggatcacagctagaaagttaaagcattattgtcatagctacccaattataattggaaccaattaatctatcataacaaatttacagaaacaggatcttgttgatca

SEQ ID NO: 54641 - DNA, 314 bp, Glycine max
ccaatatgtgaatcgatacacaggaaatttgactccatttaatagctgctgaaatgaagtttgaccactagtaatcgattacatcctctggtaatcgattaccagagagtaaatttgtttgaaaaagactctctaacttaaatttcttgggtaaacctttggctactccaattggaattcccttcctatttaatataccctttctaagactctagagactgtcttgatcatccatcttgaatatctttaatttctttgtctcgaataaagctttgagacgcatgtgaacctttagcatcatcaaaacattcagc

SEQ ID NO: 54642 - DNA, 468 bp, Glycine max
  unsure (1)..(468): unsure at all n locations
agctnagggacattcgtgacttgttctnattctaagattcgcgcaagagagatntatgagaatcttctattcatgtttccaattcagcaatgaatactgaatgcagaggaaggactactagaagggtcagataggttgaggctaatcaaagtcaagaaggaaaggtcagacaaaattttgaagtgacattatctgctggaattatgataagagaggtcactttaccaatcagggcaaggcaccaaagaagaacaaggctcacagaaacaagaagcgcgatgatgatgaatctgcaaatgcaacaactggatgaattgatgatgcattaattntgagcttggatagtcctgttgattcatgaattatggactcaggtgcgtcattccacactactccctctanagaattatcggctaactatatttctggaagatttgggacagttaccttgccatggaaaatctcttg

SEQ ID NO: 54643 - DNA, 451 bp, Glycine max
  unsure (1)..(451): unsure at all n locations
gtccttctgattctatntatgcttttttgactttatgacatgagaagaagttcaaagattggacctcttgctagttgttattcatgaatagcttaaacacttatgcttgagtgaaacaatagctgtgagactgtggtttaagctactttccttgatatttgtcttatgcctaacttcatctaattgtacaaagttacatttactcttctctttgaataactgcgtgctttgtgaaagacaagtgatgagggcattttgcttcattcttttatcatgcaatcaataaattttgtgcatacaccttcatacatagtcattgcattgttntgtcacttgngggaccagtgagatgttccttatttgcttgaggacaagcaaaactataaatttgagggagttgttagccaatgaatacgactacttttgtgtataagacctgcgtagagtgtat

SEQ ID NO: 54644 - DNA, 472 bp, Glycine max
  unsure (1)..(472): unsure at all n locations
agcttgaagggaagagagagatcgatcattatcacatagcatggtcttaaaagaagagttagcagcttgcttaaggtccaaaaggaacttgactcagcgtttgagcgagacagagatcaacatgttggctatcatcaccaagtatcaataagaactaagtctatccacagcccacgagcatagggtggcaaacgagtatgcccaagtgtacgcggaaaaggaggctagaggaagggtgatcgactcgttacaccaagaggcaaccatgtggatggaccaattngctcttaccttaaacgggagtcaagaacttccccgattgctagccaaagccaaagcaatggtggacacctactccgcccccgaggagatccacagacttctcgactattgtcagcatatgatagatttaatggcccatataattacgaaccgctagggaacttgtattgtcactcaaatcttgactagt

SEQ ID NO: 54645 - DNA, 302 bp, Glycine max
agtgaagtctgacgatattccgaagactatctttaggacccgttatggtcactacgagtatgtagtcatgccctttggtgcgactaatgcaccaggtgtgtatatggactacatgaataaagtctttcacccttactttgatagattcgtggtcgtattcatagatgatattttggtatattcaaagactagagaggaacatgaagagcacttgaggattatgctgcttacccttacgaatctacaactctatgctaagtagtccaagtgtgagctcttggttagagaaagttagtttccta

SEQ ID NO: 54646 - DNA, 409 bp, Glycine max
  unsure (1)..(409): unsure at all n locations
cctgtcatttgttgtgtgcaacaattatacacaatatatnttttcttagatatagcatcatttatactcccttactaattcgatactccagaaaaaaaaaaaaaaaaactcccttgttaaagtgcttttataagtacacattcatcaacattgatgtaaaattacaagatcatcaagaaacatcatgatttagacattaaaacccatgtcaaggttctaataactccactaagtggaagaaaaaaatagcaaattaaatggaagaagatacattactaattattttcatcacaactggttccttctagcatatatatatggctcctgggctgggcacanagacaaagatgattcttcttgtgttgggtaattcctggggcatacttcaaatcgatgtcttcctttacta

SEQ ID NO: 54647 - DNA, 453 bp, Glycine max
  unsure (1)..(453): unsure at all n locations
gctatatgcatngagatctttagattattttatactcaaagataaattaataaattgataaaaaaaataatttcataaaacttaccttattactgttaatattgaaaaacaaaaatgatacttaatagtaatataaatgaaaaaaataattaatattacattgaaaaattaacattacacttattttggaatggaaaaaatatatgttagttgtacttaatatgatttatttatttgtaggtgaagtttgagaagattactgaaatactttaggtaatccttgataggaggattgtcattgaaggaactaatgcttgcaattagcatctcaacaatatagacaccaaatagtgttagaaaatcaaggaaatctattttagttggttgaataagatatgtgagagttgtaaaattttttgtagaatttccacaaataaaaaatataatggtagt

SEQ ID NO: 54648 - DNA, 373 bp, Glycine max
  unsure (1)..(373): unsure at all n locations
agctngcacttcttcgctttcctcaaggacttcagcttctttgccacttaggccttttagctntgggaaccaagttatcccttgcatcctagacttcaaccacttgtgatagccaccgatgatgccattgctacaaccctaagctccttatcttacctctccgctgtattccaagctctacggattctcttaagtatcttcgcattggcttcattgaaacctcgtgcgatgaaaggtacgatgatctcctctgacgtcgcacctctcatagggtagcctagttgtcttatggccaacatgggattataattaatacaacccctcgttcccatcaaggggacgtttaggaatccttcacacgagcataacactt

SEQ ID NO: 54649 - DNA, 445 bp, Glycine max
  unsure (1)..(445): unsure at all n locations
atgaggaagtgtagaaaggtgaaacttcctgctnttattcgttgaccacaaagtggtacctggagatatgtcgcggnggtcaacagaccttgnggacgtcaggtggggtgctattgcccaaaaccaagcttgaccaatcccgacccaacccgggcatagtcagtcagtgagaatctgtgatgcacctaaacaggcgagctcctggcagtcaacagataaaacgaacaaagaccacaaagcaaggaggcttgtgtggtggctggccaactgtgaactttgatttatatgtgagatatggcctctggtaatcaattaccaagggtgggtaatcgattacaaggcttaaaaatgaagacaggaggctaagatggtctctggtaatcgattaccaaggggtgtaatcgaataccatgcttgaaaacgaggtcaagaagctaggagagct

SEQ ID NO: 54650 - DNA, 454 bp, Glycine max
  unsure (1)..(454): unsure at all n locations
agagataactgagacatgctgatcaacttgagnnacctgaaatcntaaantatcnataaaaaaagagggggnaacaaggtctggagacgattcngtatcttcnttacagaccgacaaacctcaatggtgagggtgaccagacactgacataccacctactgcaaatatatatagaggcattagatctaaacatcatggaagccatataaatagcggccttatattcccaccacattagaaacaaactcaatacaaggagtcataagtgaagcatacctaaaaaaccaagatcatgccgaaaggtataacagtcataagctataccaaactacaacactgccagaaggtgaatatcggctcaatgtaatcctagaatgggacctctcatacactaggaactcattgtaaaagtagtaatgcctaccagagctaatttacatgatgccacgaatcg

SEQ ID NO: 54651 - DNA, 269 bp, Glycine max
gactagctccgctcctgagtatgacagtcaccgctttacgagcgctgtacaccagtagcgcttcgaggccatcaagggatggtcgtttcgacgggagcgacgcgtccaactcatggacgacgagtatactgatttccaggaggagatacggcaccggcggtggacatcactggttacccccatggccaagttcgatccagaaatagtccttgagtattatgccaatgcttggccaacagaggaaggcgtgcgtgacatgaagtcctggg

SEQ ID NO: 54652 - DNA, 367 bp, Glycine max
  unsure (1)..(367): unsure at all n locations
gacctcagagcaccgcagctgcagctngaggcatgaaacaagttaccttgtctctcaaatcgagagggtgggaaacatacactgtatgttagatgattccatttatgaagacacttctgacattgatggggaataactcgatcatcatctgacaagcgtcagcaagccgctgtcttacatcctcggctgaggctgccggcgcctatgtctgaccacaggctataccttggagatggttatagcccttggctaatagcctagccttattcctagtgatcatgccatgttcatgaaatatatagttaagcacccttctagtggccatgatgttcatatttacggaatcatgcaccaactctaacacatg

SEQ ID NO: 54653 - DNA, 113 bp, Glycine max
ataattggcatggattgctttacaatatactattattctattgtaaataatggtataatctgctcaaactctatatcatataactaccttatatttaaaatcatgatatatta

SEQ ID NO: 54654 - DNA, 317 bp, Glycine max
  unsure (1)..(317): unsure at all n locations
ctttctacaagaatgaagctctgataccacttgttatacttgtggtctcagaaatcttaagaaggggggttgaattaagattatgctaactattcccccaattaaaacctactcagaattttatgcaagttctaagtnnnnnttataacaaattacttagatgatgaatcaaatgagaaaattgaaatgagactaataaacaacagttaatataagagataaaganaatatagaatgcaaaactggatttatactggtttagccacacccttgtgcctacgtccagtgcccaaccaacccgcttgagagttgcacta

SEQ ID NO: 54655 - DNA, 346 bp, Glycine max
tgatcatacaacacatctagaggccttctaaagttaagcacactagaagaggttcaattaatcaaataaactgcagagcttacagcctcaccccataaatgagatgggacattatcatctatcaaaagtgatcttgtcacctctaatatatgtctatttttcctctcagctactccactttgttgtgtgaataaggacatatggtttgattcaagattccattaaagttcatgaactctattaatttaatcttaaaatattcccctccattggttgatctaatgaccctaatatatgtgttaaattgtatagctatcatctaatgaagggacaaaacacatcacac

SEQ ID NO: 54656 - DNA, 230 bp, Glycine max
  unsure (1)..(230): unsure at all n locations
cttaagccttanacctcatcatcacgtctctttctatatacanattggagctctttcttctccattttgcacaagctcaaccaaaggagagatgagtctattnttttcttnttacaagcttcatacaagtgctnnnnnngnnncttccataaaaactctcgtaaggggctcttaatcctccttatcttcctttccttaacaaattcgttgaancttttcatttatggttc

SEQ ID NO: 54657 - DNA, 319 bp, Glycine max
  unsure (1)..(319): unsure at all n locations
gctatccaagcaccaagttatgggcaagcctatattatatactgcangcanggattnttgctnttntgtctagaagcttcaacttggaaaaatctgtaatccttgtacatactatatcttgattntgactngnnnnanannaattgacagggaatcaagtcctgttatgttaatgaaatgaacttgcagaaatttgaacctcccaacaaatngaaaataagtgtataattgctttagtcacgtagatgtctatccacgtcttttaaaagtattttattgtancctgttttatcatttgagtggtttaacacggttttgg

SEQ ID NO: 54658 - DNA, 350 bp, Glycine max
gtgtgttttcaccttctcgctaagccaatctgtttgcttagcgagcgtccgctaagcgcaacactcatgggctaagtgtggggaagacactggaagaagatgagctatacaggttcgctaagtgcactgcttcgtctcactaagcgcaccgcttcagtccatccgctaagtgagaaaggcacgtgctaagccaaaattcactaatgttcgttaagtggtccataattgtgctaagcggtccataattgcgctaagtgcacgagcacaaacaagaccacctatttaagcctgaaatcaaattttaaagagagagtttggactgggattcatagctttgcatgtctagagat

SEQ ID NO: 54659 - DNA, 422 bp, Glycine max
  unsure (1)..(422): unsure at all n locations
gacatagatgatcactgacttanatnatatattcgccatgangggcatccaagaacataaggagctgttgaatgagaagaaaatagactagagcctttctcgcataagcaattctttgntntccantttggctcaatattattgcaaatagaaaatgtatagctgaccttgagtgtttgtatgcaaagtaaagaaaaagacaaaagtatttggctgtaaattggtaacactgtgagctcttgatttcttgacttagtatcaacatattgtttcttgattgtttggttccaacctcaangcaaatttancatctgcgatttaagcaaaagagagagtcaacaaatcanaatggtttactattaggataattaactaatacatttnttggatattaagagactatccattgattcttttatttt

SEQ ID NO: 54660 - DNA, 111 bp, Glycine max
  unsure (1)..(111): unsure at all n locations
ggggggtgaaataagatttccaatctntctctattaaaaaatctatcttacttttaccttaattataattccttaatgacaatcttttaaatgttaattaaatgaagcaac

SEQ ID NO: 54661 - DNA, 304 bp, Glycine max
  unsure (1)..(304): unsure at all n locations
tacgagtgtcgcgatatcgtacgggactctttttacatccgagtcaaaagntattaccgttgacttttcctagagctccccgtttcaatttctagcgtctcgatagatagaagggctcaatccgacatctnanntnaaagttattgtcgttcgacttttcttagaacttccgttttaaaatttgagcgtctcgatatattacagggcttaataagaaatttcnagttaaaaattattgtcccttgactcttcttanancttgccctttcaatctctaacctcttgatatattacccggctcgat

SEQ ID NO: 54662 - DNA, 380 bp, Glycine max
  unsure (1)..(380): unsure at all n locations
aaaaaaaggggcgatctggtcagtgatactatgacaataacatattttcactatatatctcaacaagatacactaccaaaacataacattagtgctatactcttcatagagaataaaattaggcctagaattttaagttggataaattagatccctgaactttcttttacaatagttatcttccctcattacaaacattctttattgtnaaattcaagtatcgagttgaacagaaataagtttgaagacaaactaactttccctatcctttacaaanaaaaccatattttacattaattaacttgtttttggcccatcaacacanctnctaaaaaaaaaaattaataacaaataattcttttgttggatcaaaaaaatgg

SEQ ID NO: 54663 - DNA, 213 bp, Glycine max
taacatgaagggaaaaatcctgccaaattttttattaactacttaaggaagggtctctcacatccggacctaattacatcaaacaaaataaaactatcagaagcaccacataatgatcgcggagaaaattattaatgtagacagacagacaatagagcctgactcctagattattcactgttaaagaataactatattaagcaataattaaat

SEQ ID NO: 54664 - DNA, 359 bp, Glycine max
  unsure (1)..(359): unsure at all n locations
acggagttttccgactatgctcttgtgtggtgttacatgctattaaaggagagagcaagaaatgaagagccaatggttgatacatggacggagatgaaaaagatcatgaggaagcggtatgtgccggctagttactnaagggacttgaaattcaagctccaaaaactaacccaangcaacaaaggggttgaggagtatttcaaggaaatggatgtgctcatgattcaagcaaatattgaataatatgacgangtaactatggctcgatttcttaatggctcgactaatgatatccgtgatattgttgagctgcangagtttgttgaaatggatgatttgcttcacaaagcaatccaagt

SEQ ID NO: 54665 - DNA, 419 bp, Glycine max
  unsure (1)..(419): unsure at all n locations
atgggcatngtgttcatccagcatgtgacttaatctttaaacaatgtcgggctgaattccagaatgttgactacaaaaatgaatattaaaatacattcataactgtaacaaagtattatgcgtcaatgattacttttttggggaattcaaataaaggattactacctcatgacattaattctattttaaacttcattntctgtgtcaaagatatatagttgtgcaaatttaagttgttttccaagcattggtaataggttgcctatcctgtggcatggttgaccatgtatcctaattgtangaggtcctctggaatcattaattgatttgtctagtttaataccagtagaagtaaaggcanacatcatgttatatgctngtatgttatgttgataattttactatcaatcgtattatca

SEQ ID NO: 54666 - DNA, 346 bp, Glycine max
  unsure (1)..(346): unsure at all n locations
acccagctcgcccaggcgagtctggttgcttccttttattcaacagccnnccggggaatctttagagggcccacatgggcctggctgctatatgcacctccatttgtactaagtacacacacgtaactttnntttggtgattctttttcttaaagttacggaaacttacaaatttcttaacgatacttgttttcttttcgtaatgtacggaaccttgcgaattacataatcatcccctttttgacttacngaatgctacacaacctcactaattgtgccacgatgcctccatttgattcccaatgtgtcacataaccttacggattgtggcataatatattttttt

SEQ ID NO: 54667 - DNA, 218 bp, Glycine max
  unsure (1)..(218): unsure at all n locations
cgagcaatggttaaccaaacgttcattatacatagttatataacaataactaatcgaggggtatgttggttttgtcatttaaacaacaatcaaatcttaattanaaaataaaaaaattaaaacatgttgtttncccttgattcataaaccantctcttatcctangttacgaggatttatccctaaccagttcaaccacttaatcnnaaacattatta

SEQ ID NO: 54668 - DNA, 311 bp, Glycine max
  unsure (1)..(311): unsure at all n locations
gtgagaaagaaggagaaacccatgctgtgactggcattcctatatgggcaagtttcccaccaacccaacaatatcattactcaaccaataacaaaccttctccttacccaccgcccagttatccacaaaggctattcctaaatcaaccacaaagcctgtctaccgcacttccaatgacgaagaccacctttatcacaaaccaaaaaacaccaacaaaaangaatnttgcancaaaaaacctgtanggttcaccccanattccgtngtcatatgctaaacttgatcccatatccactcaataattcaatggt

SEQ ID NO: 54669 - DNA, 92 bp, Glycine max
  unsure (1)..(92): unsure at all n locations
tatcgcttantccacaaaaaagtttgtgggttctgtccaataaacgagngngaaacgattcaacacacgagaataagttaatcttttaacat

SEQ ID NO: 54670 - DNA, 361 bp, Glycine max
  unsure (1)..(361): unsure at all n locations
actcaagctggtcgaggactacccattgagatcaagatcttttttaacaatgaagaacgcgaagaacgttgaaacctttcgaaattcctcacgaanaacgttacggaaacgtttcggaagcgcctcggcttagattttcttcacggaaacaatttttccaagcaaattcgaaagagagagaagtgcctaaggggctgaaccccttccttcttcatttcctcccctatntatagcaaaataggggaggtggttgccgcccagctcgcccaggcgagctcagctcgcccaggcgagccaggttgctttccccagaagcaacagccttctggaggaatattctggagggcccaagtgggtctgg

SEQ ID NO: 54671 - DNA, 138 bp, Glycine max
  unsure (1)..(138): unsure at all n locations
gatgaatgctgaggaagctttacacaaatttttaagaatcccggttcggaattctcccctttttaaccctgccatggtacaactgcccaagtacgtcttaaagcaaacgaccttcttgtttcttcccccgctcntttt

SEQ ID NO: 54672 - DNA, 253 bp, Glycine max
  unsure (1)..(253): unsure at all n locations
caacacacaagaagttttatactggttcggcaacaactcgtgcctacatacaatncccaagagacctgcggtccttgtcatttcttttccatccttgtaaaaatactttacaagcaaagatccacanngtngaccctcactataacttatccacaagtgattgaccctctcttgtctcagtcaaaccgcagtnatgaccctctacttgaccacacaggattgaccctttattgtaccaaaaggatgtatctcc

SEQ ID NO: 54673 - DNA, 200 bp, Glycine max
  unsure (1)..(200): unsure at all n locations
attataccctttctttcaagttttgaaaattcttacgaagaagttttttgtcnttggnnccttttcatccaatagtgctttgactttntacaaacaaggcatcttgtacactattgtgnangtggcttcacgatgaaatccactaagtgaactgatgagctttcttggatccttatgcttttttcaagntgtggaaacat

SEQ ID NO: 54674 - DNA, 157 bp, Glycine max
  unsure (1)..(157): unsure at all n locations
aagtgctaatagaccctcagtgcaatgaataaaaacgtaaggcgacagtgggtcacccaaccttatccctttccctggaaaataaatccaacaaatcccaattgatcatattaatttttnatttttnnngccnnnnntntccccccccccttttggc

SEQ ID NO: 54675 - DNA, 285 bp, Glycine max
tgatgacaaagctcagagatgattaagatgagtcagaacattcccaaagaatgatttcagattggtcagaaaaattaagaatcagagaaattgtttcagaataagaatcagaatatcagatcagattcagaataagagaaactcatcagatagtactaatttttttcaaacattgataaacatgaagttacaaatcttttccaaatttactctctggtatcattccatggcaatttgtttcaaagcttcactgattacacgtccattatttcaaaggggatcgat

SEQ ID NO: 54676 - DNA, 128 bp, Glycine max
attctacctttttttagttacaaagccgacccctattcatatcagaatttacgaaatcatagtttgcacttataacgcaaccatatatcataaaatttgtggagaggcactatgaggatcctcattca

SEQ ID NO: 54677 - DNA, 209 bp, Glycine max
  unsure (1)..(209): unsure at all n locations
actacgcttaatatatattactctgatacatatcacatgattatgttttaccatcactatagtatcatgagtatgtgttatctcagtcaaaacttatntngnttctcatcatcagaaagatctgtaggtctagactgtccactgacntttatacgatntatgatatcctagattttgatgattataaaagtataagctattgatgaacc

SEQ ID NO: 54678 - DNA, 341 bp, Glycine max
  unsure (1)..(341): unsure at all n locations
aatgctactcttaaaacaaanatggtatacaacctcctccaataaacacaaatatcaatgtaaatttagagcaaactcatgcatatacttncttgcgaacattcactcgcacaagatattcttctaactaagaaaaattcacccatgcacaatcaaggcaccttcgttacctatannattatatgtacttccaaggtgtatttgctactctcatacatgcacttccttggctataattttatacatgcatactcaaagcatcttggctaccaaaaattggacacgtgcacattctggtatttctaatacctatgcatatacaaactttgtgatgaatcttg

SEQ ID NO: 54679 - DNA, 335 bp, Glycine max
  unsure (1)..(335): unsure at all n locations
ctggttctatatgctattctcaatgtttagtataaatttactccatataatcatttttcgccttagtcctataattctttttatatttttaacatattggcctctataattgttctaccaaattagtctttgttattaaagttataccacgtgatacatcttctatttacggaataaacaaaanaataatgttttaagcgcatggagtaaaataaagntttcttattanacnnncnnnnnnnnnnncnnnnntnngaccatanttcaattaaccaannantnncnnnnnaaaacacgcccactgctgataaagcgtgttcttattgtttattaaa

SEQ ID NO: 54680 - DNA, 232 bp, Glycine max
tgcctatagagctacaaacgtcttggaattgatacataccgacatttgtgggccaattcatacaccttcatggaatggtcaacaatattttacatcactcatagaccattacttcaaatatgcatatatgcttcttatacatgaaatgtcacaatctctaaatgttgtcaaaacatttaaagttgaagttgaaaatccacttcataaaaaaaatcataatgtcaaatctcac

SEQ ID NO: 54681 - DNA, 126 bp, Glycine max
  unsure (1)..(126): unsure at all n locations
tttttaagaaccatttcgatcggagcgcacctcccnntggactcaatatttagggttgggtagacgtctttctcacatganttaccngggnattgcgctgcgcgagatatgatgggtagttttact

SEQ ID NO: 54682 - DNA, 304 bp, Glycine max
  unsure (1)..(304): unsure at all n locations
tgctctanattacattgatgnttgtatttattggaggatgttgtatgcccgttctgttttaagggtagcatttcttggtaaactaactttccaaatgtttgccttcgcaagaaatggacccgaggaagcttgcctcaaagaggtccaagaaggacaaggcggccgaaggaactagttccgctcctgagtatgacagtcaccactttatgagcgctgtacaccaacagcgcttcgaggccatcaagggatggtcgtttctccgggagcgacgcgtccacctcanggaccaccagtatactgattt

SEQ ID NO: 54683 - DNA, 215 bp, Glycine max
  unsure (1)..(215): unsure at all n locations
tattttaagggggtctttggtttaaatatactaataggaatatttataataatatttgacgataatgntntcatttaatgtagatataagagttattattatttaaacattaaaataaagtgtttctaataaaatgttttnnattactacttataaaattactacctgtncactaatcatcttattgtcgtgaaaacttgtcttccttacataaa

SEQ ID NO: 54684 - DNA, 257 bp, Glycine max
  unsure (1)..(257): unsure at all n locations
aaaactttaaaaattttattattcttatanaaaacgcgaggttatggtgtaatcttgccatgagcttcaaaagccacatgtatttggaatacatgtggattactgaggaggacttaaaactaagcccacattttacaaaatacttactaaaaaatgttataaaacatttgacgaaatataaactgttcatttgaagacttatgtgatgtaaaaaaccacattctattacatataatatccaaaaaatccttaatttc

SEQ ID NO: 54685 - DNA, 82 bp, Glycine max
  unsure (1)..(82): unsure at all n locations
ttttcgtctcccactccaaggaggccttcggatcattctctcctttaaatggaggaatgnngagcctaanaccatcaattcg

SEQ ID NO: 54686 - DNA, 177 bp, Glycine max
  unsure (1)..(177): unsure at all n locations
cttatattcctgatatcatctggccctaactcgcattttaatacccctntttacctcctcaaccctttcacatcccctcctgccctgtggagtattgcttttcatgcctctactcaatgcttatgtgataaatttatactttttactaaccaaccatttttatctcctctcctcttc

SEQ ID NO: 54687 - DNA, 197 bp, Glycine max
ctattgcccaaaaccaagcttgaccaatcccgacccaacccagcatatcatttaggagaacctgtatgtccttaacacgccacctcctgccctccacaaattaatgaacaaacaccacaaatcaatgaggcttgtggtggctggccagctgtgaactttgaatgatatgtgggttatggcctctgggaatctattac

SEQ ID NO: 54688 - DNA, 382 bp, Glycine max
  unsure (1)..(382): unsure at all n locations
acatgcaaaatcgacggtcacaacttcaacaacacccagacttccacattacctcttcgaccattcttgcatcaacgttacacatcacaagattgaacacaagaaaccagggattaaataacaccgacttgccaactggagcagggttgagacctggttttgatcaatcaatgccccaaaatggaccaagagttgccgaccctcaaggtcggtcagaaaacaaccgaaacagggttgcgaaccctgcccaaattcctgggcaagctgacattccacaagcaaaaagggggctgaaccctggatccatgaattcattcaattctttattattatggatcttangaagggctctctctgagggcctaaactctcttttttcatg

SEQ ID NO: 54689 - DNA, 438 bp, Glycine max
  unsure (1)..(438): unsure at all n locations
ctaccttgtcttgatttctaagnncttaacttttttgaattattactcgcccttcatttaactgtctctgggcttggcggccacgctcaacaaagtactttcgacacctactgtacgttgatttgaccaaggctgttatgggaatgttgtgacaatgcttcaaaaccttattgatacattctgaaaggntggttgtcatgtggccatatcgacgtccttctgtatcataagtcatcgtccattcttcctttgaaatgcgatcaatccatgttgctatggttggactcagttcacgaaaattttctaaattttgatcaaaaatgtgcttgcaaggagtgtacgctgcataaaattagttatgaataacacatttnantttatatnaaagttaaataaaccccaccatcanatatgaaatcttacccaatctcttcaaca

SEQ ID NO: 54690 - DNA, 230 bp, Glycine max
  unsure (1)..(230): unsure at all n locations
tctgtcttgttcgaagcgattctcanctttatgacatctantcttcgctatcgcctaaagctatgtctgatatttggctttctcaaattccttccatgaatgttcggttactttgcaagtatgttgtatattaaaaaaatttctgaaactcacttttataaaatcaacacctgatttattcatacaatctcaatctacaaacttcactctaatccaactattaacttctt

SEQ ID NO: 54691 - DNA, 428 bp, Glycine max
  unsure (1)..(428): unsure at all n locations
atacctgatactcgattcaagaactcctcaaacacccagctaaaccactctttatgccaagataacctccaacaccacaattcccctcccacaaacccaccttgttgatgctttcatccttttgattagaattcaaaaagatcataggataagcacaagctagggtctcattctcttcccaaaaatcatgccaaaaattcactttatcccctacctcccactttccactcaatgcaattgtcaaaccaattagattcgttttgccaaaaggaagaattntggtgagcttcacttccactcaaccctctccaacctccatattangacttcaaggcctcactccaaaaacacccattattctctntaaagagatcccactctcacttgacaagtacgggcttattaaacaattccacatttttttatac

SEQ ID NO: 54692 - DNA, 242 bp, Glycine max
  unsure (1)..(242): unsure at all n locations
ctaaacgagagcatgagtccattaatgagtatgcccaaagatggacagattttgcaacccaaatcgtacccgccatgaccgagagggagatgatcacaattatggtagataccgtacctcacgtctactatgagaagctgataagctacatgcacactaactgtgcatatgctctcatccctggataaaggatttgatcctgactactaanangccagttcnaatatgctgccaatatggtt

SEQ ID NO: 54693 - DNA, 161 bp, Glycine max
  unsure (1)..(161): unsure at all n locations
cgatagnangaaacgtggaacatatggatggagaagttgacgctaagctcccgaagacnttgtaataatggattctatgtgagtctntgnnnannnanaanatggataccatgccctcacctccattaagatggagaacattggtacttggttggaaacat

SEQ ID NO: 54694 - DNA, 298 bp, Glycine max
ttttcttccctcgaagcggtagaatagaagtgaatctcccaccacgaaaagaataaagaagattccaatcaagataatcacaaatcaaaagaacgacattccccaatcattatgggaaaagccaactaaaaaaaataattccaatcaataatggcaatgtccaatgaaaataaaagaaaaagccctgactggacgaagaaaacgaaaatggcaaaggctttggccggcaattcgacatacaattgtccaatgaccaataagtaagaacccactaaatgctttccttgttccaccaatc

SEQ ID NO: 54695 - DNA, 340 bp, Glycine max
  unsure (1)..(340): unsure at all n locations
tgaactttgaagtataaatctcaaatgatcaacagttgaaaaaatgcacacacatggcctctatttatagcctaagtgtcacacacaaattggagggaaatttgaatttctattcaaatttcacttgaatttgaaattgtaattgtggaaccaaattttggagccaaaatttcactaattatgattagtggaatttagctatggttcaatccactaatccaagatcaagtccaagattctccactacctgtgcttangtgtcatganccattgtaagcatgaatgacatgcacaaagtgtgactatattatgtgacagtggggtgtagcaagcaaatgct

SEQ ID NO: 54696 - DNA, 420 bp, Glycine max
  unsure (1)..(420): unsure at all n locations
agatgaagagaagatgaaacagaaaaaattgttgaaagagatgaaagaaaatattgaaagattgattgaaagagatgagtaagatcaatgaatattgtttcatgccaaggtcacatatttataatttcttgatgactcaagtcaaaacttgtaactcttggcaattcctttaaaactaattacttaaaaagttatgactcttaaagaatcttcagaaacaagtcacttgaagaattgtgactcttggaaaggaagttttcgaaaacagtcactggtaatcgattaccattaaggtgtaatcgattacacatcaatagatgtgactcttcattttngaatttgaaaatcttaacgtttaaaacactggtatcgatacatgatatggaatcgttacagctttgtaatagctgaaaacaatgt

SEQ ID NO: 54697 - DNA, 377 bp, Glycine max
  unsure (1)..(377): unsure at all n locations
cgcgatacccgcgacctttggaagctctaagaactccaacgagagagaaaacgccggttcatagagagaaactacaagaagaaaatgactcgtgagggaagaagagattcctagcgaattctatatagacagaaaaggcttaggggccgaaccctctttgctcgagggtccaccacttaccataacaaaatatgggatgtggttggccctcactcactaaacaacatctaactaccctttccgccaaccaatcacaagaaccagctttacccanncccctctatccctactggtanatatcccacngcttaagtannntgcttcgntcntctctaatgcctttaatgcatgggtttnncttctacgctcatatcatg

SEQ ID NO: 54698 - DNA, 292 bp, Glycine max
  unsure (1)..(292): unsure at all n locations
tcatgtgagttagaactccaaccgtaagaaaggctgtaatgcacatgttgtgagtctagaccactcacagagatgttagacatgtgatgagcaatttatgtagtaacataataacatgcgacccttcaactaatgaattttcaagctatgattatgaatttgcactcttcctttntgtttaatgctttctaactgagagaagagtgtcataaagtgttttgttatatgaaagctaaaacaagataaatggttaccaataacattttgttaggcacacctcatcacttataca

SEQ ID NO: 54699 - DNA, 433 bp, Glycine max
  unsure (1)..(433): unsure at all n locations
cccagagaatgagtccacggaggagatgcctaccaccttctaagactggannagcggttctaatgactcctctgcggcttccacataaggcatagaggacgggcagctcaccaagaggtcttcctcgcctgacacgatgaccaaatgcccctccactacgaatttcaacttttggtggagtgtagagggaacaactcccactgagctgatccacgggcgccccaacaaacaactgtagggggggttaatatccattatttggaaagtgacttgacacgtgtgagggcctatttgtactgngagatcgatctctcccctaacctctcggcgggtgccgtcaaaggcatgaaccaccattgaactcggctttaagtgggaagcattgaatgggatttctccaagtgctctttgcatcatgttaaactggaccata

SEQ ID NO: 54700 - DNA, 472 bp, Glycine max
  unsure (1)..(472): unsure at all n locations
aactaagcttcatagatacctaataagcttctttatttatgtttanagagactcacgaaaggcatgtaattctggaatatctatgaggtcacaagctcacaaacattaagttaaagacaaatattaacttaaacgttatattaatgtgagaaaattacatctaatagagttcaatcctttcttctcctagctaagaaagaaactagacacttatgaaatacaagaagagagaagataatatgaattttcagtaaagggtggtgtgtagaggtgttctcctanggtttttgctgctgcctatgcctttctatttataaaatcatanatgtgttttatagaagcaaatgatcttcttaatttacaaaataatataatctatactanngaaatatctctttagctaatataatatgtntaaattgttgcattatcttccaagtattttcttcattattttcgagtacatctgcat

SEQ ID NO: 54701 - DNA, 462 bp, Glycine max
  unsure (1)..(462): unsure at all n locations
tgtagaatggctagacataatacatgtcatggtttggtttggttcaaggataaaaagggatgccccacattatttccatgacacaaatgcaaaaatgatgatttggaaatnttatgcaaaactggtcatgcatgcacctatgcggacactcaagtgtcaaaatttatggtcatgtgatgctagggctcangattcatttcctctattttaaatcaacccaatgtntccaaaatatgttcttttatccatttgtgcattcatccgagtccattttgggcgtccggngaaatntcacagcgttcacccttcgggtgtacacacacatttttcaaaaactanttatgatcagtgaattnttttcaaagaaaagtttgaagtcatctcttttcaaaagcatgttggttttccagctagacaacttattttnttttctttttcctctcttttttcttactggctctc

SEQ ID NO: 54702 - DNA, 371 bp, Glycine max
  unsure (1)..(371): unsure at all n locations
tggtgagaaatatacttatagttatgttatccttggcgngtatgttgatgacatgttgattacaggatctagtatgatagaaattaatagtttgaagcaatagttggcagaaaactttgaaatgaaggatcttggtccagctatacaaatccttggtatgagaattcttanaaacagatcacaaggaattttgaagttgtctcaggagaaatatatacacaagttgcttgacagggtttaccttgaagattctaaaaccaggaataccccnttgggatcttcatttgaagtttcaaanaancaatctttgcacacagatgaagaaaaatgctacatgtntagagtaccatatgcatcagcagttgggagtt

SEQ ID NO: 54703 - DNA, 297 bp, Glycine max
  unsure (1)..(297): unsure at all n locations
catctggcggaagagcaacaaagaattcattgggtcattactattcgaatagccccttattaaatgattgtacatgaatttattggcgtggggaattcgatcgaacagaaggtgtgcgttacggagatcaccctcttgaacgcagagagagagtagcttgcccagtgtgacaacttgggctgcaagtccatggagaatgatctgggcatggacaancttgagtcgtttcatggaggaacattggtccaaaaaatggtgaacggtttggtgagtgggtgacttcaactggtgccatat

SEQ ID NO: 54704 - DNA, 258 bp, Glycine max
aaaaactacaagacaacacgcgtcttttcttttaattttagttctctctctatgggcataacgtggttactgtgcctctagttctactgggggaaaaaagtatatatgacgggcaacacaacttgatgttaaggcaaaagccgaagtatgccctgattatcacttctgtcctattcaacctaccttctacaatatgtgctaaacaatcaaacctatctccttataaccaattttccgcggttctaaacactcttcttc

SEQ ID NO: 54705 - DNA, 270 bp, Glycine max
  unsure (1)..(270): unsure at all n locations
ctctacnnatgatgagtacgatgaatctaaatcatctagtgaggaatctgataatgatgatgatatacatgaagaggaacacacccccnnnccngntcanaacgttactactcacactggctgtgatatctctgaaaatgatctgttgaatgagatgaatgantttgaacattagggcnngatgattaccctacattaatgctttgaaaaaaaatgaccataaccaagacatanngaagaaagatcatgataggtgttgaacaaaaaaat

SEQ ID NO: 54706 - DNA, 170 bp, Glycine max
  unsure (1)..(170): unsure at all n locations
atacttcacaaaatatatatatgtatgtttaaggagaaagataccttatatatgnntnnntgnaccaaaaaatacttcaccaaatatatatatgtatgtntaaggtagaaagataccttaaatatgcatgtattgtaacaaaaaaacactttccacaatatatatatgta

SEQ ID NO: 54707 - DNA, 399 bp, Glycine max
  unsure (1)..(399): unsure at all n locations
cattgggcacctattttgaatttcctatgctgtctctacatacataanacagccccaccgtcccaattttgcaaaatcatattcatatatcattggggcatttcatcgagcacttggtgggcgcacgtttagacataaatttgcagagaatgggagcaatgtggcatgccccattgcttcagaatacaacctaagcctaaggccttttcattcaaatcctcaattcaagaaaacaagcaccaaagcaaaccaaaactgccttacaaatataancatgttctcacaattcgaggcaccnaaagatgaaaaaagcacatcaatggaaagtaaatacatcaaggatggaacactttgttgantgaattgaaataccaaaaacccaaaccaaatgcgatccaa

SEQ ID NO: 54708 - DNA, 386 bp, Glycine max
  unsure (1)..(386): unsure at all n locations
gtgctaatgtaaaaaaaaaaagtaactttgaaataagggcagaaatagagaagtgtcataatgtgccaacgaaagaaaacagtgttaactcagagggaataataggctgtacaaataatataagcttatgcagcgaaataaagtgaaaagtttttctaaggatgcatgctctcttataatcctaagttnttgaaatcccacaaaaaccatgatttcttgtttanccaggctccgtttcangccaataaaantcctttatgatcccccacntataantaaccataactttaattgaaaaaaaattcaaatttggaatattaattgtnggtctnnaatttaaacactcaccccacacttgtgcccagagaacactacctttacgaaat

SEQ ID NO: 54709 - DNA, 416 bp, Glycine max
  unsure (1)..(416): unsure at all n locations
nntgcggattggacttcgccagcggaaggatcaaagcgggtctgaaaagaggcaaatttaatcatcccacttggacgaatgagaaaactggggcaaatgaagagggtgagaataatggagaagcccatgttgtgactgccattcctatacagctcaagttcccaccaacccaacaatgtcattactcagccaataacaaaccttcttcttacctaccgcccatttatccacaaaggccatccctaaatcaaccacaaagtctgtctaccgcacttccaatgacgaacaccacctttatcacaaaccanaaacaccaaccaaaaaatgaatttttgcagcgaaaagcctatangattcaccccaaattccggtgtcatatgctaacttgctcctatatctacttgataatgcaatgg

SEQ ID NO: 54710 - DNA, 451 bp, Glycine max
  unsure (1)..(451): unsure at all n locations
gcttctagacatcatcctatctaaaatggtttctcttttcttgcataagcttgacccaggggtcaccagacataacatcatctatgtgttttggctcaatctcttgagaaagctccttctctagactttgtccctaggatcaccaatgatctacgactntggatgatgtttcctcggcaaacgtctagttggttctctgacttcttcaagttgatcgtccactagtgagttggacgcaagcctatctttactggacatagtagcaaacttgacgatattttcaattttcatttctgcaaaggactcatccaactttgacatttgagtggcaggtttattgtcattatatcttacatgaatagactcttccacagtcaagggtttggagttattcactctatatgccttggacgaattagagtatccaagtaagaatccacaatcacatttt

SEQ ID NO: 54711 - DNA, 395 bp, Glycine max
  unsure (1)..(395): unsure at all n locations
agctntatctaatgggaatctggcanaatctgtctatgagaatgaatcgatggcccttgtgctttgtattcagcactggagacattatttattgggcagagaatttattgtgcacacagatcataaaagcttgaagcattctttacaacagagagtttcatctccagatcagcagtgttggttggccaaactgctangctatcaatttgaagttaagtacaagcctgacttagagaatagagccgatgatgctatgtccagatgtcatggttaggtagaaatgaattctattatttcttttcccttgtgggctgatagacagaaacttttggatgaaataactaatgacccgtacatttaaaagttactgagagaagtgtaggagtctcctaatg

SEQ ID NO: 54712 - DNA, 199 bp, Glycine max
  unsure (1)..(199): unsure at all n locations
tatgaaaaaataattaatgctttataataatattattttacgaagtgttcaataaatattaatgtgaaacataatgatttcatatttatatataataaacatttatttcaactataagatcagaaaacataagagactgttgagnaccattaacctaaatataggatccaaactcagtatattttacatataattatgc

SEQ ID NO: 54713 - DNA, 413 bp, Glycine max
  unsure (1)..(413): unsure at all n locations
agcttccatcaagtggtaatcagagcacaaaagcttcaagtatgtgctccttaaacctccattaactntntgctntaccttctcttccattggtgnttcttcatttttctccatgtatctcctcacatgtcttgtgctaaatgttgttaacatgattctttagagtttccaccgattaaacttgctatagaagctagaattgattttctatggntcaaatttcttgttcttgttcttgaaccatgaattgtgttgagtttacgttcctttgagttttgtcttgttattttttgtggctgaaacctaaaccattaaattcttaaaaaaatattaaagtagaagaacacctcaaaaatctagaatgacttgttcgcctattgtagttntgtcatagaagtcatgtctagtcatga

SEQ ID NO: 54714 - DNA, 462 bp, Glycine max
  unsure (1)..(462): unsure at all n locations
catgcaagcttatccctgagnccttgtaacttgttgcttttcttagaacctgatttcatgaccggcttcacactcggtgggaaggtataaatgccaccttatcagatcagtgaaatgttntggtccttctggattctcttcagaattgcttcctagaggacgtttcgaaatctcactcctatcttttccttttgacttacaaggttccttcagacagtggagtatgtaacaggaacagtgtttcttggtttcaccagaagaagacatttgggtgtcatagaaagcaaagtactcagtagcaagcttaacaaaccccgcagtgtgttcatccttcttgctttcacgagggacaacatcatcatagagtttctgcagcacaaaaaagggtatttggttctctataaggatcaagtccccagcgatgttcctgctaagccatgagtgtgtcatgatcagatcatt

SEQ ID NO: 54715 - DNA, 405 bp, Glycine max
  unsure (1)..(405): unsure at all n locations
gggataattcttcatttggttttgatgaaagccccatggatcaatgcatataccataaggtcagtaggagtaaaatatttttccttgttttatatgtagatgatattntacttgcaaccaatgatcatggtttgttacatgaggtgaaacaatttctctctaagaattntgacataaaggatacgggtgacgcatcttatgttactgacattaagattaatagagatagacctcgaggtattttaggtctatcacaggaaacttatattaacaaaattttagaaagatttcggatgaaagaatgtcagcaagtgtcgctcccattatgaanggtgatacatttaatttgaaccaattcccacagaatgactttgtgaggaaacatatggaaaacattcattatgc

SEQ ID NO: 54716 - DNA, 423 bp, Glycine max
  unsure (1)..(423): unsure at all n locations
agcttctacttatatggcttggcgggcttacttcactntcttgtccccaacgcgagctctgaccaccgttcttccttcccgcgatgcttcttttcatgtccgcctgagtgggcttatagcctaaaccatacttcccatgatttccttgggtttttatcaggctagttatgccgccattgtctttgcctaaacccatcccgggttcataaccgttccccaacataactcgggccatcattaccgccgcatcggacagacaaggttgcccaaagagggagtccacggaggaaatgctgaccacctcaaaagactggaaagcggtttctaacgattcttctgcggcttccacataaggcatggaggatgggcagcttaccaagatatcttcctcgcctgacacgatgaccaagtgcccctccacta

SEQ ID NO: 54717 - DNA, 416 bp, Glycine max
  unsure (1)..(416): unsure at all n locations
agcttcaccattaccttactcataaccatcaaatgcaaattgccaaacactagaaagaaccctgtcttctctttctttctcgagcccctaccttcattactctctctctctctctcctctactaaagtgttaagtcttgtaatttttttaaagtatacttatttagtaactctatttatttttatttccattaaggcactgaaattaattaagttaatatctctatcttgttggagctggctacttangtagtgagactgagggaatggaaatctttgttgggttgttttgtttctaaagaaagcttcttcaacattatctgctgcatttttttttttctcaaaaagaggaatgatntttactccaaaacttaggaaaaggctattttttgaaaactcgtttgtttctttaaaaac

SEQ ID NO: 54718 - DNA, 289 bp, Glycine max
  unsure (1)..(289): unsure at all n locations
actcaacgagaagataacattagtagatgggggcagtgaagaatccgggtagaataaagatcattaaagatacttttgataagtaaattataatgaatgtaataacttttatagtccgaaaataatatttttcaatgttggcgaatgatgcctnctcgaatgcgaatctcgtatttgaggtcggggttcctcatnccacgtgattctagttctcaatctcatcgaatccctaactaattttaaagttgtaatatgatatagctatgaatgtgacgacgtgtgatacatg

SEQ ID NO: 54719 - DNA, 445 bp, Glycine max
  unsure (1)..(445): unsure at all n locations
agcttatngcctntagattctttaccagaattaccaggaatcttgttataattgggaaaacccttactgaaggaggtggaattgtcactatttntaacagtggataaagcaacagtatcagtaggtgattgagaactagattcaccaataaattctctttcatgttgaagcacaagagaaaaggttttaactaaaagaggcataggttccataagcatgacttgagactgaaccggtgcatacatatcattaagaccatgcaaaaaacgaattacatagtcatcttcacgttctttcttaagtttaggaatgagcccacaagaacaactactagaacatgtacatagcaaaaaacatcaatacaattccatttctttccacagaatcttcagacgaagtatatacttagaaatgctggaatcaccttgcttacaactttggattt

SEQ ID NO: 54720 - DNA, 317 bp, Glycine max
  unsure (1)..(317): unsure at all n locations
gagaagggaaagtaaaattaatcaaatttggcatggcgagtaatgtagatccgggatgttgagacgtccaagcaccaaaaacctttgtgcatactgctatatccaagaaagatacatggaatactccgtggtgataatttatgaggagcataatctcgcaaacaaggataaacccgacaaccaaatgggtgaaagtgagcataatttggagaaacatcatgtaagagctcaaaaggagatataccttntaacaagggagtaggtaaccgatttataatataaacaacacaacaaaaagcatcgagccaatacgtagt

SEQ ID NO: 54721 - DNA, 330 bp, Glycine max
agcttgaatcggacatccgtgtgaaaagttatgactcatttaatttcacgagagcttgcgttgttcaatttcgagtgtcactatatgtgatgcgccataattggacattcgagttaaatgttatgaccatttgaattactcaagagcttccgttgttcaattctgagcgtctcgatatgtgaattgtctgaatcggacatccgtgtgaaaagttatgaccatttgtatttctcaagagcttccgatgttcaatttccagcctctcgacatattatgcgcccgaatcggacatccgtgtgaaaaatatgaccatttgatttctcaagagct

SEQ ID NO: 54722 - DNA, 410 bp, Glycine max
  unsure (1)..(410): unsure at all n locations
naagcttttatcattgnggtaagtgaaaaggatgattcctaataagcaagaacgttcagtcattccagcctcccaggtgaatggcacatagaagttggccatagtaaatgggtaacaggcaaaatgtgacattgatcactaaatgggtagtcacttaatgcatatgacaaaaagatacatacctgaatggctagaaatgcagccatgcaaatgcagttccctatcaagcacaaaactccaagatgaaaattgtcaaacccaaggttctgtaagccaccaattaaccatccagatggctctggctgacctctggcacttatttcattntgtgttacatgaccgagttcggcatatcctatcanagctggaccacgatacaaaaccatatatatggcaccagagacacagat

SEQ ID NO: 54723 - DNA, 484 bp, Glycine max
  unsure (1)..(484): unsure at all n locations
actcagctgaactgttaattattcctatcctgaagtnnctttgtttctnntttctgttccagcaattttgtttttattcaaagcaagtttattattaagtagtatatatatgtgctcaccaccactggccacaaacaattagcatatctgtctacactacttgccatgccctatatctcgccgtggaaacgtggaaaaagaaaaactatcttcagcattcaacttccagcaaatatatataatttcattaccagcatgtgttactgaaggagatttaagggaaaagaggttcaggttctgatcattttggaagaatagctctggtttgaaagattgtgctaagattatgtccattcaagctcagtggtatgcaaataataattctgcttctccattctgcaacaatggttatggcgctggtgggcttattgactcccatatcaatttccaagcgaanaatcattntctacagcaacaacagcta

SEQ ID NO: 54724 - DNA, 417 bp, Glycine max
  unsure (1)..(417): unsure at all n locations
aaatatatatatatatatatatatatatatatatatatatatatatatacacacatatatatatatatatatatatatatatatgtgtaggcagaaagataccctgggtatgcgtgtgtgtggcacanaaaatatcacacaatatatatatgtgtgtgtaggtagcaagagaccccgggtatgcgcgtgtatagcacanatatctcacacaacatatatactcgtgtgtagggggcgagatacctgtgacacacacgtgtatatctaaatacctctcacaaatatatgtgtgttggggtggagaaatacctcttgagaaaaaagagagcgcgcgcgagatgagtatagcagaaagaattctgagagaggaatggtacataatatttctaatagtggggggggtgcttctaacacacg

SEQ ID NO: 54725 - DNA, 422 bp, Glycine max
  unsure (1)..(422): unsure at all n locations
agctttctagcttttcattggtgtattntgatctccttttggngctctaaattgtgggagtgtgctcaaatatatggggcaattttgatttgttttcttgcttgattaggttgaattaggggttggtatgagatggccctatgcctataatgcattttgaaacaataggacatgccacattgtccccgttctcttgctattgatgcctaaacgcgcgcccaccaagtgttcggtgaaatgcctcaatggcattagcgcgtgacttttgtaaggagacaacccatggggtattntggtttgtgcatantttctattcattcccgaaaaaggctagagtaattgccccacatatatcctagtcctagaaactgaaattttatgcaaaaagagcacaaaaggaggtgcatattgggtaaagttac

SEQ ID NO: 54726 - DNA, 255 bp, Glycine max
  unsure (1)..(255): unsure at all n locations
ctatcaccttgtacatacaaccaatcaatgagattggtctgtaatcatcaaatgactgagggtgtattactttgggaattagagccagaaaggaagcattactacctctanggaagctgccatgcacatggaactcatccacaaatcttctgaagtcaggtttcaccactccccagaattctttaataaaactgaaattaagaccatcacgcccaggacatttgtcncaccacagcttgcttgatctcatgatct

SEQ ID NO: 54727 - DNA, 381 bp, Glycine max
  unsure (1)..(381): unsure at all n locations
anngctttaactgaattgcaacgttccaattgttttttaaatggtgtaatcaattacaatatattggtaatcgattaccagtgtatctgaacattgaacttcaaattcaattgtgaagagtcacatcttttcataaaatgctttgtgtaatcgattacatnggtttggtaatcgattaccagtgacaaagtttgaataaaaatcatgagatgtaactcttccaatggttttcaagtttttctcgaggttataactcttccaatggttttcttgaccagacatgaagagtctataaaagcaagaccttgacttgcatttcaataactttttaacaattctttagaacaacttttgagaaacctttgctacttattcttcttc

SEQ ID NO: 54728 - DNA, 457 bp, Glycine max
  unsure (1)..(457): unsure at all n locations
gtcacctgcggcatgcaagcttgtaatcgattacaatgaccaaaacttgtttaaattaaccatggattngaaaaaatggtcttcataaaagttgtaactatggatgttagctaactaatggatttggtttcccttaacaatgttgtgtataattctagaaatgctgcttaaattagtgaacaatggccaagtgtttgataataagtaaaagtttcatatggattgtaattttagacataatatgcttctaagctaggcttttgggaaaacataaaagttggagataatcgttgtagctttcaaatgagacaataaccaacttgactaagttagtatatctttatttatcaggtgttggtgggaatattatattgatgatgataactatgttaattaattaatgtcttagattntgttggctgatttcttgatgatgatatggcattgggttgagatg

SEQ ID NO: 54729 - DNA, 403 bp, Glycine max
  unsure (1)..(403): unsure at all n locations
agcttaggctaaattagtctaaactttcatatgctatttaagctaagtctagtccaacaagagggatcatgatgcaatcctccctaggaagggaccaatcactagaaccatgagcaagaggctccaagaagattgggctagagctgctgaagaaggccctanggttctcatgaaccttagggtagatttctgagcccatgggccaaggttgggtccaattatctttgtacatattagactaggatgtcattatatttggtccttgtatatagggctccatattgtaggtagggtacccttgaaatataggatttttcagcccttgtatttttgggcacctagactagtttttatattaggggtagttttgtaatttcacatgcactaagtggatattngatat

SEQ ID NO: 54730 - DNA, 437 bp, Glycine max
  unsure (1)..(437): unsure at all n locations
agctntnggcaccattaatggctacgcaagtatccataatcatattaaacatatcaataatcaatatttaagcttctaaatactaaaccccaacaaaagaactcaagattcaagccaaagaactcaaaaccatcaaaaagaaagaaaaaagggggtaagcttctcttacatacaacatctccaagctagatttgagaagaagaaaagaaagattttgagctcactcaaagaacttggtcatatcaacaatatcatcacctcaccacccgtggaaaaacacaatcaaagaaacactcatgagagtttctacatcaaaacccctataggtcatcctaataaaggaagagagagagaaaaaaaaagaggagaacaaagagaccaaagggagaaagaaaggtgcataccaaatagaaatcaacaaaagagctatataggag

SEQ ID NO: 54731 - DNA, 369 bp, Glycine max
  unsure (1)..(369): unsure at all n locations
catgcaagcttctacatcgatgganaaccagcatctactgacgggcccaacaccgtctttgttccaggngtcgttgaatgtcgacaacaacgacatcggtcaactagcacccgtctttgtaatggaaaaaaacaacgtcagtggctagaaaagaacagacgttataaataaggattcaacgacgcacagtataaagaacccgtcgttggtgtgatccatntcaacgacgggtatgccaaaacacgtcgttgttttgtcccatttcaacgtcgggtagcctaacacacgtcgttgtatgcttccatttcaacgtcgggttagaaaggcccgacgttttccaacatatcaacatcggtgtccctagcaccc

SEQ ID NO: 54732 - DNA, 432 bp, Glycine max
  unsure (1)..(432): unsure at all n locations
agcttatgtctccaaagatgtttattntgttcttntatgtaatacctatatgtacacggttttagccccacatatagtttcttttcctagtccattcacacacacgtaaccaagtattgctctggatgaaaataaaatatttggactacccaatctaccagtatagtaattccttatgcaaaattaaaggttagtttaagtaaaaatatatatacatataggcatgaaaagcaaaacaataacccaagtgtgtacctttgacattctaggcagagggtggtgaagcaagcagggcagctaaggacagcatcagcgtcacgacgcccttgtcttttttatcaatccacttttcatccttatcatcaagatctgggtcataaaactctggttgggttgtgagtctattatcatcatacaaactggtattaaatt

SEQ ID NO: 54733 - DNA, 213 bp, Glycine max
attttattttcaaaagtgtactaatgagataagtgatttttaactaacagtatgtgaataattattttaaaataaataaataacttataaagatatatcatatcagtcataaagagaaccggtgcataattattatataatcatatataaaagagtattctataatatgagaaacttatggtgattgttgattgtaaaccacaatatattatg

SEQ ID NO: 54734 - DNA, 407 bp, Glycine max
  unsure (1)..(407): unsure at all n locations
agctngcataacataagctcaaatagaagctttgaacttataataacaacttcaaatagatagtaataatatttacatccgcactcagcggaatttcccaacaaaggattctagccctccattagaagggagtacctttcacaaataagagaaggggttcagagaaaataccagattacatagcagtggggatgtctcctccacctctaggaacctaagaatcactcctaaacctaaaatctacctaaaagttagggcctttttcttccttgctcagcttttcctctgttattcattcagcactaggctcatgcagtctattcagacctctctctctttttctttgcaattcaggcttaaaaagggtttttttttccatgaaggccgcttagcgcgcgaagtgaaat

SEQ ID NO: 54735 - DNA, 206 bp, Glycine max
caaagatccctcaaccttcattttcctgaggatacacacttgaatgtgacatgtgcttatcatatgggagtgttggggcattccattgagcactatatgaccctgaaacataagatgcaaagttagattaatgtacgctagctgagatttaaggaggacaatcactcgtgaattctgatgtcctcaagtgatactatgcatgatgc

SEQ ID NO: 54736 - DNA, 440 bp, Glycine max
  unsure (1)..(440): unsure at all n locations
agcttaagctccttcaactgcacaaggctcttaatatttgaagagtatccttgtggaaccttcacccgacgaatacactgacaaaaacttatcttctcctttntggacaaagtatggcaagctaggggcaagtaaattttcttcccatcagacattggatgcaactgtgatcgtatccccatataagctagatcttgacgggtattcaagccatccttcgtcttgccttgaatgttaaggagcgtcccaatcacactgtcacaaacatttttctacacatgcataacatcaatacaatgtctaacgtctagatcaaaccagtacagaagatcaaagaaaatggacctcttcttccatatgcaagtcttacttttatccttcttttgggtcttcccaaatatagnattcnagtgttgaacccgctgatatacctgctcacc

SEQ ID NO: 54737 - DNA, 401 bp, Glycine max
  unsure (1)..(401): unsure at all n locations
tcatatatgcaatttgaagatattntagcaaatttccagacagccaaattagcccaatattgagtactcaagatgcatatataggatgaagtttgttgggtggattacttagcttttgtgctgaataattaattaagttcatgttaaacaagtggcctcaataacttaaaaagggagggtgaattaagtttaaaaaatttctcctaacaacattttaattctctctttaaaatgattatgcagacttaatatgcagaanagaagtaacgaacaatttacttgatgcttctttaaatatgcaaagtaaaattaaactgcaataaattaaaagagnttatggaagagagagttgcacactcagttttatattggtttgaccacgttctatgcctacatccagt

SEQ ID NO: 54738 - DNA, 429 bp, Glycine max
agcttcagacaaacacaatattccataatcttaagcttaggaatggggttcattggcccaacccagcctatgggtgaggcataggtgataatggaaatagaattctggcacacaaatgaacatagaggcagtgatgaagtaaatatattgaaacagaatggatcagaataagaagtgaatgataataacagaaagaactactaaatccactgatcagacgcaaagacagccaattcaatgaaaagtttcctagtactgttttttccctcaacttcctgcccctaaaatgggggggcagaaagccatgcaaatggaaatgttttaaattaaactctatacaaaccataaaaaagggaaacattgttacaaaacagcaagaatggtaaaaattccacatattctcaacccgtagggttgcattgtgttccc

SEQ ID NO: 54739 - DNA, 291 bp, Glycine max
  unsure (1)..(291): unsure at all n locations
aatatatgcacagattaatgtcatgctaataattgccctttatctgtatggtatttgagaaacttatttcacttttttcatgaatagtttgtctaaagatgatgtcaataacaataattcttttgggggattnttcagggtttcaaatacacagactcatcaaattgctgctaggaaggaaaagcagatggaagcattgaaggctgctcttggcatagtctcatctgaagccaatgaaataaatgaagatgggactgatgggcttggaatgatggaaaaatggtctaatgt

SEQ ID NO: 54740 - DNA, 445 bp, Glycine max
  unsure (1)..(445): unsure at all n locations
agctntcaaaaattttctatctttatagatttgtatataaaactgaaactaaaaacataaagtgaacataaaatgtatcaaaagcaggaatatcttgagctgtaacaggccatgggtcctaggtgctctgtgttgcagtcatatcaactacataatccgcattagcaatgccatcctccttatcaaagacctccaaaactggtgaagtagctggtgaagcctatggagtggcctcgcgagcgaccttcgactctaactgaggctcctggactgtggaagcctcacctccccccaaatgagaaggctggactcctggccaggccacttgagaagtgaactcctccatactgataataggcagatgttgagtcgagtcgtgcatactctgcatcaccaggcataagccacgatggatgctcttgcacatctgcactatgaccttgga

SEQ ID NO: 54741 - DNA, 329 bp, Glycine max
  unsure (1)..(329): unsure at all n locations
acatatcggaagacctataaatggtattttcatttaaataatattattggattggttcacacaacatggttaaaaaataattaataaaagttgagctattataattttggcatgcataattgtgacaagaattccatgtggctaaattatatgggtatatcatgcatagctttgacatgattgccatatgatgaaacttacatacaatccattaattgatattgtcatattagtgcatagttgcgacatggntgccatatggcgaacaaatttgtaccatatcatccacttaaattatntttacccacacanagataaaaaaaaaaaaa

SEQ ID NO: 54742 - DNA, 418 bp, Glycine max
  unsure (1)..(418): unsure at all n locations
agcttcatgattgcctaagtgtggaccctttttgcaatcctccattctcccctntnttcggagccccatgaatgtcattgcctagcgctgttcatgtgtcctccaccttcgagtttggagctatatttcatgattgcctaagtgcggaccctcaagggcaatcctccattctcccccttttttggagccccatgaatgttatttcctagcggtgttcatgtgtcctccaccttcgagtttggagctatatttcatgattgcctaagtgcggaccctcaaggcaatactccattctcacactttttcggagccccatgaatgtcattgcctagcgctgttcatgtgtcctccaccttcgagtttggagctatgcttcatgattgcctaagtgcggaccctcaaggcaatcctccattct

SEQ ID NO: 54743 - DNA, 245 bp, Glycine max
  unsure (1)..(245): unsure at all n locations
attgatcattctactatgacgactgagaaaactggngccaatgaagagggtgagaaagagggagaaacctatgctgtgaatgccattcctatacggccaagtttcccaccaacccaacaatgtcattactcagtcaataacaaacctccttcttacccaccacccagttattcacaaaggccatccctaaatcaaccacaaagcctgtctaccgcacttccaatgacgaagaccacctttagcac

SEQ ID NO: 54744 - DNA, 436 bp, Glycine max
  unsure (1)..(436): unsure at all n locations
agcttacctaattaacctgaaattgagagtttatgattattaaacacacaaaatgaaaatactaagtatttattacctatacttaacagaaaatacttataacactacaaaataaccataaattgggagagtttgatacaatttataaaagttttatacacaaaagttagttgttttcaccgactaacagtcgacagaattattatccaatcttaagtgtagaactttagcggattttaggtgatatagagataccttctcgactagggtttacaccagagaggatagtcaacaaccattctggaaaaaaaattttctagccggtcttccaagatcattatgagataaggttagagataaaatccgttgccaatctgtcaatggaggcattccatatgagagtttaagttatggtcaattaatntcgcatgtctag

SEQ ID NO: 54745 - DNA, 247 bp, Glycine max
tttcacttttggtttttaccttctctaccacaaattcatggctttttcattggtgatgatcatgggaggctaacactaatcatccaagatcactctagcaggtggaaattgagtctgggttttgatttctaatccttgtgaatggtcatctttttcttcaatcctacttttgattctcatgattatgattatgcttaggattgaaaatggattacgttatggattcataagtgaatttgagttctag

SEQ ID NO: 54746 - DNA, 192 bp, Glycine max
  unsure (1)..(192): unsure at all n locations
gnctnctcgtgctgctatcttttttatttttgtacggtttcatctaattttagactatattcagcaattactatcattcaggacttaatattttctttaaaggttcttttaactgacttataaaatactctgtcgcctgccaattatttttatcgtgttcctatcttatgcttctcattgatacctcattct

SEQ ID NO: 54747 - DNA, 440 bp, Glycine max
tcttcactcggatgttcggtccagccgcatcagatctgtacacgataaatttggatatgagatagctagctagcgatctatgaagtatgaccaaatcactcgaactgctcaatgcgcgtgcatgatagtgtttgacatgggtataatagttgatgcgaacggagatctatattatatggactcatgcgggtaagtctgaccttcgcatgcccaacatggctaatattttattccgacttaattcaattgatcaaattgcgccgtcttgagaaccaagggaaccatatcatatctttggagcctggtggacacgcagaacatataggagctcctctatgaaccttgcatcagacttgtgcagaagttaatggccacctctatcaagtacttggttcgctgatgcatcaaccattatacttactctgccattggagcgagtt

SEQ ID NO: 54748 - DNA, 447 bp, Glycine max
  unsure (1)..(447): unsure at all n locations
agctngatcaaaacaattatctaatcattctcttccactcaaatcatacaattgctcattcaaattattctcaaacactcatttcataccaagcaatccactgcatatcattttcaatcaattcactattcaaacacacttttggtacaagcaaacaactcaaagtgctgaaatttaaataattgaaatttaaaagaactgaaatataaaaactgaaattaaaatgactgaacataaatcataaaataactgaaaataaactaaaatattcaagatgcacaaatttaaatgttctgctcctgtggttgatctttattaagatctagtgttggagctactgatgaatcctggataggctactttggctctgtgactagtgtagatggctgggtctcattaagaacaggtgcaggagatggctcatgtatctgatctgtagaagtcccc

SEQ ID NO: 54749 - DNA, 104 bp, Glycine max
agggatttgaggtaacatgctaaacatcaatctcataagtcagccctatggtcttagctgcctatacacaagaccttgttgaaaaaatttatgcaagggggggg

SEQ ID NO: 54750 - DNA, 357 bp, Glycine max
tttgatgcttgctgcaaatcattacatacattgtgtggagaagaacgtccattggttgccccaaaatcctcaccagagatggctgttaatggatcctaagctttcagaatcatatgcaggaagacagattatttgttttatttgacgtatagattttctggtgggtaagtgtgtctgactacatacatagagctttgagacgaaggaaatttacctacaagggggtaaattctgcttttgcgttgcatcgaggacgtgggaatactgtacagtgccacaaagaggcggcgggaagatattaatacagcaacgtgggtgtatctggctcctattcttcagattgctattttgggcttt

SEQ ID NO: 54751 - DNA, 419 bp, Glycine max
  unsure (1)..(419): unsure at all n locations
actagctttacctgtgtcatatcacnaagactgagtctttttctatctatctcccttttattgtctccaatgtgaatagagggcattttatggaatatcatgctgttcaataataaaattccagtgtcttgttagggaagtctaaggtagaatatttatattatatagtggtccctttgcccttggttcttgaaggaatacatacatattatgtaaatttgttgcgtaatggatttcaaaacgacattgaactcgtgactcatggtaataattaagctgaacataatacctaagaatactagctaaaattttattagtgacagtaggcttatgtgctacctaatgtgggaggcactggaccaagaaaaaaaataaaaaaagtgctatgtggtgcacgagatttctcattaaaagagaag

SEQ ID NO: 54752 - DNA, 461 bp, Glycine max
  unsure (1)..(461): unsure at all n locations
agcttaatccagaaaggactactactattagttttgttcaagtctctcattataacattntagnaatagtgatatttacaatttaaataagcaaaaaaacatctgttgggaccatttaatgaacaaacttaagtaaattgaaaactttcacattgtttgataaaaataaaatttaatgatcaactcacaatttattgntaatataaattttaaaattattattataaaaattaataaatttattatacataaagaattataattagatgataatataaaattttgtataatgttaatatataattttttttctcataaaaataaatgaaacaaagtttgaatctagaaaaaatacatgttttaattatactttcaaagagtgtctttatgataataattgataattgattaagtcgcaatctttaaataatattataattagattatggtataagaataat

SEQ ID NO: 54753 - DNA, 414 bp, Glycine max
  unsure (1)..(414): unsure at all n locations
agcttaacaataggggcattattatatgtatttcagtccgcnagggaaactacaatcacaaagtaattaatatgataatacatggatagcaatgtgaacaaaaacttgaaacattcgcagtaaaggaaaacacctcacaacaatgtaatatatttattcacataatcgtcaataatagtacaaatttgtttacaatatttgaccaattctattgaataaaatgtaattcgttcttcctaagtcatgattaagtctttctacacaacatgtctttatgttttaaacaatatgctgcttatttcttacgaattgttgtcattgtcttcttgtctaacggcgtgccatcaccataccactacaagttataatatatatcatctagtgacatatattaaaaatgaagtcaactgattc

SEQ ID NO: 54754 - DNA, 335 bp, Glycine max
acaaaagagctatattgataaagtacttgatagattcagcatgaaagatagcaaaccaagggataccccaatagctaaaggagacaaattcagtcttaaacaatgccccaataatgaccttgaaagaactaagatgcataagattccctatgcgtcatcagtagaaagtctgatgtatgctcaagtttgtacttgtcccgacataccatttgtcgtaagagttatgggcagatacttgagtaatcctagattgcacattggaaggcaagatatgcgtaatgcgtacttgaagagaaaaaagctacatgctcactatcagaagtctgaaaattgga

SEQ ID NO: 54755 - DNA, 444 bp, Glycine max
  unsure (1)..(444): unsure at all n locations
agctntagaatcaaactctttttctctcatctattcttcattctgctttccctttccgctttttctcttccttttccttgcaaatatttcgtggcttttaactgttgatgatcatggaaggctaaacactcaatcaatccaagaatccactccaagcaaggttgaatttgagttctagtttagtatttctaatctttgtgaatgttcatctttttcttcaatcctatttttgattntcatgattatgattatgcttagtattgaaaatggattacgttacggattcatttcctaatttcaaaatttaataacagattgtttggatgattttcctacctaatttgggatttcaaacaatttagggattcattattagaaaatacactttcaacatcggntatttacgacattctacattgattttaaaaccgatgttgaaagtac

SEQ ID NO: 54756 - DNA, 407 bp, Glycine max
agcttcaggctgcacaatttctctagggtgttgtattgaaaggcacagggctgtatggcggtcagcatatgagcacaaaccacacacccttgctacaggtacagatttgtgattcatggccagctgggttaccaaattgaccaacgcatccagattgccttcaagcttcttattttcagatgatgcacatggagttgtagctacctcatgcactcctctaatgactatggcatcatttctgtcgctaaactgcatggagttggaggccatcttctcaattaaatttctggcttcagcaagagtcatgtctacaagggctccaccactggcagcatctatcatacttctctacatattactgagttctttataaaaatattggagaagaagttgttctgaaatctgat

SEQ ID NO: 54757 - DNA, 439 bp, Glycine max
  unsure (1)..(439): unsure at all n locations
agcttaataaatgataccatagctntcaagatatatttgatatgacaganaaagaaaattagatagtagatataataagtgatattgtaagagggaaaaaaattaaaaaaataagataaaagaacttagtatataaatataatctttacttaattttattagtgtttttgcaagcaagaagagatctttccactaataatggttgacacaagtagcggtttgtgttccttaatcaaatgatctaggttcaaattctaattttaggcatgaaataaatcatgttgaggaaaaaaaaataccaatcttgtatgcatttatggtccccaataaagattactaactacgttcaacaggattatttcgtactaatatcatgatgagaaaaaaaaatatttcgttcaagttagtttgtaaaggatgctgatgggattgagagtcg

SEQ ID NO: 54758 - DNA, 265 bp, Glycine max
  unsure (1)..(265): unsure at all n locations
tggggtactatatactggatctgaggactgaaactcatccatgttagagatatttctttctctgctcaaatctcaataatccattacattatactatatcagttggtttattttgacaggtctgaacaaggtctggagctngatctanttcttcttcacgggtgtgctgcactagctccagaggatctatttgtcagtagaattctggagcgcttcgggctggcaaactacttatgtctaaatgttgaacggtctagcgagtatg

SEQ ID NO: 54759 - DNA, 394 bp, Glycine max
  unsure (1)..(394): unsure at all n locations
agcttaaacattcactttttattctcacgatatattacgggacncaatgaaacatccgagaaaaaaggtatcgtcgaccgaatctgctcagaggttcgaaatataatttggagcgattcgatatattactggagttaatcagatatccgagnaaaaagntattggggggggaagaggataagaagtttaacatttaattttgagcgtttcgatatgatatggtactcactcagacatacgaatataaagctatttgtgcttgaattgtgtcagatagttaacattcaatttcgagggtttctttattatatgggacttaaatagactttcgagtaaatgttattgcttttgaattggctcagagattataatctaattttagcgtatgatatat

SEQ ID NO: 54760 - DNA, 401 bp, Glycine max
gatcaatgtgggtcctgaaagaggcaaatttgatcatcctactaggactactgtaaaaactggggcacataaagagggtgagaaagatggagaaacccatgctgtgactgcctattctttacggccaagttttccaccaacccaacaatatttttactcaggcattaacaaactctttccttacccaccacccagttattcacaaaggccatccctatatcaaccacaaagtgtgtctaccgcacttccaatgacgaagaccacctttagcacaaccctattcataataaatgaatactaactctccatctaataggtattttgtcgcaaatgcctgtaggtgtcaccccacattccttggatatgctaaacttgatcactttctactcgatgattaatgg

SEQ ID NO: 54761 - DNA, 429 bp, Glycine max
  unsure (1)..(429): unsure at all n locations
agctngaccaatcccgacccaacctgggcattgtctgtcagtgagaacctgtgatgtacctaaacaggcgagctcctggcagtcaacagataaaaggaacaaagaccacaaagcaagggggcttgtggtggctggccagctgtgaaactttgatgatatgtgagatatggtctctggtaatcgattaccaagggtgggtaatcgattacaaggcttaaaaatgaagacagggggctaagatggtctctggtaatcgattaccaggggatgtaatcgattaccaggcttgaaaacgaagtcaggaagctaagggagcctctggtaatcgattaccagcctgtgtaatcgattacacagagggatgggtcactggtaatcgattaccaggtatgtgtaacccgatacacagcgcatttttcataattcatg

SEQ ID NO: 54762 - DNA, 393 bp, Glycine max
  unsure (1)..(393): unsure at all n locations
ngaaaagagaanatgtagaagggtgaaactttctgcttttatctttgaccacagagtggtacctggagatatgtcgcgggggtcaagagaccttggggacgtcaggtggggtgctattgcccaaaaccaagcttgaccaatctcgacccaacccgggcatagtcagtcagtgagaacctgtgatgtacctaaacaggcgagctcctagcagtcaacagataaaaggaacaaagaccacaaagcaaggaggcttgtgtggtggctggccagctgtgaatcttgtgttatatatgggttatggcctctggtaatcaattaccaaggatgggtaatcgattacaaggcttaaaaatgaagacaggagactaagatggtctctggtaatcgattacc

SEQ ID NO: 54763 - DNA, 439 bp, Glycine max
taatacacttctttcaagatagttttgtctgagccgttgtagtttggtacactaatttggaagcttgccgtatccgtacttggaaggatctgattactgccttcctaaggcaatatcagtacaattccgatatggctctcgatcgcactcagctgcagaatatgttcaagaaagagggtgaaacctttaaagaatacgcccaacggtggagagatttggcggcacaagtagctcctcccatggttgagagagagatgatcaccatgatggtagacactctgccggtgttctactatgagaagctagtaggttacatgccgtccggcttcgcggacctagtattcgccggttaaagaatcgaggtaggattgaaaagaggaaagtttgattacgtttcctccacgagtgcgaatgccaaaagaatcatggcaataggggc

SEQ ID NO: 54764 - DNA, 456 bp, Glycine max
  unsure (1)..(456): unsure at all n locations
agcttttaaactntatacaagaatgaagctctgataccacttgttagacaagtggcctcagatatcttaagaagggggggttgaattaagatattccaaactgtttcccctaattaaaaatctatttcactttttactcaagttatgaattcccttaatgacaatcttcttaaatattaattcaaatgaaacaatttgaatatgaatataaagcaataataaataaaggagattaagggaagagaaaatgcaaactcagttttatactggttcggccacacccttgtgcctatgtccagtccccaagcaacccgcttgagagttccactatcttgtaaattccttttacaagttctaaacacacaaggacaatccttcctttgtgtttagagatcctttacaacaagagactcacagtctcttaatcccttagagaatgagaagaagaagaagaac

SEQ ID NO: 54765 - DNA, 460 bp, Glycine max
  unsure (1)..(460): unsure at all n locations
tcacctgcggcatgcaagctntataagtgcgggttcgggagacaaatgtcaagcgttcttgatatgcgaagatgatattccgagtactttggatttggtacgaccatgctctcctaatttccagctgggaaattggcgagtggaggaacgccccggcatttacgcaacaagcataatgtaaacctttacggttttaaaagctctatagttggccctaggctttagagtttttccttttgttaaggctntgtgtcttttgtttttgaatttataatacaaggatctttcttcatctgttcctggtctctacccattctcattcatttgcatgtttacttctttttctgaaacggcagatccgatgacgagtcccccgaaggtactaatacctgggacccgtctatcgacttcgagcaagaaatgaatcaaacggaagatgaaggaaatgaggatgtgggac

SEQ ID NO: 54766 - DNA, 199 bp, Glycine max
tactgaatactgcacatctgaaggcatcattcatgagttctctgcagccattacaccacaacaaaatggcatagttgaaaggaaaaacaggatttttgcagaggctgctagggtcatgcttcatgccaaagaacttccctataatctctggggctgagccatgaacacagcatgctacatccacaacagagtcacactt

SEQ ID NO: 54767 - DNA, 449 bp, Glycine max
  unsure (1)..(449): unsure at all n locations
acctgaggcatgcaagcttgtaggattatggngtacccatcacatgtggtactatgttgcggtcgggcgatggngcacaacaagttttccacatccacaatgcgcgcataaacccaccatcccctgttgcccacctccaactgagctcacgtactcccacgtagcccatatcctcgtttctctcaacaccgggtccccatcaatccttcccaagcttcacaacatccaagcaaaacaacattcacacagcacaagctatcacagcccagcaaaacaaagcanaggcagaatactctgccaaaacaccaaccaaaaatcacagcttttcccactcaaagaccccagtaacaattccttcgatccaatttgttaaccggtggatcgaactccaaaatttactggaagtccatagtgcataagcctacattntgaccgttgggatctactag

SEQ ID NO: 54768 - DNA, 457 bp, Glycine max
  unsure (1)..(457): unsure at all n locations
gcttcttcattaaagacttatttcntttttttcttattatttctcccctttcacttctggctcaatcatcactggttntagtctctcctcatattttctttgtttaaccattagctngtttggtgtgtatattcgaccactttgagtcataccaccaattcctgcaatgtttgtaacatcaggagcttcttcccttgtattctttgactggnttacatcaccttctttcacacaaacttctatgttatacttccacggtactgccttgttatctttataagagaaatcctttggtacttgtatagtgaaagactttggcccactangagtcaagtaagtagcacatatagtgtaatgaataaccaagggcttcagaaaagtcattgatgaatcaaatgtcaatacatcatttacaaagtatcctacctgtaacaatttcttatccattaagtcttgc

SEQ ID NO: 54769 - DNA, 355 bp, Glycine max
tgtcattataaaaggagacttgtgtcacctattaccccctacctaggacgtgataaagtcacctctaagggtttaacagacgtgaaatcatgtgtcatcagtcaaactagggattgatttgccatttgagagaaagcctttatgatttactttggtgactatgcaccggtacatagatcaagaagtttgggtgccacaatattttggaaataagaaaatattcagtcaaaggattccctatggaaaaactggtttacacatctatgtgagagaagaaaattggaatatatattggtactctatctacacgtcaagtacttgaaaccacctggcatgtttgattttttaaacattt

SEQ ID NO: 54770 - DNA, 438 bp, Glycine max
  unsure (1)..(438): unsure at all n locations
agcttttgtttcaaagacttttgttacttttacctttngataaaaacaaagtttagtttagttgttaagatgaaaggttaacaaatttagtgttttgatcaaaaacaattttcatatttatgcaaagcaaagtaaaaagtaagaagaaagaggagtgcacaaaggtttttgtaatgtgtcaccccaaccttaagctacgtctagtcctcacccttaaagatgagatttcactaacacaatcagttcacaactagaccagcaaccattaggtttcaaaaacctgctagtttcccacttgacaatcctagcctcgactagaccagctacactagtgggtttcacctttggtacccactggttgacttttagagaaataaatggatttgtgtttaactacatagaatgcagatcttcacctcacaatgaaggattccactc

SEQ ID NO: 54771 - DNA, 244 bp, Glycine max
ccgctcaacatagtactttcgacacctactgtacgtttgattgaccaatgttgttatgagaatgttgcgacaatccttcaaaaccttattgatacattctgagaggttggttgtcatgtggccatatcgacgtccttctctatcataagccatcgtccattatttctttgaaattcgatcaatccatgtggctatggctggactcacttcacgaaaattttctaaattttgatcaaaaatgtgc

SEQ ID NO: 54772 - DNA, 339 bp, Glycine max
  unsure (1)..(339): unsure at all n locations
tcaatttttctcaccaagtaaaaatggatcctttttagggcccatgccttaaaaggaccacctttcaagtaaaaagaatcgcttgattcgccctttaaaaagaactacgtagggcttgattcctcttcgatggagggtacgtangagcaagagccccgcttttgtcgaccctcaaaattaaaaaagaaagaagagtttagatacacaatttcacacaattctaatttaaggctattgtctttgggacaaacgtgagaggtgctaataccttcctcaaacgtaaatacaactcccgaatctagaatattcttcatgaacgatttctttcggtttttctga

SEQ ID NO: 54773 - DNA, 135 bp, Glycine max
tctaatattccacactttttgcgtgggccattcttggatggccttgattttctctgggtccacttggaccccatttctaccaactacaaaccctaagaaaaatatattatctacataaaaggtacaattctctat

SEQ ID NO: 54774 - DNA, 442 bp, Glycine max
  unsure (1)..(442): unsure at all n locations
agcttgtggaattcacctctatcccgatgttatatgttgactngctaccatccttgatcactaaccaaatggtggttggtgaacctcgggaagatctaccaatctcctttccctcgttggtacaatcccaacacaacttatgcttatcatggaggtgtccaggggcattcaatagaacaatgcgtggctttcaaaaacaaggtccaaagtttgattgacgtagggtggctgacatttcaaaaggatggcccaaatgtaaggacgaatcctcttgccagtcatgggggatcggcggttaatgcggtattttctaagttattttttagtccctttctcaagagattgaaacccttatatctaacattcaaggataaggtgatatactccaatgtacaaataataaagcaagttccaaatgatataatgcatgagaaacaaagat

SEQ ID NO: 54775 - DNA, 312 bp, Glycine max
  unsure (1)..(312): unsure at all n locations
atttgcaccccctttctactaaatgcaccccttctatttttttggtaattctctttccgtaacggtacgaaactttacgaatttcgtaacgatacttattttccttctgcaagggtacgaatccttacggattatgtatttactcttttttagctttcgaagaagttacggaaacttacggattgcgcaaaaacacctcttttcgacttctgccacattanggaatttcacggatcgcgcaagcctgcttccttttgatttctgagacgtctcgggacttcatttatcgtgcaacanaggacgccaagtatc

SEQ ID NO: 54776 - DNA, 395 bp, Glycine max
  unsure (1)..(395): unsure at all n locations
agcttgccgcccagctcgcccatgcgagcattgntgtttcctccagaagcaacagccttctggaggaatcttctggagggcccaagtgggcctggttgctatttgcaccccctttttactaaatgcacccncttctatttttttgtaattctttttccgtaacgttacgaaactttgcgaatttcgtaacgatacttatnttccttccgcagggttacgaatccttacgaattatgtatttactcttttttagctttcgaagaagttacagaaactcacggattgcgcaaaaacacctcttttcgatttccgccacattacggaatttcacggatcgcgcaagcctgctttcttttgatttctgagacgtctcgagacttcatttactgtgcaac

SEQ ID NO: 54777 - DNA, 353 bp, Glycine max
gcaaagatatcaaagtccagttaagcatagatgctgcgtgacacatagaacaggcatcaatagcaacgttgaaacattataatgttggaaaatattaccaaaaagattaaatcataaccaaacatgttttgaatttacaaagaaataacactcattttcatagtattcttgtaaagatatacgttgaaacaaatgcctcctaaagggtgattctgtttaactactacacaggtcaataaaaaatttcataaaaaattaattaaaaagtatttctaagacacctcttttatgatgaatgttagttttttaaaatacatatcagacatgagagaataatcttttcaacctataat

SEQ ID NO: 54778 - DNA, 446 bp, Glycine max
  unsure (1)..(446): unsure at all n locations
agcttcacacatgcacgacaagaatagagactcccattcatgcaatctaaaatttgaaggcatcattaacctgtcgtatatttgaaaaaaaaaattgagaatggaaaaatcatgtctaacataaaaagttatatactactattagttnttgaaaatcacgtttaaaacaaaaaaaatatcatacaaaatgtgagaccaaatacaaaataaattatattattaataaatatttctacagcattttcatagtattttttcaattacattaataattttatttctcttttattttttcttagtctttntccttttataccacaaataattttattattataaatataaagttttaagacagaaaaaaactcttgtatcaactttctaagaatagtagtcaacaatcttaatagtgtgattaaaattcttcaaatacaacatccacacac

SEQ ID NO: 54779 - DNA, 282 bp, Glycine max
  unsure (1)..(282): unsure at all n locations
ctgcatggaaaaggccttgttcatttttattntctataaagtttaacacttgcacctttatttttttggcttttgattctttttaattggccaaacagagcttattagattaacgtttctataacctaattgaatcttttcaatgttgttgcagcgaattgctagagacaggttggagcaacctacggcgtgttgttctgttcaggattactccgaaacagtggtacttagcactgcatcacaagaagtccagtaagtaatttactaattgagtttctaata

SEQ ID NO: 54780 - DNA, 169 bp, Glycine max
  unsure (1)..(169): unsure at all n locations
ttgttggcaagacgttcaaactctgtaaaatatcatngatggagctctgctgctgaaggttaaacaaggtgccagaatgatcatcgtaataagctagggcaaaacacaagtcgagggtttcaagcattcctgtctatgatgtgaggaaactagtccccaacatccattg

SEQ ID NO: 54781 - DNA, 153 bp, Glycine max
aatccgtctgatatatataaaccccttctctgaatttgacagtatacttgatgcacgttaggtgccaggaagctcgtcactaaaagtttatttgaattgatgtggtattgaatcgtaatgactttttgtgacctattagcgaaattaaaaata

SEQ ID NO: 54782 - DNA, 453 bp, Glycine max
ctgcagctggggaagtccttctgattctgtttatacatttttgactttatggcatgagatgaagtacaaagattagagcttttgctagttgttattaatgaatagcttaaacacttgtgcgtgagtgaaacaatggccgtgagactgtggttttagctactttccttgatatttgtcttatgcctaacttcatctaattggtcaggttacattttattcttctctttggataactgcatgtcttgtaaaagacaagtgatgagggcattttgcttcattctcttatcatgcaatcaataacttttgttgcatacacctttgtacatagtaactgcatgttattgtcacttggggaccaatgaactgttctttatttgcttgaggacaagcaaaactatataattgagggagttgttagtcggtgaatacgactaacttttgtgtataaaactt

SEQ ID NO: 54783 - DNA, 204 bp, Glycine max
tattggatacctctcaaaggaacctgaagctatcactgacagaatgacagtccagaggagaaatcgtgttgtaaccaaagttttggttcaatgaaaacatcaactacctgaagatgcaacttgaaaatttttctgacttgaggcaaaagtttcctcactttaatccttgaggacaagaattcttttgggtggaaggaattgata

SEQ ID NO: 54784 - DNA, 439 bp, Glycine max
  unsure (1)..(439): unsure at all n locations
agctntataatgagtaattgtgccaatgcaccctgaatatacatcttaccatccctctcacacctctaattatttcgaccgcacaaaatctacactataaagtccatcacctcctcttatattcaccaaatagactattagacccagaggtccaagactgaccctaatcacactttataattattttttttttgtgttggcatatttcctttttctaaactttttgtgctctttttgtttgtggtagatccatgagccagaaaacaaaatcacattcatgggccttcgttgcagatctacttggttggaattcattgatcgtgtcttatatttctttgccctctcttttatgctttgtcttaccctcttgcggaaccatggtcaataaacatcttcaacgaccatgatttcattgattaattaaataagggaaaagttc

SEQ ID NO: 54785 - DNA, 438 bp, Glycine max
  unsure (1)..(438): unsure at all n locations
agctntgagccaattcaaacgacaataactgtttcctcggatgtcagttagggtcccgtaatatatcgagacgctcgaaattgaatgttaaacctatgagccaattcaaacgacgatgactctttactccgatgtccgattgagtcccgtgatatttcgagacgctcgaaattgaatgttgaagctctgagcccattctaacgacaataatcatttactaggatgtttgaatgagtcccgtaatatatcttgacgctcgaagatgaatgtttaagctctgagccaattcaaacgacattaactttttactcggatgtctgattaaggcccataatatattgagacgctcaaaatngaatgttgaagctctgagccaattcaaacgacattaactttttactcggatgattgattgagtaccggaatataacgagactc

SEQ ID NO: 54786 - DNA, 436 bp, Glycine max
agcttatctctagaaaaaaatatatgtgtgtaataacactatatacaactgcatgaaatatatcccataatagtggagtggggtaagtgataatgtgatttcctctcatgcgaagatatataactttctggatgttaagaagatcttgattccattgaagctccaaatatcctcgaattcctattgcattcacttcatagctagaaaaaaatctattcttatcaaactggatggttaaaatcattatgtgtgtttgttatataacaatttgcatagaaagcaaattcttcttataacaatttcgtttttccgagacatattcaagtgaattgtactctcacatgacattgtccatgaataaaagtaaacacaaatttaaacatagcctagttataacttcttgtgtgtttgaataatccttcaaatcacgtagaac

SEQ ID NO: 54787 - DNA, 167 bp, Glycine max
cctcatgcgtctccttatttatgttaagaacaacaaccactttctctctccgtacatgctgcctgaaacatgtcacggcccaagcaccaatctttatttttttttactaccaagaaacaatttcttctccaatttcttcaaccttccatctcgactaaaccctgaca

SEQ ID NO: 54788 - DNA, 464 bp, Glycine max
acctgcggcatgcaagcttagttatggctgcctcaattatagaccttgtaagatttgtacaccggataggaaggacatggcgtgcgggatcaactggcttagctacttcattatacactgatcgcgacatggtacttgcttatcctcctttattttaaagacaaagggaactgtacttttgatcttgattttaacattaatatgattctgctcattacttcctcgcggcaaatataaggaaagcaatagctgatgcacaatctgggaacacactgacatttgcaaccggaaaggtactgtattcattctgccagaatatcaagacccttacggtccatttggcatacccttaaaaatctgtgtaaaaattcaagagatgaatatttttatccatataatataaagatatactaaacggataaccagtgtttaggactcttatggtgttagacattttttgagct

SEQ ID NO: 54789 - DNA, 232 bp, Glycine max
aactttatggccttaaacaagcaccgagagcttgctacaacaaaatagaggcctattttattcaaaatggatttggtagatgcctttgtgaacatacattgtttacaaaatcacaagagggagggaaacatttaattgtaagtctctatgtcgatgacttactatatactggaaacgatggaagtatgtgtgatgagtttagaagatccatgatgacaaacattgatatgtc

SEQ ID NO: 54790 - DNA, 430 bp, Glycine max
  unsure (1)..(430): unsure at all n locations
agcttgtaggattattgtgtacccatcacatgtggtactaggtggcgatcgggcgatggtgcaaaacaagttttccacatccacaaatcccgtataaacccaccatcccctgttgcccacctccaactgagctcacgtactcccacgtagcccatatcctcgttcctctcaacgccaggtccccatcaatcctctcaagctcccacgacatccaagaaatttcacatccaatcatcatggactaacaaaaccaagcaaaacagggcaaaggcagaaaactctgcccaaaacacaactcaaaatcacagcttttcacatacaaataccccagtaacatttcctttgttccaattcgntaaccgttggatcgactcgaaaattntactggaagtctctagtacataagtctacattntgaaccgtgggatct

SEQ ID NO: 54791 - DNA, 333 bp, Glycine max
  unsure (1)..(333): unsure at all n locations
gagtcattcatacctatgagatgttgtttatttattgcgatcagaattgccattcttggatatagggttgaaccaagctcatgctnttacaaaaaggttcatcaagtcaagttgaaatatggaagtaaccgtcttgcannaatgnngcgaaagatgaatcgagtcacatcactgcttcgtctactgccaaacatanttaggattgttgatgtccttgttacttccagtttcaccttgacaaagatgtcatggaccatgttgaaaatctaaattgattcaaccncatatcctgcgtaaaaattcggaatacttcaactgtacatcattcgcatg

SEQ ID NO: 54792 - DNA, 446 bp, Glycine max
  unsure (1)..(446): unsure at all n locations
agctntagtgatcacgtganccacaaatttgtgttgagtgtccgcatgggtatgttttggtattgattttgcatgaatttctaattatcataatatgcgattcatggggatgatctangcattcctttctttctaagccaaacaactgtcccaatatacattattttctgccatttgcaagccttatgagccaaacattgattttagccagaaccttgatctaggatggaagttttcaaccttgccctgtgataagaaagaagggggatttttatcatcttttggttagtgatgttcatcaaaacaaaaagcaaaaaaatacacacaaagaacaaaaacaacaaagaaagaaagaaaaaatcaatcaattcaagatagaaaagagcaacggaaaatagaanaggaaaacaagttctttggaccaaacaaatgtctgaaccatgtac

SEQ ID NO: 54793 - DNA, 263 bp, Glycine max
  unsure (1)..(263): unsure at all n locations
gataaatgcaggttatcatgtatgccagtaattgtgatgaaattttaagtaggatcgaatcttcatcctctaaaggaatagtactgccagtaattataatgtcatcaacatacccaaggagatatacatggaaaattgaccaaactgggttattatagaataacaaaacttgaaacttttggaanaattggtgggtgaatcttanatcctaattntgagctacttagaggcatttctagaanaatgagtcaaccaaatcccct

SEQ ID NO: 54794 - DNA, 444 bp, Glycine max
  unsure (1)..(444): unsure at all n locations
agctntacatagaaataaatactgttagtcctatttatagctcaagcagtggttgtggcaagtggagtggacagtaaaatagaacatgttttcacaaaaattaaagattactaaaaagtaagtgctaaaaactaaaaaatttatgtagttatggacagggttgttctaccttgagtattgcatttcatatgcacaaatatatagtttccaatatcacactggatggttgtattcatcctattaaaattcctatcgtcctatagtaggaatatttatttttgaagtatatctagtatgcatattacaaggaaaaataagatcaattccaataagaacatgtcttctagataatgaataattaaaactcaacattgtactcatcttatcaaaataagttaatttcacattggaacattcactctatgcccttggacaaagagtggt

SEQ ID NO: 54795 - DNA, 369 bp, Glycine max
  unsure (1)..(369): unsure at all n locations
tcgtcatctcaaaaacacttgcaaaaatctgattctcactctaaggcctaatcttgtgagagctctagcaaacctttctctaagtccttcaaaaggcatgggtttaacaaaaataaatttggtagaaagccttcattntctaaaaataagaacaatgcttttaataacaacaataagcctaaggataaaaattcggggaatgaaattttttgctttgtttgtgggcgagctaatcatttggctaagaattgttntcaacatcatcgccagcccacgtctttccctaaaccgcaggctaatgttgttaccaccagtgctgcctctgattccncatctgacaggtaccatgtcnactagccctgagttaaa

SEQ ID NO: 54796 - DNA, 417 bp, Glycine max
  unsure (1)..(417): unsure at all n locations
agcntttgaaccttgaattgaaatgactgctcatataaaggcttgattaaacttccatcttccaacgagcacagtaacaccctaggaggacaaccaagggaatcatgaatatcaacaaaatttcgcatatgatgatcaaggaccacaatgtgcttccccttgctgtgcgtaagtctgacagggacctgaagtggttgacttccatcaacaaaaagtttggaacaatacaaattggactccagaggaccatctaaggtcccagtaaaatatattagacctgtagcctcattcacaccggcaatttgctcaaccatccattcaccttcagtgatgggtcctaaacaagtcccatttgcatcatgaagataaagatgtctaaatcctggtttctcactagcccagataaatccacccgaa

SEQ ID NO: 54797 - DNA, 434 bp, Glycine max
  unsure (1)..(434): unsure at all n locations
gacctttgtggtattgcccatgaattgcgggtgaacattatatatggctagttgnatatggatctagaaattaaaaaaaccatattaaataggttaggaaaggactctaatagctatcttaagattatattttgaaataagaaactatatttgactgcacagctcatgttatttcgtgtgacttcagtcggagtagaatgttaatgagttcttttggcctgttatcttttattaatattgtcgggtggttcttggtacaacaatggtcggccttacggtttcggtgatttaaaagaagatagccgtccatgatccatgatccatgatgaagcagttattttaaataanggtgcagtgtggtaacgggaaagaaagaatggaaatttaaacactaatatattaacacaccattgcatatatttagaacatgtagt

SEQ ID NO: 54798 - DNA, 448 bp, Glycine max
  unsure (1)..(448): unsure at all n locations
agctnttcgattcattctatgtacccgtagtggtccactattgtgtttcgtgccattttattctcgttttgtttactttttatacccccctcttgacgtgcttaagccattttacttaagtcatttctcgcttaacttaaaaataaaataaatttccaccgaatgtttgaattgtattatccattaacttcggttaaaatcaattccgaccgttcggtcatgccgtaaccacgttggaaatcaaaaagaggtaaaaaataatataataatcaaaaaaatatctttttagtgaaataaagcggaaaatcaatcggacgttttctctttgggatttctcattcttaatcgaattaattaataactaaagtgaaactaaggctaatatcaactcgcctagtcaagctcgtccacaaaaataggctnttgaagtttgtcatttcaattcctc

SEQ ID NO: 54799 - DNA, 261 bp, Glycine max
  unsure (1)..(261): unsure at all n locations
ctcattgtagaacaccgttaatgtgtatactatcattgggatcatctttntctctgtcattgaaggtgccacttgagctgtcaagtccctccacctctgggcgtattccttgaatgactcatgctcttttttacacatgttttgtaggtgcgttctatccggagccgtatcataattgtactgatattgcctaacgaaggcaaccattatgtccttccaagaatagactcgggaaggttccaagttagtgtcataccctaa

SEQ ID NO: 54800 - DNA, 442 bp, Glycine max
  unsure (1)..(442): unsure at all n locations
agcttcacagctgatagtatagaatggtcagtaacaatatcctgaanaagatcatactanaaccaaactgcacaccctactcacacgcctaagatcactggcgactagaccagttggggtagagagacccctggtccatgtggatcctgctaccgggaaagcagatggtccctacaaaaagaagttaataacctatttggggatcgtcgctcgtgataaggtgaatgtcacatacgagaattggaagcaagtccctgctgcttagaaggatttgatatgggaggatattcaggtattttagttttcatgttgcatattgtttattaaccaaaaattcaaatttagtaacaataaaacgtaatttttcgtttgtcaggctgaatgtgatatccctgaagcatctgatgtaaggataaaaaagaatatacttcagactatggcg

SEQ ID NO: 54801 - DNA, 314 bp, Glycine max
  unsure (1)..(314): unsure at all n locations
ntnggtggagaggggctatcttgtgggacgcgtgatgaactctagtccgccttttcagaatccttctctgctaagaaaccagctgtagtaaatatcgtgatcgatccctatgctggttcagagagtgngaggatgcaacataagaattgatttcccttagttgcctaatgctctatagcatcccttcacatcattttctttttggtttcaaataacacaaagtgtactcctatggcttcttttttttttttttttgcttgaattatccggtgcagcatagctatcatcaaatatatatcttttaacttcaatat

SEQ ID NO: 54802 - DNA, 429 bp, Glycine max
  unsure (1)..(429): unsure at all n locations
agcttgcttgtggtgattctatggaggctgtatcntnnancttcaatgaggccctttaatggtgattntccaccatggagattcagctgaagacaaatgagaagaggtgagaggaggcgccatccactaaggaataagccatggaagaaggagcttctccaccaagatgagccttggatatgatgctcggaaggattcttctatggaggaaaagaaagagggagagaagtggaactctgaagtacgtctcacacgactctcattcatcaaagttacaacaagttgtatacatgcttctatttatagactacgtagcttccttgagaagctctcttgagaaaacatccttgagaagcgttcttgagataactatcttgagaagctggagcttatttacactcactcatctaaaaactaagctcatcctcc

SEQ ID NO: 54803 - DNA, 448 bp, Glycine max
  unsure (1)..(448): unsure at all n locations
agcttgatagatattcaaagccaaaaaagggttccagaactttgctgattatntccttttatattcgatctttnttcttttcttgttntactatgtggatagttgacgtgatgattattcttgttccattatgaataataaaatttatcatttcaataaaagtatattggacaacagtatgctccatttaccaagtgaacattttctttagtgaattttacctagtgaactattggacaatatattgatcaaacaacaaaataaaaaaccaaacttaaagaataaccagaataagaatatgaaggtaagttgggggtctaaatttttttttagaaaacataaaaagagagttatagaatgctaatgaagaanaaaacaacaaaaacctcaatggtcaaaagcaatgccttttagtttttagttaaatacaaggtttaatatatggaca

SEQ ID NO: 54804 - DNA, 313 bp, Glycine max
  unsure (1)..(313): unsure at all n locations
agttatgactaactagctatgtgcacaaagctacaacaagagtacttaccaaagaactggaactatatgttcccttcgtgaccctcgaaactcatcgtttgttctatggttcaagaatccacaccactgctccaacaaagaggaaaaaaaatgcagtgacaccccacatatgtggagtaaatggtcacaagaaagcccaagcattttgacttcaatttttntactggagcaaccacaactagccccgactctatatatggtcgagtaaaatccacaatctttgttcggacagagacaatcgcaatgtcaccta

SEQ ID NO: 54805 - DNA, 468 bp, Glycine max
  unsure (1)..(468): unsure at all n locations
cctgcggcatgcaagcttccacaacatccaagcaaaacaacattcatacagcacattctatcacagccaagcaaaacagggcaaaggcagaaaactctgctcaacacaccaaccaaaatcacagcttttctcacttaaagaccccagtaacaattccttcgatccaattcgttaaccgttggatcgactccaaaattttactggaagtctacagtacataagcctacattgtgaccgttgggatctactagcaaacatccagaactcattctgcactagactttccacagccaaccacacacaagcatttttctgcacaaagccaaaatcctgctgcacctactttgtcagcaaaattctgcataagtgcagatttcgaaaatcacacttcctctcatccaatcttgcccaaatcaattcctacaagtccaaaatcatgtatcaaccatgtctaacccanaatcaagc

SEQ ID NO: 54806 - DNA, 224 bp, Glycine max
  unsure (1)..(224): unsure at all n locations
ataataaaaccccctcagcngcgaaacccacaacaacagaataattatgatctttcaagcaacanatcaatccatgttggaggaatcatncaaacctgtgaaggacaagtcctncacaacaacaacaacttgtccctccttttcagaatgctgctggcccaagcaagccatatgttcctncccaatgcagcagtagcaacaacaacaaagacaacaagcaactg

SEQ ID NO: 54807 - DNA, 443 bp, Glycine max
  unsure (1)..(443): unsure at all n locations
agcttaagcanaaacattatatggttntntgtctgttggattctactcagttggatagttttctgttgattgattgcgtttgaaatgggtctcttgcagattctctcatgttttttttttatgtttttttggatttcattatatgtgtcatgtacgttgcttaatgttctttatctatttatttatagattcattttttcttcttaaaatgtcaattttatagacattttgtaggagattctgtaattaagagctctttgaatgaaagtacatatcggtaattcactatgctgagttggatttttaagcatgcttagatacccttcatggagtcacctattaatggagttggttccttatcagaggtgtgtatctagcttaattgggttgtggagacgtaaggagtgtgtatctagctgaatagagtggcacaagaacttctt

SEQ ID NO: 54808 - DNA, 140 bp, Glycine max
  unsure (1)..(140): unsure at all n locations
agacatcttttagtataataaagcggaaaatcaatcggacgttntctctttgggatttctcattcttaatcgaattgattaataactaaagtgaaactaaaggctaaaatcaattcgcctagtcaagctcgtccataaaa

SEQ ID NO: 54809 - DNA, 448 bp, Glycine max
  unsure (1)..(448): unsure at all n locations
agctntaacctcatcatctctcatagtctttagatttgggagccaatccaatccttgtgtccggactctcagccacttatgatagccgccgatgctcccattactgcttcccctaagctctctgtcctttcttcacaccgcatcacatgccttgtgaactccttagagtaccctcgcattggggtcactgaaaccccgtgcgatgaaaggtgtgatgctttcgtttgatggcacttctctcatggggtagccaagctatcttatggcgaggacgggattataattaatacaaccccttgttcccatcaagagaacatttggacatccttcgcatgaagatagaatcctgattcttccttccttctagcaagggaaccaattaacagacgcccctccatgctagccaagagttggtcccaattcgccttttctttttcgacgcacgagc

SEQ ID NO: 54810 - DNA, 116 bp, Glycine max
atatgatgctaggatggatacctggcatattagatggttgccatgcaataaatccgcattcctttgtaagacttcaactatatgtctctattcatgattagtgagggccctactga

SEQ ID NO: 54811 - DNA, 447 bp, Glycine max
  unsure (1)..(447): unsure at all n locations
attttaacttaatttaaattttatgctacttttttataaaaaaaatatatatattacacttaccaaaattcaaaattcggaactgacacgtcagggtaaacgtgattaagatgaacttctaaatttcacacatcggaccgagagtgactttttttagaagaataaaagggggacatacaaaataaaagactctaatgtttaagtaagtatatgagttaggagagtataaagaataagtatatgagcaagtgtgtttgtcttaagagagtacaaatgactgtgtgtgttcataaatgtgtcgagagagtacgagggaacttgatacttataatgtggagagtgagctacgggtccttggtgatatgggttggtacngngatgtaacaacccttgtagatattaccgatttgagataatagccagtagataaaagtgactaatagataa

SEQ ID NO: 54812 - DNA, 480 bp, Glycine max
ctaagctttatcgggtattgattagatagtggtgctttaatgagtgccttctactatatggacacggatcctctccagctgatttctgtcccgccacctcccagccaagatcttcactgttttagttgaacttagtaactgaagaagaaagagaatgtgatgggtggttgagatttgggatggagagaaacctaccttgctgggagaggctgcagaggatccaaactcctgctatatattgacatgataaatgtcacgcctgtaattgagagtttgctaatctcgtagaatatataaaccttctttgactgtctttttaaaaaatattatgatttgatcatatggcattcatgtttgtttgagttgttgcagtttctttatgttcagataaatcgtataatattcagttaacttgggaaatgcattatcatgtttctggagttgcttactggtttgagtgactcactcatgtgtactata

SEQ ID NO: 54813 - DNA, 430 bp, Glycine max
  unsure (1)..(430): unsure at all n locations
agctnnggatttcttttagtatggaatctattcttcctaagatggagccaaacccagtcacccttattaagaactagctcttttcttcctctattgcctttagttgaatacaccttttgttggttctctatttggttcttaaccctctcatgcaacttctttacaaactctgacctagattccccttctttatgtataaaagaagtgtccagtgggaggggaatgaggtctaacggtgttaggggattgaacccatagacaacctcaaaaggggactacttggtggttctatgaacccccctgttgtaggcaaattctacatgaggaagatactcattccaagacttatggttgcctttcagaagaatccttaaaagggtggataaagacctattcactacctctgtttgcccatcagtttatggatgac

SEQ ID NO: 54814 - DNA, 363 bp, Glycine max
  unsure (1)..(363): unsure at all n locations
ttccttaagaagctagaagctatctacacatacctctataatagctaagctcacctncttgagatgagaagctagagcttagctacacaccccctataatagctaagctcacccccatgacaaaaaacatgaaaataacaaaaaaaagtgcttattacaaagacaactcaacatgccccgaaatacaaggctaaaaccctatactactagaatggtcaaaatacaaggcctagacgaaggaataacctattctaatatttacaaagataagcgggctcatacttagcccatgggctcgaaatctaccctaaggctgatgagaaccctanggccttttcttggatctctagcccaaattacttg

SEQ ID NO: 54815 - DNA, 414 bp, Glycine max
  unsure (1)..(414): unsure at all n locations
agcttgagatgaggaagtgtataagggtgatactttctgcttttattgntgaccacagagtggtacctggagatatgtctgcggggtcaggagaccttanggacgtcaggtggggtgctattgcccacaaccaagcttgaccaatcccaacccaacccgggcatagtcggtcaatgagaacctgtgaggtacctaaacaggcgagctcctggcagtcaacagataaaaggaacaaagaccacaaagcanggaggcttgtggtggctggccagctgtgaactttgattgatatgtgggttatggcctctggtaatcgattaccaaggaagggtaatccattacaaggcttaaaaatgaagacaggaggctaagatggtctctggtaatcgattaccacggggtgtaatcgattac

SEQ ID NO: 54816 - DNA, 217 bp, Glycine max
  unsure (1)..(217): unsure at all n locations
ccttctgaggttgtctatgggttcaatcccctaacacccttagacctcattcccctcccacttgacacttcttttatacataaagaaggngaatatacgtcacagtttgtaaagaagttgtatgatatggttaagcgccaaatacagaaccaaacatatgtgtcttacactaaaggcaatagaggaagaaatgagctatttcttaatgaaggggact

SEQ ID NO: 54817 - DNA, 316 bp, Glycine max
  unsure (1)..(316): unsure at all n locations
agctttaagcaaancaattttcttaacattttactctcttggccgatagtcttccgctgtatattgagacgttcgatattcagaatataagctctgagcactaacctaaccaccgataaactttttactctggatgtcgtgatctggtgtccatatagtatatcgtagaccgctccaacattctataattgaagctttgagaaaaactatatgacaataactttttactccgatgtccgattgtgtccgtattttctctagacgctcgaaactcagaatcgaagcttcgagataaaccaaacgacactaacttttt

SEQ ID NO: 54818 - DNA, 384 bp, Glycine max
  unsure (1)..(384): unsure at all n locations
atgtcatataagaccttttctctttacgaactggtcctggatgcttaacaacaactcatgaaagcatcantaatttatacttttgtaaacatcaaaattcaaggtatggtaggtcctccaatgatgagtgcatcatcctaacctaacatgatttagttttcttatttctgcgttcttgatcctgatttttgtaattccttattgattctgtgttatgaatatccctaatttgttggctggaaaatgaaaatgtagagtcgacctagattactggataccccttttgattctacagattgacattagggtgtgaggttacttggctctttatgcctttgacattgcattctgataaactttagcatttattattgatcttgatat

SEQ ID NO: 54819 - DNA, 442 bp, Glycine max
  unsure (1)..(442): unsure at all n locations
agcttctagaaacaaaggtgcatggctagtttatattttcaagcataaaggttaaagaacttaggagatgttcggttagtttccgttttcattnttttgttaccttgtattcattgataattttaaaaatgccaccttgcttttcatttntattcggattttcaacattttgtgaaggaaatcatgacaacaagggaatgaaaattttaccatttgctctacaaatttttgaaaccattaaacgaaacaacaagggtggtattttttcgtaatcgttaataaaaatacaagtgatgattagacatcaacccaatattgaggactatgagcttggcaaagacagaaggccctgaacatatgaacatataanatatgttcatgcaatttcaggagttaaaagtacttcaaatacttcaatttagcatatctaatgatcaaattc

SEQ ID NO: 54820 - DNA, 423 bp, Glycine max
  unsure (1)..(423): unsure at all n locations
aaataggaccccttctttatggtactcgattcaagagaacatgttagttactaatttaagagataagtaatggtgatcaccatctcttttcactcaatatgttctatccctaaaatctataatatgtagatgcaaagaaataagtggaagtaaaaggaaatatgatgaaaattatataattaaaattcagtgagagcaacagtcaaataaaatagatatgaagaataaaaatataatattgtggacaataatcacacaccaaccacattctacaattaatgttaatgaagatgccaaaatggtgtacttaataaatataatatctaaagtgaagagaagaatgattatctaagacttttgaacaaantaaagcattgaanatcataaggaagaaatgattaatgaagatagaatatagtatca

SEQ ID NO: 54821 - DNA, 397 bp, Glycine max
  unsure (1)..(397): unsure at all n locations
aatatattatatgattatattntggttatagtataaatataaaatattattaaatttataaaaaaatatgtatttattaaatgtatacctttntaaatgaatttatatgtattaaaagcatattaattaaaaagtaactatcactaaatttaatacctatttatataaatataataaaatatatatgacaattggaaaaaacattgtctctaagtccacctactggcagcacataaagctagctatagatacgatttgtttgattttgtaggttntattatgatgaaccatcatgtatccaacggttcagtaaactgctatagaggcgctgcagaggcaatctgctgtagaggatccgaacgcgaattataattgagagaaacaataaaataaaaga

SEQ ID NO: 54822 - DNA, 189 bp, Glycine max
  unsure (1)..(189): unsure at all n locations
cactagtataatctctctatcttcattggtgaattacaaattacgcttagtacgtaatacaattatatngataattangtgcatgcaagcgctatatctatctggattatccacgatcaaaaattccatattaanggcaatagttaatttctgtcatgtgttcgtaattatattattctgtgttggagc

SEQ ID NO: 54823 - DNA, 407 bp, Glycine max
  unsure (1)..(407): unsure at all n locations
agcttgtcgttccgttccctgcacaacggactctctttctcctctcgttcccatcgtaacccccctatcgctgcctcgcctcttcctcctccgacgaccgcagtgccagtgccaaacgcagcggctaggactccgtgctgcaccagttcttcgaggtcgccaaccgagtcgattcctactggaagtcccttgggaacgccgtcgntgacgaggattgggattaggatcactggcgtcgacatttcgaggaaatcgacgagcaagagcgcctcctttcgattntcaaattacacgaatttcaatttgtgtcttctcacgtgcttttaccgaagtttttgtgtaagtcattattctgaatcgatgtcattgcgtttttttattcgttgaanaaagattcaatttattag

SEQ ID NO: 54824 - DNA, 453 bp, Glycine max
  unsure (1)..(453): unsure at all n locations
acgatatctcatttgcctaacttggcatcaaattttatganctatgctcaaaagacanaaggtatgccatgcatgctcgcccaatacttttggtctaactctaaaactgaatttaacaccgaaattcctggaattcatccttttacaaagtttgtagatatcattattaactntcctagcatataaagaacgtcataataagagatctatagcttaagttatgactaaaatgctgatatagtgtcaaaatataactaatgctgtcaaaattaagaccaagtatgaaacctagaagcaaagttagactccttgttgatgtagtaaacaaagttagactcttttgctcccttagaatngaaaagtaattttatagtcccttgaatttaagtgatnttttagttntatcccttaactttataataattgtagactccattagttntattacttaaa

SEQ ID NO: 54825 - DNA, 407 bp, Glycine max
  unsure (1)..(407): unsure at all n locations
gatcttaagcaccgcagctgcagcttcccccttttttatattagggtgagaagngaagtaganaagggttcagccncttatgcactggtctctctctctcgaaatagctgaggagaaatagttccgtgaagaaaatccaagccgaggcgcttccgtaacgtttccgtgagtaattacgcgaagattctcgaccgttcttcaagaatcatcgatcgttcttcgttntcttcagtcttcaacgggtaagtatctcaaaccgagcttttcaattcattctatgtacccgtggtggtccacattttggttcatgtatttttattctcgtttccatttactttttatacccccctttgacgtgcttaagccatttatttaagacatttctcgcttaatctaaaaaaaaataa

SEQ ID NO: 54826 - DNA, 458 bp, Glycine max
gacacaagaaactcagcgggttggtgtaacatttggccttcctcctgtacgatattctccgacactaatcaggtgctgcaccttatacttgaacgggatgcaaaagtcaatattgtgtccgggaactccactatggtacacacacttggcacccgggtcataccacttggggtagggtggctgaagaaccttcccgggtatggccaccaccaaatgattctccaataatgaaggccatatctcagagtatgccatgggaataggagggaagatgcctttctggtgctgtgcatatttataggtcgcgccggcggctgtattattaactggccggggtgcggctggagctgtgcattgagccggcgctctttctgctgcggcgggtacttatacttgaatcagctcttcatagaagaacgtgggtaacgtatctacgcataattgtgatcatcctcctc

SEQ ID NO: 54827 - DNA, 325 bp, Glycine max
acatccgagtaaaaagttattggcgtatgaattggcttaaagcttaaacattcaaatgtgagcgtctcgttatattacaggactcaatcagacatccgagtaaaaagttattgttctttgaattggctcagaaggtcaacattcaattttgagcgtctcgatatattacgggactcaatcagacatccgagtaaaaagttattgtcgtttgaattggctcaaagcttcaacattcatattcgagcgtctcaatatattacgggactcaatcagaacatcgagtaaaaagttattgtcgttgaattggctcaaaagttcaacattc

SEQ ID NO: 54828 - DNA, 295 bp, Glycine max
tttactcggatgtccgactgagtgacttaatatatcgggacgctcgaaattgaatgttgaacctttgagcacatcaaacgacaataactttttactcggatgtctgattcagtttcgtcatatatcgagacgctcgaaattgaatgttgaacctctgagccacattatacgacaataacattttactcgaatgtttgattgagtcccgctatatatggagacgctcgaaattgaatgttgacgctctgagccaattcatacgacaataaccttttactcggatgattgattgagt

SEQ ID NO: 54829 - DNA, 451 bp, Glycine max
  unsure (1)..(451): unsure at all n locations
agcttagattaaagtgaatataaagaatcttgttttaagctatataatggagtgtagtagcagacactaatgaagtgtggttacttttgaccaatgagtgttgctgttaaacgtaacccaggatgtcaatggggaaatccatgaaatgtatcataagcttgtaaagtttcggaatcctatgtcaattgatgctttaaaatttttagttattcttgatctagctttaaaaaccatgatgcttggttttaattaattaagcaaggtgattaaaccccctccgttgatcaataaagaagaaaaatggtattttattaatagaagataagcactactttagtgtcaaaggagttcttgttcaaccaatcaaagctnttaaatgcctttcgtagaatcttaacatcgaatctgttttctttttcaatgggaaggaactttaattaagctatttctg

SEQ ID NO: 54830 - DNA, 461 bp, Glycine max
  unsure (1)..(461): unsure at all n locations
tatgccagtttattttggatataaaacttaagcaacttagtttatattataatgggtgatattntcttgggggaaatatagctggaagatttggcctcacaatgtttatttaatgttttgtgaagttttttggccctaaaatgttttgacttaggaaagctagtcaagtaatatattcgagcaaagaaaggaaaaacacagagacaattgtgtttcgtattttagttagaacatgtgcttcttacaacattaagtggctgttatagcatgggcatttggctttttccttatagaatgtgtgaaagtctattcttctaattttagtatgtatgtagtatgactcatatagtatataaaactaatagtttgagtggccatggcctccctcagcttcttatcagaatcgccactggttagaaattaattaaatatattgattggcattcaattataaacaaata

SEQ ID NO: 54831 - DNA, 434 bp, Glycine max
  unsure (1)..(434): unsure at all n locations
agcttggtttttatttgtcaccttcaaatagcatagggatttattttttcatttttccttttactttgttccccatgattttccattgaaagctattangttttatatgtatatgtataagacaaactaaattcatcttggtttatatgccaaacttttccctgagcatactattcctgcaaattcttctgctcatcaatatcattagctctaccttaagctatntgccttataataatgggttntgaaaatgatcatttatcataactcttgtatagaattcttcttatctactttccctcctcataagtttcccaatcttttctatatttctcctttattgtagntcactcatctctgctctgtatgatctaattaatatttgtactatctatgtatctaaacaaggaatgcnattcacatggatagggatt

SEQ ID NO: 54832 - DNA, 389 bp, Glycine max
  unsure (1)..(389): unsure at all n locations
ttaagtcacctgctgcatgcaagcgttggctggaggtggattctctnttagttctcaaggctnttagtgttatcaatatggctcattaggatttaagaaatgtctggatgaatactntattctattgtggcccaaatggagtttcgtgtctcccatattttctgagatagtaatgtatgcgctaactatggtgtagaattactctattatgttggaagataaacttttgaattggatgaggtgtacaaggggagatacttggtattgcaaggacagaaaaataaaggtaacctttgttatttggatggacaagccttgaagagaaaccatgattgcaaagtgaagaagaaaatgaagttttctaatattgtagaagtgttgggagatac

SEQ ID NO: 54833 - DNA, 337 bp, Glycine max
  unsure (1)..(337): unsure at all n locations
atgcgtatgggtaaaatatctactatttatgtcaccatacaaggacattcaacacaatctgggtaccacacatatatatatatacatctttgaaaagaacacacattctcgtgctcaaggcattgtgtcaaaatttacacctaatcacatcctanatattctactatcacaaactacctatacatatntgaagtatttaacatacaaatttatgttggttgactcacacttatntatatgcatattggaaagctaattacgtcatgcgcatacttgcatttgaaaaggaatatcattgccatctatataccattgagggataattccacaccatata

SEQ ID NO: 54834 - DNA, 450 bp, Glycine max
  unsure (1)..(450): unsure at all n locations
tgaagctttgatgtattaatataacggggnattgtgttaattatttatatatgcataccaatatttacaatacatctgttttcttataaatttaattaatgtttttttatgcactgatatgcacataatatttatctagggatatatatatatatatatataaagnattacatgtgattgtacactgatatgttagatctatttgtttataagttttgaagttagatgtgttatgttattattattatattttttctctaattgttaagtatactttgtaattagttaaattgtgaaatgttaaattgtagacatgagatatggctgtgaatgagtgtgtgattaatacttgtagtgatattacttatcttgtgaggtatgagttatacaataacccgaccagctgttacctcgagaaatattttatgcacagttgtaaaggaaaaatgt

SEQ ID NO: 54835 - DNA, 416 bp, Glycine max
  unsure (1)..(416): unsure at all n locations
agcttgttccattataaatctgggtgggatattatcatctggctggtgcgagtttttcanaaatcgatgttctagtaaaactgcagctgttggccgctctgctggatttcttttaaagcagcacctcaagaaatctttaccctcaaatgaaagtgtttcaggtataggaggggtctccttcataaccttaaacagagctgcagcctgcataattagaaaagaagtttatttagcaagataaaaaaaaaggacccgtatacagatagcatctctgcctaatccacaagttgcaaacagaaaaaagttggctaaaagatgccttagctggttgttaaattgaggtttgccaaaataagtaaaaagttgacacattatcctacattaccaaacttcagaatctcatattctcatagaag

SEQ ID NO: 54836 - DNA, 401 bp, Glycine max
  unsure (1)..(401): unsure at all n locations
tttcttactatacactttattgttttgcttatcgtggtgcttcctgcttcttcatgcttgattcacaccccagaaagtttctttgctttccttttctattntattttcaagattgaactcacgttagatgacttactttactatntaaagtttcaatttttgttgatgattgactcgctgcagggttagtttggttagtagcgtatacttgttagggggttntgattcacatgcaatgtacattgttttggcatgttttgggtaggatctgaaggcctgataagggcctatgttgaggggctgaaaagcccaaattttctagaaatctcgatgatctcgttaagcgcgcttgtgcgctaagcgagtttattagcttgtgatgaatatgtgggcttccagat

SEQ ID NO: 54837 - DNA, 368 bp, Glycine max
  unsure (1)..(368): unsure at all n locations
agcttgccttgccccttgatatatttgagggactcatgtgtcactatgaatgacaaattccttgggataaaggtagtgttgccatgttttcaaagcccgtactaaggcatacaactccttatcataagttgaatagttaagggtaggaccacttaacttttcactaaaataagcaattggatggccttcttgcatcaacacagccccaatcccaacatttgaagcatcacactcaatttcaaaagatttttgaaagtttggcaacgcaagtatggggacattagttagcttttgcttaagaacattgaaagcttcttcttgtttctctccccatttgaaaccaacattnttcttgagcacttcattga

SEQ ID NO: 54838 - DNA, 321 bp, Glycine max
  unsure (1)..(321): unsure at all n locations
tatcacacaattatgggttttctctaatgaaacactctngccttttaccactctaattccccttgagttcttaggcaattcaagagattatggccacaacaaagaacaattcaccaatatgtgtaagggaaaggctagacaaggaaaaggttaaccaagaaaaaggctaacaatgtttttaggcacaaatgaaggaaataaaattcagaatttaggaattcaagtaacaatccttcatgcaaccaatatattaccttaaagagttttttntttttaagttcttcaagcatgaagcattcagccccaattttttttttttta

SEQ ID NO: 54839 - DNA, 466 bp, Glycine max
tagagtgcacctgcatgcatgcaagctgacaccaagtaatttctttcttgttttatgtccaaagtatatttacgttggcataagaatatcccacttggattccttgcaacttctacaccaagaaaatacttcagggtccccaaatctttcatgtgaaagcacttgctgagatatactttaaatttttggattgtagtggagtcattcccacacacgatcaaatcatccacatacaccaaaactaccagttgcactccatgattaagaagagtaaagagcgagtggtcagaggatgattgttgaaacccaaaattcgtgaaggcaaatgatagtttggcaaaccaacatcgaggggcttgcttcaagccatacaatgatttgcgcaacttgcaaactaatcctggttgagatgtgcgaaagcctgggggcaacttcatgtaaacatcttcatgaagatcaccatgga

SEQ ID NO: 54840 - DNA, 317 bp, Glycine max
  unsure (1)..(317): unsure at all n locations
tcctgagtatgacagtcaccgctttatgagcgctgtacaccagcagcacttcgaggccatcaagggatggtcatttcttccggagcgacggcgtcagcttcaggacgatgagtataccgatttccaggaagaaatatgtcaccggccggtgggcatcactggttacccccatggccaagttcgatccagaaatagtcctcgaattttatgccaatgcttggccaacagaggagcgcgtgcgtgacatgaggtcctgtgtgaggggtcagtggatcccgtntgatgcagatgctatcggccagctcctgggatatccg

SEQ ID NO: 54841 - DNA, 446 bp, Glycine max
  unsure (1)..(446): unsure at all n locations
agctnggtcttaattatataaagatagatgtttgtccaaaacattgcatgttgtatttgggagatgatgaaaaaagtttggatgcttgtaagcattgtggtacatctagatggaaacccaacaagaagaagaaaatagctgcaaaggttttacgttactttccatcgaaaccaagattgcaaagattgttcacatgtcgtaagactgcaaaagatatgagatggcatgttttggaagacaataaagatgggttgttaaggcatccaagagatggagaggcatggaagacatttgatttaatccatcctgagttttcttcagatcctcgaaatgttcgcttaggccttgctactgatggttttaatcctgctaggaccttgagttctacctatagcatctggccagttttcttaattccatataatcttccaccttggatatgtatg

SEQ ID NO: 54842 - DNA, 443 bp, Glycine max
  unsure (1)..(443): unsure at all n locations
gtatcttacctatntatctcccagttgtctntgcatttatttcttatataanaaacatgaagttctaattcaagatgttntctttgttgcatgggcataatgcaatcactctatgtctagcaatgattttattaagatgtccctacctttgaattctactaaaaattatcctctctcgagcgactaatctctaaaactgatgcatataaaaccttcaatgtatgtctactaaggattaccctctttcaagcgccaaacccctaaagatgatgcaaggatgaagcatataatacattngttggcattttaagcctgccaagccctaactaaaggggtttagcctttcattgtcatgagagactnttacactntatggggttgatatggatggaagaagatggatggatagaggaagaanagaggataatggacatatatagaaa

SEQ ID NO: 54843 - DNA, 338 bp, Glycine max
  unsure (1)..(338): unsure at all n locations
agcttgcttactaatgaatcaagacacaatttgtgcctagcccgggttgagtttgtgtcctctttgtcaggaggcaaatgtgtctactattcatattctccgtgattgtatctttgcgcaacaagtttggaataagcttttgactaagttagcaggatctcagttttttgggagtgatctatgaccttgatgttgcattagaatatcactntgcctttgttttttgcagaaagggtttgagatgtagtgtttggtgtgacctcattttttgtggaggaatataattgatgtagttttctatttcttttcttcatttggtaacaacttgctttgtcgca

SEQ ID NO: 54844 - DNA, 374 bp, Glycine max
  unsure (1)..(374): unsure at all n locations
tactaagcttagcgtcggctcggccacccgatccaccacgagcgacattatttcaggagctcgtgagggccgcgtcgctccggagctacggcaatcgcgttcagttcggtgatgctgctgccgccgcggtgaagaagatgaaaatgcatcggagtcgcagcgtgggaatatttggaaggatcgacgaggaaaaggtgtgtgagtttggagatgatggaatcaaggttaggcctaatgcttatccaagaagtaaaagttatgctgcacgtagagacggatcagcaaaggactgttttagttaacattaatgttaattacgatggttttctctcttaactaanaatgtaaggaaatatgcatgacttgttgntctc

SEQ ID NO: 54845 - DNA, 426 bp, Glycine max
agcttcaagatattgccaaactcccttccttaatctgatttcaagcttaaataggtggctttgttcatgctcgtgcgcttagcgcacttctgaaccgcttagcgcgcattagtgaacttcgacttagcgcgacttttcttggtcagcgaatggactgaagcggtgcgcttagcgggatggcccttcgctcagtgagcatgcacaactcatccttctttcagattcttcctcgcacttagccgaggaatgttgcgcttagcggatggctcactaagccattatattggcttagcgagagggtgaaaatcaacacttcacaaactcgtctaattaacctgaaattgagagaaaatgattattaaacacacaacacggaagtactaagtatttaatacctatcctctaccccacataattacgacacta

SEQ ID NO: 54846 - DNA, 405 bp, Glycine max
  unsure (1)..(405): unsure at all n locations
acactaaaaactaagctanagatgcccgagcttcatctatttattgtgttgttttatnggcgatcagaattgccatttccttggattatatggttgaaccaagctcatgcttctacaaaaaggttcatcaagtcaagttgaaatatggaagtaaccgttttgcataattggggcaaaagatgaatcgagtcaccatacttgcttcgtctactgccaaagatagttaggattgtttatgttcttgttacttccagtttcaccttgacaaagatgtcatggaccatggtgaaaatctaaattgattctaccccatatcctgcgtaganactcccaatacttcaattgacatcattcgcatcatccatggcttttattggttgcatggttcgtgcattctttctttga

SEQ ID NO: 54847 - DNA, 338 bp, Glycine max
  unsure (1)..(338): unsure at all n locations
accaattacaatatattggtaatcgattaccagtgtatctgaacattgaacttcaaattcaattgtgaagagtcacatctcttcatataatgctttgtgtaatcgattacatggttgtggtaatcgattaccagcgacaagttttgaataaaaatcatgagatgtaactctttcaatggttttcaagttattctcgaggatataactcttccaatggttttcttgaccagacatgaagagtctataaaagcaagaccttgacttgcatttcaataactntttaacaattctttagaacaacttttgagaaacctttgctacttattcttcttcttcct

SEQ ID NO: 54848 - DNA, 456 bp, Glycine max
  unsure (1)..(456): unsure at all n locations
atgcaagcttaaagtatgcccgagtcattcatccctatgagatgttgttgaagtattggcgaacagaattgccattccttggattatagggttgaaccaagctcatgcttttacaaaaaggttcatcaagtcaagttgaaatatggaagtaaccgtcttgcaaaattggggcaaaagattaatcgagtcacatcactgcttcatctactgccaaacatatttaggattattgatgtccttgttacttccagtttcaccttgacaaagatgtcatggaccatgttgaaaatctaaattgattcaaccccatatcttgcgtaaaaattcgcaatacttcaattgtacatcattcgcatgcatccatgcttttcattggttgcattgctcgttgcattctttccttgaaaaataaaataaaatgaacttaatcattgttataaaanaagaaagggacac

SEQ ID NO: 54849 - DNA, 428 bp, Glycine max
  unsure (1)..(428): unsure at all n locations
gcagcttcttgaaagctgagctanctacctcacccctcttattttaagctcacctccttaagaagagaagctagagcttatctacacacccctataatagctaagctcacccccatgacaaaatacatgaaaatacaaaataaatcttactacaatgactactcaaaatgccctgaaatacaaggctaaaaccctatactactagaatggccaaaatacaaggcccaaaagaagaaaaaaacctattctaatatttacaaagaagagtgaaccctaccttgacccatgggctcaaaaatctaccctaagattcattagaaccctaaggccttctttatcagctctagcccaatcctcttggagcctcttgctcatggctctggtaactggtcctttcctagggaggattgcatcatcccctccccatt

SEQ ID NO: 54850 - DNA, 453 bp, Glycine max
  unsure (1)..(453): unsure at all n locations
agacttgttcctctngctataatcaagtcctatttcaagaaaattacactcttcatgcacttaatacccctctttcaactcctcttaatccgtacaaaaaaataacaataagagacttttctgtggatctatttctccgaaataacataatattgaaaggactagtaacatggatatagaaagaaaagaaaattgagttaaccacatagtccactttatgtctcctttgtagaaaagagaaataataattgatgatattaagtgaattgtttaaagagatagataaaataaaaatgtgattagcattaattaatataggtgttttgattgttgaggtatccaaaaatagttcaaggttttattggtttgcgaatagcacannaagtaattggaaatgcatactatcatccaattttaattcaatagaattgatttgctaaacttacaaacttg

SEQ ID NO: 54851 - DNA, 183 bp, Glycine max
aatcaaatactattatttaattgttttaaataaaatcttcttattgaagtctgaatttctattattattttcaatgaccttcaattacacactatcatacaaggttgttgacttttaaatattttttaaaaatgctacacaattattttttattaactgactgatcatttataaaatacatat

SEQ ID NO: 54852 - DNA, 422 bp, Glycine max
agcttatccaaatactggtattcgagagattatccttgtaaccattaaaggtgcgtccttagtagaataggggtactcgggagggaaaccttgcaacgattcaaggtgtccttggtcgaataagggtactcgagagagaaaccttttagcgattcaaggtacacccttggacgaatatggatattcgggaggaaccttacaataattcaaggtgcatccttagccgaataagggtatttaggagggaaaccttgcaatgattcaagttgctccttagtcgaataggggtattcgggaaggaaaccttgcaatattttgaggtgcatccttactcgaataggggtgggtattcgggagggaaaccttgcgacgagtcaaggtgcatcattattcgaataggggtattcgggagcgaaaccttg

SEQ ID NO: 54853 - DNA, 438 bp, Glycine max
  unsure (1)..(438): unsure at all n locations
gcttaagaaaggccaactcccttaaaatatgattttttgtatttaataggtgggcttgttcgtgctcgttcgcttagcgcaattctgagccgcttagtgcgcattagtgaatttcggcttagcgcggcttttctcgctcagcggatggactgaagcggtgcgcttagcgggatggcccttcgctcagcgaacaagcacatctcatccttcttccagattcttcctcacgcttagctgaggaatgttgcactcagtggatggctcgctaagccagcagattggcttagcgagagggtgaaaattagcacttcaaaacttgcctaattaacctgaaattgagtgaaaaatgaatattaaacacacaanatggaagtactaagtatttattacttatctttaacannagggaattataacactaccaaataaccccataat

SEQ ID NO: 54854 - DNA, 443 bp, Glycine max
  unsure (1)..(443): unsure at all n locations
agctnggctggacttgactcatttccacctctattaccanatataaatagataagtatcgtgtgccatanagagttagcaaaacatgtaagtctcagtgaaacctgtgagtaacatatacagtcccaaataagtaatgtaaagtagtaatgactaattgagtacaaaatgtctgagcctaggtctactcatcccaaaatacacattaggacaaaaacctaagactcaaagcagtcacctatacccaagcccaaagtcaatcatatccacaaaaaaggaataagtatagtcagatttaaagaggcctcctggcaagactcctcagatgaatcctgctaagaatcctcctncataacctctcgctctgtgactgggtcctcctcatccatagagggatcctcctcgtaagatgtgtcctcctctagatcctctctctcgccctct

SEQ ID NO: 54855 - DNA, 365 bp, Glycine max
  unsure (1)..(365): unsure at all n locations
tttgctaacataatctgtgctactggttcttcatttacttataaagtctgcagttgggtatatgaattctctttgatactaaaaagtaataaactgtcatgaagaccatgtgagttataattttttttgcatgcaactaaattggggtttcctaactggatcttttagataaatcgactaccccttggaagatgactatgcatcgaagaatagtagtttagaggaccaatcaattattaaagagtttcatgcctttcacagtgaaaacaaggatgtattggatgaaacaactacaattaagctntnggaaagataggagttgattcttgatatgtctgctgcatgtttttngactggacattaat

SEQ ID NO: 54856 - DNA, 442 bp, Glycine max
  unsure (1)..(442): unsure at all n locations
agcttattatgctagtttattcacaactcattatattctatatttatgtaattatagcagaaactaagacttgagtgcgacaaaaaaaggacaaaaaaggataaaggtttactggttttttttttaaaaatactattataattataattctgagtggtgttttattattttatatataaaaaagncgaattgtcattggttatactactatttagtaaggttttacaagaaaaggaagggggagggggaattttcattttaataaacatttgatatatgattatataaaaaaatacaaatgttattttaatacaaatttaatgctctatattttgttttatatatatcatataatcctatgactctataaacaaatatataaaatatgcttcattcctttcccttataagaacataacttctaaatatatcttttttattta

SEQ ID NO: 54857 - DNA, 248 bp, Glycine max
  unsure (1)..(248): unsure at all n locations
atactactgagcatgcttgactggaatgtgtggagacatgtaccttgagttaagagatgacaaagatgggtatcccatggaacatggtgaattcaagtgagaagctagagatctttgggatgcattcctaagatctacggagcttcggctgatgcttatggagggggattgatggtatgaagacctaananatgggttgacataatgtgcactgcctatggcgttgttaccggaaacacatggggttt

SEQ ID NO: 54858 - DNA, 441 bp, Glycine max
  unsure (1)..(441): unsure at all n locations
agcttatccttatggcttgtctctggacttttctctccgngccaccccagaagatntaagccaagcccctactttcgaggggcagctccaaccttatgacgactatcccgggcaagacgatgaggaaggagatacccatctcggtcctctgctccacctcanagatccgtccccccatgaactaccccaaccgaacatagtccgccatatcccagcttcacctacacccgaaaaagaatctgttcccgtcacggaagataggggaaagattgaggcgcttgaagagaggttaagagcagtcgagggccttgacaattacccattctcggatttggcggatttatgtctcgtgcccaacatcgtcatccctcccaagatcaaagtaccggactttgataagtaaaaagggacgacatgtccgaaagggcatctccggatgta

SEQ ID NO: 54859 - DNA, 366 bp, Glycine max
agttagtgaaaaggcttaacgaaaaattagggaacttagaaaaactaaatccttaattgaaggcgtaggtgacaatcatagtgaattactaaacaagattggtagtttacttaaggtcattccagatactccccaagcctcggaaaatacttccaaaatggtaacaagaagtacctccaaattaattaatattattaatgaagatagtgaccaaaactcagataacacaactgagataggatcagtgtcagaaaagaatataaatccaattaatccaaacactggaagacaccctcagttatattatcaacgtccgactgccctgaccttctatataagaaaaagtgaaaacatttaaagtttagt

SEQ ID NO: 54860 - DNA, 445 bp, Glycine max
  unsure (1)..(445): unsure at all n locations
agcttattaggaaacaaaatacaaagtattttgatgttctttgacaacaaacgaaccttaatccttgcctcctgtaaaataaattaaaaaaaaactaatcttagtaccaccataacctgaaaaaataattaaatacagcattggtttgaactttgaagggaactttctttctttagaaaaatatattacctgaaagaattgtatttgtatttctgtggatgctaatctgagaagttccaattgttggagctctaggtagggtcgttgattcctaaaagctagtccaggaacacggctgaataaaacaaacaaattatctatatgtttgcttttttagaaaaaaaaaatagttnttttattttattataacattccatatatatatatatatatatatatatatatatgcaaattagcattaaaaactagggaacattagagcaaa

SEQ ID NO: 54861 - DNA, 372 bp, Glycine max
  unsure (1)..(372): unsure at all n locations
aaaaaaaaggaggtgccataagtgctaaggtaaaaaaaaaaagtaattttgaaataagggcagaaatagagaagtgtcataagtgccaagaagaaaagtgttaatagaggaataaaggctgaaaaataaataagcttatgccggaaataagtgaaagttnttctaaggatgcatgctctcttataatcctaagtttttgaaatcccagaaaaaccatgatttcttgtttagccaggctccgttacaagccaaataaagtccttagtgatccaccaagtataagtaagcataactttaattgagaagaagtcacaatttggaatttaattgaggtcgagaatttcaacactcccccaacacttggcgcgagag

SEQ ID NO: 54862 - DNA, 325 bp, Glycine max
  unsure (1)..(325): unsure at all n locations
gaatggggaatatttgtaaatgttgtcacaacatactttatggagttaaaaacatttatctcaggtacacctcctactacactagatatttcaagancctttttcttttgggttatgagaaatnnatatccttttgatctctattggaatattcgcgcggtccaaatgggctctgaaaaaggatgacattgaccatttgtcactctaaatcgtgatcctatattttgaagctaggcatattctattcgttgctttgttctaaacctatcttgttgtccttaggagcatgattctcttcgggtattacacgccataccaacatgtt

SEQ ID NO: 54863 - DNA, 437 bp, Glycine max
  unsure (1)..(437): unsure at all n locations
agcttcttatccaaggctcatcttggtggctattctccttcttccatggctaattccctagtggatggcgcctcctctcacctcttctcctttgtcttccgctgcatctccatggtggaaaatcaccattgaaggatctcattgaagctcagagatccagccaccatagaagctccacaagcaagcttccatcaagtggtaatcagagcacaagagcttcaagtgttgagggaaggagcccaaagtgtgaagaacctcgggatttgaggtcaaatcctttccaaggtggagggaatgatgcaatcctatcccgcaagggcattgngtagaagactccaagtagattgggctagagatccaagggaagaccctagggttctcatgagccttatggtatattctgagcccatgggctaagtatgagcccgcatatcttt

SEQ ID NO: 54864 - DNA, 317 bp, Glycine max
  unsure (1)..(317): unsure at all n locations
acaaacataaaaagggaaaaggtaatattgtgaccgatgctctttctcggcgtcatgcattactttctatgcttgaaaaaaaattgattggtcttgaatggttgaaaagcatgtatgaaaatgatgaaacttttggaagaaattttaaaaattgtgaaaaactttcagaaaatgggttctttagacattaaggctttcttttcaagaaaacaaattgtgtgtgcctaaatgttctactacaaatttgcttgtttgtgaagcacatgaaggaggtttaatggnggcatttggggtccaaaagactctaaacacattac

SEQ ID NO: 54865 - DNA, 439 bp, Glycine max
  unsure (1)..(439): unsure at all n locations
agctngcaatgacgcatctacttcttcattttattatatacaaagatgagtgtctcttaatcttaaatattctgaatttgtttattagttagaaatacttcaatttgaacaaaatgaacattgtctcttgaattatatgaagggtctcgctcggaatctttctgagttcttgattttatgcggcataaataaaaactaatatgatgtgctttacgggcaagggaaaaaaaggaaaagtttttaaatataaattactttattttctaaaatttaaatatagtgattatataatctttttatattgttatctaatcatagatttattaaaatatgtccaatttctcttctctatattattattttgtgatactttcattctaatatattcttttcgtgtctcaattttcatctccctcttctattctttctttctttatct

SEQ ID NO: 54866 - DNA, 452 bp, Glycine max
  unsure (1)..(452): unsure at all n locations
ctttaagatgaaaaacaagncatttaatttanaaatattttatganacgaatctatcattgtattcaatctctcacactaccctttagacaagtttaaatgacattttgtttgatatattttaagtgttgtatcttatcctangtttatacggctaggcctaatttaaccaaatccaatttgacgggggcaattgctttcttcatccacattgttgctttctgcaccttatagaggacaataatactttgtactctaatgtgcacccaattgctgcagcaacaacccctttccacatggcatcagcacccttgcaccaccaccgcaacccctttaaccacatggcggcagcgacaaccccgtcaaaatgcaatggagcaatattaccatcctttattatggaacggatattccagaagtgtatagatatttcttaatacgatttttatattt

SEQ ID NO: 54867 - DNA, 461 bp, Glycine max
  unsure (1)..(461): unsure at all n locations
tgaggatgcagcttataaatggatgtnaaaattcattctttaatggctttattcaataggatggatatgtagataaccccccggatttgaaaacttagacaagcctaatcatgtttttagattaaaaaaggcgttatatggcttaaaacacgcccctatggcttggtatgagcgtttgagtatgtttcttttagaaaaggatttctctagaggaaaagtagatactacttctttcataaagagaaaattacatgatattttattggttcaaatttatgttgatgatattatttttggatctactaatgaattattgtgcaaggaattctctcatgacatgcaaattgagtttgaaatgtaatgatgggagaacttaatntctttcttggattatcaaataaacaaaccaagactagaatttttgtcaataatccaagtacttgcaagagttaattacagat

SEQ ID NO: 54868 - DNA, 466 bp, Glycine max
  unsure (1)..(466): unsure at all n locations
ctaagcttagacaacttgtgtaataattatgataaggctgntatcgattataacaaagagtttttccttctgaagaaactcttgtaacttagaaattttttctccccacttactcatgatgatgcataatgcacaaaagatatgatatggactaagatacattcaatataacaaccaatacaaaagccactcaagggaattgggcatgttatagacaaaacatcttcatgattttctccaagctccaagctttagtcttcatgttgttcatgttgctcccactatctctaacacaaaggcatgacattttttcctcttagaagtcaaccaacaagagattcttctatacatcgtgttatatgtattggtcatgtgtatgaaaaattatttgttcaggtaaaataatgatcatcccatttgaatgtgtatatgcctatgcaacaggtatatgcccatttgaatgtat

SEQ ID NO: 54869 - DNA, 265 bp, Glycine max
aaatacgaacatacagttgcaatataattatgttacattggagtcgtagatagataaaaaaaatttaataattataagtcgcagcacgtattacgactcttagttagagggtggaagctacgacttacttcgtttagagtaatttgctatcatatctctcggattaaaaaaatggaaatttttgtgacctaatgggtaaaaaagcctatattgctctccacattattactctgatttataatataagagtatataagttcttttc

SEQ ID NO: 54870 - DNA, 366 bp, Glycine max
cttaataattactttatacaaaacaaaaatagtctagtgacaagaaatatgaaccatgtagatctatattctctatgcaagatggttgtcatgtgaaacaatgatcatattcatatatttggttatactgaaacttaattacacaaattactgtaatcatataagagcattacaatatgatgtctcttttttttttgcctttttgctcacaaaagctaacactaaacagtctcaaaataggcaactggaacctaatgacaagggactattgtttatacctatataatgcacagaagatgcaaaaaattatgacagagttgtgtgcctgtgttagggggaaaccaaccacctgttagttcagcaatc

SEQ ID NO: 54871 - DNA, 412 bp, Glycine max
taagcgacgcggctgcagctttgaaattgcccaaatccctctccatatcttgtttcatgcttaaatatgtggccctggtggtgcttgcgcgcttagcgcaactctggcgcgcctagcgcacatatgtgaatttccgcttagcgctcttattctcgcttataggatgcatgcaagcaatgcgcttggcgggatgacactttgctcagtgaacatgaacagctcatccttccttcaaattctttctcgtgctcagcagatggagtgttgcgctcagtagatggctcgttgagttgacagattggcttatcgagcatatgaaaatcagcacttcacaaacttgcctaattaacctgaaattgagaggaaatgattatttaatacacataataggagtacttagtatttattacct

SEQ ID NO: 54872 - DNA, 405 bp, Glycine max
gccttccatactaagctttgtctacgtattcaagattggcttttgaaagtgcctcggtcagaatgtcattattttgaatctctgtcttgcagtacagtaacattacttctccttccctttgaacttctcttagaagaaaaagctttatcttgaagtgcttatttttgccatgaaacactggatcattacaattgagatggagcctggttgtccacaaaatatggtgctttcttcctgtttatatgcagactgtcataattatctgatccaagagactgatcattgcgctacacagcttatactctgcttctcagttgattgagctacaacttttgcttttataacaccagaaagactccgaactgggaaaacaataccagagggctttatgtataatcaacctgc

SEQ ID NO: 54873 - DNA, 452 bp, Glycine max
  unsure (1)..(452): unsure at all n locations
atgcttaatgcaagaaaacgcactcatgactagggacccaanatttggttttagaattagaanagcatgaaaatagggacttgtttgtaagaatttgggctgccccatgattggtactttgcacataagcaatgtgggaaatgcttttcaatggtgtgaaggtatgtgtgtaaatataaagggcataaaattcctcgccaagtatgaataaattgttttcctaaatgaatgtatgatagcatggaatgcccttctgaatgcaaatgtgtgcaggatgtaattagctttccaatatgcatataaataaataggagtgaaacaataaaaatttgtatggtgtacttcaaatgtacgtaagtaagttatgatagcaaaatgtttaggatataaattaggtgtaaggttgaccaacactctgagcatgaaagtgtgttttcttttcagaattatat

SEQ ID NO: 54874 - DNA, 449 bp, Glycine max
  unsure (1)..(449): unsure at all n locations
ttcaaactcagcttgttctttctataaatgagaagttctgaactcatcacgttatctaaaacaaaccttgnggtggatccaagtgcttcaatcattcatttgcatattcatgttttggtggcatactcacctttgtttatttctttaggattttcatcataactaagaaaacaccaaggcacccctataacactcgatccagataaatggataatgaagagggcgtgcaggaacagatgaaggccgatctatcggccttaaaagatcaaatggctttcatctcggaggtcatgttaaaactccagaaaactatagaggataaagccacggcaaccgcctccagtacagttagggcagcggagccggtgctgcagcctgccttatatccgggccgagacagaaaacacggtagtgttggtcggaggtatagtccgcaagcttacccctat

SEQ ID NO: 54875 - DNA, 367 bp, Glycine max
  unsure (1)..(367): unsure at all n locations
agctntctagctnttcattggtggtatttgatctcctgttggtgctctaaattgggggagtgtgctcaaatatatggggcaattttggtttgttttcttgcttgattaagttgaattaagggttggtatgggatggccctacgcctataatgcattttgaaacaatgggacatgccacattgtccccgttctcttgttattgacgcctaaacgcgcgcccaccaagtgttcggtgtaatgcctcaatggcattagcgcgtgacttttgtaaggaaacaacccgtggggcatnttggtttgtacatattttctatttttggaatatgtattcattcccgaaaaggctagagtaattgccccacatata

SEQ ID NO: 54876 - DNA, 429 bp, Glycine max
acctttgctaattcaattaggaattcccttcctaatattctagtgatcatcttgatgttgtgacttgtaatcttgaagtattgtcttgaattttaatcttgaaaagcccatttgcatcaattgcaacacatcatcatgatcatcatcaaaacatcaaagccaattgcatctacacatgtgtcctccaccttcgagattggagctatgtttcacgattgcctaagtgcggaccctcaaggcaatccgccattctccctttttttttcggagacccatgaatgttattgcctagcgctattcatgtgccctccaccttcgaggttggagctatgtttcatgattgcctaagtgcggaccctcaaggcaatcctccattctcccccttttttggagccccatgaatgtcactgtctagcactgttcacgtgt

SEQ ID NO: 54877 - DNA, 368 bp, Glycine max
  unsure (1)..(368): unsure at all n locations
gacttgctaccatccttgatcactaaccaaatggtggctggtgaacctcgggataatctaccaatctcctttccctcgttggtacaatcccaacacaacttatgcttatcatggaggtgtccaggggcattctatataacaatgcgtggctttcaaaaacaaggtccaaagtatgattgacgtagggtggctgacatttcataaagatggcccaaatgtaaggacgaatcctcttgccagtcatggnggatcggcggttaatgcggtattttctaagttaatttttagtccctttctcaagaaattgaaacccttatatctaacattcaaggataatgtgatatactccaatgtacaaataataaagc

SEQ ID NO: 54878 - DNA, 446 bp, Glycine max
  unsure (1)..(446): unsure at all n locations
gtgccgtccagctcgcccaggcgagcaagggtgcttcctctagaatcaacagccttctggagggcccaagtgggtctgattgctatttgcaccccctttttactaaatgcaccccttctattnttttggtaattctctttccgtaacgttacgaaactttacgaatttcgtaacgatacttattttccttctgcaaggttacgaatccttacggattatgtatttactcttttttagctttcgaagaagttacggaaacttacggattgcgcaaaaacacctcttttcgacttctgccacattagggaatttcacggatcgcgcaagcctgcttccttttgatttctgagacgtctcgggacttcatttatcgtgcaacaaaggacgccaagtatctcaaagcgtctaaccaaaggttgcatgtcgtcaagtaataatccccgaac

SEQ ID NO: 54879 - DNA, 449 bp, Glycine max
  unsure (1)..(449): unsure at all n locations
agctnggatgaagattcccgaccgagacatgttttcttccctggcaacaagagtgctattgatccaaatattctcctccgttatgatatgttggggtaaattttagatttttaatatgtcttgaccctgtttgatattatttgaaaattcatttttttttacttgaatatatgtcctgttgtgctatagccagtgatcaaatacattcattttcttttttgatataggnttgtgcaagttaaatttttttaaaagaaaatgtggactttcatatccttttatagatcttttcttatacttgagaacaagttgttgtgttgttctttattaagttgcttctacaaattttgtggctaatttattggtcttaaactgattttatttttttcaggagtatgattcatgactattgcatctcttttgcaagtntaattcttcctccttttcta

SEQ ID NO: 54880 - DNA, 455 bp, Glycine max
tctacttatgtggcagggcgggcttccttcactttcttgtctcaaccgcgagctatgaccaccgctcttccttcccgcgatgcttctctttacatcttcctgagtgggcttatagcctaaaccatacctcccacgatttcctttggcatttatcaagctagttatgccgccgttgtctttgcctaaacccattccgggttcgtaaccgttccccaacataactcgggcaatcattactgctgcatcggacaggcaagcttgcccagagaaggagtccacggaggaaatgcttaccacctcaaaagactggaaagcggtttctaatgactcctctgcggcttccacataaggcatagaggatgggcagctcaccaagatgtcttcctcgcctgatacgatgaccagatgcccttccactacgaatatcaacttttggtggagtgttgagggaacaa

SEQ ID NO: 54881 - DNA, 351 bp, Glycine max
agcttaacattcaatttcgatggtctcgatatattatgggactcaatcagacatcagagtaaaaagttattgttgtttgattctgctcaaagcaataagattctatttcgagcgtctcgatatattatggtactcaatcagacatccgagtaaaatgttatgttcgtctgaaattgctcagagccttcgcattcaattttgagcgtctcgatatattacgggactcaatcatacatccgactaaatagttattgttttttaaatattttgagatcttcaacattcaaattcgagtgtttcgatatattctgggactgaatctgacattcgagaaacaagttattgtcgttt

SEQ ID NO: 54882 - DNA, 337 bp, Glycine max
gaggattttcaaacgaacaataacttttactcggatgtctgattgagtcccgtaatatatcgagacgctctaaattgaatgttgaagctctgaccaaatgcaaacgacgataactttttactcagacgtctgattgagtcctgtaatatatcgagacgcttgaaattgaaagttgaagctttcaacaaattcaaacgacaataactcttttactcagaatgttgattgagacccgtaattttttcggacgatcgaaattgaattttgaagctctgagctaattcaaacgacaataactttttgctcggatgtctgattgagtcccgtaatctattga

SEQ ID NO: 54883 - DNA, 462 bp, Glycine max
  unsure (1)..(462): unsure at all n locations
cgtacccgagatcctctgagtcacctgctgcatgcaagcttcgtctctcgaaacaagcctttcgctcttggaatttatgttgntntggcaatgttcatgataatgttaaagcttgtcaagatgtggttaatgttgtgcagcgtgatattgacacttcggtttactctgatgagttgaaagatatggaatctcaagctcagattgaccttgaaaagctttatccatgcagaggaaactttttggaggagaagggtaagtattaaatggcagcgtcaaggagatcaaaatacaacttattttcacaaattagcacatattaggcatgcagctaagaagatgtcagttcttcaaagtggggatgttatgatggaatcccaagaagctctggatgtgctcggctttttctctaatatttatgggagacaataactgtgtccaattatttgatcagaagaatcattc

SEQ ID NO: 54884 - DNA, 409 bp, Glycine max
  unsure (1)..(409): unsure at all n locations
cggacctataaaactaagctngagggcgactggatgcattggttaacttggtaacccagctggccttgaaccagaaatttgtacctgtcgcaagggtctgtgatatgtgctcctctgctgaccaccatacagacctttgtccttccatgcagcaacccggagcaatggagtagcccgaagcttatgctgcaaacatttacaatagacctgcttaacctcagcagcaaaatcaaccacaacagaacaattatgacctctctagcaaaagatacaaccctggatggaggaatcaccctaatctcagatggtctagccctgagcaacaacaacgagagcctgctccctcctttcaaaatgctactggcccaagtagaccatacattcctccaccaatccaacaacaacaaca

SEQ ID NO: 54885 - DNA, 458 bp, Glycine max
  unsure (1)..(458): unsure at all n locations
agcttatgcctcttcatggactattatagtgtgtttggatggagcaatttaatagaggaattcattttttcaaaaaatttgaaaggattcataataaaatagcttgtttggataaaatatttgaaaggaaatttaatttttggtatttttatgaattattttgattgactaaaacaatggaatttcaaattctctcaaaaaataaagaatttgaaattctttttttggagatactcactctaacttatattcttgctcacgactttntcttgctcaacactcgcaactataggtgaccaaagtttttacggccgacatcaacataagttatttttcattgacattggccgagattttttcggttagaatttttcgtatgatatcaaccacagctatnttntgccgatatcggctaagatattttttagatgatgttggttaggggtattttctcactg

SEQ ID NO: 54886 - DNA, 402 bp, Glycine max
  unsure (1)..(402): unsure at all n locations
cgaatcatgcagccactntgcttttcaatccattgcttaaatctccataatacacctgcaacctctgacttagacttgagaaagtaaatccagcacattctggtgaaatcatctataaagatgatgtaatatttactctctttaagtgaagcagtcctttgaggtccggcccaatctgtgtgaatcaactgcagcttctctgttgctctccacgttgattgtttgaagggtaatcttgcttgcttgccatattgacatgtttcacagcttggtaatttagaatctaagtgaggtaagccatgaaccaactctttacgttgcatgttcagcacaactgcatgatgaaaatggcctaactctttgtgccaagcctctgtactgtttacagaggctggataggct

SEQ ID NO: 54887 - DNA, 449 bp, Glycine max
  unsure (1)..(449): unsure at all n locations
agcttgtagagttgagtcttgtattattntaatcgattactgatatctcatataatcaattactgcgttgtttgagacaatgaccaatttagtcaagagtctctactttgatcgattaccaagtggatgaatcgattacttctttctcatttattgttcaaaagtgatcaagaacactntaattgattaccaagagcatctaatcgattacattgttcttgagttgtattttagatgttggatgaacactntaatctattacttacataatctaatcgattactttgttaaaataattgattaccttatagatttaatcaatttcggacaattataactattttctctataaacaaccagcttgtattcacatctacacatcaagagatcattagagaatactcaatacatctcgaaaacaacatcttagcctcaaaatgagcaagatt

SEQ ID NO: 54888 - DNA, 448 bp, Glycine max
gtaggattatggggcacccatcacatgtggtactatgtggcggtcgggcgatggtgcaagtcaactctccacatccacagatcacacataaacccaccatccccagttgcccaccttcactgagctcacgtactcccacgtagcccttatcctcgttcctctcaacaccgggtccccatcaatctctccaagcttccacaacatccaagcaattcaacatcccaaacatcatgaactatcaaacccaaggaaaacagggcagaggcagaaaactctgcccaacacaaaccaatatcacagtttttctcacttaaataccccagtaacattctcttcgttccaattcgttaactattggatcgactcgaacattttactggaagtctctagcacataattctacattgtgaaccgtgggatctgctagaaaacgtccagaacccaatct

SEQ ID NO: 54889 - DNA, 447 bp, Glycine max
  unsure (1)..(447): unsure at all n locations
agcttccattntcaatttcgtgtgtctcgatatattacgggactcaatcggacatccaagtaacatgttattgtcgctagaattttctcagagctttcgttttcaattgcgagtgtctcgatatattacgggtttcattcggacatccgagaaaaatgttattggtctttgatttatgtcaaagcttctgttctaaatttcggagtctcaatatactacgggtcacaatcgagcatacgaatagaaagatattgtcatttgatattgctcagagcttttgttcttaacttcaagcgtcttgatatattgncgttagattatggtaagagcttcttttctgaatttcgaacgtctcgatatacttctggacacaatcagacatctgagtaaaaagatggtgtcgtttgagattgctcagagcttttgtttcaatttcgagcgtcacga

SEQ ID NO: 54890 - DNA, 405 bp, Glycine max
gtgggagtttccaagtgccaattcgtcttcttctttagtccagtcttcttctggcttcaatccatcagtgggctatccttctgtgtccagcatcttgggatgttcccagcctttgatgacagctttccaggttctgctatccagtgatttgaggaaggccaccatccttgctttccagtattcatagttggttccatccagaattggtggtctgttcactggtcctccttctttctccatgttcatcagaatttatctccctagatcccactcagtgatttcgagtgcccgctctgataccaattgaaattctgataccaatgccagatgtcgtaccggatgtcacgacatcacgcttcagaacatgcagattatatttgatagtgtgaacagattaaacatgta

SEQ ID NO: 54891 - DNA, 426 bp, Glycine max
  unsure (1)..(426): unsure at all n locations
cactagtaatatgtctactatcnatggtattatttctttcttcgncattgagggaaacacttgggcttgcagaatcctccacctttgggcgtattcttttgaaagatccgcgccccctttttgcacatgttcttgtagtgcatcctatttgaagccattatactgacactgcctaacgaaggcaaccattangtccttccaagaatggactcgggaaggttccaagttagtgtaccangtaacagctaccccagtaagactttcttagaaggaatgtaccagcaattcctcatcctttgcgtatgcccncatctttcgacaatacatctttagatggttcttggggcaagtagttcccttgtacttgtcaatgtccagcacccttgaaatgggaggggtgatgatatngggtactacgaacaactc

SEQ ID NO: 54892 - DNA, 470 bp, Glycine max
  unsure (1)..(470): unsure at all n locations
tcaagcttctcctctatattcctataaataggaggagaagtgaagggaatgtacgctcgtgcctcctggtaattcgagatcacttgaaattagtgaaaaacattgcttccgtgaagaaaatacgagccgaggcgcttccgtaacgtttgcgtgggtgatttcgcgaagattttcaaccgttcttcgacgttcttcgctcgatcttcggcgatcttcggtcttcacccggtaagttcccgaaatcgaacttttcaattcattctatgtacccttagtggtcctcatttgttttcacgcgcttatattttcattttcgcaattaaggaatacgtgagagcaagggaaacattctcgtcgaccgcagaaagataaaagaatataacaagtgcagaaggaaataaagatgttaaagggaacataaaagattgaagtcatgttngcacatttgattaaaggctgccgtctgttct

SEQ ID NO: 54893 - DNA, 446 bp, Glycine max
  unsure (1)..(446): unsure at all n locations
acccatcacatgtggtactaggtggcggtcgggcgatggtgcacaacaagttttccacatccacaatgcgcgcataaacccaccatcccctgttgcccacctccaactgagctcacgtactcccacgtagcccatatcctcgtttctctcaacaccgggtccccatcaatcctcccaagcttccacaacatccaagcaaaacaacattcacacagcacaagctatcacagccaagcaaaacaaagcagaggcagaaaactctgccaaaacaccaaccaaaaatcacagcttttcccactcaaagaccccagtaacaattccttcgatccaatttgttaaccgttggatcgactccaaaattttactggaagtccatagtgcataagcctacattttgaccgttgggatctactagcaaacgtccagaactcattntacattactct

SEQ ID NO: 54894 - DNA, 403 bp, Glycine max
  unsure (1)..(403): unsure at all n locations
ctagattcgaacattacctcttcaccatcaaagttgacagtatcactaggccgagagtcttcatcatctgaacttgcatccaatgttggttctactttactagtggatgcatcagccattagacataagttggcttcttcctcactatcctcgttagataaggaatcatctaggttctctcaagtgctcatgaggttcttctttttgatattgaagttattcttcttatantttagcttttcaaggccaagacattccgacttgattactgaacctgtggaaggatgattggagtttcttgcactcatagaagatgattggagttntctctttcttatggaaggatcttttgtatgatccgtctaacctagaggagttcttatttttccacatcttttttatc

SEQ ID NO: 54895 - DNA, 445 bp, Glycine max
  unsure (1)..(445): unsure at all n locations
agcttatccctgagccttgaactntggtgctgttcttagaacctgatgagcatgaccggcttcacacttcgggggaaggtaaatatgccaccttatcagatcagtgaaatgttctggtccttctggattctcttcagaattgcttcctagaggacgtttcgaaatctcactcctatcttttccttttgacttacaaggttccttcagacagtggagtatgtaacatgaacagtgtttcttggtttcaccacaagaagacatctgggtgtcataaaaagcaaagtactcagtagcaagcttaacaaaccccgcagtgtgttcatccttcttgctttcacgagggacaacatcatcatagagtntctgcagcacacaaaagggtatttggttctctataatgatcaagtccccagcgatgttcctgctaatccattgagtgtgcatg

SEQ ID NO: 54896 - DNA, 468 bp, Glycine max
  unsure (1)..(468): unsure at all n locations
agcttcatagatgcttacaatntaacagtaaaataattaaaatttccaaactagttgggaggggaagaattgtattttagtcgcagagttgcatagattntgtatctagatctaactgaagatctaagtctcctctagatcagtgcagcagcaaagtctacagtatatttgactttagctccaaatatagccatttaaactaagttatcaatctaatgtcataagaaaatgttttagtagggcatggttagatctgcaaagatacaagtggttaatttgattttgcagcatcattttaataccagaactgtttttattgctgcaagataaatcatcagcagaacanaaaaaaaaatctaaaattctagtttacccacacaacgatattaagcagcatataaagttgtctgcaatattgaagccccaaaattcaaacccccaaatttaggagtctatcaagaatatcaa

SEQ ID NO: 54897 - DNA, 434 bp, Glycine max
  unsure (1)..(434): unsure at all n locations
tgaacgatgtaaacattatgatacttatctatgtaagcttgtcttatctagtatggnttatggggtgagagctatatatggtgtgaaaccttgccctgctaaacaattacttgtaagtagcatgctttggtctgtgaaatgaaattatggctgagccatgttggttctgtggtttaggaagtgtcaaatgatatttgctagcagttctttggactaggaccactgtcaaatgatatttagtggcttttcccccctgattaagttttcaatttctcatacatttgctacttcactaacttcaacaagctatatagctggaattatgtgctttattacttgaacacttctaataaatggggttaatggacagcctatttactatggaacaacaataagaaaaatggtgatgaagccaaatcaactcaaatttctat

SEQ ID NO: 54898 - DNA, 455 bp, Glycine max
  unsure (1)..(455): unsure at all n locations
atcctctcagtcacctgcngcatgcaagctngctgatatcaactaggcattaatcttcaactaataacttattcttctagctgggttgatttggtcctttgatggtttttgtgtatattgactgactgccctaagatgttgaacatggttagtatagatacatttccatttgatatgaccctacctacttcaaattaaaaggattaccatccaatcttctcactaactattaaaccttaacttgtaaattaacatagagaaatatgataatattaactgctacgcatgttgctttcttcatacctaactaaccgtgtgacctaagacttagtagtatccaaacgaaaacataagtttaatgtaaatttatttttatgcctacacattattaaacaacatatgtatcaatttctattatagagacacagaacagaaccctgctatatagccacata

SEQ ID NO: 54899 - DNA, 467 bp, Glycine max
cttttagtttcagatgatgcagatgggtatgtagctacctcatgcactcctctaatgactatggcatcatttctggcgctaaactgctgggagttggaggccatcttctcaattaaatttctggcttcagcaggagtcatgtctccaagggctccaccactggcagcatctatcatacttctctccatattactgagtccttcataaaaatattggagaagaagctgttctgaaatctgatggtgggggcaactggcacatagtttcttaaatctctcccagtactcatacaggctctctccactgagttgtctaatacctgagatatccttcctgatggctgtggtcctggaagcagggaaattattttctaagaatactctcttaaggtcatcccagctcgtgatggaccttggagcaaggtaatacagccagtcctttgccactccctctaatgaatgaggaaa

SEQ ID NO: 54900 - DNA, 379 bp, Glycine max
agcttatacggcctcgtctgaaccgagatgactttattatttatttggacaagtctgaatatgatgtataagagagtgaatgtgagcctttcaccactttgaaaggcttgtatctaaaaataatctaaaaacacttttcattaagatttgaatctttattcctctattactatatatgagacgggtagagggtgtcacaactttcatatatgtattttgctagaacaaaatcaaaaagaaaagagaaggagcatgaatactaagttgcatacaacatgatcaaacatggtctaatgttatgatagcattaatactaattattaacaaagcgactgcgacacacttgtcgtacatactaatcaattattgcacatgcttc

SEQ ID NO: 54901 - DNA, 452 bp, Glycine max
  unsure (1)..(452): unsure at all n locations
ngtgctgcgttcttcttcagctctgtcagacgtctaataacttcaccacgtaatgatgctatgtccatctatatgttcaaaagtgaaaatgagaaactcaaaattttaaacaatgaatgaaatctaacattgtttacttctactgacatcagaattcataaatcaaactataagcacaactaagttggattgataatatcaagttcctctcgcccccttattaggaaagaaaactcatattgaatccttggcagtcaaagcaacaaatcaactactaccaactagcatagttacattcaaaaatttcaagtacccaacacttcattaatacatgttgagatggtcatggaagcagaagagagtgctaatgagtttatttgctcaaaaaatactccacaaagtcaaaagctgtgatgaagatgaatgcatacatgatatgtaccagatccatc

SEQ ID NO: 54902 - DNA, 459 bp, Glycine max
agctctagaaccattaaactacctgcagtgaattaaatatcccgaaaaacgcatacaaatgccaatacaggtgaaaagaaaacgtagaagaagatagggaggcagaaatcaaagctctttgggataaagcaagaaaatgaatctgtattcatggagtttggagataaaaattgaagcttttggagataaaaatgatagctttagaagaaacaataaacatgcagtgaaaaaaataaaataaagcacatggagagggaaaacgaagcacattcatggagtttggagataaaagtcgaagttttttgagataaaaatggtagttctagaagaaacaacgaacatgtagtgaaaaaaataaaaaaaaagcacatggagagggaaaccgaagcacattcatggagtgtggagatacaaatcatagctttttgagataaaaatggtagctttagaagaaacaat

SEQ ID NO: 54903 - DNA, 343 bp, Glycine max
actatcaaactaagctaataatctatttggttgaaaccgccttccgtcagttgtccttttgtttatgggataactatggatttggagctgtgaatgcgcgatagatcaacgcgcataccatatagtcagtatgagtaagatatttttccttgatttatatatagatgagatcatacttgcaaccgatgatcatggattgttacatgatgtgaaacacattctctctacaatgatcaccttaaagatactgttgacgcttttcacccccggtcatttttataaatgagatagacctcgacgtattttacgtctaccacaggaaacttattttaacaaacatttt

SEQ ID NO: 54904 - DNA, 399 bp, Glycine max
cttctagccaatggacttaccttgaattaattcctttgatagctcttttgagccttgtttctctttccttggtttgaagctcactacatattcttaaggaattttggagctttggaattgttttgggaataagtgtggggggcttttgtttcattggataatatgttttgatggctatgcttcatgatgtattttggataatatgttgtgttggctatgcttcatgatgtaaggagcacatggggtgaacttcacgccggaattataccgcggaaagcaagtcaaaaatggggtggttggagtaccaaggaaatgtttggaagcaaaagcacgagtctttgcaggtaaaggcgaaagggccccgatcatctagcacttttgatcttcgagggggggggg

SEQ ID NO: 54905 - DNA, 393 bp, Glycine max
actctgaaatcaagaaacacatacacacactctttcctagtcgatcactcacttaattttccattctccccctttgtttttgagtttatgcttcacttgaaattaagttaattacttatgtgagttcttgatttaatccctatttctctccccctttggcatcaacaaaaaagccaaagtgcgtacaagtagaaatcatacatacactacttataattacaaggcattcattgaagaataaaatatataaaaaccacatagtcatataacataattcataattgttcaaacataccgtgcaaataaaagaaatactaaattgttcaaatgtcataataatatagatcattttgataggtcactaacatctagcattcctaattctcttctaat

SEQ ID NO: 54906 - DNA, 460 bp, Glycine max
  unsure (1)..(460): unsure at all n locations
tcgagaaataatatcttatcttttaaaaagtatgccgaccacttctctacaattaattaaactaaactaaacatgtaaatagtaacttatcttttttaaatataatttttatttaacaaaaaatatatatatatatatatatatatatatacacacacccgaatattcgctaacatgcaatcccatacttaaaaattatttttagacacccattctgttataagagagccagttaaagagagaaacaaaaaaaaatagtatatatgatcatgagtattataatgttataggaaaaaataaatagaaaaaaatgaagaaagttaattataattaggtgtttgaaaatttagggtattaaaaaaatcttagctccaagacattatgctaccggtggaatggtggaataaatttagaggatctatttntatatgattaanaatatagattctaatcccttaaa

SEQ ID NO: 54907 - DNA, 451 bp, Glycine max
  unsure (1)..(451): unsure at all n locations
agcttctccttccatggcttattctctagtggatgacgcctcctctcacctcttctcctttatcttctattgcaactccacgaccgaanatcaccattgaaagaccttattgaagttcaaagatccaacctccatagaatcttcttaagcaagcttccatcacatgccatgaggaattctataagggtgtttcctaatgctcatcacagactgtgtgcatggaatttggctaggaatgcaacatctaacaataacaatgcattttccaaacagttccaaagttgcattcttggggacattgacgttggtgaatttaagaaaaaatggtgggagttggtgtgatagcaatactacaccagcaacacctagcagacaacanaggaacaccatggctacgcgtaaggatgcatcactagcatacgaacaaaacanaataatagaatatcttttg

SEQ ID NO: 54908 - DNA, 457 bp, Glycine max
  unsure (1)..(457): unsure at all n locations
cctcgcacttggaatggcgaaagccncactctatcattatgatttgtttctgccatctcanacaaacaaatcaaacgtaacaagacaattatagttgttgtttgaatacctcacccacttaagtgtatcacacaattatgacttttctctaatgaaaaactcttgccttttaccactgtaattccccttgagttcttaggaaattcaagagattatggccacaacaaagaacaattcaccaatatgtgtaaggtaaggctagagagacaaggaaaaggttaaccaagaaaaaggctaacaatgtttttaggcacaaatgaaggaaataaaattcagaatttaggaattgaagtaacaatccttcatgcaaccaatatattaccttaaagagattnttttataagttcttcaagcatgaaccattcagcccaatttttttttttaattttgcttatac

SEQ ID NO: 54909 - DNA, 433 bp, Glycine max
  unsure (1)..(433): unsure at all n locations
agtcttggattaanttaatcgaatactgatatctcatataatccattactgggttggttgagacaatgaccaatttaatcaagagtctctactttgatcgattaccaagtggatgaatcgattacttctttctcatttattgttcaaaagtgatcaagaacactttaattgattaccaagagcatctaatcgattacattggtcttgagttgttttttagatggtggatgaacactntaatctattacttagataatctaatcgattactttgttaaaataattgattaccttatagatttaatcaatttcggacaattataactattttctctataaacaaccagcttgtattcacatctacacatcaagagatcattagagaatactcaatacatctcgaaaacaacatcttagcctcaaaatgagcaaga

SEQ ID NO: 54910 - DNA, 443 bp, Glycine max
cacccatcacatgtggtactaggtggctgtcgggcgatggtgcaagtcaactctccacatccacagatcacacataaacccaccatccccagttgcccaccttcactgagctcacgtactcccacgtagcccttatcctcgttcctctcaacaccgggtccccatcaatctctccaagcttccacaacatccaagcaattcaacatcccaaacatcatgaactatcaaacccaaggaaaacagggcagaggcagaaaactctgcccaacacaaaccaatatcacagtttttctcacttaaataccccagtaacattctcttcgttccaattcgttaactattggatcgactcgaaaattttactggaagtctctagcacataattctacattgtgaccgttgggatctgctagaaaacgtccagaacccaatctgtactactc

SEQ ID NO: 54911 - DNA, 446 bp, Glycine max
  unsure (1)..(446): unsure at all n locations
agctttgagaaactcatatggtcattacttttcactcggaggtccgattcangcgcatcacatgtcgagacgctcgatattgaaaaatggaagctcttgagcaattcacatggtcataaattttcactcgtacgtccaatacaggcgcataatatatcgagaggctcgaaattgaacaacggaagctctcgagaaattcaaatgggcataacttttcactcggaggtccgattcatgtgtataacatatcgagacgcttgaaattgagcaacggaagctctcgagaatttcaaatggtcattacttttcacttggaggtccgattcaagcgcataacatatagagacgctcganattgaataacggaagctctcgagaaattcaaatggtcattactatttaatcggaggtccaatatatgcgcatgatatatacagacgctctaa

SEQ ID NO: 54912 - DNA, 333 bp, Glycine max
  unsure (1)..(333): unsure at all n locations
ttcacgccgcaatccatgccttgcgaactcctttggagtacccctcgcgttatggtcactgaaacctcgtgcgatgaaaggcgtgatgctttcgtctaatggcgctcctctcatggggtagccaagctgtcttatggcgaggacgggattataattaatacaaccncttgttcccatcaagggaaccattggacatccttcgcatgaagatggaatcttgattcttccttccttctagcgagggaaccaattaacagacgcccncccatgctagccaagagttggtcccaattcgcctttcctttttcgaagcacgagtggtaaccttgtagc

SEQ ID NO: 54913 - DNA, 479 bp, Glycine max
  unsure (1)..(479): unsure at all n locations
atcctcagagtcacctgctgcatgcaagcttacacaaacatntattagtccaacacacactcaacaaatagtcatcgtccatccataattccaataaatcatgctcggtatgatgcatgcacctaacctaaactctcaatgcaatgtggtaccatccccaaggaaatagcctaagcatgtccaacgacgctctcacgtangaaaactattgcagtagtgtcaatgtcaccatgtcgtgcacaagcaactcccccccccccccccacggtcatcagcctgagtctaaagggagttcccaaccgaatgacatgcccccaagtacaagtattcctcctcatgagaaactacaaggacttactgacaaagtttatactatttccatgcaatatgaagtatgacacatgggcaccatcaatgcactgaccgcggataattaaaattctaagccattcccctccagagatgcttaaaactcttta

SEQ ID NO: 54914 - DNA, 453 bp, Glycine max
agcgacacttaatctatgtatccaaaacccctcaatgtaatggattttcaaggtttgagaagtgaaattgagaatgaggtaaatatggagcaaactctcacctcacacaagtctataacatcaatttaaacttgctcaaactggatttacacctaaaattccaccgaatcaaaatttgactcctcaacacccaatttttaccctagaaatgactctttgtccacttggtcatttgtttttctcacttgcacagcccaagctttctcataagtcctaaatgacatttcaaactaggattaactcactttaacctccaaataccactaaatccagatttggccttccaactctcaaaaactcactctttttccactcataacaccatattctcaccttctaaccctaggttaactctacccttcatctctaacagtctttccataagcaatttca

SEQ ID NO: 54915 - DNA, 448 bp, Glycine max
  unsure (1)..(448): unsure at all n locations
agcttgatgcaacattnggagaggttaatgaaacaacgagatgatgcgctccatgagaggttggatcaaatggagaatagagatcataatgaagaagaaaggaggagaagagggaatgatagtgttcctaaacaaaaccgaattgatggtattaaactcaacattcctccatttaaaggaaagaatgatccggaggcctacgttgagtgggagatgataatagagcatgttttctcatgcaacaactatgaggaggaccagaaggtgaagcttgccgccacggagttttccgactatgctcttgtgtggtggaacangctacaaaaggagagagcaagaaatgaagagccaatggttgatacatggacggagatgaaaaagatcatgaggaagcggtatgttccggctatttactcaagggacttgaaattcaagctccaaaaactaa

SEQ ID NO: 54916 - DNA, 448 bp, Glycine max
cggaagctctcgagacaatcgagtggtcatatattttcacacagatgtccgattcggggaaataatatatcgagacgcacgaaattgaacaacggaagctctcgagaaatttgaatggtcataacatttcactcggatgttcgatccggggacataatttatcgagacgctcgaaattgaacaaccgaagctctcgacaaattagaatggtcgtaacttttcacgcgaatgttcgattcggggacataactcatctagacgctcgaaattgaacaacggaagctctcgagagatttgaatggtcataagttgtcacacggatgtccgattcgggaacataatatatcaagacaatcgaaattgaacaacggaagctctcgagaaaatcgaatggtcataacgtttcacacagatgtccgattcggggacataacttatctagacactc

SEQ ID NO: 54917 - DNA, 404 bp, Glycine max
  unsure (1)..(404): unsure at all n locations
gaccacagagtggtacctgcagatatgtcgcgggggtcaagagaccttggggacgtcaggtggggtgctattgcccaaaaccaagcttgaccaatcccgacccaacccgggcatagtcagtcagtgagaacctgtgatgtacctaaacaggcgagctcctggcagtcaacagatgaaaggaacaaagaccacaaagcaaggaggcttgtggtggctggccagctgtgaactttgattgacatgtgggttatggcctctggtaatcgattaccaagggtgggtaatcaattacaaggcttaaaaaagaagacaggaggctaagatggtctctggtnatcgattaccacggngtgtaattgattaccaggctggaaaacgaggtcaggaagctaagggagcttctg

SEQ ID NO: 54918 - DNA, 469 bp, Glycine max
  unsure (1)..(469): unsure at all n locations
ntatacacanaagttagtcgtattcaccgactaacaactcctttctatntacagttntgcttgtcctcaagctaaaagagaacagctcacttgtcttcaagtgacaataacatgcaatgactatgtacaaaggtgtatgctacaaaagttactgattgcatgataaaagaatggagtaaaatgccctcgtcacttgtctttcacatggtatgtagttatccaaagagaagaataaaatataacctgaacaattagatggagctaatcataagacaaatattaaggaaagtagcttaaaccatagtctcacggctaccgtttccctccagcacaagtgtttaagctattcattaataacaactagtcagaggtccaatctttgaatttcatctcatgccataaattcataaatgtataaacagaattagaaggactttctcaggcttgtagtgagacttgctacaaaaat

SEQ ID NO: 54919 - DNA, 455 bp, Glycine max
agcttcaggctgctcaattgctccaggttgctgcatggaagggcaaaggtctgtatggtggtcagcagaggagcacaaaccacaaacccttgcgacaggtacagatttctgattcaaggccagctgggttaccaagttgaccaacgcatccagtttgccttcaagcttcttagtttcagatgatgcagatgggtttgtagctacctcatgcactcctctaatgactatggcatcatttctggcgctaaactgcagggagttggaggccatcttctcaattaaatttctggcttcagcaagagtcatgtctccaagggctccaccactggcagcatctatcatacttctctccatattactgagtccttcataaaaatattggagaagaagttgttctgaaatctgatggtgggggcaactggcacatagtttcttatatctcttccagtactcat

SEQ ID NO: 54920 - DNA, 424 bp, Glycine max
  unsure (1)..(424): unsure at all n locations
cctaaatggagagagaatgattattgaacacacaaaatggaagtactaagtatttattacctatacttaacgganaatacttataacactacaaaataaccataaattggaagagtttgatacaatttacaccagttttagacacaaaagttagttgttttcaccgactaacagtcatctgcctcttttcaaagacttcaatgtctttcgatcaagactattaaagtcttctttgccttccagagacaatcaagttcgttggcacgcagagacaaattatggtcatctgcctcttttcgaagacttcaatgtctttcaatcaagactattaaagtcttctttgccttccaaagacaatcaagtccgttggcatgcggagacaatcatggtcatccatttttttgttttcaagactattacagtc

SEQ ID NO: 54921 - DNA, 434 bp, Glycine max
  unsure (1)..(434): unsure at all n locations
agcttctcctcttttcctataatagggggaggagggaagaacaanaatgttcaaccctcctggtatctgaggatcacttanaattagtgagaaaaattggtttcgtgaagaaaatccaagccgaggcgcttccgtaacgcgtccgagacgttttcctgggtgatttcgtgaagattttcctccattcttcatcgttctttggtcttatacctgaagtttccgaaatccaacttttcaattcattctatgtacccttggtggtccccacttgtttcacgtacttttattttcatttcatttactttccgtacccccttttgacgtgctttagtcatttattcaagtcattgtctcgcctaatcaaaaaataaaattaatctccaccgatcatttgaattgtaacatctgttaatttctgttaaaatgatatctga

SEQ ID NO: 54922 - DNA, 452 bp, Glycine max
  unsure (1)..(452): unsure at all n locations
tcacaaaagttggtatggcttgaaacaagcaccgtggcagtggtacaagaagtttaatgagtttatgagcaactcatgattcaaaagatgtgacatggaccattgctgctatgttaaaaaatatactaatagttatgttatccttgttgtgtatgttgatgacatgttgattgcaggatctagtatggcagaaattaacaggttgaagcagcagttggcagaaaactttgaaatgaaggatcttggtccagctaaacaaatccttggtatgagaattcttagaaacagatcagaaggaattttgaagctgtctcaggagaaatatatacacaagttgcttgacaggttttaccttggagattctaagaccaggaatacccctttgggatctcatttgaagttttcaaagaagcaatctttgcagacanatgaagaaaaatgttacatgtcaa

SEQ ID NO: 54923 - DNA, 436 bp, Glycine max
  unsure (1)..(436): unsure at all n locations
gcttacacaatntattgttctcagactngtgttgtgtattaccaattactaagtcttttctagctaaatgatttagatgatgcgtgtttatgtgtgcaacccatcgatgccataaccatgaatcatcaatcttacttaccaaacaactaagctcatgaattgatgcatgtccaatgtctaacatctagatagtacctattcttttggcaatatggacaacctcaccatacatagcttcactaataagacaacaattcctattgaattcaattttgaagcctttgtcacaaagttgactaatgctcaagatgtatgctttagtccataacatataaacattctttatttgtgtttaaacaaattccaatatttcttcacccataatttaccttatttttgctccaaagtgaatatgctcttctttgaacaaagcagg

SEQ ID NO: 54924 - DNA, 406 bp, Glycine max
tactaagcttgtagagagagaaattccccttgccggagattgtgaattgttgcttcaatcccttcttcttgttctctctaactcttggagactctaactgaccagccaaaggaaaagcttgaataatcttagagaactattagagatgttgctatcactggcggactacacacgtgatccttcttagaagtaagggatgaaattatcgcaattgaggataaagtgaacatgtgtagggatccttataagaacaaattgggattaattttggtgtgttctaatttttcctgtacaaggataaactacaatatctcatgtttgatcggccattgatgcctaatgcgaaatcatggttttgtgaacggttggcttgaatgtagaaacctagaaattagaatcttgattc

SEQ ID NO: 54925 - DNA, 466 bp, Glycine max
  unsure (1)..(466): unsure at all n locations
agcttagccatcaactctntatcaatgaggtttatacccacaatntcctccactattcgtatccagtatccaagccaggcaatagcaatatcagcgaagcctattttttcacctccaaagtagcgcttcccctctaatcctccttcaagggtcttcagattctctctagcttcttgtgctgccttctggtgttcctcccctcctttggaaaaggtggccataacagctggcacacacggagaataagaaaggttgagtgttagactgttagttaccaaggaaaaaaaaagcacatgatagcatgctgatgctgagttttaacttctaatttcttactaccttttcatcaaacgaatntggaccagaatcgtgccttggccttttcatagggatcatgtggaagggagggatcttgcttccaggtctcatcaatatactcaagaatcaccagtgattctgcgagggg

SEQ ID NO: 54926 - DNA, 360 bp, Glycine max
  unsure (1)..(360): unsure at all n locations
agcttgaagtgatgtagtggngaatggtgagacttcctacttttattcgttgaccacagagtgtgacctggagatatgtcgcggnggtcacgagaccttggggacgtcaggtggggtgctattgcccanaaccaagcttgaccaatctcgacccaacccgggcatagtcagtcagtgagaacctgtgacgtacctaaacaggcgagctcttgacagtcaaccgataaaagaacaaagaccacaaagcaaggaggcttgtgtggtggctggccagctatggatcttgagtaatatttggagtatggcctctggtaatcgagtatcaagggtgggccatccaatacaaagcttaaaaaatga

SEQ ID NO: 54927 - DNA, 446 bp, Glycine max
  unsure (1)..(446): unsure at all n locations
ggaggtaatctactcaaatgtgtatggaccatccatattggatctcttggtgcaaatatgcattgtgtttccttcattgatgatttaactagaaaagtgtggatttatttgattaaaatgaagagtgatgtgtttgatgtgttcaaaaagatcaaaaggttgatttagaaacaaaataacaaacagataaaagtgttaagaacaaacgaaggtggtgagtatgtattagatgtgtttcgaaacttctatgaggcagaagtgatagtgcatganataacattatcctatactccacaacacanaggaactattgagagagagtgtaacgacccgcctcgtcgctacgatatcacttactataaaatatgacatttcaatttagaagtacaagcttcattaatttgattgtgaaaacgatggtaaatattttgcgatgtacattcacc

SEQ ID NO: 54928 - DNA, 427 bp, Glycine max
  unsure (1)..(427): unsure at all n locations
agctngagatngaggaagtgtgaagggtgagacttcctgcttttattcgttgaccacagagtggtacctgcagatatgtcgcgggggtcaggagaccttgnggacgtcaggtggggtgctattgcccaaaaccaagcttgaccaatcccgacccaacccgggcatagtcagtcagtgagaacctgtgatgtacctaaacaggcgagctcctggcagtcaacagatgaaaggaacaaagaccacaaagcaaggaggcttgtggtggctggccagctgtgaactttgattgacatgtgggttatggcctctggtaatcgattaccaagggtgggtaatcaattacaaggcttaaaaaagaagacaggaggctaagatggtctctggtaatcgattaccacggngtgtaattgattaccaggcttggaaa

SEQ ID NO: 54929 - DNA, 427 bp, Glycine max
  unsure (1)..(427): unsure at all n locations
ntatacacaaaagttagtcgtattcaccgactaacaactccctcaaatttacagttttgcttgtcctcaagctaaaagagaacagctcacttgtcttcaagtgacaataacatgcaatgactatgtacaaaggtgtatgctacaaaagttactgattgcatgataaaagaatggagtaaaatgccctcgtcacttgtctttcacatggtatgtagttatccaaagagaagaataaaatataacctgaacaattagatggagctaatcataagacaaatattaaggaaagtagcttaaaccatagtctcacggctaccgtttccctccagcacaagtgtttaagctattcattaataacaactagtcagaggtccaatctttgaatttcatctcatgccataaattcataaatgtataaacagaatta

SEQ ID NO: 54930 - DNA, 485 bp, Glycine max
  unsure (1)..(485): unsure at all n locations
gatcctctaagcaccgcggctgcagcttgaagaggattggaaaggggctntcatccaatgcctntatgtcttagatctcaaggacactcttgattgcaaatntacttttcctattatcaattcccattcaaattccattccttgtaaaaatgctcatatttggcattctagatttggtcatatctcagacaaagttttcaaacatttgaataataaaattggtatgcacctttctcctaatttctcttcttctaattgttttggttggcctcttgctaaatttagaagattatcttttcctaactctaaccatttatctaaattaccatttgatttaattcactgtgatatatggggtccctatgctcaccctacgaatgagggaaggagattnttccttacattggttgatgattgctcaagattcacttgattatttctgcttaagaacaaatctgaagcttcaatctatgtgcaacaatttt

SEQ ID NO: 54931 - DNA, 458 bp, Glycine max
  unsure (1)..(458): unsure at all n locations
ngctgcccatgaagatattagatggcattgtatgaaggcatgtgcacgtgtattttttgcccttcaccttttttttatgttgattttcagatgggctgcagcttctaatgatatttcactaaatgcaatgatttttccagttgctttgtatttttggcaaataccacactttatggccctaacctatttgtgtcgtgatgacctgctggaggccagggtatgttcttatatctttgtttatagtgacaattttttttcatacaactattttggtgctctgtaatattcaatatctgcctaaagtccttgttcatataaacaaagaacttaatgactctaatgcaatgtctgattcaggatagcagtataacatttttttatgaaattacgatctaaactgcaaggacctagaantttttaaaatgtatagacatctggatttgaccaatttatataac

SEQ ID NO: 54932 - DNA, 331 bp, Glycine max
gacaaacaacttaaataaaagtattgaaacttgttaagcatgaaaaaacaagtgctaagctacaagccaatagctcaaacttatgggaaagaatactttgacattgaattctatgaccaagtacttaagaatttgtatccttcaaccaccattcttcataaggaaattaaatcttatcaaacaatagagtggctcatgcattgatgatgctacaagcacaaagggatctcacatgaaagtgcatgataaacctataaaaccagttatgggcttcctcccaacagttatgcatttagctcatccatgaccaaactgaatgggaacttcaaaa

SEQ ID NO: 54933 - DNA, 467 bp, Glycine max
  unsure (1)..(467): unsure at all n locations
agcttatagatgcttacatttaacagtaaanaaattaaaatttccaaactagttgggagggaagaatttgtattttagtcgcagagttgcatagattttgtatctagatctaactgaagatctaagtctcctctagatcagtgcagcagcaaagtctacagtatatttgactttagctccaaatatagccatttaaactaagttatcaatctaatgtcataagaaaatgttttagtagggcatggttagatctgcaaagatacaagtggttaatttgattttgcagcatcattttaataccagaactgtttttattgctgcaagataaatcatcagcagaacaaaaaaaaaaatctaatattctagtttacccacacaacgatattaagcagcatataaagttgtctgcaatattgaagccaanaatttcaaacccccaaatttaggagtctatcaagaatatcaac

SEQ ID NO: 54934 - DNA, 243 bp, Glycine max
tctagccaaatggacttaccttgaattaattcctttgatagcctctttgagccttgtttctctttccttgttttgaagctcactacatattcttaaggaattttggagctttggaattgttttgggaataagtgtggggggtttttgtttcattggataatatgttttgttggctatgcttcatgatgtattttggataatatgttttgttggctatgcttcatgatgtaaggagcacatggg

SEQ ID NO: 54935 - DNA, 424 bp, Glycine max
  unsure (1)..(424): unsure at all n locations
agcttcatgtacatcctgactctctctacattgatgagctatacaacgacgcgattctaacatcatttagaactcaaaattctaagtgtgcctttaagtttgattctaataaacgaattttaattatttagtataactaaaacatgtgcgcaaatgtatctcaaacacatttgacattaaatgggtgttngaatggacgggcgtcaactctgaagctagaaatactagcttgattgtcattttttcaatttggaagtggatttgctacaaaacgtggatcattgtactaaccaaacactatatatgttatagcaataacaaaattggttttattgatatcaaacaggagaagactctaatattctttggttcaaaaatgcgtttgaaggcaagcaaagactgggggagaaagcactgcgtcttg

SEQ ID NO: 54936 - DNA, 455 bp, Glycine max
  unsure (1)..(455): unsure at all n locations
ggattacctattgtattgactgggtntttctacttttcatgttgttgcatctgaaaatttcgattatgtcgagttcgcttatttttatttgtattttaagcgtattccacattacattgttagtatgttaagttaatccgtattgtgtagacagattcatcgctgcaaaattaaaattaattacaggaattcgaggatattagatgcgcggtgacttgctctactaaatcattcttctgtctgaatttgttntgtggtattctattcactttgtggatttttattttgggttactgctagcccctatgtcattgcgacatttggttttcaaaatatgcagtctggcatacgagtatcgatcaagtataaactatcaattaattaagttctttcataagaaagaacagagcactttgttttcataatatgcagtctgacatgagtccctatcaact

SEQ ID NO: 54937 - DNA, 454 bp, Glycine max
  unsure (1)..(454): unsure at all n locations
agcttgcattggtgtcttgaaatctaaggctgatgaaggacatctattaatcaaatatgctgctgcgtttgcagcttctccccaaaaagtctttggcagtcctgcacttataagcatgcacctcactctttccaaaatggtcctattcattctttctgccaaaccattctgctgtggagtgtgagggacttntttgtgccttttgatgcctattttcctgcaaaactcattgaactgctctgaaacaaactccaggccattgccagttcttaaaacttttaattttgtaccaagttgatttccaacaagagtatgccattctctgaatttttgaaaagctttcgacttatttttcanaacatacagtcatactcttcttgagaaatcatctatgatggtgagaaagtatgagcttccaccatgatgtttcactctagatagccncataaatctg

SEQ ID NO: 54938 - DNA, 438 bp, Glycine max
tcttatgcatctcttccaagagagtctcgctggttcatctattacctggtatactaacttggaaccttcccggatccactcctagaaggacataatggatgccttcattaggtagtatcagtataagtctgatatgactccaaatagaatgcaactacaaaatatgtgcaagagagataatgaatctttcaaagaatacactcaaagttggccagatctggcagctcaagtagtgcccccgatgacagagagagagatgataacaatgatattggacacattgccggtgttctactgtgagaaaatgataggttacatatcttcgagttttgcagatctagtgtttgttagcaagagaattgaagcaagtcttaagaaagggaaatttaattatgttgcttatgcgaatcctggtaatggcggacttggaaggagtga

SEQ ID NO: 54939 - DNA, 454 bp, Glycine max
  unsure (1)..(454): unsure at all n locations
agctngaaggtgtgtaacccacccattttcatattagaacactggtaatgtgtctactatcattgttatcatttctttctccgtcattgagggaaccacttgggctgccagatccctccctctttgggcgtattctttgaaagatttgttccccctcttgcatttgggcgtattctttgaaagatctgttccccctcttgcatatgctntgtagttgcatcctatctgaagccatatcagaattgtattgatactgcctaacaaaggcaaccattaggtccttccaagaatggacttgggaaggttccaagttagtgtaccaggtaacagctaccctggtaagactttcttggaagatatgtatcagtagttccttcatctttgcgtatgcccccatcttacgacaatacatctttggatggttcttggggcaagtagtccccttgtacttgtc

SEQ ID NO: 54940 - DNA, 443 bp, Glycine max
  unsure (1)..(443): unsure at all n locations
ngcagtagacatgaatgggcggccaagaatgagaggaatgtcatcatcctcttctatatctatgacaacgaaatcagctgaaaatataaggtgtttaaccttcaccaaaacatcttcaatgactccatatggacttgtaacggagtggtcaactaactggaaggtcatgcgtgtaagaattatctctatctctccaagtcactagcatatggaaagaggcattaaattgatactagctcccaagtctatgagagcttttcctacaacaacctcaccaatagaacagggtatcgtgacaactccaagatctttgtgcttgggtggaagaatgcgttgaatcatagcactataatgaccttccacaacaattctgtcactatggatgtaccgattggtcttagtaagcatatccttcaaaaatttggcatagaggggcatttgct

SEQ ID NO: 54941 - DNA, 493 bp, Glycine max
ctcgcacccgagatcctcagagtcacctgcggcatcaagcttttatccaggcaattcttgggggtgatgctccttcttccttggcttattccctagtggatggtgcctcccctctcctcttctcctttgccttccgctgcatctccatggtgaaaaatcaccattgaaggacctcattgaagttcaaagatccagcctccatagaagctccacaagcaagctttcatcacctctcatcttgtatatgacgattttggacgagtcgatgggatgtatgctggggcaacatgacgagtctggaaagaaagagcgcgccgtctactacttgagtaagaagttcacggcctgtgaaatgaattactccctgctcgagagaatgtgttgtgctttagtctgcgcatcccatcgtctaaggcaatacatgctaagtcataccacctggctgatatccaagatggacccagttaagtacatctttgaaaagtcagctctt

SEQ ID NO: 54942 - DNA, 433 bp, Glycine max
  unsure (1)..(433): unsure at all n locations
tagcctggctgaaggcacctactacaattagcgtgcgactatgatgctgacgctcagccaaattctcctttgtgctaagcgcgctaaagctatgcttagtggtgaatatgtgcttagcccaactgttgagcttagcccaactgctacattntgcaattcaaaacttagcctctttttcacctgaaaatgcacagatttcatcattaaattcaatggaaatgttctagagacaacatgaaccataaaacaagatttattaatcaaatttactccaaaatgaccataaatcggggaactatacaagctttggaaaatgatttctatacaaatgttagttatataaagcgactaacaaactcccccaaatttacaattttgcttatcctcaagcaaagaaagaaaagttcacttgtcctcaagtgacaaagacagt

SEQ ID NO: 54943 - DNA, 428 bp, Glycine max
  unsure (1)..(428): unsure at all n locations
agcttaaacattcaatttcgagcgtctcgatatattacgggactcaatcagacatccgagtaaaaagttattgtcgtttgaattggctcagaggttcaacattcaatttcgaacgtctcgatatatttcgggactcaatcagacatccgagtaaaaagttattgtcttttgagttggctcaaaggttcaacattcaatttcgagcgtcccgatatattacgtgactgaatcggacatccgagtaaaaagttattgtcgtttgaattgggtctgagcttcaacattcaatttcgagcgtctcgatatattacgggactcaatcagacatccgagaaaaaagttattgtcgttngaattggatcagaggttcaacattcaatttcgagcgtctcgatatattacgtgactcaatcagacatccgagtaaa

SEQ ID NO: 54944 - DNA, 451 bp, Glycine max
  unsure (1)..(451): unsure at all n locations
ttaagccaattcatacgacgatgactntttactctgatgtctgattgagtctcgtaatataacgaaacgctcgaaattgaatgtttaagctttgagccaattctaacgataataactttttactcggatgtccgattgagtctcgtaatatatcgacacgctcgaaattgaatgttgaagctctgagcctattcaaacgacaataacgttttactcggatgttcgattgagtgacgtaatatatcgggacgctcgaaattgaatgttgaacctctgagccaactcaaacgacaataactntttactcggatgtctgattgagtaccgaaatatatcaagacgctcgaaattgaatgttgaagctctgagccaattcaaacgacaataactctntactcggatgtctgattgagtgccgtaatatatcgagacgcttgaaattgaatgttga

SEQ ID NO: 54945 - DNA, 68 bp, Glycine max
gaggaccgaactatcaaaataatcgtcagagatgttgtcatcgaaaatctggctaaatcgattatatg

SEQ ID NO: 54946 - DNA, 382 bp, Glycine max
  unsure (1)..(382): unsure at all n locations
tacctggagatatgtcgcgggggtcaggagaccttggggacgtcaggtggggtgctattgcccagaaccaagcttgaccaatctcgacccaacccgggcatagtcagtcagtgagaacctgtgacgtacctaaacaggcgagctcttgacagtcaaccgataaaagaacaaagaccacaaagcanggaggcttgtgtggtggctggccanctatggatcttgagtaatatttggagtatggcctctggtaatcgattatcaagggtgggtaatcgattacaaagcttataaatgaaggcaggaagttaagatggcctctggtaatcgattaccaaggatgtgtaatcgattaccacgcctaaaaatgggatcagtaacatga

SEQ ID NO: 54947 - DNA, 464 bp, Glycine max
  unsure (1)..(464): unsure at all n locations
tgaggtaatctactcaaatgtgtatggaccatcacaaatggatctcttggtgcaaatatgcattgtgtttccttcattgatgatttaactagaaaagtgtggatttatttgattaaaatgaagagtgatgtgtttgatgtgttcaaaaagttcaaaaggttgatttagaaacaaaataacaaacagataaaagtgttaagaacaaacgaaggtggtgagtatgtattagatgtgtttcgaaacttctatgaggtagaagtgatagtgcatgaaataacattatcctatactccacaacacanaggaactattgagagaaagtgtaacgacccgcctcgtcgctacgatatcacttactataaaatatgacatttcaatttagaagtaaaagcttcattaatttgattgtgaaaacgaatggtaaatttttgcgatgtacattcaccanacaactcacaaacatg

SEQ ID NO: 54948 - DNA, 377 bp, Glycine max
catagtgtgattattatgtcataaggaaaggacagcacctggagcagcagttctttctccagcttccaagaaagcttcaggccttctactgccttcaccaaagataggtttttctgatggggtgagttttgctttgcttatattcgatgtagctagcaaccgtgtgggttaatggctggttagtaccacgtttcttggaaaagtatacaaatttcatatcattatgactttggtcacacactatttattgggttcttcaggaggaatatgtgcttcacgcaacttatgatattttacttttcctttctctttggagatctctttactacgctgccattgttgtgcaggagatacccttaatgcgcactccacctggg

SEQ ID NO: 54949 - DNA, 452 bp, Glycine max
acttcatactaagcttgttgggagatagtggattcttactctaggacttgtgtatcccaatggagtgaggcctaatagaccagatgcttctggttattggaaggctactgtgaatgacaaacccattttcacttcctgtgggatgaagagcattgcagtgaagaaggcccttgtgttctacaagggtcgtccgccaaaaggatctaaaacagactggatcatgcatgagtataggttgcatgattctatgatctcgaattcaaggcagagagggtccatgagagtaggtcaattgcatcattccaatttttcaatgtggtggttttttgtgaccaatagagtaaattattgagggaattctcaattgcatttcattgacactgtattgtaccttagtacatttatagagtctatttacaactgatcgataagagatcagatctatcttaatc

SEQ ID NO: 54950 - DNA, 441 bp, Glycine max
  unsure (1)..(441): unsure at all n locations
agcttgcgcctatactagtggaggggtgtgttttccaagctaatatgtatctggntctgatatagacaataatgtaagctgctaatatattactatgaaaaagaatatacatcttatcggcctaatttgctctggttctaataaatgcattttntacaacaaatgaaatatgctctgcaagacaggtttgtaccaaattgtgatgaggcaccctgtttacatctttttttgtatgccataaaaatattttcttttttaaaaaaagattcacttttttgataaataaaataaagagtcattctctagagtttgcttctcctattgctcattcctacttaatattcctccctatccacacgtcttaaatttacatgaaggggtaaatagtaaccatttctctcacgtggatactttcattctcatagatactctcattagtca

SEQ ID NO: 54951 - DNA, 387 bp, Glycine max
  unsure (1)..(387): unsure at all n locations
actatgcttaagtgcgaaataatttaaactggactggcgccttagctctttggctttattttcctgacggcacactntattcttaaatatttatctaacgnccaataataacgtatatgaacggaatgttttgatttggtctcaagagcctaatcttttatatactacacctttcactacatcacaaagtggtgatttgtggggactgagacaatctataattctttgtcatgaaataatgtgtcttcgctgatagtgacttgtaactcttcatcagaggatatattctgaatgatcatatgcctgatgaagagacataaagaataattgcattcttacattaaagggattttgacgtttgttttatgaatatgtcttgaacataaa

SEQ ID NO: 54952 - DNA, 455 bp, Glycine max
agcttgaataccaagttcttccccctcaacttgatatcgatcctaatggtagatccatgtactggttcaaagagatcaccattcaaaatgacattattgatgtctaattgtaatggttgccaactctttgtgactgcagccgaggattcaaatcgtgattaatttaattaccaacaggtaagaaagtggttataaactcaattctcatgttgtatatgtaactcttagctgtagcacaagcatttaatatatcctcactaccatcaacctttgtttgactaagaatatattcatccaaccaattgtgtgtgtgcactattagaaaatatactatcacatcagttatttagaacattctacatcgattcttaaaccgatgttgaaagtgacgatgttgaatgtatgaatgtaacatcggttttggagaaccgatattaacatgcatatgacaacat

SEQ ID NO: 54953 - DNA, 389 bp, Glycine max
ccgcgatcgagcataaacatatggtggatggcatggtggacacgaaaaatacacacactctcgtattgtccatgacaacatctgcgtggcggagattaactcttgggtcaaggaagcaagaatcgtgcattgtaagcctggggacaacgttcactagcacaactagtgagatgcatttatgtccatttaattaaaggggaagatttggaggatagcaagccacagttctacttggaacaaattgaatgaaatgaattgttaaatataaaaatgattttaagtaaacgtgagtataatgcaatttttctcacctggtcatggaagagggggtgggagaaggactttttctaaccttataacaagtctctatttatgtcttttgccttccc

SEQ ID NO: 54954 - DNA, 353 bp, Glycine max
acctcggacctaagtgtgaaggcacattcatgttcgtatcaatcttatacaattgagcatacaagctactggatatagatggcaaaccaattccaggaacttggaatgctacccatctaaagatctactttagttgacttactacaagaccgggtgttgtactctgtttcctactcaagactttctgtccaaaagaaaaaaaatcaaatgttgggcttgaaaagttttaatgacgcacatctggcgtaacgaaaggaattcctactcaattgattatattgaataaagattatctcccttcatttcttaatgttcttatgtcgacttaaccacagcttactaaacctaaggtg

SEQ ID NO: 54955 - DNA, 476 bp, Glycine max
  unsure (1)..(476): unsure at all n locations
gcacttcgagactaagcttgccgccgctcgtcaggcgagcnggatgcttcctacatatgcaacagttctttggaggaatcttctggagggcccaagtgggcctgggtgctatttgcaccccctttgtactaaatgcaccccctttctatatttttgtaattctttttccgcaacgttacgaaactttacgaatttcgtaacgatacttccttttcttccgtatggttacgaatccttacggattatgtatttactctattttatctttcgaaggagttacggaaactcacggattgcgcaaaaacacctcttttagatttccgccacattacggaatttcacggatcgcgcaagcctgcttcctttagatttttgagacgtctcgggacttcatttattgcatgtcatcaagaaataatccccggacgaaatcagggtgtgacacaactatatataagaatctgaagaagggatat

SEQ ID NO: 54956 - DNA, 414 bp, Glycine max
  unsure (1)..(414): unsure at all n locations
agcagttaatgcactgtatgtattagtcttactttgatagcccacgaaatctactatatctcgactgatgcgatgagctacggcccttggctctagcctcatgaactatgtcaaaaagcctgacgncaatggacaagggcgctcgtgttatctatattcagaacataaccctgctacgcataacattctaaattcccgtttctgttacttaaaccaaaaggacattgggcgactttatgctcctaactcgtgtactgcagctatgaaaaaatagctgtgctttgcaatacctgcagcaacctatggctgctatatngctataatgcactacaactatgatggatatatatactatcctattattacccacttttgatgaaccccaaagatgtaataagcgtatccttgctagcc

SEQ ID NO: 54957 - DNA, 369 bp, Glycine max
tctgctccatacgcaagagaatcatgcctctattgtaattaaattttccaacactctaagttaattgaagtcttattaacaggtttttagattgatcttaactcccataccctcaagaattcatcatagctgatatatcgtggactctaaaatgtcatattgggagtgaggttttgatgctaatcctaattaataactagataatttagatgttgtagattccaacagttcacagttctaagtatagacaacacgtttaatgtagattagttctaaataacagaaggttaccattatttgtagaaatatatcatactctattatgcagtttctgactgtgcaggagtaatcataatattctgctctata

SEQ ID NO: 54958 - DNA, 450 bp, Glycine max
  unsure (1)..(450): unsure at all n locations
tgcttatcacaacagatgaacttatcagaggatcgacagctacttgtataagcntaaccaagtatgtgtcattctcagcttgaattacttatatgataaaataagcccaactgaaatatgtagaaactctaccttgcttaataggttttgaaaagtcaaaatttaaaccttctagggccgaaaggatatcctattaaagtcaggtttctatgatttgagaattcatgttatgtgtggataattttgatcctctatcaatatatttaaacttctattttgtcttctcttgttgcatttaaccacgagaaagcttggaggaggcttgtagaagagaaacgttggaggagactggtttgaagtgggagaaattgtatattatagctctcagccatgggctggtatatcatattctacataacaattatgcttttgcattttatcatttcttca

SEQ ID NO: 54959 - DNA, 447 bp, Glycine max
tgctattacgtgacctatgaaactcagcttcttgagaaacttccttggaagcagagcttatctacacatacccctctcataactaagctcacctccttgagaagcttccttaagaagattccttaagaagctagagcttagctacacatacctctctaatagctaagctcacctccttgagatgagaagctagagcttagctacacaccccctataatagctaagctcacccccatgacaaaaaacatgaaaataacaaaaaaaaatgtccttattacaaagacaactcaaaatgccccgaaatacaaggctaaaaccctatactactagaatggccaaaatacaaggcctagacgaaggaataacctattctaatatttacaaagataagcgggctcatacttagcccatgggctcaaaatctaccctaaggctcatgagaaccct

SEQ ID NO: 54960 - DNA, 458 bp, Glycine max
  unsure (1)..(458): unsure at all n locations
agcttatganagtataaagttgtagtggtctttgctatgtaaatagatcttatttgaaaatgggttgaatattgagttgcccaaaattggtttgatataattctggacacatcatgcagctaacaaagataaacaagagtgaatgaaaagcaaaggtccacgagttctgtcatgtaagtggtcaaaattgaaactacatcataaagccaatgctcttttgagaaacaagataactcattgctgaatcttatcattcagtattcacctctaataaagtcgttatgattacttcctcttacaagagagatgaacacatgtgaatgtgaccatgtcatcataaaattcgctatagaggatccattttcctctcactcctttcatgcaacattgcagttntatgcaccaattnttaaggttgaagnttaatgctgggcaaattaaactcaaccatattgaca

SEQ ID NO: 54961 - DNA, 438 bp, Glycine max
tagtaaagtttagctggagtgcaagtgttagaatcagtgttttatttgcacaaggccaaaatccgccataaacatatggcggatggcatggtggacaggaaaaaaatacacacacacataaatactaaaaaaacatcagtgtgggggaatataactcttgggtcaaggaagcaagagtcgtgcattgtaggcctgtggacaacttcactcagcacttctctttggctgcttcgagggctactaatagaaagtggaagatttggtggatagcagccacagtttctatttggaactataggaatgatatgatttttaaaaatcaacagtttgtcatctctaagttggtggataatgcaatttttctcacctggtcttggttgagggggtgggaaaaggactatgccgttccgtttcaacaatggtcctcatctatgtctt

SEQ ID NO: 54962 - DNA, 438 bp, Glycine max
agcttatcaagcccaacaagttctacgatgtgtttactgtggtggcgaccattagaatggacactattcaacacgatggttgccaacaggaagaggagtcccattatttgcataatcaaaccagacctcaatagaacttgcaaggaaactatcaatgctacagaagtggctctggatcaaattaaccttatggctggaggcagcaaaataataatgcatattccggccctactaactcttcttatgcatgtcctactatcaacttttttacagggccttctaacaactcttatgcgagtccatctaatatgtatccgccacaacaacaacaacaacatgcttactctttaaaatgtcaaaatagaagatactctaactcagtttatgcgaatgtccatcataaccagatgaacacctatgcttccattaaatcttgag

SEQ ID NO: 54963 - DNA, 464 bp, Glycine max
gcttgatgagcattgtaagctaatggggaatgttgaaggtgattcattgaacattgttggtgttggaactgcgtttgagatcaaaccctcctaaaaaattagcaagtgttggaaagagagaatcatagtgcattgtgcatgtcatgatttccttggcaatgaatgtggaggttgaattggggcctgaaccgtgaataataaccctcactctaatgatcaaaaaaagagcgagtgagatacatttatgttcatttcattatttgctttcgtagtgaactatacaatgcgtgtttgagcgtttctaaaattaattttgaatcaatgtaattttataaaaatgattttaagtaaacgtgagtttaagtatgtgtttggattagtgttgataaaattaattttgaatgaaattgattttataaaattgaattgaaagtcatgttatttatattatgatatttttaata

SEQ ID NO: 54964 - DNA, 455 bp, Glycine max
  unsure (1)..(455): unsure at all n locations
agcttatgttatggcanatggaagagcttcgtcttaattgctattctaatagntggtaaacattgcatatccatgatttatctgtaagtttggcactaaaaggctttccaattttgatatttgcatgtccgtgctcaaagtgtgtaaatgaagttngacaactatgttacgaactaattattctactggagctgcttttgtaattccattttatgaagtagaatgttcttgcaataattcatgtttgctggcttcaattatatatattgcacttttttatgtataagaatctcctgagggcaggaagatgctggaattccggaagtctctaccatcattcaaggagaagcaagggttacttgaagctatagcacataatcaggtatacttgctaaatgtgtttcattagatgtctgcttaactatcagcatgtctttagttttttggaccttgaa

SEQ ID NO: 54965 - DNA, 441 bp, Glycine max
  unsure (1)..(441): unsure at all n locations
nagctttatgtgaaaagatgtgactcttcacatttgatattgaatctcaacgttcaaaggtactggtaatcgattaccaaaacattgtgatcgattacagccttttgaaaataattggaacgtttgaaaatcaatttgaaaactttctcaaaacaattntgctactggtaatcgattaaaacaatctggtaatcgattaccagagagaaaaaactctttggtaaaaagttttgtcaaaaactcatgtgctattcacagatctgaagaaccttttaatacttattttgattgagtcttctcttcatccttgaatcttgagtcttaaatcttgatcttgattcttgagatcttgaatcttgattcttgtctctagaactttttcttgagtcttgaattcttctgattcttatcacgaactcttgaaatgttcttgattgctct

SEQ ID NO: 54966 - DNA, 371 bp, Glycine max
taataagtggataaacatgggcattcccaatgcctctgattcccgttctaacaagatattacaaaaagttcactggaacaatgctattctagcacatcatatcaaagcagcagaggcaattcataatctaaagtcagcattggagaacatttccagaatccagatcaggtttaaaaatatgatattattatttttgttgccaaaaataatatgcaaagttgaccaagccatataaatacgaaacccacatgtccaaatcaactaatcagtatttctaatcatctataatgtgtacagtgcaaggaacaataaacatcccaggtattgttatgcaattaagttggagatagctcaccaatgtgtggacacag

SEQ ID NO: 54967 - DNA, 453 bp, Glycine max
  unsure (1)..(453): unsure at all n locations
agcttgctatcaatacgctggctatgttatgccctttntatatccttcattgccattcgtagatcttgcatagctttcttgcatataatgatatgttttgagatagttctcttatgtagatggaaagccactggatgttcttcttatagcatgatagacttgtattccaaacattctattgtgagcttgttgtagcatgttatgtntgctacttattttttattatttctntgaccctttaaatggccaaaatggcttttgatgtcttcatgaaagttgtagacaattctatccttgacatttgggcactagtctcatgtcatttagaccactacataatataagaaatctttacaacactgtagttgtgttatattgtgagaacaaaatgacatctttatcttaatcatgaatttcctcanagattaaagtcatattagctcatgacttctt

SEQ ID NO: 54968 - DNA, 391 bp, Glycine max
  unsure (1)..(391): unsure at all n locations
ggagtagganacccttgatatgactagtgtcctagttatagttttagacatcgtaaacaacagtcgaaccctcaacttcaagtgcgaagttatatagtggcatgagtataaatgtgataagattaccttaagtcttagtaagtttatggaagtcatgagtgacatgttttgcttatccagttaacacccaattagtatcaggtaggaaatcgttagaatcccttgaacctaagtgagagttatgagtcaagtataccaaagtgaggaagatcatgttgaggggaaaaaaaactagatccaaaggtaggtaaatcatgtattctcgagaatcacatatggaataagattggtttaaccgtgaagtcttcaaacgtataccctttttatatca

SEQ ID NO: 54969 - DNA, 462 bp, Glycine max
  unsure (1)..(462): unsure at all n locations
agctntgagccaattcanacgaacgataacttttcctcggatgtttgtatggtcccataatatatcgagacgctcgaaattgaatgttaaacctattagccaatgcaaacgacaataactttttactcggatgtctgattgagtcccgtaatatatcgagacgctcgaaattgaatgttgaagctctgagccaattcaaacgacaataactttttactaggatgtttgaatgagtcccgtaatatatcgagacactcgaagttgaatgtttaagctttgagccaattcaaacgacattaactttttactcggatgtctgattgagtcccgtcatatattgagatngctcgaaatgaacgttgaagctcttagccaattcaaacgataatatacttttactcggatgtccgattcagtgacgtaatatnatcggacgctcgaaattgaatgttgaaactctga

SEQ ID NO: 54970 - DNA, 469 bp, Glycine max
  unsure (1)..(469): unsure at all n locations
tactaagcttacagcagattcagtaatgacccactaacctagaataatataacttaatgccattaacctagggaattaaaacaaacttaatggctgagtgtaactgaaattgtggcaaccaaaagtcacccccaacagccaacaagtcagccaccatttggtctcccaaaaggctgatgcctaggttgccaattgggcccttattacaacttgaactanagctaactaaagcccttttagttgattaacccaaaacatatttttggtcagccaactttacaaggattgggccattatttagacaaactaaacactctaaaattgaaacaaagtggtgtcatttagtcctcctccatttgggccatgatacaactcacaaccttggactnttctccttgaaacttgggcttgtattcaaacagtatggacagcacttgttgaagagcttccttggctttccttgctctag

SEQ ID NO: 54971 - DNA, 483 bp, Glycine max
  unsure (1)..(483): unsure at all n locations
cttacagtaacctgcggcatgcaagcttatccttatggcaactcccgccttatgacgactatccctgtctagacgatgaggaaggagatacccatctcggccccctgctccacctcaaagatctgtccccacatgaactaccccaaccgaacatagtccgccatatcccgacctcacccacacccgtaaaagaatctgttcccttcgcggaagataagggaaagattgaggcgctcgaagagaggttaagagcagtcgagggccttggcaattacccattctcgtatttagcggatttatgtctcgtgcccaatatcgtcattcctcccaagttcaaagtaccagacattgataagtacaaagggacgacatgtccgaaggggcatcttcggatgtattgctgaaagatgggggcgtattctgcggacgagaaattgttggtcaatttctttcaagacnagctggccggagcagctgtagcat

SEQ ID NO: 54972 - DNA, 404 bp, Glycine max
  unsure (1)..(404): unsure at all n locations
atctgtacctatcgcanaggactgtggtttgtgcatctttgctgaccaccatacagacctttgcccttccatgcagcaacctggagcaattgagcaggctgaagcttatgctgcaaatatttacaatagaccttctcaacctcagcagcaaaatcaaccatagcagaacaattatgacctctccagcaacagatataaccctggatggaggaatcaccctaacctcagatggtccagccctcagcaagagaccagagcctccattcagagcttaaccaatcagatgggacaattggctacccaattgaatcaacaacagtcccaaaattctgacaagctgccttctcaagctgtccaaaatcccaaaaatgtcagtgccatttcattgaggtcgggaaagcaat

SEQ ID NO: 54973 - DNA, 473 bp, Glycine max
  unsure (1)..(473): unsure at all n locations
agcttgtaggattatggtgtacccatcacatgtggtactaggtggcggtcgggcgatggtgcacaacaagttttccacatccacaatgcgcgcataaacccaccatcccctgttgcccacctccaactgagctcacgtactcccacgtagcccatatcctcgtttctctcaacaccgggtccccatcaatcctcccaagcttccccaacatcaaagtaatacaacattcaaacagcacaaactatcacagccaagataacagaacaaaggcagaaaactctgccaaaacaccaaccaaaaatcacagcttttcccactcaaagaccccagtaacaattccttcgatccaattcgtaaaccgttggatcgactccaaaattttactggaagtctataatgcataagcctacattttgaccggtgggatctactagcanacatccagaactcattctgcactagactttccacag

SEQ ID NO: 54974 - DNA, 467 bp, Glycine max
  unsure (1)..(467): unsure at all n locations
actatgcttatagaacanattgccttaatcatttgaaatatgcatgtgaattacgactcatcatcaagaatcaagccacagctattgtgcaagcaatcaatggggcaaaacacaccaaatgattataatgatggatggctcagattctcacaaaggtaaaatcatcactttcaaattgagctttcaaaactatcatgacatgtagagaagaatcaacgatctctggtcacataatgtcaagaactcttattttcaaaacaattacccatttcttgaacatatcctataatataaagagaaacatgcaaagtcatacgtgcgcacgaaagtgacccaaaatattaaactgaaaatccgacgaaactaacaacattatcaaattaacacagctaacatattaacaaaaccaacaaaactagcaaaaccaaagaacactcccccccccgccccatacttaaacaacacat

SEQ ID NO: 54975 - DNA, 435 bp, Glycine max
  unsure (1)..(435): unsure at all n locations
agctntcctcgtacctcaatcagcaatactacaattgaagacgtattattattattatcatcaataaaacatgaacacccatggaaacttagcatacacgaagttgacctacgtacctcgcggagaaagctttaagctttaagcacccatgagtgtttcagcaccctattaccaagagtgtatgtagggttctcttcgagccacacttccaagagcagtgtanggggttttgtgggttcgagcgaggggtttccggcactattgaaaataatgtgggacaatgtggatgtcgagggagcggttntcggaagatttcaggcgggaggaaaaagacaagagcgatttctagaaggaggacaaagagaagagggagggcaatggtttcgagcgcgcgggttgtgaaatgtcaagttttaacttataaacataacaaca

SEQ ID NO: 54976 - DNA, 443 bp, Glycine max
  unsure (1)..(443): unsure at all n locations
tattgaattattgtagatagaccgagatctataccccttttaccatataatagaccaagcttggttgtgcagtttggcgtgattggataatgtagattctgctgtgaggtatcaggtgatcgtagaggttaaaaattgcattttatgtggtgcagacaaaaatagatggacatcatcagccaaaattgattcttgaagttatttcggttttctctttgtctgggccttcatagtaatatgttgtttggctatcttggatgtgaggtggtgttatataaaagcatctaaaatatttggtgatggatagcagctgttgagttttgggagcatagttttttgtttaatatgcataaccttaattgcacaattgatgtaaggttctaggattggatcatatttaatatanttttacacgaagatcagtacccccaattcatgataca

SEQ ID NO: 54977 - DNA, 433 bp, Glycine max
  unsure (1)..(433): unsure at all n locations
agcttgaaagcaaactggatgcgttggtcaacttggtaacccatttggccttgaatcanaaatctgtacctgtcgcaagggtttgtggtttgtgctcctctgctgaccaccatacagacctttgcccttccatgcagcaacctggagcaattgagcagcctgaagcttatgctgcaaatatttacaatagacctcctcaacctcagcagcaaaatcaaccacagtagagcaattatgacctttccagcaacagatacaaccctggatggaggaatcaccctaacctcagatggtccagccctcagcaacaacaacagcagcctgctccttccttccaaaatgctgctggcccaagcagaccatacattcctccaccaatccaacaacagcaacaaccccagaaacaaccaacagttgaggcccctccacaacc

SEQ ID NO: 54978 - DNA, 465 bp, Glycine max
  unsure (1)..(465): unsure at all n locations
tctactgatgtggcagggcggggcctcttcgactagttgtaccaaccgcgagccttggcctctgntctttctttccgagatacttttccttataccagcttgcgtaggtttatagcctaacccacacttctcgcagtttcctctggtgcttaccagactggttctgccactgttgttcttgcccaagcccattccgggcttgtagccataccccaacatcacccgggccaccatcattgccgtatcatacaagcaaggctgcccagagagggaatctacggaggcaatgcttactaccttaaaagattggaaagttgtttccaatgactccttcgcggcttgcacatatgacatagaggaagggcaacttaccaagacatcttcctcaccagatactatgaccaaattcccctccactacgaactttatctttttgtggagtgtatagggaatgactcccactga

SEQ ID NO: 54979 - DNA, 445 bp, Glycine max
  unsure (1)..(445): unsure at all n locations
agctattttgctatcttgctgaaagaacactgngttctatntatagagaaaaatagctataatcgcttggaatcgattaattcaatgaagtaatcgattaaattatctttttaatcgataaattgttcttcccaaaacctaaaaacagcccaagaacattgtaatcgattagatactcaaagtaattgattaaagtgttcttgttcccttttgaaacacttaaagagagagaagtaatcaattatatcacatggtaatcgattgaagcagagattcttgattaaatcagtctttaactaaaaaacaacagtataatcgattaagagaatactataatcgattaaactgatatgagacataactctacaagcttaagacaacttgtgtaataaattacaataaggttgtaatcaattaaaatagagatgttttccttctgaagaat

SEQ ID NO: 54980 - DNA, 452 bp, Glycine max
  unsure (1)..(452): unsure at all n locations
gntactactattagatagctactaatactattgcacactgttattgtttttttaacttaattatattacacttgtttatgtatgtgtttttctcttgacttaaatataattttggtcattttattttactcaatacgtaattttggtctctctattttaaaattaaaatatttgatactcctatttttaaaaatctacaattttggtctctctattttaaaatacaaacattttgtccctatattttagaaaattcataattttgattctcatattatagaaaattcacaattttggtttaatatataatttttcctatgttttatttcttttattttttactttgtagttaattaaatcatttcttgatgatatcttaaatgaatatgtagatttaggatctaattagaccaaaacanaagacataaaatatagataaaattgagagtttg

SEQ ID NO: 54981 - DNA, 445 bp, Glycine max
  unsure (1)..(445): unsure at all n locations
agctngcacacaagattctccttggctggcacttcataattctttgggtgggtcttatagatgtcttcctctaaatccccatgcaagaatgcagttntaacatctagctgctccaagtaaagattctctgcagcaacaatactcaaaataactctgatggtagtcatctttacaactggaaaggagtctctgtgatatcaattcccttgttctactgaaaccctttcaccacaagtctcgccttgtatcttcttctaccgtcagattcttcctttagcctacagacccacctattttgtaacgctttctttccttctggcaatttagttaaagaccacgtcttattcttctgaagggatgtcatcttatctttcatcgctagctttcactcaatagtgtcattcccctgcatagcctcactgaaacattctggctcaccaacatc

SEQ ID NO: 54982 - DNA, 430 bp, Glycine max
  unsure (1)..(430): unsure at all n locations
ggggtggtgttgcgcgtactgatgggtaccatgaggtgtattctgttgttgacccacacgggtgttgaagagacggcatgggcatctccttccttcctttntgcccctattgccccgattcttttggcgttcacgtttgtggaggaaacgtaatcaaactttcctctcttcaatccaacctcgattctttccccggcaaacaccagatccgcaaagctggacggcatgtaacccactagcttctcatagtagaacactggcagagtgtctaccatcatggtgatcatctctctctcaaccatgggaggagctacttgtgccgccaaatccctccatcgctgcgcatattctttaaaggtttcaccctctttcttaaacatattctgcagttgagtacggtcaggagccatatcagaattgtactgatact

SEQ ID NO: 54983 - DNA, 456 bp, Glycine max
  unsure (1)..(456): unsure at all n locations
agcttataagaacaaaattgcctcaatcatttccaaatatgcatgtgaattangacgcataaacaagaatcaagccaaggctattgtgcaagcaatcaatggggcaaaacacaccaaatgattatgatgatggatggctcaaattctcacaaaggtaaattcatcactttcaaattgagctttcaaaactatcatgacatgtagagaagaatcaaggatttcaagtcacaaaatgtcaagaacttttattttcaaaacaattacccatttcttgaacatatcctataattcaaagaanaacatgcaaagtcgtacgtgcacacaaaattgacccanaatattaaactaaaaatgcgacgaaactaacaacattaacaaattaacatgactaacanattatcaaaccaacgaactagcaaaaccaagaacactcccccgctattaaacaacacatgt

SEQ ID NO: 54984 - DNA, 459 bp, Glycine max
  unsure (1)..(459): unsure at all n locations
ggactcacaccanacatggcangttcaacatgctttcaacgtattccttcacaaataactaccacaatgcataaacctagtaaaactacccatcatatctccccaaaccccatacccacaaaattttaggtgagaagaagtctacccaaacctgaaatttcgaagtcccacacgtagagatgcgcttcacgactccgaaaatgccctcctttcgcgatttggagcagaaatggctaccaaaggttggagctttgttgaagcttcaatggtggaggaagaagaagagaatggcaacgtgagagagagagggagaaaggcttcanaaattttggggctgagtgaggagagagagagtgttgctttttggtttaaaaaggcttttctcttttctattattntattttaagctatgccacatgtctccatttgagtggagcaaaagggcccactttttctctt

SEQ ID NO: 54985 - DNA, 320 bp, Glycine max
atagcaagacgctctaaatcgaatggtgaagatctgaccaaattctgacgacgataacgtcttactcggatgcctgattagaatccacgaatacatacagaccctcgctattgattgttgaagctctcagcaaattcaaacgacaataacagtttactcggacgactgatggagtcccgcaatacatagagacgctcaaaattgaatgtagaatctcttatcacattaaaacgacaatgcatttttacttaaatgaccgattgagtcccgtaatatttccagacgctctgaattgatgaatgaagctctgaaccaattaa

SEQ ID NO: 54986 - DNA, 443 bp, Glycine max
  unsure (1)..(443): unsure at all n locations
agcttacacatgcacgacatgaatagagacacccaaccatgctatctanaattngaaggcatcattaacctgtcgtatatttgaaaaaaaaaattgagaatggaaaaatcatgtctaacataaaaagttatatactactattagtttttgaaaatcacgtttaatacaaaaaaaaaatcatacaaaatgtgagaccaaatacaaaataaattatattattaataaatatttttacagcattttcataggattttttcaattacattaataattatatttctcttttattttttcttaggctttttccttttataccacaaataattttattattataaatataaagttgtaagacagaaaaaaactcttgtatcaactttctaagaatagtaagcaacaatcttaatagtgtgttaaaattcttcaaaacaacatccacacac

SEQ ID NO: 54987 - DNA, 430 bp, Glycine max
  unsure (1)..(430): unsure at all n locations
tctattctttttttttgttttcaaattccattacccttttgttctgttcctcagaaactgcatggaaaaggccttgttcatttttattttctataaagnttaacacttgcacctttatttttttggcttttgattttttttaattggccaaacagagcttattagattagcgtttctataacctaattgaatcttttcaatgttgttgcagcgaattgctagagacaggttggagcaacctacggcgtgttgttctgttcaggattactccgaaacagtggtacttagcactgcatcacaagaagtccagtaagtaatttactaattgagtttctaatattgtaacttttttttgtttttcgcaacaaagcatgtttgatttttgggattgaagtttatttatgattcctgataaaatgggttgggatct

SEQ ID NO: 54988 - DNA, 409 bp, Glycine max
  unsure (1)..(409): unsure at all n locations
agcttagtaaaaaaaaaaattattcaaatatacttagtattaaagcttgtttcccgtgcaaaaataagtgttgccttcagacaaattacaagaagtgaagatattacattataagacatanaagaataaatacattagcattgatgttaccattctattattattcttttttttttactgttctcactcctctaaatgtctaaaaaatggaatgcggaagatgaacgattnnttttataaataaaaactatttacaatgaaaactacttacatgacatatttaattttatnttttttcacatccattatatgtataatcaatgtaaaaaatattattacatcaattataaacatgaataatctaaaaaatcactttttcacattaattatattttcaaccgatataaaa

SEQ ID NO: 54989 - DNA, 392 bp, Glycine max
  unsure (1)..(392): unsure at all n locations
tctatctctaatacttatgaacaataatcaaaacgcatcaacaacaccctgtatatgtgttttattattgttttggctacttttttttctaatcaaactaaatcaaagttaatatatgcttcatttacttttaccttttttgttcttgattttgttgctcgctgtcaatatcaccaaacaaagtacacattttgggggtttatttttttcttatgattttttgtgtgctatatatcatatataattctttttttttacaatattttgcattctgttttaattgtgattttaattcgtttatctaaaaaattaggagttgaagcattattgaatatattatatgacttanaaaatcaccacaatattatagtatttctatatactgattgaga

SEQ ID NO: 54990 - DNA, 421 bp, Glycine max
  unsure (1)..(421): unsure at all n locations
agctntataagtgcgggtctgggagacgaatgtcaagtggtcgcgatatgtgaagatgatgttccaagaactctggatttggtccgaccatgccctcctgatttccagctgggaaattggcgagtggaggaacgccccggcatttacgcaacgagcataatgtaaacctttacgggtttaaaagctctataagtgggcctaggctttagagttttcattttggtaaggctttgtgtcttttgtttttgaatttataatacaaggatctttcttcatctgttcctagtctctacccattctcattcatttgcatgtttacttctttttctaaaacggcagattcgatgacgagtcccccgaaggtactaatacctgggacccgtctatcaacttcgagcaagaaatgaaccaaacggaagat

SEQ ID NO: 54991 - DNA, 481 bp, Glycine max
tgctattacgtgacctatgaaactcagcttaacatcagaccacttccgggtactggaactacttacatggatttgatggggcctatgcaggttgaaagccttggaggaaagaggtatgcctatgttgttgtggatgatttctccagatttacctgggtcaactttatcagagagaaatcagaaacctttgaagtattcaaagagttgagcctaagacttcaaagagaaaaggactgtgtcatcaagagaatcaggagtgaccatggcagagagtttgaaaatagcaggttcactgaattctgcacatctgaaggcatcactcatgagttctctgcagccattacaccacaacaaaatggcatagttgaaaggaaaaacaggactttgcaagaggctgctagggtcatgcttcatgccaaagaacttccctataatctctgggctgaagccatgaacacagcatgctacatccacaacagag

SEQ ID NO: 54992 - DNA, 444 bp, Glycine max
  unsure (1)..(444): unsure at all n locations
gcctgaggaagactagggatgtgatcaccatggngaagctgttcaaaaagctgcacagggaattgtaccaggtgcggatacgggtttggttcctagtacgactcaacctagtccggataaacgcttgaagaccgggaggccccacatggggagtggcttgttgctactatgaaaaaacgaanaccgcaagagaataaggtggaggcgcaaatgagtttaagtgaataggtgaatatttaacttttaaaataagcatcatgatgttgtagttntaaaatttnggttaaatttatttatatgtatgtatataaaaaaattggnttaaattattttcattgtatagattttttttataacatttttcatttagtattntttttaaaattattgattattttaatgaanacttctatttatttaataaaaataattttattttaaatt

SEQ ID NO: 54993 - DNA, 411 bp, Glycine max
gcatatgcatgcacatgcatcttttatcatgtgtgaactgtcacacaggctcatgatcgctttaagtgacgcgtcaactacccgcccgatatcagtacaaatattgaatcgggtacttttgtttctaatccacattatgctacgcaaagatatgctctgcttacatgtgccatgggactggttgcaattgacgctcggtgcgagatcaccagaccatctactcacgttcacgtatgacgttaaataagcactactatgaggcaacgtatcacctataaaatttctgcttgacattagatcaccttctgtttctcaaggcatagtaagacacacctagttgctcatgatcctatgaatttatatagaacatgcacaatgacgaaaggtagtcctacctcacaatatatatgt

SEQ ID NO: 54994 - DNA, 444 bp, Glycine max
  unsure (1)..(444): unsure at all n locations
agcttctagaaggagatcaactngatggtctatgcttnctgaaggtggcagtccatgacgaatctccttgggaaagacatctttaaattcctgcaataagggttgaacactangagaaacataaatagttaactgattagaattatcactctctctcttgtgtatcactcttttcctcgggtgtatcactcttctttttcatattcctttgtggtgcctcactattttctttctcttggtctctcttttctctcattctgagttggtcatcacacacttttctaggggatagaggtttagagtaaacgaggaagatttggctattcgtctgtagggctcttctttgtacggttaacaaacgttgcatttgtgtagtccacgcgtccagaaataagcgctgagattcgtccaattgatgatatacaccaccattgtcaccagctc

SEQ ID NO: 54995 - DNA, 193 bp, Glycine max
  unsure (1)..(193): unsure at all n locations
acttttacatggatgtccgatttgggaaaataatatatcgagatgctccanattgaacaacgaaagctatcgagaaattcgaatggtccgaacttttctcacggatgtccgattcggggacataactcatctagacgcacgaaattgaacaatggaagctctcgagaaatttgaatagtcataagatttcaca

SEQ ID NO: 54996 - DNA, 459 bp, Glycine max
  unsure (1)..(459): unsure at all n locations
agctnttcaaattcatatcttttgaaatactcctcaaatacacaacataatattgttgtcagtgtcaagtgtacagctaatatggcacaatctatgtctaaactcagattgtatttggttttcaaagataaactttcttgaatatattggtgataagctcatcttatatgtgagcttaacagcacagacatgcataacccgatcaacagaaataaccaacttaagaaaaagcttatacagtctaaagaagacaaacagcatgcatattatctcagagactaagggatctgacttgacagttagatgatacttatgctatggcattatttaatcattatgcagattcatgcagaacagattattttctcatttatatttgaattcttaaatanaattggttgcacgatgatatataatacgtaagtgtatctataaactagatatctgctcccattctta

SEQ ID NO: 54997 - DNA, 469 bp, Glycine max
  unsure (1)..(469): unsure at all n locations
gactatgcttaactctcgtataaccatggtgggtatggagccgttgcattaatgnaatttttcttgccttaacataggccctgtaatatcttctatgagttgcatgtgagtagacatcatcatcagaggtcaagttaaggccatctgcattgccccatttcacatattgagctttgcctccatatgcctcccatataattaccaatgataatataagcctgattttgtatttctttgcttcactgaccacataatccaaagcctgaggcaccaatagtaaaatggaactacataatcaatgctaattacctgcactgataactaacaactcggaagtttaattgtatcataatctgatatcaattaccatatgaaagcttacacaagcagaagtactaacagcagataataccagagaaggtcacatgatattgctgtgtggggttacataaataatatattatgttgt

SEQ ID NO: 54998 - DNA, 461 bp, Glycine max
agcttatccaaatactggtattcgagagaaaagccttgtaaccattaaaggtgcgtccttagtagaataggggtactcgggagggaaaccttgcaacgattcaaggtgtccttggtcgaataagggtactcgagagagaaaccttttagcgattcaaggtacacccttggacgaatatggatattcgggaggaaccttacaataattcaaggtgcatccttatccgaataagggtatttaggagggaaaccttgcaatgattcaagttgctccttaatcgaataggggtattcgggaaggaaaccttgcaatattttgaggtgcatccttactcgaataggggtgggtattcgggagggaaaccttgcgacgagtcaaggtgcatcattattcgaataggggtattcgggagcgaaaccttgcgacaatttaaggtgcattcttacccgaataggggtatt

SEQ ID NO: 54999 - DNA, 449 bp, Glycine max
  unsure (1)..(449): unsure at all n locations
ctccncttaaaaatatgattntaggattaaataggtggctttgttcgtgctcgttcgcttagcgcaattctgagccgcttagtgcgcattagtgaatttcggcttagcgcggcttttctcgctcagcggatggactgaagcggtgcgcttagcgggatggcccttcgctcagcgaacaagcacatctcatccttcttccagattcttcctcacgcttagctgaggaatgttgcactcagtggatggctcgctaagccagcagattggcttagcgagagggtgaaaattagcacttcaaaacttgcctaattaacctgaaattgagtgaaaaatgattattaaacacacaaaatggaagtactaagtatttattacttatctttaacaaaaggtaattataacactacaaaataaccataaattggaggagtttgatacaatttacatag

SEQ ID NO: 55000 - DNA, 414 bp, Glycine max
  unsure (1)..(414): unsure at all n locations
accggactcaagagacgcagctgcagctgctgacaaacttattttactttatactcggcctataaatataccggtggccctgcttcaataacaaggatatgatattcttcaataagaaaaagtatataaaaactattaaggctttatgtaacacaaanaaagatagtgtggccttggtttactactatcgatacattgaattgagggcttagattatgttccaaagcatcataactttcatatgcaaacaggggttgacataagaccgaataaaggattgacctgataaaaggaaacgaacagttaccaggaatgaaatagatatgcaaatgaaaagaggatactgagcttaatataagtaacgaagacacccaccgaaggaaactgaaactataactcgtacacagaaggcct

SEQ ID NO: 55001 - DNA, 74 bp, Glycine max
ccggccccaacaaaaagagacagaacaaaaaaaaaaaacgactgatgcccgaaccacagaaacccgaagagaag

SEQ ID NO: 55002 - DNA, 423 bp, Glycine max
  unsure (1)..(423): unsure at all n locations
agcttgagggagggtgttgagattataactagttagttgtagtcttgtttagtagtagcttgtatctgagaatataaatactttgtaacacacactttacaaatcaatcataatattttagttggcctgttctttcttttgtttgcttcctgctacaatgagttcggtctctttttttgttgttgatgatgatccaatatttgcttctgccttttgtgcttaagaattgatgacgtgagcttctggttttggtggttaagaattgaagttgacttgttttgcttctggtttgaaaggataagcctcatgtgtaactttttctcttgatatttaagcatttgttgcttctgactgacatggcgattaatgccgtgatcattgnntttcttgcttctgccaagtagctaagcatatagtgtaact

SEQ ID NO: 55003 - DNA, 443 bp, Glycine max
  unsure (1)..(443): unsure at all n locations
ggctaatctgngattcagggattgggcatatgacatcctccctccttcctcaattngaacttgtagatatccagtttctgttttttaaactagatgattttcccacttcatttctaactttctttttctttcgacttcaggtgtgtagagacaaagaaagatccagtctgcacttgttccaacctaacaccatactttgtctctgacatattttagaaatcaaatatattggatttcattggctattattggttatttctttgggcgttgntttccttgtcacttgattaattcgataactaaaggggtttagagggaaaaccaatgtcagacaacaactctcctgaaacaaagtatgatgtttttgttagcttcaggggcaaggacatccgtgacgggtttcttagccatttgactgacacttttctagggagaaaataaat

SEQ ID NO: 55004 - DNA, 456 bp, Glycine max
  unsure (1)..(456): unsure at all n locations
taagcagatagtaagttatgtcgcctttccatganagttgttattntattatttttaagaaatacgttttattntatttttatgtccatattaatataacataatatgaaagtgtttcattccattacttttgcaagtttaccagttacaggtcaatgtgtagtttcagtaatacttttaaattttaatcgagcttaaacttcacatattaattcagcttagccttaatgactntatacgtataatattaattaattaatattaatattatatattttcttgtaggctcttggctggggggagcaatgacccctcccaccccattaaagatccgccactattgaaaaataattaagtatccggcatcaactatttattatatcttcttatatatgtacgtatcttccgataacattattaggtatttaatgttaaaaatcggttataaatatatta

SEQ ID NO: 55005 - DNA, 458 bp, Glycine max
  unsure (1)..(458): unsure at all n locations
agcttgtccaccagtgatggaacatcataagatgcacccatatacctgccaataaataggtaacaacactcacattacactatgtaattgttntcttcttaggggaggtggatcagagcacaaatgaaatgcatattttaaccagtagatagctaaatgtaggattaccccacagtagcttcggtacgctgctccggtgtagcatctaaaggaagattactgttatagacagcaaatgtaagtacaacacccaggtgataggactttagtagtttaaaaggggatgtcagaaccccctttccagatgcccttgctctcaaaatattctcatggtcctcctgtgcaacaatgcaacaaaatattttcttttaaccagacagataatgagaaatatacagataattcaatagataatagtaactcctagccttagttctttaaccagtgctcagaacatt

SEQ ID NO: 55006 - DNA, 447 bp, Glycine max
tacttgtatgatggctactgtgaagacattggtacaattgatgctttctataatgcaaatctgggaatcacacaaaagcctgtgcctgacttcaggtaaattatataggctatttaatatatccatcatattgacaaatgtatttcaacggtagtatatagtggatctgatgtttatgtgttcatgcattctggcatattgattgcagtttctatgatcgttcatctccaatctacacccaaccacgatatttgcctccctctaagatgcttgatgctgatgtcactgatagtgttattggtgaaagatgtgtgattaaggtaagtatttcagaaccttcacattctactgatctgctctataaatgagatttatacaattcttaacaaagatgtcaaatataatgagattgatttatttataggaaactaactctgtattccatat

SEQ ID NO: 55007 - DNA, 468 bp, Glycine max
  unsure (1)..(468): unsure at all n locations
atccttaagtcacctgcggcatgcaagctggtggcgcgctatgtgagcacatctcatactgatcctcttctagggtttcccaacatgctaagtgtgacatcctggaaatttctacccggaatttttgtanacggtgcattntgtatgattatatatatataagtattattcagtgtatatgcatatatgttcctggtagaagtaagaatagtgggggcaagatacgtgggttaggctgattaaggaagagaaatccataactggaaggttataggttaattctcgattaattagtctaaaaatcatcatcttgcgtgtaacttaaaatttaacaaaaccaacatctgaaccacgctcggggtttcattctgagcgctttgatatatatattgcctactttcaaaaattggccccgacgggcgcagagaaacatgatgaactaataccagagaaatgacacgcaaaccg

SEQ ID NO: 55008 - DNA, 416 bp, Glycine max
  unsure (1)..(416): unsure at all n locations
tgtccatnaaanataggtntttgaagtttatcatttcaatttctcattaagtaaaatggatcattttcaaggtccaacgccttaaaatgatcaccttttaagtaaaaaagaatcacttgataagaaagaactacgtaggtctgatttcctcatcgcaaattgaggaatacgtaggagcaaagggaaacacccttgtcgaccacaaaaagaaaaaaatataaaaagggtataaaggatataaggacataaaaagggaacataaaaaaatcaaagtcatgtttgcacattcgattaaaggctgtcgttccttgggacggacgtgtggggtgctaatactttccccgtgcgtaaatacaactcccgaacctttcacttaaagttcgtagaccgcgtcttttccgggttttctgacgttt

SEQ ID NO: 55009 - DNA, 443 bp, Glycine max
agctgtgacttgattcatcaacagattatatatatgtgaccatgacatgagtttcaattaatcatcaatcatctttgaataatctatcttgataacatcttctttcaacatccttcattcaatccttgaatatcttcttccatctctttcaacactttcgacataattgtctaattcatttctcttcatctttctaaaattctttgttcaatactttctctttcaagaaaagttctttgataaaaaaaacttgggctattcatctttttcattctcttcttcctttgccacaaaaacgaaggactaaccgcctgagaattcttttgattcttccctttcccttaagcacaagatttcaaaggactatccgcctgaaatatctttttattcccccttacaagattcacaggactaaccgcctgagattctttgtccaacacatt

SEQ ID NO: 55010 - DNA, 309 bp, Glycine max
tacttaacaaaatacttgtcatgatgcccagtcagagcacccaaaagcatagtggcaacactaacaatactgaaaaatatttggcaagtgcttcttctacatctcatctatttaccgtttcttgaggtagccgaagcattaactatactacttttcatttgttgctcgtcccactatttaaccaaagaaaaataatgtaataacaaagggataattaagaagctgatgcatatgcttatcaagaaatatgataataaattcaattggacaatcaatacagattcaaatacatcattaacatctcttatc

SEQ ID NO: 55011 - DNA, 457 bp, Glycine max
  unsure (1)..(457): unsure at all n locations
agcttaacctctcttatactagactatattagtactccattaaaagtcgagaaattctatgcacccttgaaattcaaagattttggtactgctattgagaaactctatctttctcttgttgtgttcaaacttcatactcattcaactattaggcaaaaaacatcttatataaaaatcttcagatttctgtgggtaccatagcaatcctcaaggcttatggagaagaaaaaagaagagaaatgaaaggccaagagaatttgagaacaaaactattaactgtttgtgataataaacaaaacttacatctgtgctgttctttatacatggaaagctccaatcctgacacagcagaataaactgcacaatgacaaataaccacacaacanaagtgagttagttactaagaccccatacaagtagcactgtttacaaccaagggtgtaaaaaaactgttact

SEQ ID NO: 55012 - DNA, 456 bp, Glycine max
  unsure (1)..(456): unsure at all n locations
ctcagctgaagtgcttacactaactngcataataatcacgtgctccatgcattcttttccaatttcattgcaccagctaactgggtttgaaagctaatctttctttngagttgggttgtaccatcattgcaatgttcacagggaagccttcatggagtgaggatgaaggattaagtacctgaagaaaattctatttttctcttttgaattttgttattctcaggctacttctgtaactctatatatagttgaagatgtcacattggttatagagtcccaatagtttccaatatttctaatactggcatggtttgatatttgtttatatgagattttgaagtttggtaatggaggataatgtgtcaactttcacgtgaggctgctatattagatcgagataatgaaggtctctgatagtaaacttatcgaacaccacagacccaagaggatgagcaa

SEQ ID NO: 55013 - DNA, 461 bp, Glycine max
  unsure (1)..(461): unsure at all n locations
agctntgacttgagtcatcaagagattataaatatgtgaccatggcatgagtntaataattatccttcaacatctttatcatccatcaatcatcaatcatctttgaatcatctatctttcaatatctttttacagaattttttgattcatttctcttcatctttctaaaagattttgatcagcactttctcttccaagaaaagttctttgttcaaaaacttgggctattcatctttttcattctcttctccctttgccaaaagaacaaaggactaactgcctgaattcttttgtgtctctcttctccctttcaaaagattcaaaggactaaccgctagataattcttttaattcttcccttccccttaagcaaaagatttcaatggactaacccgctgagatatattttggttcccctttacaaagattcanaggactaaccgcctgagaattctttgtcc

SEQ ID NO: 55014 - DNA, 453 bp, Glycine max
  unsure (1)..(453): unsure at all n locations
cctcatcgtccctcacagtctntagaattgggagccaatccaatccttgtgttcggactctcagccacttatgatagccgccgatgatcccattactgcttcccctaagctctctgtcctttcttcacgccgcatcccatgccttgcgaactccttggagtaccctcgcgtttgtggtcactgaaaccccatgcgatgaaaggcatgatgctctcatctgatggcacttctctcatggngtagccaagctgtcctatggcgaggacgggattataattaatacaaccccttgttcccatcaagagaacatttggacatccttcgcatgaagatagaatactgattcttccttccttctagcgaggaaaccaattaacagacgcccctccatgctagccaagagttggtcccaattcgcctttcctttttcgacgcacgagcggtaaccttgta

SEQ ID NO: 55015 - DNA, 465 bp, Glycine max
  unsure (1)..(465): unsure at all n locations
agccttgtaagtgctttaaccaattaggttttgtattatattagatttagaatactnttgttatttgcatctattaaagtctgaaggagagggcaatctatcactcttagtagccatgagttatatgaaactggtttgggaaatggggtttcacatgtgaagtaagtttctgcaaggggttgtcaaaattgggttcaggttggattttgccctggtgttcttaatgacattgatcgaggtttgtgtgtgcttctattctgggtgactgtgactgtgtcttcattcactgagcctaatgtttgatgcttctttttgcgaggggacaaggtggatgcataaggggttcttatgagagacatttttcactgtttagttaccaatctttatggngtgtgagccaaaattttgctgtcatgcacaaaattggaaatgattaaagtgattgttggtttgtccaccatgtta

SEQ ID NO: 55016 - DNA, 452 bp, Glycine max
  unsure (1)..(452): unsure at all n locations
gcttattctacacctgananagaggatgagatagttgccaaaagagaaagcttccctaacaatattttcatgcaggcggaccttcttctggtaattctgacttacagcagccccctatccctcttccattcccacctagagaaattctaaacaaaatgatggaagaagcggaaaaggagatcctggagaccttcaaaaaagtagaggtgaacatacctctgctagatgccatcaagcaaattccaagatatgccaagtttttgaaggagttgcgcacccacaaaaggaagctcacaggcaatgaaagaattagcatgggcagaaatgtgtcagcattgataggtaaatctgtccctcacattcctgagatatgtaaggagcccaggactttctgtatcccttgcattattgggaacagcaaatttgagaatgccatgctagatctaagagca

SEQ ID NO: 55017 - DNA, 435 bp, Glycine max
catgtggtactaggtggtgtgtgggcgatggtgcacaacaagttttccacatccacaatgcgcgcataaacccaccatcccctgtagcccacctccaactgagctcacgtactcccacgtagcccatatcctcgtttctctgaacaccgggtccccatcaatcctcccaagctttcccaacatcaaagtaatacaacattcaaacagcacatactatcacagccaagaaaacagagcataggcagaaaactctgccaaaacaccaaccaaaatcacagcttttctcacttatagaccccagtaacaattccttcgttccaattcgttaaccgttggatcgactccaaatttttactggaagtctctagtacataagcctacattttgaccgttgggatctactagcaaacatccagaactcattctgcactgctc

SEQ ID NO: 55018 - DNA, 466 bp, Glycine max
  unsure (1)..(466): unsure at all n locations
agcttcatcaagtggtaatcagagcacaagagcttcaagtaggtgctccttanacctccattaatattttgctttaccttctcttctattggtgnttcttcatttttctccatgtatctcctcacatgtcttgtgctaaatgttgttaacatgattctttagagtttccaccgattaaacttgctatagaagctagatttgattttctatgggtcaaatttcttgttcttgttcttgaaccatgaattgtgttgagtttaagttcctttgagttttgtcttggttatttttggggctgaaacctataccataaaattcttaaaaaatattaaaagagaagaaaacctcaaaaatctagagtgacttgttctcctattgtagntttgtcatagaagtcatgtctagtcatgaaacttgtcacataagatatcttatgttgngctggaatttattntcttggttcttt

SEQ ID NO: 55019 - DNA, 467 bp, Glycine max
  unsure (1)..(467): unsure at all n locations
tatgcactggtccgaagagaagatntaagccattctgtgatgatggtaaatgaagatattgcatcaggaggtgctatgctttcaaggagagggcataaacctcaacaccgattatctcttcagatgacttcaaatggcaagccaactaccaaatctcaatcacaaggagaaggagaaggatgcaaacattgtggaaatatgaaacataccanagagacatgtttcaaactacatggttatccagattggtggcatgaactcaaggaaaagaaaaaacgtgaatcaagtggaggaaacaattctggtcgtgcagcccttgtgagcgtagagcctcaactatctcttatcacacaacaagaatcacctagtggccatgcttctcaaaacgattcangtaaccaaggttcttcttattcatactctaagcaaggaaaccgtgataattggatcatcgactctggagcaac

SEQ ID NO: 55020 - DNA, 480 bp, Glycine max
  unsure (1)..(480): unsure at all n locations
atcttaagtcacctgcggcatgcaagcttcttcatcaatatgattaagggtctttttttccggtgctctttaggatcttagggttgttatgtgcttcttatatatactcacttaaaaagcaaattgcgttgaggtattattatgtacccaaaaattgagaacacatgtgtaattaatgtgacagatggcagttgatgtcaatggtcaccgtgtggaccatttgattgtcagtttgaacacataaactatattatttggccgaagaggtgtgatgaattatagaccttgaactttantttaggtattttatattattatttagagatctatctttatggatgttaaaattaaaaagttctctgatgtctctctgccattgcatggtgtttgagaaaatctagccatacatcacttttctagaggaaaatatacatgcatgtgtaaataaataggtaaaattgtattctttgttctccatta

SEQ ID NO: 55021 - DNA, 427 bp, Glycine max
  unsure (1)..(427): unsure at all n locations
caaaactcagaagcattttttctacttatttctcatccccattcagccctaaacaagcacgaagtagcaagaatttttcacccaacaagtacaaataaaataaaaaaattactcaaataatacatcccaaaaattatttacaccaataatataaaatattgtttatggtaagaaatgagttccgcaaaccaatttctaaccttcttttttttccttaaggaagtgattcttacctagatgatattttttgtaacacgttaagagattaatgtttgagaaactaatttcttaacgtgcctttatttcaaaaagagtattttttaaaatattaattgatttttttatactttaattggttgtgaagattgatattntattaatttatatataataagggatgaagaataaaatatattcttggcatatg

SEQ ID NO: 55022 - DNA, 420 bp, Glycine max
  unsure (1)..(420): unsure at all n locations
agcttctagccaaatggacttacctngaattaattcctttgatagcccttttgagccttggttccctttccttggtttgaagctcactacaagccttaagtgaaaaaccatgatattaccatatccttaaggaattttggagctttggaattgttttgggaataagagtggggggtttttgtttcattggacaacttgttttgttggctatgcttcatgatgtatnttgggccatacttgatgtacattggatattggttaaatgttggacatgctgaatgaaatgttgtttctcaaaggctaaaaaaaaaanaaaaatattcgaaaaaaaaaaagataaaaaatagattagcntttaagttgagtgaataagatcttaaatggcacaagaatgatgaaactctcggctctactcttcat

SEQ ID NO: 55023 - DNA, 444 bp, Glycine max
  unsure (1)..(444): unsure at all n locations
ggttactactattagatagctactaatactattgcaaactgtaattgtntttttaacttaattatattacacttgtttatgtatgtgtttttctcttgacttaaatataattttggtcattttattttactcaatacgtaattttggtctctctattttaaaattaaaatatttgatactcctatttttaaaaatctacaattttggtctctctattttaaaatacaaacattntgtccctatattttagaaaattcataattttgattctcatattatagaaaattcacaattttggtttaatatataatttttcctatgttttatttcttttattttttactttggagttaattaaatcatttcttgatgatatcttaaatgaatatgtagatttaggatttaattagaccaaaacanangaaataaaatatagataaaatt

SEQ ID NO: 55024 - DNA, 458 bp, Glycine max
  unsure (1)..(458): unsure at all n locations
ngcttcttgatattgtcagagatcagcactctataactcctagcttaatattagagtatggcaacagtacagaatttaaagatttgtatccaaccttgactgattatgacatacgctattacatatatgagcttcttaaaggaacgtgatccttcaatctctcatggtataccttgactggagctctgtgccctctccataatgtataatatggagtatctctgtcttggacaaggcttatatcaattttgcatcttggtcatgtgtatagacatttgcttatgcatcatggaaaatacattacatttgcacaaatatgtgtcaaggaccctttcttgttacttgaatgctctagatttgaattgcaggccatagattactgccattctcaaggcataatgcatagagatgtcaagcctcataatgttatgatagatcatgaattacggaaactccgc

SEQ ID NO: 55025 - DNA, 475 bp, Glycine max
  unsure (1)..(475): unsure at all n locations
ctattacgtgaactatgaatctcagctttagcttatatatttattctttntttatgtgtccttgaatatttattggatttcctttttaattttttatatataaggtagaactttattatttttatccttttttaacatatgatatgatttactcatttttacctttttattatatatgatattgaatttataaaaaaaaaatatgatagtgataatgatatataataagtttatgtagtttttgtttattctttggatattttataaataaaaagctacaagtgtttaaaattaatttaataccaaaattataaatactacaaaatatattttgtcaacaaaatcaaattaaaatttgtataaatcattacataaatatgcccattatgtaatattacattttttagctacttcaatatataattttacaaaacatctatgatttaataaaataaatttccaactttcagcaagc

SEQ ID NO: 55026 - DNA, 434 bp, Glycine max
  unsure (1)..(434): unsure at all n locations
agctntgagccaaaatcctgactcaccatanttcttgacccagggtgagaatgtcaattcttaccctcggaagcaaaaaaaaaggggagagggaaaatctccaatccaagaggaagcaaaaaaggagagaaggaaaatttccaatcaaaggaaaaaaagagaggaaagggaattcccaatcaaagagtgggagaaagcaaaaagaaaagatagaaaatttccaatcaaagaatgggagaaagaaaaaagagaagaagaaagggaagaaagttcccgatcaaaaaaaaataatatgcagaaaggtctttggaccggacaatatctgaacaatacagaattgtcaccaaatgaataaaaagaaggaaagggaaccatgacctantatggtcttccccctttagttgccaggcaaaatcttgtgcgctagcaacctt

SEQ ID NO: 55027 - DNA, 458 bp, Glycine max
  unsure (1)..(458): unsure at all n locations
ngagatgaggaagtgttgaagggtgaaacttcctgcttttattgttgaccacagagtggtacctggagatatgtcgcggnggtcaggagaccttggggacgtcaggtggggtgctattgcccaaaaccaagcttgaccaatcccgacccaacccgggcatagtcggtcagtgagaacctgtgatgtacctaagcaggcgagctcctggcagtcaacagataataggaaaacaagaccacaaagcaaggaggcttgtggtggctggccagctgtgaattttgtgtaatatgtggattgtggcctctggtaatcgattaccaaaggtgagtaatcgattacaaggcttaaaattgaggacaggaggctaagatggtctctggtaatcgattaccaaggggtgtaatcgattaccaggcttgaaaacgaagtcaggaaacttatggagcctctggtaatcg

SEQ ID NO: 55028 - DNA, 413 bp, Glycine max
  unsure (1)..(413): unsure at all n locations
agcttgtgtcgcactttcaactaccaaagntgaatatattgntgcaggaagttgntgtgctcaaagtctctagataaagcaacaactagaagactgtggagtaaaccttgatcacattcctctgaaatgtgacaacacaagtgctatcaacctaacaaaaaaccttgtcatgcattctatgactaagcacacagaaataagacatcattttcttaaagatcatgtgttaaaaggtgactgctgcattgagttcattgatagtgagcatcaactagtagatattttcactaaaccgcttactagagataggttctttttcattagaaatgaactaggcatattggatgcatctagcanaaaatactttntgttngcatagtgtgtgactcatatngctactcatatcattttgt

SEQ ID NO: 55029 - DNA, 451 bp, Glycine max
  unsure (1)..(451): unsure at all n locations
ntacatgtctagtgattctagagagagattggtttaagttccatagagntttgagagattntgctatgtgaagatctgcagagaccagagcttgaagaggaagttgttctgagagcttgagatgagtttgtgagtggttgtgagatcccagaggtgaaggagacatcctcaccacttgtatttttgaaatctttcatcttgttcttctctttttgtaaaggaggcttcctggttatggaaagctaaaatcctctgttggatcttccctgtgggtacttgatgtaaatatatttctatctatttaatgatgttttgtgtgttctctgtactatcagcttttcattctagtatgcctttaccttgatcacatagatgcatgctttgttagggtcattcagcagtggaaactggtctgattttgatgaccttgattggacagggctaagttgtc

SEQ ID NO: 55030 - DNA, 446 bp, Glycine max
  unsure (1)..(446): unsure at all n locations
agctngccacccagctcgcccaggcgagcatggttgcttcctccagaagcaacagccttctggaggaatcttctggagggcccaagtgggcctggtttctatttgcacccccatttttactaagtacacccccctgcctttttttggtgattcttttttcgtaaagttacggaaacttacgaatttcgtaacgatacttgttttctttccgtaatgttacggaaccttgcggattacataatcatcccctttttgacttacggaatgttacggaacctcactaattgtgcaacgatgcttctatttgatttccggtgtgtcacggaaccttacggattgtgcatcaatattttcttttgttttccggcatgtcccggaatttcacaaatttcctaatgatgggtgccaagcacctcacaaggaccaaacaaaagttgcatgtcatc

SEQ ID NO: 55031 - DNA, 404 bp, Glycine max
  unsure (1)..(404): unsure at all n locations
cttgcttatttagttttcgctgatcgaagtggctctgaaaagaggcaaatttaatcatcctgcttggacgaatgagaaaactacggcaaatgaaaagggtgagaatgaaggagaaacccatactgcgactgtcattcctacatggccaaattcccaccagcccaacaatgtcattactcagccaataacaacccttcttcttacctaccaccaagttatccacaaaggccatccctatatcaactgcaaaacccacctaccacacaaccaatgctaaacaccacctttagcacgaaccaaaacaccaaccaaggaaggaatnttgcagcaaaaagcctgtagaattcacccgaattctggtgtcctatgctaacttgctcccttatctacttgataatgcaatg

SEQ ID NO: 55032 - DNA, 443 bp, Glycine max
  unsure (1)..(443): unsure at all n locations
agcttatccgctttaagatggtagatgttcgatttgtatataannaacatggtagaagctcgttcttaaaaatgtaaatatcaaaatagagtccaatatagttacgattattgttagaatgaaacatattttatattttcatcgtttatgtaggtaaagcaacaaactatattatgtatattcatttatttattcattattggcacattattataataatattaattatgtatattaacatatttattagatgttttaattgtgggtgaaataaaatattttaattggtaattttttatggaaaataaatttactggttaaatcattttaatgtataggggtcccaaataaggatttaaagtattcgttaaaagaaaaaatggcagaaaatatgattgaacaattgaatattagaatatattactcagtagaactataaataa

SEQ ID NO: 55033 - DNA, 453 bp, Glycine max
  unsure (1)..(453): unsure at all n locations
tgtacgaatgtgttggagatgctgcacttttaattttattattattatctanggtgaaagtgtgaaacgatgaggactgaggaggagttacttgattgaacggtaaacacaggcgtgcagaataaagaaaaataaaagaagaaagtggtttctacaagcggtggcagcgtgcatgagttatggttgcattgcatggcatattagtgcagtgttcccttgctttctctttcttctagtttcgctggccttttgttctcacccatccaccgcttataaagctttaaataagtactattacactacttttactttgttttttgttttttaattcgctcgtctttatctttaagaaaaattgacaaggggccttctcatttgtcattcggtttagctgaaatctgagatttataactattccatgctgccgtaaaaaagtaagtttatctttatata

SEQ ID NO: 55034 - DNA, 228 bp, Glycine max
ctatatgttcaaaagtgaaaatgagaaactcaacactttaaacaatgaatgaaatctaacattgtttacttctactgacatcagaattcataaatcaaactataagcacaactaagttggatcgcaaatatcaagttcctctcgctcgcttgtatgaaagaaacttcaattgaatctttgctataaaggaacaatgaactctaccaactgatagtacttcaaaattca

SEQ ID NO: 55035 - DNA, 281 bp, Glycine max
  unsure (1)..(281): unsure at all n locations
tatacataatataaaataagtcatgtaaatatatatatcgatttttgctgtggctctcaatagtggtttgaaatgacttaacgatactcaacaaagtaaatccaagtctattgctaggtggatggttgntaaagtaagtaatttaaacaatatgcttatacttatattttagtactgtgtagactatattgtacttaacgttgaatatctaaatttcataatgtatttagtaatagacaaaaaggaagcactgagtgtggatattatgtcatgtactggat

SEQ ID NO: 55036 - DNA, 454 bp, Glycine max
  unsure (1)..(454): unsure at all n locations
agctngcatntactgcatttaagggtgaagtttccatgtccatgcattctaaaactcatgtttcacatcaggctatgagtccatagatttctcattatataccaatttcaaaaatcccattggatgaatcataagaactaatggcctttggttttttcataagactcaacgtcctttgctttatgtttcaaaagactacaatgtcttctgctttatgatttccaagactacaatngtcttagtcttttacactttcaaagactacaatgtcttttgttttacatttcaaagactacaatgtcttcagtcatttacatttcaaagacgacaatgtctntagtcatttagatttcaaagactacaatgccttcaatcatttacactntcaaagaatacaatgtcttcagtcatttacgctttcanagactacaatgtcttcattcatttacatttc

SEQ ID NO: 55037 - DNA, 199 bp, Glycine max
  unsure (1)..(199): unsure at all n locations
tgctttattgttgaccacagagtggtactctggagatatgtcgcnggggtcaggagaacctgtggacgtcaggtggngtgctattgcccaaaaccaagcttgaccaatcccgacccaacccgggcatagtcggtcagtgagaacctgtgatgtacctaagcaggcgagctcctggcagtcaacagataaaatgaaaaca

SEQ ID NO: 55038 - DNA, 363 bp, Glycine max
  unsure (1)..(363): unsure at all n locations
agcttctaatttcttagcttctaagcctcgtttctctccccctttggcaacatcaaanagccaaagttcgtggtaaccaacataaggcagaaagtaagaatcaaatataactaaagttcacataaccattcacaagtcanaatcaaatatagttccgtcataaaatacaaagtaacgaatactaaaatataattaaaagtttggtggatcgagtggcctcaaaaataattaagaagggggggttgannataatattcataaacctttactaattaaaaaattactcttctaaggcttttacttatgttgttatgagaatatggagtagaagagaaacttaacagaaagtaaaagcggaaatta

SEQ ID NO: 55039 - DNA, 407 bp, Glycine max
  unsure (1)..(407): unsure at all n locations
acctgcggcatgcaacgcttctttggaccttgaacaagcaattaactcctctttcagaatcatgttatgtgctcgcgaccggtctctttcttccctccgcaacttgagttcactattgctaccccatagagctccgcgaaatttgttccggccatactcttccttgcgagccctcttggtctcctattcaagggctcttgcggtaattgcattctcttcccgtaacccggcacacttcttncgaacgtgtgtagcggccaacttgaacttctccttggcaagttttgcctttcctaactcgcttttgagagcttggacttcttcgtcctcttccggtgcttcaaaattctcttcgctgacgactnttaacttggcgagccaatctaaacctcgtatatgaactttca

SEQ ID NO: 55040 - DNA, 300 bp, Glycine max
  unsure (1)..(300): unsure at all n locations
ctctatgtcataccctaatttcgtccggggattattacttgctgacatgcaacctttggttagccgctntgagatacttggcgtcctttgtttgcacaataaatgaagtcccgagacgtgtcagaaatcaaaaggaagtagactagcgtaatccgtgaaattctgtgatgtggcggaaatcgaaaagaggtggtattgcgtaatccgtgggtttccgtaacttcttcaaaaagctaaaaagagtaaatatatattccgtaaggattcgtaaccttgcggaaggaaaataagtatcgttac

SEQ ID NO: 55041 - DNA, 347 bp, Glycine max
  unsure (1)..(347): unsure at all n locations
ggataaaacatttaacagaaacgtaagaagaaaagaacttaagaatatcattctctaaaaaaaatcatctgttattttttctctctctataaaaacacttaaaagaagttgataacgcttcacgcatntcanaagttaagaataactatatcttttttttgacacaggtattaataaattaagatatctcttcttcttttttagattgaaatcatgtatatcctctaattcacattatatnttaaagatngatgtatgaatngcagttatttaattgatactttcatacgttgatgagtgacactggaagtgaattaanataattaatcctataaaatntcattcat

SEQ ID NO: 55042 - DNA, 263 bp, Glycine max
  unsure (1)..(263): unsure at all n locations
atctccaccggacaagcgctgatagagcgtaacaaacagcaccaagtaatgcaccatccccagcgaanacaagcatactgcactctctttccaacccatgttcgccgcagcttgtgccccgaccaagttccctatcaccgacatctggctggtcggattcgccacccgtcgacaaaacctcttncccttcgtgaaccactgcccgtagatcttcacgtccagcaccaccaccggcaccgcgaacacccaccacagaaccaagt

SEQ ID NO: 55043 - DNA, 326 bp, Glycine max
  unsure (1)..(326): unsure at all n locations
tcaattgaagttgataatttcaaaagaagaagataaacagaaattgaagtgagagagaatgagatatggcggaggtaggaagaggcgaatgctgttgcaaccgtttctggttntgtgtgcgacgatgacagggttgggatttgtgatgctggcgacgaggccgttggatccttcgatcactgttgaatttccgaacaaattcgagctcggagattcgaatagctctagtttgaacggcggcggcggcggatagaaaccatgcgcggcggtggagtagatggggaaggatttcgaagctggtgttgtcggaaaggagacgctgagaa

SEQ ID NO: 55044 - DNA, 271 bp, Glycine max
  unsure (1)..(271): unsure at all n locations
taacttctctagtgttgaaagaaacctctgtctcacactatcacaacaaaataatttacatttaagcacaagaagagaatttggaatggcacatagtatctntggccagactcgtagtaccttgggtgtaatctatagaaataaaacaacataagtcaggggatacacaacttaacctttacaatgttattgataatcacaataaaattacatgatatatttaagagtattactaccttagcaaaagtgtttaaactaccaatgtaaagcc

SEQ ID NO: 55045 - DNA, 256 bp, Glycine max
  unsure (1)..(256): unsure at all n locations
gtcatatatactgactcctcaagaatcccatttagaaaggcattgttcatatccagctgatacaactcccaccaatgtgagagaagcagggtgagattagtgcaaattgtcacaagcttgaccacggnggataatgtctcatgaaaatcgaaaccatggacttgatggaaacccttagctaacaaccttgctttgaactttgtgataaagccatcaacattttcctagactctgaaaacacacttacatctaatag

SEQ ID NO: 55046 - DNA, 297 bp, Glycine max
  unsure (1)..(297): unsure at all n locations
taataataagatgaaattggattaattaatagtgtgaaaaagtattaaacattttttgtatagcaaaaggttaaatatatttctagtctctcaaatttaaatatttatcaattttttagtcttttaaattaaaatttatattttttagtcccttaacattgtaaaatgttttcttacgtcttgtaggtaaaaacaanaaactatcacagattgtgtattcaaattgctaagacacagtcatgaagaactaaaaaaacattgtataaatttgagaaactaaaaataaatttaatgtaa

SEQ ID NO: 55047 - DNA, 342 bp, Glycine max
  unsure (1)..(342): unsure at all n locations
taccctaatgtctaaattntatgggattaagatggtcattgaccaatccctattntatgatttaacacaattgcctagtgaatgtgtgccttttgagggtgcactgatngatgattgaaaattcaatatttctgtgcatgatgcccgccggttggtttgcaccaaccaagcggatatgaccggaaggattcttgccatatcattggctttngaaagccgcatcctacattaccttattgttcacatattgcttcctagatcttcagatcttgctcaggtttctgaagaagatctcattgtcatgtgggcctctcataaacgttacaaattgattgggcacac

SEQ ID NO: 55048 - DNA, 349 bp, Glycine max
  unsure (1)..(349): unsure at all n locations
gcatgcaagcttttgcaagctgagatcatttattctatctcctatatccaatgggtgagtcgcgtgcaggtagtcccgaanaagactggcctcacagtgatcagaaatgagaaggaggagctgattcctactcgggtgcagaacagttggagagtctgcattgactataggaggctgaaccaggttaccaaaaaggaccattttcccctgccattcattgaccagatgcttgaacgcctggcaggtaaatcccactactgtttccttgatggtttttctggatatatgcaaattactattgctcctgaggatcaggaaaagaccacattcacctgccccttcgacactt

SEQ ID NO: 55049 - DNA, 229 bp, Glycine max
tactaacggaggagctggagtggatgatgaatggatgtcatccgttctagctctctttctctatgccatctataactaaaaagaactaataattccttagaccaaaattgctcacgtttaacaacagaaataaaggctgaaattaacaatatgcgcttagcaagatatatctcgcttagcgcgcccttagaaacataacttatcggcttatcaggagccaagcacactt

SEQ ID NO: 55050 - DNA, 386 bp, Glycine max
  unsure (1)..(386): unsure at all n locations
caaacttgatgcattggttaacttggtaacccagctggtcttgaatcanaaatctgtacctgtcgcaagggtttgtggtttgtgctcctctgctgaccaccatacagacctttgcccttccatgcagcaacctggagcaattgaacagcctgaagcttatgctgtaaatatttacaatagacctcctcaacctcagcagcaaaattaaccacagcagaacaattatgaccttctcagcaacagatacaaccctggatggaggaatcaccctaatcttagatggtccagcccttagcaacaacaacagcagcctgctccttccttacaaaatgctgctggcccaagcagaccatacattcctccaccaatccaacaacaacaacaac

SEQ ID NO: 55051 - DNA, 305 bp, Glycine max
cctctaatgtgtcatctctcaatagattatccgatgattcgctgcggatatgagcattccaagatgttatatggcgttgatatgcaccattactgtggttcttctcttgacgcggtaagaaccgggcaatttcacctgctaaactcttcatagaatccacaacatcctggatgggtaattcaccgagcctttccaaccagatttcacaggtggcatatattggaggaccatacattcttaggagtggacgttggggtctcttattttgcctggcttttgttaagagaacacatttggcagccatc

SEQ ID NO: 55052 - DNA, 61 bp, Glycine max
  unsure (1)..(61): unsure at all n locations
agctttgaggcaaggactcagaatgaatgcaaacttanaaaaacttgtaagaatacctaag

SEQ ID NO: 55053 - DNA, 272 bp, Glycine max
  unsure (1)..(272): unsure at all n locations
ctcgggaaatctcttcagctccacctatgtngcttataagcaccaattcgaaatagtctcttccattgatggtaaatctgatgcctccacttcttatgcacccaactctgcataatataaatgttactagttagcccaattttttttaaaccacatgtattctttactagaaacaaaataaaaggttaagacatatggcaattgacataacataaagatacttacttcctgtacaaaattggtacaatgccagctttgtacttggctattgt

SEQ ID NO: 55054 - DNA, 491 bp, Glycine max
  unsure (1)..(491): unsure at all n locations
acacagcaacacanaatctaggtgtctctatacccttttntaatagatttctaggtttgagaagtggaaatgagaatgaggtaaatntgaagcaaactctcacctcacacaagtntataacatcaatctaaacttgctcaaactggatttacacctaaaattccacccgaatcaaaattgactcctnncacacccaatttgccctagaaatggctctnggntcactntggtcattngtttttctctctagcacagtccaagctttctcataagtcctaaatgacatttcaagctaggattaactcactttaacctccatttaccacagaatccagatttaaccttccaactctcaaggcctcactctttttccactcataacaccacattctcactttctaaccctaggttaactctacccttcatctctaancagtntccataagcaatttcagcacataaacatcacaagcatcatcataagaacccta

SEQ ID NO: 55055 - DNA, 346 bp, Glycine max
  unsure (1)..(346): unsure at all n locations
gaggaagtgttgaagggtgaaactttctgcttnaaatgntgaccacagagnggtacctggagatatgtcgcggtggtcaggagacctcgccgacgtcaggtggngtgctattgcccaaaaccaagcttgaccaatcccgacccaacccgggcatagtcggtcagtgagaacctgtgatgtacctaagcaggcgagctccttgcagtcaacagataataggaatacaagaccacacaagcaggaggcttgtggtggctggccagctgtgaattntgtgtaatatgtggattgcggcctctggtaatcgattaccaagggagggtaatcgattacaaggcttaaaatt

SEQ ID NO: 55056 - DNA, 406 bp, Glycine max
  unsure (1)..(406): unsure at all n locations
caggagctcttctaattntcttgtatctctcaattatgccaattcctaatattgggtggtactcaaacgcatcagcacaaacattacctcactgatagctntacaagtgaatnntatttttatcatccctaaattcttcgaaaacaacttacagattatggtacttgaaataattagtaccaaatataagggattttgggcctgagtgaaccatccattacctataatggtctgccatgaaagtgtgttgattttgtgtgacactaatgttgactgcatccactctacaaaagagatgccatntagagatgcanagattcatgccctctcctttcagcctaacctggttaaagacttggcatgtcttaatantaatttttcattgaactganacaactaatgcaat

SEQ ID NO: 55057 - DNA, 223 bp, Glycine max
agctcacgagacctctggatcacattctcacacctctctcttcaggctaacgcacacacctagcgctgtgctctctgagcatacctagcggcatggtccaactgaaacaaaacaaaaaccaaacaaaacaaaacaaatgaaacttgactggacaaccaaaccttaaaagggtgtaacgaagaaagagctttatcaagaacacgtacacacaaactgagtataa

SEQ ID NO: 55058 - DNA, 275 bp, Glycine max
  unsure (1)..(275): unsure at all n locations
gtacaagtccttataaaaattggtgacaagactntcaacggctcgagtatcgaagatccaattaccattctcatctttcaacatatcatgtttattccgcttccgtctgatcgctgtgataccatganaatacttggtattgtggtcccccatatacaaccatttacctgtggacttttgagaccaatgaagttcttcttcagccaagacttgttcatattctatccaagtcttcttatattctgaagctgcctacaaatcagacatgccactac

SEQ ID NO: 55059 - DNA, 368 bp, Glycine max
  unsure (1)..(368): unsure at all n locations
aactcttacgcaggagagaagggtgtgcaagaatctacagtaaggcggcttcagtttcttattttcatctaccggcacttatgtttcttttcccttaaaatatagttccagttcagaagttaccatactcttgattntgggaaatcactaattggttgaagaattctagtgaagtagtatttatttattttataacanagtcatagttctgaaatttggttgtgcttcagtttgtgtatccttttatgtttggtttctcaaatttaactgagcctatcagtgatcacctagctaagaaaagtgaacaaggtggaaaatgaaagttgaatgatgagagagattggacanactcactaggtaacctctaa

SEQ ID NO: 55060 - DNA, 457 bp, Glycine max
  unsure (1)..(457): unsure at all n locations
agacataactgtgtaagcttanatcaacgtgtgtaatcgattaatataagaatgtaatcatttaaaatagagagttttgccttctaaagaaactntctaactcttgaaattttctccttactcacacatgatgatgcatgatgcacatatgatatgatagagactaagatgcaacatacaatacaacaatcaatacaaatgccactcaagagaagtggggcgtgtaatgagagaacttcttcaagctcttcttcaagcttcaaggctaagtcttcatgttgctcccnctatctctgacaatctcccnncttttggctttgatgatgccaaacttgaattngccattgagtgcatctggaggggctgagtttgagagtagagactcactnttcttagtctacctganaaattcttaacactaagaaaagtatcaattcatatcatcattatcattatc

SEQ ID NO: 55061 - DNA, 401 bp, Glycine max
  unsure (1)..(401): unsure at all n locations
gctgcagcttatgatgatgaaccangcatttgatgatttctattcccaagnggatgattcaagacttcaagatcaagcatcaagaatccaatccaagattcaagattcaagagaagaaatcaagaagcaacaagtcaagacttcatataggataagtattaaaagaatttttcaaaaatcaaatagcacagttntggtttacaaaagaattttctcaaattttctaaagtatcatagtgattactctctggtaatcgattaccacttatcagtaatcgattaccagtgaccagtttggttttcaaaatggtttcaaatggattgtaacgttccaaaatggttttcanatagtggtatcgantacactatattagaaatcgattacaagtgaatctaaacgt

SEQ ID NO: 55062 - DNA, 329 bp, Glycine max
  unsure (1)..(329): unsure at all n locations
agatcaatcatcaatcatctntgaatcatctatctttcaatctntttcaacatcatctctcanacatctttcaatcaatctttcaatatctttctacangaatttctgattcatttctcttcatctttctaaaaagtttttgatcaacactttctctntccagaaaagttctttggtcaaaaacctngngccctatcatcttttcattctcttctcctttttccaaaagaacaaaggactaaccgcctaaattcttttgtgtctctcttctcccttggccanaagaacgaaggactaaccacctgaattcttttgtctctcttctcctt

SEQ ID NO: 55063 - DNA, 315 bp, Glycine max
  unsure (1)..(315): unsure at all n locations
ctcttgcatattacattctatttaaccaaaaaatgcacccatatacaatcaaggcagcttcgttacctagattatttacacgtacttccaaggtgtatttgttacttacatcacacacctncttggctaatatcacatacatgcatactcacaagcatttgtggtaccaaaaattgcacatgtgcacatcttggtatttcaatacctatacatacacaaacttcatgatgaatcttgactatctacacaataaggtgctacattatatgctctcttcaagttattgctacctaaagccgcatgcatattcaagta

SEQ ID NO: 55064 - DNA, 335 bp, Glycine max
  unsure (1)..(335): unsure at all n locations
ccattgctgttctgaatgatctaagtccatggtattcttggaacaaagcgntctctctgaaaccaggagctccttttccccatgttcccgcctctgagtgttccttcaagtactttttcagcatatcagatgaaacctgaagaatacaattaatataagaagattaataagatgtacactataaacaattcttctactcttctactatatataagttagtatgttaattacttacttgattttctgccaatcccatttgtataactncggaggagtttgttaattcatcataagggttctcgtcatangctctccacccagcaaaatagggggag

SEQ ID NO: 55065 - DNA, 243 bp, Glycine max
  unsure (1)..(243): unsure at all n locations
gaaacgtcgcgaaatcttacggatcgcgtggcaattagctctaagcaactnaacgtgaccagcaaaaactcgtatgtcgataaacaattgtccccggacaaaattatggtatgacaaggaccatattatcaacttatcaatgcctaactcaagtcagaaatctgagttggatgctctattagcaacttatcaataattggtcaaagaacctaccactctacctcccaaaagaagatatgatca

SEQ ID NO: 55066 - DNA, 357 bp, Glycine max
  unsure (1)..(357): unsure at all n locations
acacactatgtatactcagatgattactatttattcattgcctatgtatatgtattcattatgcgatataattcgttgtaacccgtcactaaccaattaatattatcaactactcgtttggttaagcaaggaaatcgttggtccaacaataatcatttacgcgtacagcatacatcattgtcataattgacaacacataatgacatgcatgcgtgttacagtttgagcgtgacaacacattggttgacttcagtacacattntgaaactagcagtcgctcaacaacacactggttgacttgactacacattatcgacaacacattggctgacttgactacacatatacgcgtgtcta

SEQ ID NO: 55067 - DNA, 367 bp, Glycine max
gcagcttcatgatgaggcaatgattagtttacttgctgtgctataaggggaggcatcgagaatatgatgcgatatacacaaaccatctactaataaaaagaaataaattttggcttgcattgggaatatggaaaagtgaactaattattcgaggtggacaggtgacaaaaagtatagctgacctcggctgcaaaagagaggctttaaactttttgctcttacactggcaacttcatgagataacagataggtcttataatttggctgaaaaggaatggatttaaagttgataatgctctatttagtgcacaatcaggaatggattcaagttgaatgctctattattgcacaacactatggttctttg

SEQ ID NO: 55068 - DNA, 342 bp, Glycine max
  unsure (1)..(342): unsure at all n locations
gtccnctaatctctctctcatgtcggcgtccatcanaatggtgctcgaattgatgtccctgtgaataacaacctggtcccaaccgtggtgaaggtagttaagcccctctgccacgtcgacaaggatacgacggcgtngctcccaccccagaagcttctccgacttatcgaanacccacttgttgagactcccgttgggcatgtaatcataaaccaacataagctcgtcccctttctgcaccaccctctcatttgaaccaagttcttgtgctgaagcctccccatgcttgaaatctccgccatgaattcccgcaacccttgcttcgaatcgtggttcacgcac

SEQ ID NO: 55069 - DNA, 448 bp, Glycine max
  unsure (1)..(448): unsure at all n locations
tggagtacccatcacatgtggttctaggtggttgtcgggcgatggtgcaaaacaattctccacatccacaaatcacatataaacccaccatcccctggggcccactttcaactgagctcacgtactcccacgtagcccttatcctcgtttctttcaacactgggtccccatncaatcctccaagcttncacaacatncaagtaattccacatccaatcatcatgaactaacanaaccaagcaaaataggcaaaggcagaaaactctgcccacaacacaaaccaatatcacagctnttcacatacaaataccccagtaacattctcttcgttccaattcgttaaccgttggatcgaactcgaaaatttactggaagtctctagcacataaatctacattatgaaccgtgggatctgctagaaacgtccagagcccaatctgtactactc

SEQ ID NO: 55070 - DNA, 357 bp, Glycine max
  unsure (1)..(357): unsure at all n locations
tactaagtctctcctatctagatgattgatatgatgcatgtttatgtgtgctgtcctacgatgccacaaccaagaatcatntatcttacttaccaaacaactcagctcatgaaatgatgcatgctcaatgtttaacatatagatattacctattctcttgccaatatggacaacctcactagacgtagattcaccaataagataacaattcttaattgaaatcaaattttgtaagcctttgtcacatagttgactaatgctcaggaggttatgttgtagtccatccacatatagaacattctatatctatngtttgactaatttccaatattttccttctccattatctttccttta

SEQ ID NO: 55071 - DNA, 376 bp, Glycine max
  unsure (1)..(376): unsure at all n locations
atatatcgagacgctcngaaatgaatgttgaagctctgaaccaactcacacgacaataactttttactcggatgtctgattgaggcccgtaatatatcgagacgnctcgaaatgaatgttgaagctctgagccaattcaaacgacaataactttntactcggatgtctgattgaggcccgtaatatatcgagacgctcgaaattgaatgtggaagctctgagccaattcaaacgacaataactttttactcggatgtctgaatgacgcccgtaatatatcgagacgctcgaaatngaatgtngaagctctgagccaattcaaacgacaataactctctactcggatgtctgattgaggcccgtaatatatcgagac

SEQ ID NO: 55072 - DNA, 418 bp, Glycine max
tttgagcgcgtcgtaatattacgggactcaatcttacatccgagtaaaacgttattgttgtttgaatggttcagagcttcaacattcaatttcgagcgtctcgatatatgacaggactcaatcagacatccgagtaaaaagttattgtcgtttgaattggctcagagcttcaacattcaatttcgagcgtctcgatatatgacaggactcaatcacacatccgagaaaacaatattggcgtttgaatttgctcagaggttcaacattcaattttgagcgtctcgttatattaacggactcaatgagacatccgagtaaaaagatattgtcgcctgaattggctcagagcttcaacattcatattcgagcgtctcgatatatgacgggactcaatcagacatccgagtaaaaagttatt

SEQ ID NO: 55073 - DNA, 114 bp, Glycine max
  unsure (1)..(114): unsure at all n locations
agtgtctttgcttgttcagagtaattactaataatcaatgtgatggcctacnggcgtgaagccagtgccactttgaactcattatttcgcgcatacagacaattgtagtctttt

SEQ ID NO: 55074 - DNA, 374 bp, Glycine max
  unsure (1)..(374): unsure at all n locations
gcttatangcgcgggtctgggannatggtacgaccatgcnctcctgatttcagcttgtgattggtacgaccatgcnctcctgatttccagctgggaaaatggcgagtggaggaacgctccggcatttacgcgacgagcataatgtaaacctttacggttttaaaagctctatagttgggcctaggctttagaagttttccttttgttaaggctntgtgtcttttgttnttgaaattataatacaaggatcnttcttcatctgttcctggtctctacccattctcattcattngcatgtntacttctntttctgaaacggcagattcgatgacgagtcccccgaaggtactaatacctgtgacccgcttatcgac

SEQ ID NO: 55075 - DNA, 114 bp, Glycine max
gcttccaacatcaagcaaacaacgtcaacagccaagcttcacagcagcaaacagagcaagcgaaaacttgctacacataaccaaatacagctttctacgtaagacacagaacaa

SEQ ID NO: 55076 - DNA, 382 bp, Glycine max
  unsure (1)..(382): unsure at all n locations
gcgtcacacctttgctctgtttgtcctncttcggaataattgtgctggccacctccagttttcatgtatattccgtttttactccaagtcccaccattatatttcccttttgcccttctatcattctatgttctataacacatatcgcacttactagtttaattttgtccctctaatgtacctcttctagatannaatataacttatgaatngataatatataacaatattttcttacaaaatatatgtgacatattttatctggtttaaaatttcattcacatttggtaaaaataattactgttatntaaataattatatacttatntatgtacatgaattttntagaaataaagttcgttgaaaatttttatcttcatat

SEQ ID NO: 55077 - DNA, 355 bp, Glycine max
  unsure (1)..(355): unsure at all n locations
aaacacggngagtgatcctctcttatgcaggttacagatgcaatgctccaacgaaggagcatcaaaacactttcacatgacaagaacaatntatacttggctaacttatacttcctttaattttggttatcattattcatactgtcttgatcaccagcctcggtttactcgggtgacttctagccttttctaggaacttatgaatcctcacctgaagtacaataacataatcagaacaaatatgtnatttataaaagaataagaaatagtagaaagggtgcacttcttatctggtatccctatatatcaattctagaatacaacaacaacaaccaagaagagtgatataagaaca

SEQ ID NO: 55078 - DNA, 320 bp, Glycine max
  unsure (1)..(320): unsure at all n locations
cacttttgggggccatctgatggtttatttctagggccacttgacccattctacactacaatctaaaaactatatatctacacaaaagtcacttcttatattgcataagagtgttttctaaaactgaagaacttgcttaatgtctaatgaccatcttgctctactgactctanatatcatcaaataacaactacaatctactataaatccttacacatgatgcatagcctataaaggtgctgggcattatgatccaaaacatactaccattatacaaccaactggtctgaaagcatttcactatactcttttatctgatt

SEQ ID NO: 55079 - DNA, 476 bp, Glycine max
  unsure (1)..(476): unsure at all n locations
agctnnggcaaatntcgaagggggtaatttgtgaaatttatagagccaacaagaaaaagcatcagctgcgaggacatgatctaaactctcccctaattggtggctntaacataaatgaaaatgagacgtgttcattaaacaattttgttgattagaaaattctaacttgtaactgacattcatggttgagtgagaccaacctatctcaaatattaatatattatttaaactagttttgtatcgtgtaacgtacagtttttttaaaatattatataagaattatttatgatatnagattgatagataaaaaataatataatgttatattggtaaaatatgaccaacatatntaaaaaaaacatagcaagtttaatttttcanaanagtatctaatagatgaacaatcactaaaaaattgaagaccattgtctcacttcgatataaaataattatataagaattaatatatttatatt

SEQ ID NO: 55080 - DNA, 349 bp, Glycine max
  unsure (1)..(349): unsure at all n locations
gcaagctatagaactatgctacattatttgatatgtctcagattaaacnctcttatgcgatcaaatatttgattcttcaatcagtgtgcatcccaccatatctattcagagaagttnttcctttaaataaatcttcatactctgagaaatcagtctctaactcttaattgaggatatgttgatcacaaaaaatataaaactatgaaaactatattcttgattgagatagcagctaacacaccagagatcttactgtattgatctcaaaagtcaaagcaagtgtttattttaaacacagaatcataatggcatcagaccaaaagtgttcaaagggtatcatattatttat

SEQ ID NO: 55081 - DNA, 300 bp, Glycine max
  unsure (1)..(300): unsure at all n locations
gggccatgcaagttgaaagccttggaggaaagaggtatgcctatgttgttgcggatgatntctccagaattacctgcgtaaactttatcagagagaaatcagacacctttgaagtattcaaagagttgagtctaagacttcaaagagagaaagactgtgtcatcaagagaatcatgagtgacccatggcagagaatttgaaaacagcaggttcactgaattctgcacatctgaaggcatcactcatgagttctctgcagccattacaccacaacagaatgggatagttgagaggaaaaac

SEQ ID NO: 55082 - DNA, 407 bp, Glycine max
  unsure (1)..(407): unsure at all n locations
gaccttaagaggggtgcaagtggcaggttcttgaacactgctgcttatggccactttggaagagatgacccagacttcacatgggaggtggtcaagcctctaaagtgggaataatgccatgaataaagctgattgccaagaaactatgtgtgatcttatatgctntcatacctaagatccgngatatgatttgccttagcttttgtatctttataaataaataaaacatatatatgtcgagttgagtatatgaacatacaaaggaagctgcatagcagcatcaatgtactattggaagttaatgtttgagatatatccgctaccatcgctatccattatccattatgtgtcctctcaatngctgagagacttagagaatcttgagtctcctcattaactaattggac

SEQ ID NO: 55083 - DNA, 246 bp, Glycine max
  unsure (1)..(246): unsure at all n locations
aatttacaatctctaaatatatattaactatattagttctatcttataaaataaaatatctattttagattttcttaagaatttgttctaatgagtcaactagtttgttacgtttgttgtgacacatgtaggttggtttccaacgatcatatttccaatggtcataatttcttgttgcnaaaatgcctatatatatctctgtcctcttttctaaaaatggtacagagcaatgtctagtttcttcct

SEQ ID NO: 55084 - DNA, 448 bp, Glycine max
  unsure (1)..(448): unsure at all n locations
cgcttcatcctcagatccctcttgttggactaggcttatattagtctttcctcctaggcttngactaacttaaactaagattcatccttagatccctcttggtggactagacatagcttaaatagcttatgaaagtttagactaatttagcctaagctgtgtcctcaaatccctcttgttggactagacttagactaaacaacattattgtaacagcatattttaaaaccaaaacttaatcctcagatccctcttgtaagactaagtttcaattctgcttcattctagttctaaggcaacaatacatttcccaacgctaaaatcacctaactaggcacacanatggttgatcagaccaagagcatacaaaatttaagcactaaaagaagcattgaacacaagaaacacaatcaattagatattaaaataagtacattcagttttcatt

SEQ ID NO: 55085 - DNA, 362 bp, Glycine max
  unsure (1)..(362): unsure at all n locations
gctatcctatggctggcctcaacttacccccgtgcaccccgtgtgattatttaagcccctactntcgaggggcaactcccaccttatgacgactatcccgggcaagatgatgaggaaggagatacccatcttggccccctgctccacctcaaagatccgttcctccatgaactaccccaaccgaacatagtccgccatatcccggcttcacccacacccgtagaagaatcttgttcctttgtggaagataaagggaagatggatgcgctcgaagagaggttattagcagtcgagggccttggcaattacccattctcggattggcggattatgtctcgtgccaacatcgtcatccctccaag

SEQ ID NO: 55086 - DNA, 320 bp, Glycine max
  unsure (1)..(320): unsure at all n locations
catgcagctgctcgggaactttatggggctggacttgagcacttttaggttcttcaaaggagannattcaccatggagatgcaccggaacgcaaaggagaagaggacaatgtatgcgccatccactanggaataagccatggaagaaggagcttcaccaccaagatgagccttggataagaagctcggaaggatgcttccttggacgaaaagaaagacggagagaactagagagaggcgagctcgaaattgaaggaatataagagggtgagaagtagaactttgaagtgtgtctcataagactttcattcatcacagtta

SEQ ID NO: 55087 - DNA, 361 bp, Glycine max
  unsure (1)..(361): unsure at all n locations
atctttgttgttcgagttatatgctctctgttagtgcttccatatctcgtgtttgagatctgtgctttttgatgaaattatacctaagctattgctttcaattcataaatatttaactntgacttaacataaagaggcatatgactgaaacaaggatgcgancatcggaattctgatctgtatggattcctctagccacgttccattcataggtctgggcaatcgcagcttgatactgaacgttacataaagagttggatgcacagttcaaaatgcgatgtccaccttggagcctacctaaatgcgtaagtgacacaaaataactgaatgtaagtaatgtctactaatatactaacacata

SEQ ID NO: 55088 - DNA, 391 bp, Glycine max
  unsure (1)..(391): unsure at all n locations
tatttgatgaattaagtgatagtgtttcaacccctcgaaaattggcaaacaaacaatttatatatagatntctaatactaacatttgaattaaatgatttggacatgtgtatggtgatattcctaaaacattaatatgacacctagtacttgtctttgtataacttccttgcaattgtgtgaactgggacttcaattataaaaaaagaccttgcttcctcgcacttaccaatctcacatgcctataatgaaatatcaaaattattaatcccaatcgaaataacttcctttgattacataatcaacttcttgaatttttgccatatctcgattattttttgtaatggatcttctactaatacaggacagtgtcatggtatacatcccattat

SEQ ID NO: 55089 - DNA, 364 bp, Glycine max
  unsure (1)..(364): unsure at all n locations
agctgtggttctctgagtatataggatggaccacttccaacaaaacaattgatgcaatcctacctcccaagatcatcggatagaagactccaagaagattgtgccaaagatgcaagagaaggccctagggttctcatgagccttagggtagaattctaagcacatgggccaaggttgggtccaatttatcttgtacatattagactaggatgtcattatatttggtccttgtatatagggctccatattgtaggtagggtatcctagaaatataggatatctcagcccctgtattttacggcacctagactaggtttcgtattatgggtagtnttgtaattcacatgcactaagcggatatttg

SEQ ID NO: 55090 - DNA, 143 bp, Glycine max
  unsure (1)..(143): unsure at all n locations
ttatcaagtaaagggatcattttaaggtccaacgccttanaatgatcacctttcaagtaaaaagaatcgcttgattcacgcttaagaaagaactacgtaggtttgatttcctcatcgatggagggtacgtatgagcaaaagcc

SEQ ID NO: 55091 - DNA, 416 bp, Glycine max
  unsure (1)..(416): unsure at all n locations
atcatctgcaggcatgctgccgcatgcaagctntgatgcaacatatggagaggttaatgaaacttctagatgatgcgctccatgagaggttggatcaaatggagaatagagatcataatgaagaagaaaggaggagaagagggaatgatggtgttcctagacaaaaccgaattgatggtattaaactcaacattcctccctttaaaagaaagaatgatccggaggcctacttgcagtgggagatgaaaatagagcatggtttctcatgcaacaactatgaggaggaccaaaaggtgaagctggctgccacggagttttccgactatgctcttgtgtggtggaacaagctacaaaaggagagagcaagaaatgaagagccaatggttgatacatggacggagatgaaaaagatcatg

SEQ ID NO: 55092 - DNA, 321 bp, Glycine max
  unsure (1)..(321): unsure at all n locations
ttggattaacaaaacattctgatatataactcttatntaaggataaaaaaaacatcaatatctttttaagtatttcttattgttgggtcgaccatccgtgtacttgacacaatcacaaggagaaaaagtcatggaaggcctcacctttatgccaattgtgacaatttagcccttatgcattgatagcttctctagcttatatatcatttggccttcaagacccgaanagaccacattattntcaaaatacacgagttcccatctttcatattttggaagatcctatgttgtaccanactaaacctaagagcatatatctat

SEQ ID NO: 55093 - DNA, 385 bp, Glycine max
  unsure (1)..(385): unsure at all n locations
ttttatcncggattcttgctaaacaaataaatatatctattaatatttctctaataatatgggatacacttattattattagtattattattattattattattattaatattcgaatgaaatataatcttgatattggactaacattaaattctatttacacaatcacgaaatttcgaataattaatgataatataaaggtatttcatatttgactagatcaaaaagttttacacatttgcttactgtatttatttagcctctagttttaaaagataataagcagctctttatttcttttctatttcatttaataaaaaanatcaattttatttattttgtacaatggctgaaatactactaattttgctggttctcttaccat

SEQ ID NO: 55094 - DNA, 380 bp, Glycine max
  unsure (1)..(380): unsure at all n locations
catgcaagcttctcccncaattntctataaattatgggggagatttgaagtgaanaagggttcagccccttaggcacttctctctctttcgaatntgcttggaaaaattgttttcgtgaagaaaatctaagccgaggcgcttccgaaacgtttccgtaaggaatttcgcgaaggtttcgaccgttcttcgacgttcttcattcattcttcatcgttcttcgatcttcaacgggtaagtacctcgaaccaagcttttcgattcattctatgtacccgtggtgatccacattgtgtttcgtgtatttttattctcgtttcatttactttntataccccctttttgacgtgcttaaagccatttatntaaagtcattttcgct

SEQ ID NO: 55095 - DNA, 184 bp, Glycine max
  unsure (1)..(184): unsure at all n locations
ttcatactgaaccatatcagccacataatatngataatatcagcagcaagttcatcatttgctcccataagaagaggtcacaaccattccttgagtgagacaagatggttactctgggttcatatcaagtacttagaggtaaaccacatctgctgcagactggatccacatcaacattgcagta

SEQ ID NO: 55096 - DNA, 468 bp, Glycine max
  unsure (1)..(468): unsure at all n locations
agctntattacactcacatagtagtttacaccattcgtgccaccaaaaccncaaaaaccacatcaaaaccatcgaaatgaacatttntacgaactttcaatagtgctcatggagggaaaatgaaaacggaaaacaagagggaaaagataagggttccttatcattgaactagccctcaaactcaactaaagcacaactacaaagtcccttgagtagcggaattcaaggtctcaagctctctaatgaaaggttatcttggagagagagaagaaagtgaaatgatagtattttaagtggtggttcagacttgaactcttttactttgagtntatgactcttcctattccttctaatcacacctcttcacttgctaaactcaaccgtcccatccctattactcaagacccactcatctcgatggaacaaccagcctcatcgctacggtatcattactctanatcgcataaa

SEQ ID NO: 55097 - DNA, 374 bp, Glycine max
  unsure (1)..(374): unsure at all n locations
atctacttgataattcaatggtgagcataaccctagccgacgttcatcaacctccatttgtgcgagaatacgactcgaacgcaacgtgtgcttgtgacggagaagcccccgagcgttccattgagcatggtagggctctgaagcgtaaggtgcaaggtctaattgatgcgggctggctgataattgaggagaattgcgtgtaaatcctgacattgacaagagatgccacacatggggcaattntgaaagctgctgttaggtgtccctaatgactcatcacggtttccaagtttatgccattattgtaaaccacagctacaatgttaaatgaaatggataagagtgatatcnttgtccctcatcctctcacaaac

SEQ ID NO: 55098 - DNA, 325 bp, Glycine max
  unsure (1)..(325): unsure at all n locations
tcatcttgtctgtgatgaatgtagnnctgagaaatctaggatntctgcttcttctggtttgtcgagacanagagagataaattcaacagttactcgcatgaattntacttttcagttggggaaatacccagggtttataatttttcatggcagatcgaggagacgagattatatggatatcatgggcgtaattaattctaaattggcagcttggaaaggtaggcctctaaataagccgggtagaatggttatggcaaatggtgtgatgtcttttattccttcttggtatgcgggtggatnggtatcctgaatatttctgtgatgc

SEQ ID NO: 55099 - DNA, 394 bp, Glycine max
  unsure (1)..(394): unsure at all n locations
agctntctattcanacctatatatccaattatgctctttaatttatgaagnttatgggattaagatggtcattgaccaatccctattctatgatttaacccaattgccaagtgaagatgtaccatttgaaggtacattgattgatgattggaagtttgatttttctgtgcatgatgcccgccggttggtttgcaccaaccaagcggatatgaccggaatgcttcttgcccgctcattggctttngaaagctgcatacttcattatgtaattgttcgcatcttgctttcaagatcttcaaaccttgcacaggtttctgaagaagatcttattgttatgtgggcttatcataaacgcctacaaattgagtggcacatcttgtagatatcgatgcat

SEQ ID NO: 55100 - DNA, 426 bp, Glycine max
  unsure (1)..(426): unsure at all n locations
ctatggaggctggatctttgagcttcaatgtatgtccttcaatggtgatttccaccatggagatgcagcagaagacaaaggagaagaggtgagaggaggcgccatccactanggaattagccatggaagaaggagcttcgccaccaagatgagccctggataagaagcttggagagaatgcttcaatggaggaaaagaaagagggagagaaagagagaggggggagcacgaaattgaatgaatataagagggagagaagtggaactttgaagtatgtctcacaagactctcattcatcanagttacaactagtgttacacatgccttctattatagactangtagcttccttgagaagctttcttgagaaaacttncttgagaagctagaacttagctacacacacccctctcataactaagctca

SEQ ID NO: 55101 - DNA, 92 bp, Glycine max
ctcgtcgacgcggagtttccgactatgctcttgtgtggtgaaacatgtctcacaatgttagagtctgaaatgaagagccaatggttgataca

SEQ ID NO: 55102 - DNA, 457 bp, Glycine max
  unsure (1)..(457): unsure at all n locations
agctngagatgaggaagtgttgaagggtgaaactttctgcttttattgttgaccacagagtggtacctggagatatgtcgcggnggtcaagagaccttgnggacgtcaggtggggtgctattgcccaaaaccaagcttgaccaatcccgacccaacccgggcatagtcggtcagtgagaacctgcgatgtacctaagcaggcgagctcatggcaagtcacanataaagggaaaacacgaccacanagcaaggaggcttgtggtggctggccagctgtgaattttgtgtaatatgtggattgtggcctctggtaatcgattaccaaaggtgagtaatcgattacaaggcttaaaattgaggacaggaggctaagatggtctctggtaatcgattaccaaggggtggtaatcgataccaggcttgaaaacgaagtcaggaaacttagggagcctctagt

SEQ ID NO: 55103 - DNA, 370 bp, Glycine max
  unsure (1)..(370): unsure at all n locations
tatctcttctaacataatctttctttctcgacccatactgaccagtcatctcacaaccaattatcacaaatgaagtccttcttctcataccagtgtttgtgtctgacctcataatcaccgccactgcaaaacatcatctcaggtagcaaacatcttgatgcaatcctccctaggaagggaccagtcactagagctatgagcacganggcttcaagaagatngtgctagagtagctgaagaaggccctanggttctcatgaacattanggtagatttctaagcccatgggccaagggtgggtccaattatctntgtacatattagactangatgtcattatatntggtccttgtatttagggctccataat

SEQ ID NO: 55104 - DNA, 290 bp, Glycine max
  unsure (1)..(290): unsure at all n locations
gctctcctctttcctataaataggggaggagggaagaacanattctttcaaccctcctggtatctgaggatcacttgaaattagtgaaaaaaatcatttccgtgaagaaaatccaagtcgaggtgcttncataacgcgtccgaagacgttccgtgggtgatttcgtgaagaatttccgccgtctttcgatacgtcttcgtcgttcttcggtcttcaacccggtaagttcccgaaatcgaacttttcaatgattctatgtacccttggtggtccccacttgtttcgcgtac

SEQ ID NO: 55105 - DNA, 455 bp, Glycine max
  unsure (1)..(455): unsure at all n locations
atcctatctccgacagccaatgggtgagtcccgtctcatgtagtcccgaaaagactggcctcacagtgatcagaaatgagaaggaggagctgattcctactcgggtgcagaacagttggagagtctgcattgactataggaggctgaaccaggttaccaaaaaggaccattttcccctgccattcattgaccagatgcttgaacgcctggcaggtaaatcccactactgtttcttgatggttctctggtatatgcaaatactatgctctgggacaggaaagaccacattcacctgcccttggactttgctatanaggatgctttcggctgtcaatgccctggaccttcaacgggctgatagattttagtgcttttagaaatgcataagtgtatggtgatcatgattggtctcttgaggtgttgaagttgaaagttgataatgctgaactactgtt

SEQ ID NO: 55106 - DNA, 464 bp, Glycine max
  unsure (1)..(464): unsure at all n locations
gcacctgcggcatgcaacctngagctcanntgtgctgccccatagagcccatctgaacttgtttctaccctatntttcttnttgggccctctntgtttcttgctctaacgcttcagctgtggtcatgttggcatgccttagctcatcacactccttcctgatcctagtgactgccgtctttagcttttctttgaccactcacactctttcaagctctgccttcaaggcttgcacttcttcacttttcttangaacttcagcttcttccccacttggactnttcagctttgggagccaagttatctcttgcgtcctagccttcaaccacttatgatagccaccgatgatgccattgctgcttcccctaagctccctatctcttctttccaccacattccatgctttntgtactctctgaatattgccttcattgaaaccccatgtgatgaaaggcgcgataatct

SEQ ID NO: 55107 - DNA, 191 bp, Glycine max
  unsure (1)..(191): unsure at all n locations
accttttccatagtagaatactggtaatgtgtctactatcattgtcatcgnnttttcgtcattgaggtgccactntgagctgccaggttctccacctttgggtgtattctntgaaagaattgtgcccnccctnttgcacttgttctgtagttgcatcctatccgaagacattatactgacactgcctaacg

SEQ ID NO: 55108 - DNA, 401 bp, Glycine max
  unsure (1)..(401): unsure at all n locations
cttaattcttcctgacatcatcaaaatcttcatgatttattgaggccacaaggtccaacaggaaattctcatcctgngtcaaggattatggtgagttgggattttggctcaaggcttgtaaaatggctggacatgaggtatgtcagggtgttggttcggccagcggtttatggataaaggggatgtcccacattacttccacgacacacatgcaacaatgatgatttggaaattntatgcaaaactggtcatgcatgcacctatgtggacacttaagcatcaagtttctatggtcatgtgacactaaggatcangatntattcttcctattcaagtcaacccaatggttgcaaaacatgttcttttatcaattcatgcattcatccgagttcattatgggc

SEQ ID NO: 55109 - DNA, 316 bp, Glycine max
  unsure (1)..(316): unsure at all n locations
aatagtcctctcacgaggtggagggtgagccatgttctcagtataaaaattagtagtggaatgctcanaatcagaatattcagaatcaccctcaacagaatgctcagaatgctcaaaatgcacagaatgaccaagatgcacactatgcctaactaatctatgaaaggttctatctatntcaggatcaaagggttgtaaatcacctggattgcccctaggcatgcactatatgcagcanataatgtgtttcccaacagctcctaacaagggggtaaaactacaactatactcaaatgatatcaaaataagctgaaat

SEQ ID NO: 55110 - DNA, 381 bp, Glycine max
  unsure (1)..(381): unsure at all n locations
gcttaactggaagacctctcgtgttctntcacttgctgattaacaagatctgcaccacaagttaacaaagcttgtgtcaatgttggacgaggcaagacatatttatgtagattcccatacttttgtaactccgatttcttcaaacagttgaccctgactatatatctataaaagaaaatgtagattttctcagagttatgagtcgctgcaaccttccccaatttgaatactataactccatctcacctgtgttgatgttcatgtgtgtcagcattggttaaataaatgcgtgctaaactatgataacggaaattgactntcttcccctgatagagcataattatggctgctctatgctgtatattagtcatcattttaaca

SEQ ID NO: 55111 - DNA, 302 bp, Glycine max
  unsure (1)..(302): unsure at all n locations
atatctttactcaggtgtctcggcctaaccttctcatccctcaattcttaattataccaaccacatatgttatatgcatctctgcaagctgctacaataaaatattcaactctatgaagcatgcatcataacataatcttatgtctggaggaggaggtgaggagctgtttcaatacatacatagaaatcagtttatgaacttgtctgcccagaacagaatatatcagataagagagaatctttattttctgatatcaatatattgattcgacatttattaatgtatcaactngcggtactat

SEQ ID NO: 55112 - DNA, 261 bp, Glycine max
  unsure (1)..(261): unsure at all n locations
agtacctgacatctcaaacaaacaaatcaaacgtaacaagacaattatagttgctggttgaatacctcacccactcaagtgtatcacacaattatggcttttctctaatgaaacactcttgccttttaccactctaattccccttgagttcttacgcaattcaagagattatggccacaacaaagaacanatcaccaatatgtgtaagggaaggctagacaaggaaaaggttaaccaagaaaaaggctaacaatgttttta

SEQ ID NO: 55113 - DNA, 333 bp, Glycine max
  unsure (1)..(333): unsure at all n locations
gatgatgacaaaaagcccaatagaatgatttcaagattgagtcaacaattcaagaatcaagagaagttaattattacaagaatgagtcaacaattcaagaatcaagagaagtttgatttcaagattcaagaaaagatgaattcaagtttcaagagaagaaatcaagaagacttcacanagggagtattgaaaagattttcaaaaacaaacatgcacagtttgtttttaaagagttttctcaaatttctaagtaccagagttttactcttggtatcgtaccagtttctgaatcgattacctgacaagttgtttcaaagcttcactgaattacac

SEQ ID NO: 55114 - DNA, 204 bp, Glycine max
  unsure (1)..(204): unsure at all n locations
gagggacactatatcactgcttaagattgtatcttattctggcatacaccatacttcatccatatgtacgacttacttgttcngtaagtaataattacatgctaataattgttaattgtggcaggcataggaggatataattgcagcactaagaaatgaagtatcattaggaagtaacacacttgttgaaacaccatagctggc

SEQ ID NO: 55115 - DNA, 351 bp, Glycine max
  unsure (1)..(351): unsure at all n locations
tggattcaccaacataggccttacagtatataagggctggaaaatttgaagaaattatagacctatntctttgctatgatgaatagccacattatcagcaagagcaaatgcaaataattgcagatcttgctacaagctccacccagttccttcctctggcctcactcccgcctacgctgacaacccattgcattttccttgatgcactcaatgtgttcgacgaaatgctccaaccaaatgtggcatctctaaatgcttcactttctggcttttcgcgaaacgggcatcacggagaagctctccgggtgttccaactcggtcactattgcgtgcatgctcgacgttcctcgt

SEQ ID NO: 55116 - DNA, 448 bp, Glycine max
  unsure (1)..(448): unsure at all n locations
agcttatgctgcatatatttacaatagacctcctcatcctcatcagcaaaatcaaccacagcagaacaattatgacctttccagcaacagatacaaccctggatggaggaatcaccctaacctcagatggtccagccctcagcaacaacaatagcagcctgctccttccttccaaaatgctggtggcccaagcagaccatacattcctncaccaatccaacaacagcaacaaccccagaaacagccaacagttgaggcccctccacaaccttccctcgaagaactngtgaggcanatgactatgcagaacatgcagtttcagcaagagaccagagcctncattcagagcttaaccaatcagatgggacaattagctacccaatggaatcaacaacagtcccagaattctgacaagctgccttctcatgctggtcaaaatcccaaaaat

SEQ ID NO: 55117 - DNA, 296 bp, Glycine max
  unsure (1)..(296): unsure at all n locations
cgtaaagtatgaatcacctttattctntcttctatggaccgtatcttntcggtgatatccatgtctcctgttgagttgatactgtgagcagaacaaatgcatgtttcttcaattgacaaatgaactngtataacataatgtaattacttggtaaaaactcattttttagtcatatattgataaaaaaatggagacaacaaggttagtgttggcgtaaaggttttgtgcattgattttcttcccgaacttttggcttctttggaagcattctcctgtccccttacagctatagcttt

SEQ ID NO: 55118 - DNA, 320 bp, Glycine max
  unsure (1)..(320): unsure at all n locations
cccaaacccaatcacctggntcaagcacgactttctttctacttttgtttgcttgccttgcataactcgcatttttcttttcaatttgagccttcacttgctcatgcagcttcttcacatactcagctntagcctgtgcgtccttatgcttaaacatagtaatgttaggcataggcaacaaatcaagaggagtcanaggattaaatccatacactatctcaaatggtgaacaattagttgtgctatggacagtccgattataagcaaactcaacatgaggcaaacatgcttcccaagatttaagatttttctttaaaaca

SEQ ID NO: 55119 - DNA, 297 bp, Glycine max
  unsure (1)..(297): unsure at all n locations
tgcaacatactggtgttagctcaacctcaatagaaagacactgaggcttagtgcacaggcgcacttagccttattacaaaggtgaagaaacataacccaagtgacgcttagctcagcaagcatggcttagcgcctgaactactctaagtatctcaatatactattgacgcttagcgcacangcgcgcttagcgtcagcatcgttttggttcaacagccacgatgaacgcacttagcgcgacatggtccgcttagcgttgatcatcataaatctaaaaatttaacagttgcgatgaac

SEQ ID NO: 55120 - DNA, 472 bp, Glycine max
  unsure (1)..(472): unsure at all n locations
agctntacagcaaatgccactctactccaaattcttgaaggatatgttaacaaggaaacataagtacattcaccaggaaaacattgttgtggaaggaaattgtagcactgtgattcaaaagatccttccagctaagcataaagaccctgngagtgcaactattccttgtttaattggagaagtcattgtgggaaaggctcttattgacttaggagccagtataaatttaatgccactctccatgtgtagaaggttaggagagttggagataatgcccactaaaatgactntacaactggctgactgctctattaccagaccatatggagtaattaaagatgtgctggtcagagtgaaacatnttatcttcccgggagacttaatggtaatggatatctgtgaagatactgacattcctataatattgggaaggccattcatgttaactgctagnttgcatagtgacatgggt

SEQ ID NO: 55121 - DNA, 374 bp, Glycine max
  unsure (1)..(374): unsure at all n locations
gactcaagtcatgaatcatgattcanacanngttcaagaatcaaagagtcgttcaatcaagaataaagattcaagtaaagattcaagaaaagactcaagatatgcaagaacttcaagaaaagtatcaagataactgggacctttctctctctagaacttcctaaacatgcaaaagctccaagccagggccagattctcgtgcatgcaaaggcttcttctagaaaaacttcaaactccctttgcaaatttgatttcaggcttaaataggtggccttgttcgtgcttgtgggcttagcgcatgtatggaccgcttagcgcacgttagtgaattatggctcagtgtgcttctctcgcttagtggatgagctgaagcg

SEQ ID NO: 55122 - DNA, 116 bp, Glycine max
agcttatccttatggcttgcctccggacttcaccctccgtgccaccctggaagaattaagccaagcccctactttcgaggggcaacttccaccttatgaacaatattccgagccag

SEQ ID NO: 55123 - DNA, 105 bp, Glycine max
tatattaaccacatctataatttaccacttttagatagattattcttttaatgatttaggctattttgactgtagggtgtcctttatgtatttagctttatataa

SEQ ID NO: 55124 - DNA, 400 bp, Glycine max
  unsure (1)..(400): unsure at all n locations
agctngaaggcanactggatgcattggttaacctgttaacccagctggccttgaatcagaaatctgtacttgtcacaagggtttgtggtttgtgctcctctgctgaccaccatacagacctttgcccttccatgcagcaacctggagcaattgagcagccgaaagcttatgctgcttatatttacaataaaaactcctcacctcagccagcaaatcaaccacagcagaacaattatgacctcttcagcaacagatataaccctgtatggaggaatcaccctaacctcagatggtccagccctcagcaacaacaacagcagcctgctccttccttcgaaaatgctggtggcccaagcagaccatacattcctncaccaatccaacaacagcaacaacccca

SEQ ID NO: 55125 - DNA, 425 bp, Glycine max
  unsure (1)..(425): unsure at all n locations
gcaagcttatatgagctntcggttcattgctactagctataataatattagcaggcttctcttccaatatagcaaggtcaagatccaaaacaccgagatgaaattggacttgctcattccagtcagagaagttgagcccattaaaaattggtacagatgatacatgagaattcaatgagttaggaacaggtactgcataataaaacttcacataagcatttttgtacatgaaacacaagtcatacatataatttactcaaataaaattcaatgtatattgatgttctcctttgggtgacacaccaacacacaacatacaaacatgatggatgctaataaaatttaacattatttgacaataaaatatgaaccaattagtagtatctatttcctttgggtatataaataaaactaatgatacacac

SEQ ID NO: 55126 - DNA, 162 bp, Glycine max
  unsure (1)..(162): unsure at all n locations
gagaaatgaattctggaatcatggaggtgggctacgggacaaattaaatttgggaggaaggtggttgggggagaggacacncttctacaagaaccctatgttgacagtattctaatcacaacatcaatgtttcaacactgggggccttcaagaagctgggtg

SEQ ID NO: 55127 - DNA, 460 bp, Glycine max
  unsure (1)..(460): unsure at all n locations
tgcctgatgcaagcttgtctcccctcttatcacactaattcctatatagncgaatgcaccagatagacaccactagaatcacatagccatagccatgaatcttcctcgggcctctttaaagatatatgactaggcatctcactaagttcctccctcaaggactcatctcacaaaaaacaattccttcttcatataatgatccacttccactcatcacccctccactctcctatataagttaatgtatccattttttgtgaagacatgacaaataatctatgaaaaaaaaaagcatgattattgtccccaaccatatgtcttgccaaaaccttaccctcccaccactaccaattctccacctcattaataagtcaaaccacttcaacgagttttgcccatatggatgccttctttgaggagttagcatccacctagttccctcaaccccaatttggactct

SEQ ID NO: 55128 - DNA, 291 bp, Glycine max
  unsure (1)..(291): unsure at all n locations
acagcagagctccggcgttaagcctgatacatatcaacttactaaaaatgagggtggtagatcgacgatgcggttggcaagcctttcanacttgtgtaagaactcattgactaagcctctntgggtgagtttgaatagtggcgcccttggatcatcatanaacgtgggagcgaaacgagtctccagcgcatggagtagtgagggccatgaagtgatcagaccgtttcgatgcattcactgaaactagcttattgcctgaccatccatgtaataagaggccacggcaatgca

SEQ ID NO: 55129 - DNA, 455 bp, Glycine max
  unsure (1)..(455): unsure at all n locations
ctgcaagcntttaactgaacacaaccagattctntacctctcatgtatgaaattgcttctcgnctccgatcatgcaagtcatgatttcagttgttgataaaatttcataaataatggacggntcaaattcatcaaacatgacctctcctatcacaagcaaaaaggagaggatccaaatccattttttagtccttattaggattagacaagttctactaactaaaaatatgttagctaagtttgtaactttctatttttggtagcttagttgctaactttttatttttggttagttacaactaattctagtttaacttgtaaacattcagtttgatgtatgagaagatcattccagaaattgagtttttcctccaatttctggtagagtttctttcatggtatcatcttgtacacgaaaactatcttcgtcataaattcttctcttttctctatct

SEQ ID NO: 55130 - DNA, 319 bp, Glycine max
  unsure (1)..(319): unsure at all n locations
gagatcaagacaacgcattcaacatggattcttgtgatgataccactaacaaaagcncanaacccatcaaagagctcatcaagctacaattgggacctaaacccgaacaatgcacacaactcagtagagacctcatcagtcatgagtacagacatatagctgaagtcctacgaatgaacacatnattatttggatggaaaccatctgatatgctagatatccatcccaacatcatatgccacanactggccatctctccttaggctaaaccagtctcagaagaaaagaatgatgggagaaaaagtgacaaaggtggtca

SEQ ID NO: 55131 - DNA, 390 bp, Glycine max
  unsure (1)..(390): unsure at all n locations
agcttaataaagtccttaggatccactttgtgtatatatgattgnctggaatgagatggagtgaaaaattgggaattgactactagttgtttggatgaattgactttntcctgaaacacttatgtgcttaagagaaacactggtttgtgaggaaaaaagcttagtcaatcttccttcatgcttgtcatgcttgctaactgattttatctctttagctcaattgcacatgcttctatcttgaaatgtgacaaatgcctaattgngggagatattgattgataatgtgcaattatcttagttactgtagttgatacattctgaacaggccattaacctaacttagcatagttggtttcttttgcttgangacaagcaaagctttaaatttgg

SEQ ID NO: 55132 - DNA, 337 bp, Glycine max
  unsure (1)..(337): unsure at all n locations
acgtgcagatattcatatgttatttatatgtatatgcgctgcagttctatataagaccccatgaaactggttgaagataaagaaacatatcatatacaaattgactaccatatagaattagattcgtntaaagtaacaaaaaaagagcaatataatttgaagttgcgatttgcagccttctccttcttttagaaaaaaaaaagaaattgaaaatgacgcatgttgaacccttaatgtgtgacagaatcactttatggtcaaggaaagcgtcgcactagtctgcaaggatggtgatctcttctatcatatcattataacgaacatacccataataagt

SEQ ID NO: 55133 - DNA, 426 bp, Glycine max
  unsure (1)..(426): unsure at all n locations
gcttagtttctcttttcccatgccataattgngtttgatataaganataaaaggaatgtagatgctgtatttaatgctgaaacccaacaaggctgngtttgtacactcaaacagaatatgctcaattttcaacccaatatggaggctgtattgatggaaatcatgtcctttngaacttcctgcataaaagttagcaagaaagtttatctgagtatccttgatagcaatatgtgaaagctgcaaaaggatatttgcgcaaaacagttaggaatctataatcaacttcatgcacatatcttctagtaacaagtaaagaatacagaccgatgattaggtttgtagcatttatggaaggtaaaatatttgaagaagagatggtaacaaatatgcaatccatgacaangtttgattcttttgaaaagaact

SEQ ID NO: 55134 - DNA, 263 bp, Glycine max
tgtacaaattccacaaagtaatatcttaactcgaaggaggaggcaggggagaaaggagatatgcgcatattgacaccattatgacaaagttgtctcctatgctagttattggacattattcataattataatattgaatggtgtggttggactctataacaaactaccaattccttatacttgaacagctacttgccgtgtaaactatcatgcattgccatcttttacgcgaggtgcattaatagacatatacaattcacgtt

SEQ ID NO: 55135 - DNA, 350 bp, Glycine max
  unsure (1)..(350): unsure at all n locations
caacaaccttctataggaatcttctggagggcccaagtgggcctggttgctatttgcacccctatttttactaaatacaccccctgcccttttttggtgattcttntttcgtaaagttacggaaacttacgaatttcgtaacgatacttgttttctttccgtaatgttacggaaccttgcggattacataatcatcccctttttgacttacggaatgttacggaacctcactatttgtgcaacgatgcttccttttgattttcggtgtgtcacggaaccttacggattgtgcatcaatattttcttttgatttccggcacgacacggaatttcacaaattgtctaatgat

SEQ ID NO: 55136 - DNA, 341 bp, Glycine max
  unsure (1)..(341): unsure at all n locations
gcggnttctaatgactcctctgcggcttccacataaggcatagaggatgggcagctcaccaagatgtcttcctcgcttgatacgatgaccagatgcccttccactacgaatttcaactattggtggagtgttgagggaacaactcctactgagtggatccacgggcgcnccaacagacagctgtnggggtgttaatatccattatttggaaagaacttgacaggtgtgagggcctatctatactgtgagatcgatctcttccctaacctctctgcgggtgccgtcgaaggcacgaaccaccattgaactcggttntaagtgggaagcattgaatggtaatt

SEQ ID NO: 55137 - DNA, 436 bp, Glycine max
  unsure (1)..(436): unsure at all n locations
gctgactctagncttacaagagggatctgcggacgaagctcagtttaagttagtctaaacctaagagggtcgtctaaattgagcctagtccaacaagagggatctgaggatgaagcttggattgattcggtctgacgagggatcaagggttataattcaggctacagcataagacacaaaagcatgattgattagagaaacatatttatatacatcagcttgtttgttagaaagacccaacatttctaccttctgctgtcaattntacttattttcattttactatttttagcatagagtttagtttaaattctgtttacaatcatcaatcatttatgtttcttcaccaatgcctcatttctgaagntaactctatctaacattagttccttgtgttcgatactcggatttcatccgtttatatttaaatacttaa

SEQ ID NO: 55138 - DNA, 329 bp, Glycine max
  unsure (1)..(329): unsure at all n locations
ctcaaagaagcttttcaaggaagctacctagtctataaatagaagcatgtgtaacacttngtgtaactttgatgaatgagagtcttgtgagacacaactcanagttcaacttctctctctttttcttccttcaatttcgtgctcccccctctctctntctatctctcattctttttcttcatttgaagcatcctctccaagcttcttatccaaggctcatcttggtggtgaagctccttcttccatggcttattccctagtggatggcgcctcctctcacctcttctcctttgtcttccgctgcatctccatggtggaaaatcaccatt

SEQ ID NO: 55139 - DNA, 272 bp, Glycine max
  unsure (1)..(272): unsure at all n locations
tcggaagaaaacaaaaaaagagaaaaggaaaattcccaatcaaagagtgggagaangtaaaaaaaagaaagtccccgatcaaagatcgaaagaaaacataagaaacatgcagaaaggtctttggaccagacaatatctgaacaatacagaattgtcaccaaataaacaagatnaaaggaaaccacgacctanagtggccctctccctttngatgccaaccaaaatcctttgcgctagcgactntctcgccccgcactaaacaaaaacagaaa

SEQ ID NO: 55140 - DNA, 290 bp, Glycine max
cattggattgacaaacatgaatgagagagttctcggagcgacgcatagaggaactgacatagagctcacgataggtgaagggagtttattataatttacgggctttgataccatagttagtgatgtagctccatgtggagcttgtaggccttgaatcttcttcatcaatagagtcctttgcttcttgaaggtcaatggcagcggaatggagacggaaaaagaccattggagatgccacttcaagaaaatatgagtaacaacaagctcccaccataagaagctatgataca

SEQ ID NO: 55141 - DNA, 355 bp, Glycine max
  unsure (1)..(355): unsure at all n locations
taacaatgctacaggcggtataggacaacagtctattatataaactngtngtacatgcaaaaaaatatttactcaatcgtacacaactgattgataaatataaaaaaaacactttatatctacaatgtacctgaacgaaatgatggttatacacatgatcgatacannatatgcgatgcatngaagaatctggcggtggctgagttctaagaggaaagaacgtcatgcctttgtgttgagacaaggatacaaaaagtacattataccttgatgcaatgacatatcccatgtcggttatatccatccacttatccatagtcacctgaatgaaacaaatatacacgtcanagttaat

SEQ ID NO: 55142 - DNA, 377 bp, Glycine max
  unsure (1)..(377): unsure at all n locations
catgcaacgcttcttgctcttgctctncaaaatngcaaaagcttatggaattttgtttctactaccatcttgtccaatggaattcaacaaagtaccatgatactctctagtttaaaatgtcccatctacttgcacaattgacttgcaatattgaaagccttcaatgcatggcttaaaaacccaaaatacacaattaagaatcaccttagaagactcatgctccattgaagtggnttgtttgtatctaacaattgtacttggtacaaagtgttgagcaactgtcatccatacagacagataactgtgtgattcttcccaacttccaaatgcaatttcaagtgctttctatttagttgttgtcgcaacctacccttcgg

SEQ ID NO: 55143 - DNA, 361 bp, Glycine max
  unsure (1)..(361): unsure at all n locations
tctcttttggtctacttatatccattaaatcattcttaactccacacaacttttgaccatccaaagccaagctagaaaaattgaagctttattaaccaattatctgcatcaatgctccttttcgagttgtctcgagtgaaagacttgatttttatttttttggtaaatgaagtanaagaattggtatgtcttaacataggtctagactaatgcgttaactgaaatcaactgtagtaacctaaatatgctntctgaaattctttgttcttcctattaacanaacattgcatatatttcccatgtggctcaataaaaaacaatccttagtaggggtatcaataatttggtcttggtaacatct

SEQ ID NO: 55144 - DNA, 120 bp, Glycine max
gttgacgacaaaaaagaaggaacttctcgcggaagtggctcatcatcgctaccaaccaacctctgccgttattctcaatgcagaagtagagctgcaccacaacttcacaactcttatggt

SEQ ID NO: 55145 - DNA, 501 bp, Glycine max
  unsure (1)..(501): unsure at all n locations
gatccttagagtaanctgccgcatgcaagcttccttganaagattcctaaagatgctagagcttatctacacacacctctctaatagctaagctcacctccttgagatgagaagctagaacttagctacacaccccctataatagctaagctcacccccatgacaaaatacatgaaaatacaaaaaaattccctactacaaagactactcaaaatgcctcgaaatacaaggctaaaaccctatactactagaatggccaaaatacaaggcctaaacgaaggaaaaaaacctattctaatatttacagagataagcgggctcatacttagcccatgggctcaaaatctaccctaaggctcatgagaaccctagggccttcccttggatctctggcccaatctacttggagtcttctatccaatgccctggcgggggaggatngcatcatnntcctcaccttggaaaggattngacctcanatcctgagggtcttcatactct
